United States Patent Application Publication US 2019/0348154 A1 - sequence listing, part 54

SEQ ID NO: 200747 - DNA, 2286 bp, Klebsiella oxytoca
atgtccgaaaataattatggtgcgctgatgatgaaatcgggaatcagcgccgatattgacattgatagtttgttacagcccggtatatatactatccgacagggaaatgaatcatccccggacattaatggtggagttttaaccgtcctcagtgacccggaaaaaagaagaacatttacatccaatgcgattgttttcgctgtggctacctataaagaatccagtaaatcctggggtgattggtcattttctttacccatgaatgatataagcgcacccagcggctttgggtttatcggtcaattttccagcgtttataagttgtctttgtaccgtggagcgcatggcgaccgtgtacttgtaaaaagctacaacgaaggcggcagcgatggcggcgggcagtttgtctatgatgaagacagggcatctgagaatgacggagtaacagtctttaatgggtgggtgcgccagattatcaataatacgctgacgaatttcgatgcgggaattattccgttcgatgagtcagacgccacacagaaactgcaaaacttctacaacagcgtacctgatgggacgaccgttattgtcatggggtatcatcaggtttctggccctgtaacaataaaaaataaatctaatcttaacctcattttccagaatggaacgctttcgggtagagaacgaaaatccacatggaggtggggttctgacccggattttgagtatggctccggcaatctggggttactgtcgctgtttaattgcccgtttacaactattgagggtctttctgcgaccggagcgcacttacagcgccctgactccaaggagtggggcgactgcatgattcgttatgaatactgcccccatatgacgattcgaaactgccggggtgaatattttggcgggtggggtattttcggtatgtattccgaccactccgaagccagtaacgtcaatatctctcatgtttcacggcagagcggtatcaatattttcgcctgctccagttattgcaaagtccaccactgtacagtgatagatgtgggcctttatggagttgagtttgagacgttcgattctaaatcaaactcaattacttatggcaatgaagcatccaataacactattcactatgcaaaatttggaatttgcgctgtcggcactcataatgatgccgttattactgctaatcatacttactggtgtgaaacgggaatattcgccatcaaagcatacggctcgctgagcgtcaatgagaacatccacttaaattgtatgcgaggcatacaggtaaattcgtctcgtaatgttatggtagcgcacaacaatcataacatagatacgattccggctttcgttatacatgaccagtacaacgcggtgcttgatattactgcggacagaatggcgttttacagcatcaactccgttcgcgccggttatcagattcagatacgcggcgtaacgtataccgtagcgtcgtcagtacaggacccgacgagaaccgattaccaggcacagtctggcggtctgtacctgaatacgctgactgctgccctggcggctgacgtggagcattgcgataacgtctatacctctactgccagtttatcgattactccatatggttacgggatgaacgctgaggcttcagcgtcagatgtgattaactctaccagtaatgtgcattttgatgctaacagtacgtcaggattcattgccgctggcctattcagcaattcgcagtacagcgacttttccacaatcaaggaatggtgggttgataatattgtttctccattcagaaataacatttacacctgccgatggtttcgtttccagcagggttcccatgatggtatggctatctccggaaacaactacgataaactgtcatctgtttttgcaagctcgacaggaggactctctacttacatccaaccaaagagaacactgagatttgagtatggctcacctgtatcaaatggagatgagtttatccctcaccatttgatgattgactcgtcatttgccgtcattggtgttcgcgtagttctttataattattcaggagaagaggatgtatttctccaaaccaatagcgtagtcacaacaattaaggttgcatcagcaaatacacatcaggttgctgtaaccgcttatgatgtacggaagttattctatacagtaaccacatccggggcgttcttcttccgcctttataccgccagcaacaaggcaaacctacaatcatatagtatagagattgacattatttaa

SEQ ID NO: 200748 - DNA, 267 bp, Klebsiella oxytoca
atgtcattcatcatcaataagaaagtgtccgttgtaaagtactaccctgaactatgcaatgcatcgagttcatctgattcagaaacagttagcgtgactgtgacagttgaatcgcttgacgccttaatcggtcaacatggaacaataaaatactccatgaagactaccaacggcggtactggaatgggaatgtttgactttatttattcaggctctggaaatccaatgaaagaagcagaggaggctcttaaattaagtctgagttaa

SEQ ID NO: 200749 - DNA, 711 bp, Klebsiella oxytoca
atgagagccggtagccagattcaggccattgttgagcaggcgcttaattcagcgcttttttcgcttgaggcaacgattgtttccgtcagcggcgggcgggcaactgtccagccatccccaaaacgcatattcggtgacaactcagagccgattgcttatccggctgttgaaaacgtgcgtctggtttcgctcgtctgggatagcggtaagtcaggcgttagcgggcgagtttctcagggggatgaatgtctccttatcgcgctttcacacggtgacggcgacgagccagaccataagaccatttcaagcgccatcgctatatgtgggttttccgactttgccagccaccagatgccggatgaggcggggttaagagtgttcagcggtagcgcctttgttgaatgggatgacaaccatatcaaagcggcaactggtggcggtgctgaaattgtcatggatggaaacaaaattcgctatgtagctaccggggggcatgagttctttgggacatctcgttttcatgacgatgtccaaatggataaaggtttgatgcagggagctggcggcggcggagaaaaagccagcttcggcggtgacgtggaaatcaaaggcaatagcgaagcagcagaccacttaagcggtggtaaatcaggtaaagaccatacccatttagaaaacggtgaaggcagtcagacagcccccccgacataa

SEQ ID NO: 200750 - DNA, 291 bp, Klebsiella oxytoca
atggctatttttggcgtaaagttaaccaaaaccagcaatacgcagcatgttgttagtgctttactcctgatttgttaccgattaggtgagggcgataacgtcgctcaccttttcggtgatgaagtctccactatttccccgcgtcaaaatgttcaggatctacctgagcgaatcgtaaaaatcctctctgaaatctcccgtcgcggcctgttttttcacgtagcgccgcatgaagaaaatcacggcatattcattgccacacatccgaaaatcctaactaaacacgcatag

SEQ ID NO: 200751 - DNA, 1284 bp, Klebsiella oxytoca
atgatcaaatacccaacaggggtggaaaaccacggcggcacgctccgcctgtggtttatctatcagggagtcagggtaagggaaagtcttggcgtgccagatacgccgaaaaacagaaaggtcgccggcgaattgcgtacgtctatctgctatgcagtcaaaacaggggctttcaattaccccgcgcaattcccgcaatcgcctaacctgcgtagatttgggttcgcccaaccaggcgtgacattgaaaagtctgtcagatcggtggcttgaactgaaacgcatggagataacggagaatgcacacaatcggtacgtctcttacataaaaatatgcactgaaattctcgggccagagaaaccagtaggatcattcagtaacgaggatgtactgcttgtgcgcaaagagctgctaaccggctttcaaatctgtggtaagcaccagaaaaaccgatcagcaaaaagagggaggactgtcagaactgtgaacgtttatctgaattgcttttcccagatgttcaagtttgctgagatgaacggatacatcgataagtccccatttgccgggatagcgccgctcaggaaaagcaaagccgatccggacccgttaacaaaaaccgaatatcggagaatgttggatggttgcccgtctgagcagatccgtaatctgtgggtgctggctattaatactggtatgcggcatggcgaaatctcggcccttgcgtgggaagatgtcgacctgaaagaaggcacgataaccatcagccggaacatcgccataaaagggcatttcacgccgccaaaaactgaaagcggtaaccgggttgtcaatctgacagagccagccatccaggcgctgaaaaaccagcttgcgtacacacgcatgggtaagcagcaccagattgacgttcatttgcgcgagtttggccgggttcgggtggatgcctgcactttcgttttcgtaccgcggctgaccgccagaaatgggatgggtggacactggtatgcgcccgggtcatttggcgccacgtggaatgacattctcaagcgcgcggggatcagacatcgccgcgcgtatgagtcacgtcatacctacgcatgctgggcgctgagcgccggggcaaacccaaactttattgcaactcaaatgggccacacttcagcccagatggtttacaacgtttacggcaaatggatgagcgataacaacgtcgatcagttgagcattcttaatgctaatttcaacagcgatgccccacagatgccccaggcgatttccatgtga

SEQ ID NO: 200752 - DNA, 252 bp, Klebsiella oxytoca
atgggtgaagttgttgtgattgtttcccccgggaaatgggttgctgaagaccagctgatcgccatgatgggaatcaaaaagggaacgctaaaaaaggctcgtgaaaacacctttctcgaagggaaggaataccgtcacgtgtccttcgactgcgaaccctgggacaacagcccatgtttttacaacattgatgaaatcgatatgtggatcgagagacagaagccggcgaaaccacgaaagcaatctgtttaa

SEQ ID NO: 200753 - DNA, 780 bp, Klebsiella oxytoca
atgaaagaacgcggaatgatttttaacggggaaatggtgcgggcgctgctggatggtcggaagacgcagacgcggcggattatgaaggtgcagccatccgaaggcttcacgcccatgaatatggcgcttgaaaccgattataaggcgcgctggtacacaccaggcattgtcgataaggacggttatttgcagccagccagtaaagaggtttttggcgtctccaatgaaaatgaagggtattcatgcccgttcggagccgtcggcgaccgcatctatgtgcgcgagacgtgggcaatcctgggtaacgaagatggctgctgtatcgactgggaagaaaaactttgcaaagcggatgaacgctcagcggcgagaatttaccgagccagttgtgagcagaagccaggtaattacggcctgtggtctattcctgatgatgccgactggaagcctcataccaaagaccaccagtacgaaggtgcatggcgcccatcaatccacatgccgcgctgggccagccgcatcacgctggaaatcaccgatgtgcgcgcggagcgactgaacagcattagcgaagaggatgccactgccgaaggcgttccgcctgctggaagtttgcttcctgattacccggggacattcctgacgcctaatggtgatttcgcaacggccaaggttgcattccagcgcctgtgggaatccatctatggcgaagacagttggaaggctaatcagtgggtttgggtcatcgagttcaagcgcgttgaaggaggtgctgaatga

SEQ ID NO: 200754 - DNA, 546 bp, Klebsiella oxytoca
ttgcgaataatattcgacactaacatcctagtgcaggccatcactggaatgaaagatggatgcaagttatccaatcccgagaatggggtggagatactcgatcccatgagaagggtcgaagcgttgatcgatatggtagaaagcagtggtgggaccatcataatccctacccctgttttagctgaatatcttgtaggaattgataaaaaagatcaccaaacccatcttaatatgattcagagacaatcctgctttgagattgctagcttcgatgaaatagcagcgattgaatgtgcacagatgccatcgataaaagagttaaaactaatgatgaaatctgatacggcaaacaaggtaaaatttgacaggcaaattatttccattgctaaagctcttaacgtcgatgaaatttggactcatgacaaaggtgtatttaatcgctgcaaagaaatgggaatggcagtcaaatctttagctgatatagatccagccccaatacaagtattgatagatatgagccatgatgcttcatcagagcttcactaa

SEQ ID NO: 200755 - DNA, 717 bp, Klebsiella oxytoca
atgggcaaagataatcgcctgaccttaaaacttggtggaactagcccagacgagctcacgttgtctcgccttggaaagtatctgtcagctctatctgacctttatggttcagtggatgccgttcacttcaaggatgtgagcgaagggtcagcatgtctgaacacttgggttgacagcacagcgtcatacaatgcagttatactgcgatcaatgtcacaggcggccacatcaggaaattcttatttaaaattagtgtctttgttggcgcaggacgggtttgaagcaaaactaatcaaccaagataaagttactattcttgagtttccatcaaccaaggaagatgcgcctaccatcttaagaaaaaaaggcagggtacaaggtaaactttataacgttggtgggaaggatgactctgctccggttaagctagagggagctaatggcgaaacttaccactgcgaggccactccagctatggcagcaaagcttggcgcgttactttttaagcaactgcgggtttcaggcgatagcgagtggataaagaaagatggcaaatggaagcttaaaaaattaataattgaatcctacgaagttttagaaaaatccaatttgaaaactgcttttaaagcattacagaatgcttctggcaatcaatggaaagaagaagatgacactcaagccatcttaaaagctttaagggcgctaaattgcgaataa

SEQ ID NO: 200756 - DNA, 285 bp, Klebsiella oxytoca
atggagaattcaaccacacgcaacaaaacacaggccaggaacattgagtcatggattctgaatcagatagcacttcgcggtgcaacaaacattgcgaagttgcttggggttcataaatcgacggttaccacctggaaagagaatttgatccctcgaatgtcaatgctgctagcagctcttgagtgggggattgcggatgatgatatggctcgcctggcgaaagaggtggcgaccattctcagaaatgaagcggccccaaagtgctcgcaacactttgaggcctga

SEQ ID NO: 200757 - DNA, 798 bp, Klebsiella oxytoca
atgaccacgctttctcagttgtacaagcaaaaggataagaacggcaccggagcgaaggttaataaagcctacgtcgttcccgtttctgagttgtacgttgaaccgggatttaacgtccgtgaaatcgaccaggagcatgtaggtgaatttcgcgatgctttcattgccggtgaatacatcctgccgttaaccgttcaggttacagagcagggcatcaaaatcattgatgggcaccatcgctattatggcgcactggctgctactgaagctggttatcccattgagcgagttgagtgtaaggacttcgtcggttctgatgccgatcgcatcgccttcatggtcacttcatctcagggtaaacctctgacgtcaatcgagagagggaaagcttaccagcgcctggttaatcagggctgggagcacgctgaaatcgcaaagaaagttaagcgttctgtttcggatgtggtgatgcatatcgacctggtgagttgtgatgatccgcttctggatatggttcgctccggtgaggtggctgcgactactgccgtggctttatctcgcgagcatggaccacaggccgtatctgtggcctcgcgccagatggataaggcaaaagcatcaggaaaggccaagttaacccgcagtgcagctctgccacagttcagcgccaccaaagcgcgccagtttatccagattgttgctgatcaggctgatgtcgctctgccggatgaggcctgcgccattctggatgcctaccgcgagttcctgaaagaggctggctgggagagtgagtcatga

SEQ ID NO: 200758 - DNA, 1029 bp, Klebsiella oxytoca
atgaataccgcagaaatactcaagttcccggggggctctccgggtcaattcaggagcaacaggatggaaaaccagaagtctggctacatcccgttgtaccggagcgtcctcaagcagccatgggcaaaagatgtgtacctcagaacgctgtgggaaaacctgctgctcaatgctgctcgccagccattcagggctactttcaagggtcatgaatggtcattgctgcccggtcaactggtggtcactgcggctgatttaggactgcagctttgcgaccgaaaagggaacccaacaagtcgcgattctgtagagagaatgctggctgtttttgtgcgagaagggatgatttctattgagggtgaaaaacaaaaaggaagagtgatcaccatcacgaatttctctgaatatggtcaaaaaatagacgatttacccgcacaaacaaccgcacatgtagccgcacatacatccgcacatggtgaggtcaataatggcgcgggtttgatggcaatacccgcacatgtagccgcacacggacccgcacaaacaaccgcacaacatgaacaagaaggtaataacaagaataaaaaccttaaaagatcttcgtccgagaattctggcgaatcctctgactatcgactgaagaaatttttatctgctcatcctgacgctgcggtttacaccccaagcggtggaaagtggggaactgcagaagaccttcgagttgctgagtggatttcctctcgggtcgggatgatcaatccaacctgcaaaactcctgacatgacatcctgggctaactctgtccgtctgatgcgccagatcgacagtcgtacacaccaggatatctgcgccatgtacgactgggccagcaaagactctttctggcatcgcaatatcctgagccctgattcgctgcgtaagcagtgggacaagctgacgatgcagcgcaatgcacctggcgtccaggtggccggaaaaccaaaagtcgacctgaacaacactgactggatttatggggtgctcgaatga

SEQ ID NO: 200759 - DNA, 387 bp, Klebsiella oxytoca
gtgattggagcactggcaaagcgttactggttgcagttactggtgatagcgttaatcggcgtgctggcattcttcgttaaccgctaccgcgataacgccatcaccttcaaagatcagcgtgataaagcaacggtcagggcggaaaccgccgagaccgttagcaatagcgtaatcactgcaatgaacctcatcaatgacatttcccgggtaacccagaatgcaaagatcgaactttcccaggcaggtgagcagcgtgttatctacatcaggcaggcgcttgagggcgatcagtgtgctaagcagcttgttcctgctgccgctgctgacagcttgcgggaattcgcgagcggtttacgtgccggcgccggtggtcccgataagcgctga

SEQ ID NO: 200760 - DNA, 663 bp, Klebsiella oxytoca
atgagcaaacccgactgggaggccatcgagacggcgtaccgggccggggtgatgtccctccgtgaaattgcatcgcagcacagtatcagccacgtatccattaacaaacgagcaaagaaagaagggtgggagaaagacctatccgcaaaagtgaaagcaaaggctgatgcgctggttaacaaaagagaggttaacaggcaggttaacagcaaaacagcctctcagaatctgttaaccgagaggcagctaattgaggcaacagccgaggttatcgctaatgtccgcatggagcatcgcggtgatattagacgggctagggagttaacaaacacgctattcgatgagctggcaggagagtgtggcgatgtggccgcgctggataaactcggtgaactgatgcgccgtgaagatgataagggtatggacaagctcaacgatctctaccacaaaataatcagtcttccttcccgcgttaaatccatgaaagacctgagcgacagcctgaaaacgcttatcggcctcgagcgcgaggcatacagcattgagaataaggctgaaacgaaagaggtcacgcataacgtcatgctggtaccaaccagcgataacgtggatgactgggaggcggcggcgcagaaacaacagggtgaggttctcggtggatga

SEQ ID NO: 200761 - DNA, 1386 bp, Klebsiella oxytoca
atgaaacgcaaccgcgttaacgtgctgaccgtcgtcaactccgcttcaaacatcaccactgaaaccatcgacggcaagccacatatcgtggttcgcggcatcacgcctgtcgtggacgatattgtgatgaaccggaagttgtacccggcagcagaaatcgaaaaggcctacaacacgcttgagcgtaacccgatgccgctgggccacccaaaagtgaacggaaagcatgtgtcggcgcgtgatgtccgggctgtgaacaactaccacgtgggtgcctggctccagaacgtcacgcacgcagatgccaaagtcagcggcgatatgtacgtcgaccgccagtatgccgagtcgagcgagaagggtaagcgtctcgttaatcgcctcgatgatatggcagccggtaccaacgtcgacccgatccatatctcaaccggcctgctgtattccggcatcgctgccaacggcaaatcaaagggcaaaaagtacaacgagatcgccaccaacatgatgtttgaccatgtggcggtgctacttgatgagccgggcgccggaactccggaagagggtgtgggcatcttcgttaactcagaaggtgatgagcaacagatcgaagttgcccgcctggttgatggtatcgactgcacccgagaaggactgttgaataaagcgaagttcttcttcaccaacgcctcaactttctcgttcgacgatatccagcgtgccatcagcgacaagcttcacgaaggccgcgctgatgataagtggctctggcccgaatcggtatggccagacaacttcatctaccgcgatgaagccaagtatttcaaacagaagtatctcatcgatgacgacggcaaagccgtgttcgtcggcgaacctgtagaagtcgtgcgcaaacccattgagtacgagattaaaaccaacggagagaacgatccgatgaaagaactgattatcaatgcgctgcaagccgcgggtaagccgactgaaggcaagtccgatgccgagctgatggacgcgtacaaccagatgaaggccgaagaagccaccgccaagaaaaaaggcgatgaagaaatcgaccctgaaaccggcaagccaaagaaaaaagagcaggccgccaataacgaagagatgcccgcctgggcaaaagctcttaccgatcaggttttggcgcttaacagcaagatcaacgcgaactcggaaagcgagaagagcaacatgcgcgcagcggtaaaagccaaatttgacatgaccgatatcgctgtaaacgctctggacggcgagcccctgaaagagctgtttgctcaatgccagacttcaaccggcctgaatggcgctttccgccaggctaccaatacccaatcagtcagcgaaatgccggagtaa

SEQ ID NO: 200762 - DNA, 2331 bp, Klebsiella oxytoca
atggcagaagttccactcccaactccgacgcaggttccggtaccaagtaccgatatccgcaatgcggtatttgcaggcgcgaagcttgatgaagaggtaaccggtaccggcgaattctatacagatcgccttgatgtgaaacgcctgacgaatacaggaagaaataatcagttcaatgctgcgcagcaggacagagctaaccagtttcagcagtttctcctttcatcaggttacgttttcctcggcgactacgaagatggtccctttcagttcagtgcccgtaaccagtacatccgttataacaatcagtattaccgcctgaatgctgctactgatgtcggctttatcactaccggcacgacagcggccagcttcgcaaacgacgtcactcacttcgttcttatggatggagacaccttaaggcaagaattagcgtcaccatcaggtgcttcattatctggagctgcgcagggtggaagtgttgagaaagcgcttcattttatcactgtgaagcaaaaaggcgctgtcggtgacggggtgacagtagaagatagttatttcacaaaagcagcaaaagaagcgccggcatcaaatattgcaggagttggaaagtctgctgatattcctcgccctgattcttgcatagtttatgtaaatgacggggagtacctccttaatgattatctggatgttgggaacagggatgtaacgtgggttttgagtcatggggctaaaataataaatcctaaatatctaaatggacgggttcatagggaagggcgtcagacaaacttttatccacatggctctgcaggctacgtttgtggcttctcaactagatcacagaagcttggcgaagacccaacggatggccctgaaatccttggtataacgactccaagtcgattggcttcatatcctgatcgtgatgttgctgcaatttacggagaggtaaaattaccccagttaattacaactcttacaggaacaatatttactgctaatagcgttacattcaccagtgcactaactgctaatgcgagaaaattcctccgtgtagggatgattattgatacgttagggacaaaatattcagggattattacaggttggtctccagactggcaaactatctatgtatctggctggtatttgtacggcggagggataacgccagtaactccgactaacggactttcggctgttatcaatgccttcacgaaaggttggggcttgaatgttaacgtttcaattgatactaacagtttcggagactatgcggtagccgctgaatttggcgttatcaacaacaaggcctataaccagaacgtgtggggtgtcgacgtagtaaatcttggtacatacaaaataggtactcttcatagcgtgcgcggtggggtaaatggatctttgtacggagtgcaaatcagagatgttgatacggctatcaacattaataatgtcacgaatgcatattttatcggagtcgataacaatgatgtacaaatgacattcgggaagaacacccaaacctttggtaaagcaagtactgccagtacgcaaactatagccttcagaacaagcggtttaaaatcaggtgggaatgacgcgacaataactgtgagtggtggtgatgcaacggctcttgcaaccattaacatggttgcgtcagctacaatcactcgccaccttaatccacatgctgacggtgttgatgatcttggatttgcaggagctggtcgattccgaaatgcatatcttgtcaatgcccccattgtcacgtctgactcaaatatgaagactggtagcgaggatgggagcgtagattctctgtctattccagatgcagttcttgatgcctgggagtcaatcaacccctgggttatttataaaatgaaagcatctgtggctgagaaggggtgggaaagtgcacgctggcacattggtgcaatttcacaagctatcaaggccgcttttgaaagacatggtattgacgcgatggattatgggctcattggttatgatgaatggccagcagaagaggcggtctactcagagtatgttccggaagtaaacataccagaggttgatattcctgaacggcatttgcctgctgaggtagacgaaaatggagtagtgacgaaggatgcctgtattattccagcataccatcaggaagctgtctttgttgccgagagggctcctgaattaatcaagccagcaattgaagcaggatcatgctataacttgagatatgaggagtgtttatctttagaggctgcatgcctgagaaggaaaattaaaagaatagaggataagttaaatttttag

SEQ ID NO: 200763 - DNA, 834 bp, Klebsiella oxytoca
atgagacttcctcttgtattaaattcattctacagggtctttgcgcagaatttgccagaggttataaaaccatcattacgaggatggtataatgaattgaataaaatagttacatatggcgttaacaaaaaagatatttttactgcattagactttgagataaattctcactgcaatcttgaatgcagttattgcccagcatcttttaaaaatggtcgcggtaaaaaccttatgccctttgatacgttcaaaaaggcaattgacgatctctctacaataaattactcagggcgaatatctcctcatttctttggtgagccactacttgatgaacgtctacccgagctgatggcgtacgccagaaaaaaacttcctaaagctcagatagttattcacacgaatggcatacgactcagcaaggaaaagtaccaacagtgcattaacgcaggcgtggatggtttccttgtaacacagcacacaaaaaaaatgcctaaaaatgttgtagacattattgatagtaaattctcaaaacacggaactataaaggtgcgatcaattgaagatttaactctgttcaacagaagtggtctggtaaagcctaaaaaagaaagaaaaatgaaccgctgctactatttatcagatgagatatctataacacatagcggaaatgttgtatgtacgaatgatttcggcgaaacccatatatttggtaatgttaatgaaagtagcttgcttgatatctggtatagcaaggagtttgtaactgtaagaaatgaattaaagaggggtatatttaaacttgatatgtgcaaacgatgcattgggcaaaagtga

SEQ ID NO: 200764 - DNA, 372 bp, Klebsiella oxytoca
atggctaaagtgttaactgcaaccaaaaagcatcgtgtattggcgaaaaccaatgggcgttgcgcttactgtggtgatgccctgaatggcaataactttactgtcgatcatatcgttcctaagcatcatggcggtgacaatgggttagataatcttttcgcctgctgccgcgaatgcaatacagctaagggcacgaaaactatagagcagtggcatagattcgctgcggttaagcaagtaaccggtaaagcgatatttggtcaggctcaggtagattacttattcaagcatgggctatttcctgcgttgggcgtgaatgaaaattatcaattctatttccagcagatcggaggtttaaatgcgaccgtctga

SEQ ID NO: 200765 - DNA, 414 bp, Klebsiella oxytoca
atggctgataatactgtccatgaaaagagcgatactccattggtgccaatggcacctatttccgctaatgaaatacgccatactttagccacaaacccggagccggttaaaccagagcgctccccgacgattgttgatgctttaatacctcttccaaagtttaaagcagtgcagggctacaacccatacgcggcaaaaggtgaactttctggatacgaatcctttgcaacagattttgcggggtctatgtcccccgaagagactacagccataaagcatcaagttgacgcaaagaaaattgtttttgggattaatagcaccggagaatttaaaaccttaatggcttccagtgctattggcgtaatactatgcatagcgttactaattatgctttatcgtcggttaaaacgttaa

SEQ ID NO: 200766 - DNA, 816 bp, Klebsiella oxytoca
atgctttgctgcggttttcctcccggtggcgctgcgctgaccgggctacgggttcacaaccgtctgcggatcggtagcccggacaggcgcaacgcgccgcctccggggaaggtgctgtgtctgaaacctcggtgcggtttctccccagcttgcgctgcgctgaccgggctacgggttcacaaccgcctgcgatcgggtagcccggacaggcgcaacgcgccgcctccgggaaaggtgcgctgccggatgctttgctgcggttttcctcccggtggcgctgcgctgaccgggctacgggttcacaaccgtctgcggatcggtagcccggacaggcgcaacgcgccgcctccggggaaggtgctgtgtctgaaacctcggtgcggtttctccccagcttgcgctgcgctgaccgggctacgggttcacaaccgcctgcgatcgggtagcccggacaggcgcaacgcgccgcctccgggaaaggtgcgctgccggatgctttgctgcggttttcctcccggtggcgctgcgctgaccgggctacgggttcacaaccgtctgcggatcggtagcccggacaggcgcaacgcgccgcctccgggaaaggtgcgctgccggatgctttgctgcggttttcttcccggtggcgctgcgctgaccgggctacgggttcacaaccgcctgcggatcggtagcccggacaggcgcaacgcgtcgcctccggggaaggtgcgatgccgggtgccttgctgcggttttcttcccggtggcgctgcgcttagccgcgctacgggttcacaaccgcctgcgatcgggtag

SEQ ID NO: 200767 - DNA, 255 bp, Klebsiella oxytoca; identical to SEQ ID NO: 178776

SEQ ID NO: 200768 - DNA, 621 bp, Klebsiella oxytoca
atgggcggcgccgacgctatcctcaagaaagccaaagaagattacaaccagggcaactatcgctgggtagcgcaggtagtgagtaaaattgtcttcgccgatcccggcaatctggaagcgcgcaatctggaagccgatgccctggagcagctgggctatcaggcggaatcaggaccgtggcgtaatttctacctgaccggcgcgcaggagctacgcaacggcgtcgtgaaaggcccgacgccgaataccgccagcccggataccgtgcgggccatgaccccggaaatgtttttcgactatcttgcggtccatatcaacggcgaaaaagccggaaccgccaaagcggtattcaatatcgaccttggtaacgatggcggtaaatataagctagagctggaaaacggcgtgctcaaccacaccgccgatgccgaagccaaagacgccgatgctaccatcgcgctggatcgcgccacgctgaacaaaatcatcctgaaagaggaaacgctaaaacaggcggaggataagggtgaagtcaaagtgaccggcgacggcgcgaagctggacgagatgctgggctatatggataaatttgagttctggttcaatatcgtgacgccgtaa

SEQ ID NO: 200769 - DNA, 531 bp, Klebsiella oxytoca
atgcaactcttaaaccgacagcaggagctcaatatagctaaatcgagcgcgattggtaatgtaagaattatcgataatgctgtgtcacaaccgaagccagtgaaacctaaaaaaatactaattttactcgttggtttttttatagggggaatgatatctgtagcactggtaattctacgtatatttttacgtcgaggaattgaaaacccagaacagttagaagagataggcattaatgtctatgcaagtattcctgtatccgagacctttgcgaaaaaagttatacaagcgccaagtttacgcaagagaagtaccccagagtatcaaagttttcttgcgctggaaaatccagcagatttggctatagaagcgattcgtggtttacgcaccagtctgcacttcgcaatgattgaagcgcggaataacgtactgatgatttccggtgccagtccaaatgcgggtaaaacttttgtcagtacaaatcttgctgcggtgatttatcaggctggatgctctttggtatacagctga

SEQ ID NO: 200770 - DNA, 1023 bp, Klebsiella oxytoca
atgagtatatttagcgatgggagcaaggttctatcttttcaagaggttgtagaaaggattggttttgatattaataaatacgactcatttgaaatgatgagcgattttgatttgttgactcagatttctggaagaaacgaactttcatatatggtgaagattcttacagatgaagatctgatggggttttacgagtacgcacttgcagaacattacatagaaaactattcatgcacacctcagagtgactgtgatatcgaaaggttaatacctgttatcgtaggaaagtacaaaaagtcacttgatgatgtgttgggtcattatgccgattgtttttctagtcctgttattgatgttgatggggttaagttcctggcatcaatacaaaggaaggatgtttataatggtttcgtgccaaatatgatgtcattcagtgacatagttaaacctataagtagattttcattggaaggtttggtttttaataaccctagccttggtgaaggcattgggcgtcctttaatgctaaccagcgatgagatagaggatttagatgaaaatgacagtgagaagttatttaatatttctaatgaaagtatcagtatcatttttccggataaaatgaggatgccaaataatgctgatgattttgggcatgcaatgcatttatcgatagatatagcaaaaaatgacaacgatattttggatagtctagctaagttgttgcctatctggaggaaagagttaaagataagtgagcctgagaaaaaaagaacttggtcatatattagagatagaattattagctataggattattcctctgattgatttgctggagttttcgaaaatatacacaaaagtaacgaaaaaaagagtgtcaaggaaaactattgcattcttgacttacccccatggagaacaagatcaattcggattggctcaaactgttttgccatttttagagaaagtaaaaatggaatgttctaaattttttgatgagtataaaataaataaagattaa

SEQ ID NO: 200771 - DNA, 675 bp, Klebsiella oxytoca
atgactcagaaaaaattaactgccttaactggcagcggccagactcaccctgaagccagcattcaggttaaacagctccctgccgtcgaatttcacggacagcgtgttgtgacgttcgccatgattgacgaagcccaccggaggccgagagatacagccaaaaaggcttttcagcgtaatcgtgcccgcttcattgatggcgatgatttttttattgtcggggcgtctgaagtcgaatgggacattactgatcatttagccaggggcattaaacgccctggcaaaaaaatgaacagcccgatacgtggccgcgtaacgctgatcaccgaatcgggttatctgctgctgaccaaaccgtttaatgatgatttggcctggcaggtacagcgccagctcgtgaaagcttatttccgctgcccggaggtcgtcaccttccagcacatcgcgctgccgtcgcttaaggaactggcagctatgccggttactgatgcgcaaaacgttgtcacccgtgccgggaagcattctaagcagcttcatggctcacagggcagtaatggaatgaacctgcggaagaaggaactcaaagccctacgacctgcggaacggctggtagatgcgatggggcagataggtttcgataagtatgagtgggaggtacagcatgatcgcggataa

SEQ ID NO: 200772 - DNA, 1026 bp, Klebsiella oxytoca
atgatcgcggataaaacaaaggcagctttgcagagctgccaatgtcactaccaaatattcaagcaaaagcagcatatcaaggttaatgctggtggtcaaagtcacatctcaatcgatattaggggtaccttatctgctgatagattatggggctgtcagcacttaaatttagattcttccgttttctttcaattgacgctcaatgaattcgaggtgctctttcagccgagtttttcttttgaagattttgctgtcgatagtgaaattgaatgggttatgagattcagattcggggaatctgataaaaattacatttccgtaatcgtctgtttttatagaacaattatactcagagaagtgatgccttacttgattaatggcttcctcaacttcctggacgttaggtacgaattcatcattaatcatggtcattatgtggcctcattcggatcgattttagtctgcttacgctggcggcgtttgatctcacctctggctgcagttacgagaaaaccagcggtgctttcgccttcttgcttcaaactttcaatatcttccatcacatcatgggggattcgaactgtagtcatttgtgactttgcgttcttcgcacctgttgccattactgaaactccttgtgttaggtgtatttcagtatacgcaaaaaaaacaaaagaaaaaggcttgaagtgtatttcactttgggctagcttgaatatcagaggtgaaatacaccttgtaagtgcgaagcccggcagtgctaggaacactaaccgggcctctaaccacaaaccgttagtcgaggtaacagttatggctggatcacagcatacccaaactcaccctgaatttacatggcgttttctctccacttccgagcgataccctactgcaaagccgttggtgatttacgtcaacgcatcgagtgagcaggaagcccgcgacactatgccgggagtaaacctcattttttccgcccgtcttccatttcatgcttttcaggtgatggaggtcaatcatgcgtaa

SEQ ID NO: 200773 - DNA, 1002 bp, Klebsiella oxytoca
atgggtggtgaaacatcggctatacagcgagtagctggaaaaatatctgaagatattttctcagtgttcaagtggaatagtgcagcaagagaggacatgaactgggattgctgtcaagaagcacattcaaagaagactcaccctagtgacgtcgtattttactatattgatccatacgaagaggaaatggtctacctcaacacggatcttaaaagttatgcagaaggaactattgggaaaaaaattgtggagggagcattaacctcacttgctttagcaacggaatgtgcaaacgtaagtgaagagtggagaatgaaatacgtccatgaggagtccttgggttataatgttagggggttgcttttcttatataaccatgacaatttatacgataaggatttttatgagaatataacaaaaaaattagatcatagcgcaataaattgctctccaaatattaaacttcatttgctcgacccttacaagatatctgacttgataaatatatcttctgatataattaaactcatcggttctggaaaactccctcagcctgacaagttttcttattactatcctgacctatcgctcacgaggattaaacacccaacgaaccacaatacacctgcaacaatagagttactaacatcgccgtacataataattaaacatgagggtttcaattggcttagaggagaaaatccagaagggtatgttatctattataaccaacctggggactcggttgatgagtttgtttatttctttgatatgttatcaacttatcaaatactaactgaagataagccaattgtcttgcgtcattgtcatatccatccaaatgaaaacgccattcatcattttgaaaaagcaaaaaataagtacagcactgactggttattaggcgaggaagaaaggttttttgttaagattagtttcgaaaagattgaaaaaatagttgttgaatataattttgaaaaaattggcatggagcaacgataa

SEQ ID NO: 200774 - DNA, 1080 bp, Klebsiella oxytoca
atggcaaaaaaactttacttcgcaactgagaagaatatttatgatgctttacatcataaaagaataactcctgcaaagttacatgatttactattgaatagaggtatatttctatcaccagatctggataaagagatactgatagaagaaatttcaaaactgcctcatgggtttaatgaactagagcatattaaacaaatggtcaaaacctatgacccaagggaaagcactacgagtttaagttttcaaacctcagcgaatcaggctgagttaaaaagtgcggctgaagtaataaggaaatcatgctctccaagcaaagggcaaagcatgaatatagtagcaaaaaaagacggctcactcaccgttgaatataattatgaagaaatagatttatctaagacggcgttgcgtcaaattgataaacgaactgtgataattgaaattcgccctgttgataataaggttgaaatacgtatgcctcaaaatccagaggcaaagaggattatagatagtttgcaaaaggaattatctaaaatcaaggaggaaccgattgagcgttttgaaatttcactactagcaataagtgatcctgcattgcgaagccagttttttcaagaattaatgaatggtcttaaaggttatgagactgatgatgtaacaaaagtcgaattaaatcgtagtactgatacaagtgatgatgatgacaaagaagaaaccattgatactggttttgttaagagagctgttctgaatggtgaaggtgtaaatagttcagctatattctcccaacttcatgaaaaaggttattatataggacgtattgcatggtcgtcaaagccaatcagtggtattggggacaggattaatgttgaagcttttttcaaagattcagagaattgctgtgattttgcctatcaaattaaaggtataaataataaaaaagatgatggtttcaatgtaaccatccgagtggcaacagcgcaggaaaaaaaacacattagtgaattaattgagttagccgctaaaaaagcctataatattataataggattagaggtgagcgaacatgaagaaggttaa

SEQ ID NO: 200775 - DNA, 684 bp, Klebsiella oxytoca
atgaagaaggttaaatggcttaaactaaatatacgtcttgaatttgaaacattcgttagacgtctttctcttgattcctttaccgaggataaagggaaaggttttatttttgataaaatacggcatgatttagcgtatggacgctttatcgagcgcatcgtttatcatgatactgttttaagttttgacggaagcgaaactacagtagaacgaactgaatatcgcactacgaattttagcctggctttagattctcttcctatcatgcaaattactaatccccctagaactttaaaacctttttctcaagccttggtaaagaaccttggcttaggtgtgagtttagaggagatagacgttaaccctatagactggcttaatgaaatatccttaagtgtgaatgtcaatttgactcagcttgatatctcaagggttagagtcgctgattatgcaactgctaaaatgcagattattggcaacagcgatcttagaaaatactataaagaagagttggttggtaagaaagtaagaattgacaggctcgtttgctcagttaattcattagactacacgggaaagcttaaaataacaaatggtggacttgcttacattgacgtgagaaacgaaaaagattttataaaaattgtatttggatctttaaaaaaagttgtttttcatccatag

SEQ ID NO: 200776 - DNA, 189 bp, Klebsiella oxytoca
atgttaaaacagaagaagatcgaggcggtaattgaagagctggcccgcctgcagggacatgagctgaactctgccgatatgctggagttacggtgcagggtggccggaacgctcgcagcaaaagaacggcaccgccggaggatgaccgccccagaatatcactggcgtaagccaacacctcgccgataa

SEQ ID NO: 200777 - DNA, 168 bp, Klebsiella oxytoca
atgggtgattttctgagtgagtttaattctgatgaggaacgagcaaggcatcttgaaaatctgctaattgaagttgccagaggggggcctcgtgacaacagtaataacttcaatactctcaggtcgcattttatacaaaacagcacatttaaggttctggttcaatga

SEQ ID NO: 200778 - DNA, 492 bp, Klebsiella oxytoca
atgcatcagaccaagaaaggcaatcagtggcactttggcatgaaggcccacattggtgtcgatgccaagagtggcctgacccacagcctagtcaccaccgcggccaacgagcatgacctcaatcagctgggtaatctgcttcatggagaggagcaatttgtctcagccgatgccggctaccaaggagcgccacagcgcgaggagctggccgaggtggatgtggactggctgatcgccgagcgtcccggcagggtaaaaaccttgaagcagcatccgcgcaagaacaaaacggccatcaacatcgaatacatgaaagccagcatccgtgccaggggggagcacccgtttcgcatcatcaagcggcagttcggcttcgtgaaagccagatacaaggggctgctgaaaaacgataaccaactggcgatgttattcaccctggccaacctgtttcgggtggaccaaatgatacgtcagtgggagagatctcagtaa

SEQ ID NO: 200779 - DNA, 195 bp, Klebsiella oxytoca
atgttgttcaaagagttaattgaagggaatgttatttctcttcctgaaggtgaggcatttactgtgacaagctcgcctgaaaaagacccggtgacaggatgcccgttcatcataggcatattagctgacggttccgaatcccggtattttgcggcagaagatacgttggtaacggtggttgatgatgacgattaa

SEQ ID NO: 200780 - DNA, 225 bp, Klebsiella oxytoca
atgaaagagatttttttgaaatttattctttgcaagaaaatagaaaggcaagaattgaagtttcttaacctgaaatatgtttttttgcaactcttcttttctttgcgacagctggatatctttttttgcagtatgaagagtttcttgatatgcagtccgccactcctgaacaactgcaaagtattattcatgacacaccttgtgcaggagatgcgttacggatag

SEQ ID NO: 200781 - DNA, 369 bp, Klebsiella oxytoca; identical to SEQ ID NO: 196714

SEQ ID NO: 200782 - DNA, 351 bp, Klebsiella oxytoca
gtgcacggcaccctgccggcacgggttgaaaaccgggagaagaacgctgtttacgcgcatctggacgagtatggccgctaccgcgtcaggctcgactttgaccgggacgatgcggagcagggattcgcatacctgtggctgcggatggcgaagccgtataccggagagacgtacggctggcacaccccgcttaccgatggcaccgaagtgtccatcgcgtacagcagcggcgacatcgacctgccgtatatttctcacactttacatgactctgaacatccggatcccgttacccgtgacaaccgcacccgcaacgggccacagccccggcaaacaacacgctgtggatga

SEQ ID NO: 200783 - DNA, 234 bp, Klebsiella oxytoca
atgacattatcgatctttcaacgcctggcagggaatctgcttcagcaagctacctgcaatagctctcgcccttatctccatgatggccagaacgttcttgtctggccctttctcaagtttgctcagtcgaaattcaatattctttgccttaatcatcgcgtaaccctgccggttggttgcgggcagttggcctgcacggatttgttgtgcgccagaatgtcgcgcttcgtctga

SEQ ID NO: 200784 - DNA, 2331 bp, Klebsiella oxytoca
atgagttttaatgccaaggatatgacccagggtggtcagattgccaatatgcgctttcgcatgtttggccagattgccaatattatattctatgtgctgtttattattttctgggttttgtgtggactgatgctgatgtaccggctcagctggcagacctttgtgaatggctgcgtgtactggtggtgtaccaccctggcacccatgcgcgatatcattcgctcccagccggtctatacgattaattactacggcagatcactggaatataatgcggaacaaatcctggccgataaatacactatctggtgtggggagcagctgtggaccagttttgtgctcgctgccgtggtttctctcgtcatctgtatcgtgacgttctttgtcgccagctgggtactgggccgtcagggtaaacagcagagcgaggatgagaataccggcgggcgccagctttccgataagcccaaagaagtggcccgccagatgaagcgtgacggtatggcctccgacattaaaatcggtgacttaccgatattgcttaactccgaaattcagaacttctgtctccacggtaccgtcggttccggtaaatccgaggtcatccgccggctgctgaattacgttcgggccaggggggacatggcgattatttacgaccgctcctgtgagtttgtcaaaagctattacgacccgtcgctggataaaatcctcaacccgctggattcgcgctgcgccgcctgggatttgtggaaagagtgtctgtcgctgcctgacttcgacaacatctctaatacccttattccgatggggaccaaagaggacccgttctggcagggctctggtcgcactatctttgctgaaggcgcctacctgatgcgtgaggacaaggaccgcagctacgagaagctggttgatacgatgctctccatcaaaatcgacaagctgcgcgcctatctgcagaacacgccggcggcgaacctggtggaagagaagattgagaaaaccgccattagtattcgtgcggtgctgaccaactacgtcaaggccattcgctacctgcagggcattgagaagaacggcgagccgttcaccatcagggactggatgcgcggtgtccgtgaggaccggcccaatggctggctgtttatttcctccaatgctgacacccatgcctccctgaagccggttatctcgatgtggctgtcgattgccattcgtggccttctggctatgggggagaaccgtaaccggcgcgtgtggattttcgctgatgaattgcccacgcttcacaaattacctgacctggtcgaaatccttccggaagcccgtaagtttggtggctgttatgtctttggtattcagtcttatgcccagctggaagatatctacggtgttaagccagccgccacgctctttgacgtgatgaacacccgggccttcttccgctccccgagtaaagagattgccgagtttgctaccggtgaaattggtgagaaagaaatcctcaaggccagcgaacagtattcctacggggctgacccggtacgtgacggggtgtcgaccgggaaagaaaaagagcgtgaaacgctggtcagttactcggatattcagacactcccggacctgtcctgctatgtcacgctgcccgggccgtatccggccgtgaagctggccctgaagtacaaaccacgtccgaaaattgccgagggatttattcagcgctctctcgatacgcgggtggatacacgactcagtgccctgctggaagcccgggaagccgaaggtagtcttgcaagggcgctgtttacgccggatgcaccggcgcctgatccagctgagaaagacgtaaaagtcgggaatacacctgagcaaagtcagcctgcggaaagcatcgaatcgcctgcgacagtcaaagtaccggcaacagccaaaacgccggctgccgatgagatcggtcaatcacctgaaactcctgagcctgcggcaccggtcacgaaagtggtgaccgttccgttaatccggcccaggtctgcgacagcaacgggcacggctgcagttgctaccaccgcagcatccacaaccagcgcaacgactgtgcctgcaggcgggacggagcaggaactggcgcaacagcctacagagcagggccaggacaggctgccggccgggatgaacgacgacggtgtgattgaagatatggatgcctatgacgcctggctggccggtgaacagacacagcgggatatgcagcgacgcgaggaggtcaatatcaatcacagccaccgccgcgatgagcaggatgatattgagatcggagggaacttctga

SEQ ID NO: 200785 - DNA, 615 bp, Klebsiella oxytoca
atgaaatctatttttttgatagtgatccaatatgtgtcttgtgttctggctggatggcaacttcctgaaactcttttcatggtatgtgcttccttgatgtggttgattgtttttaactatgcgttctatcagataggtaaaaacaaaaaacaagcattggggaaagataagagcattgtcggcttaatgattgtttctgttttctctctatttggtccagtgttttgtatgtttgctattgttatgtaccccttgtatatactaaacgttcagtttgcttttttttcattaaaaaaaattggttctcatggttatggcgttaaaagtagtaatggtaaagtggtcagcttgaaatcatttgatatgcaaagagatatatttgatgccaatgaattacagggaggtggttcttcaacatcatttaatcataatcggaatgactttagcgtagctccagatggctttgattcatcagtatctgaacctgagtggtttcatgaaagtgttagtcatactagatttagtattgatgaggtcaatcccgcgaatggtcttccaatgattgggaatgtcgatgtttctggaaatccatatggaattgatcggcacgattag

SEQ ID NO: 200786 - DNA, 2823 bp, Klebsiella oxytoca
atgctggaaatctacacgatagccggcggggactggtttcggggaaacctgaatgccattgctgctttcatgagtaccggtacctggtcttccatcgagaaaatgtgtatcgccttttccgtgctgattgtcgcctgcagttgggtgaaaaagcataacatcatggatttggttggttgggtgtttgccctgacgctggtctcgatgctggtcgtcattcgtaaacctgtgcagattatcgattacagcaatgtctctcaggtctatcaggtcgacaacgtcccgataggtctggctattcccgcgtcactcaccacgcgtgtcgggaacgccctgatacagggctatgagatgattttctcgctgcccgacagcgtgacatacagcaagacggggatgttgtttggcagtaatctggtggcaaaaagtaccgactttatctctcagaacccggagattaccactctgttctccgactatgtgcagaactgcgtgatgggcgatattttcctgaaccataaatactcgtttgaagaactactgaactccccagatccgtacaccattattttttcaaatcccagcccgctgcgcggggtgtttgataaaaacaatcagttcaggacctgccaggaagcctcacgggatttgaaggcagctctggcgctggatacccagactggcgggaaaacctggagctactacgttcgtcaactgtttggtggaaaacctaattcggacgtactgttcagccagatgatcggtgattcctataactacttctacagctccgggcagagtgcgggacagattatccgtcagaacgtcaccatgaatgcccttcgcagcgctatacagagctatgcggcccgcagcggggatacggccagcctggtcaacattgctaacacctcttcgctggaaaagcagcgcctggcccaggcgactatgggacaccaggcgttacgctccctgccgatgatgcagacggtagtgatgggaattatgattggtctgtttccaatcatggtgatggccgccatgttcaacatgatgacgatgcaggtgctgaaagcgtacatttatgccctgatgtggctgcagtcatggcccctgctgtatgccattttgaacagtgcgatggcttattatgcaaaacagaatggcgtaccagtggtgttgtccgagctctctcagctccaactgaagaactcagatattgccacgaccgcgggctacatctccatgatgatccctccgttaacctgggcgatgatcaaaagcatgggagcgggcttctccagcgcgtacagccattttgcttcgtccggtctcagctccacgtcgcaggcttcatccagtgtggtggacgggaattactcgttctcaaatatgcagacggataatgtcagcggaaacagctggaacaccaacagcaacacagcctttgggcagatgtcccggcaactggggaacggtggcatgggtacgcagacccgggatggatcgatggtctgggacagcagcggcgccatgtcaaaactcccagtggatatcaatgttggccgacagatagccagtgcacagcagcagatggcacgtgaatctgacgtccaggcagagagctcactgcagggctataacagcagcgtaacgagcgcctggaaccgcctgaagcagtttggcaccaatatgggaaccagcgcgtcaaccaccaccggggccgataataccgaatcatcgcaggattcgatggcgaaaagcaaaatgtggaatgctgttgattcatatgctaaatcaaaccacataagtagagatgaagcatttagtcagcttatggataaatcagttaaaggtgctgtttccggcgaaatgtatggcggtgccagtatgaagggtggcatggagttatttggaaatggtggacatattgaaggcggtgtaagggcttcagtaagcggtactgcgagttcgggctcacaagacaatgttagtgaatccggtcgtaaaacaaatactgataatcatgataccagtagtcaggcagtaaaagatttcagagagtcctctgattaccttactagcaagaaaaccagcacatcaggaaatgcgacagataataatgccagctcccacgtggaccaattctctgcttcactttcaagtgcgaaaaacagctacgaccaatatacaaacagccgtacacgcagccatgaattcagtgaaatggcgtcacgtaccgaaagcatgagtggccagatgagcgagaatctgacgcagcagtttgcaaactttgtccaacagcgctctccgcagaatgcggaagctatcctgacaaataccagttcgccggaagtggctgcacagcgagaagcgctggcccgtgaatttgttaaagagcaggtagagcctaaagttgatggcgcctatcaggaggcgagaggaagtattgggcaaaacatgccgggagtgtcaggcagtgggggacataacactgttacatctgattatgcgcagcattcagggtcaatagatgccatgactaaggacgcaggtattaaggataatgtggtacaaacggttgataacatggtgtctcaaaacaaacaggcgcatcaggatgcacatcagggaatccagcatcagggagatgacgtgaaaggacaacacaccgacctgaaaaataatcataaatcggaaggaaataaaatggaaaatgaatacaatgggaaaaaggatgagcagaaatcgctccctggagctgatactagagatgagctactaaataaggctcgcgactatcaggaaaagcataaaccataa

SEQ ID NO: 200787 - DNA, 126 bp, Klebsiella oxytoca
atgatccaaactggcactcagcgcttgcagaaaagaactcgtgttcccgtttcgccggatcagggcggcaaactcatccccgccgaggcggcctgctatttcgcccggttcgaggtgctgatgtaa

SEQ ID NO: 200788 - DNA, 705 bp, Klebsiella oxytoca
gtgtccccagagatcgttcaccggtttgaacctgtccagatcgaaatagatgaggctgaacgacgcatcctgccggttcatcgcgcggaagagtttttcgccggcgcggtaaaacccgcgccggttgggaatgcccgtcaggctgtccgtcatggccatgctgatggcctcgaattcgtcttccacgatacaggccagatcccggagggacgcaatgtcatcatccgtgaaggcgcggggaacggtgtggatcaggcacagcgtgccggccaccgtgccgtcgggcaggctcaccggctggccggcgtagaaccggatgtggggctcaccggtgaccaggggattgtcacggaaccgctcatcagcagctgcgtcgtgaacaatgaagggcccctcctgcagaatggcatgcccgcagaacgagatgttacgcggggtttcgcgcacgccgacgccctggcaggcgaggagccactggcgctcgcgatccagcaggcttatcagggccaccgggacctgaaaggctttacgggccagccgcgtcaggcgttcaaaacgctcatcgtcacgggtatcaagaaggccggtaatatacagggacttcagcctctgttcttcattctccggtataccgggtgcctgcatgtaatctcctggtatgtacaaagtatatatgcagatgaaaaggtgtttggatctgactga

SEQ ID NO: 200789 - DNA, 2415 bp, Klebsiella oxytoca
atggcagtgcaaaaacttgatgatggcatgaatcgggggagtgtgtattttgatgacaaaagcgacaagagctatacagccacgttaactcacaaccattgggtacattacaccagtggccaggagcgtcagtcagaaaactttgccgagtataccgaaggtaatgcggtgcaggctttcctggggggaaaggcctattttactgcgttactgactgcctttaaacaggcccaaaaatgtgtttacatcacaggctggcaggttaactgggatgcccaactagcggaaggggttcgcctggtggatgcattactggaagccgtacaggcttcaccggaactgcaggtgtacattatgccgtggaataatccctcacaggtggaaacctattcggcggcaacagagcgggtgtttgcggcgatgaattgttatctgaagcgcaaggccttttatgttcagtgtgcggattctaaatccggaatgatgttttcgcatcaccagaaatgcgtgattgttgatgaagaagttgcgtttgtcggcggtattgacctggcctacggacgctatgatgaccattatggtttgcaggcaaatgcagacggacgacaggggatgaatatgtacaattcgtgcatcccgcctgtttcgcggcaaagcagttacaaccccatggaggaatatgtcatcccggcagggggattccggcgggataaccagcaggatgaacggcaaaaagctgagcgtcggcaggctgacagtgtacagcacattatcaataacgtgctcagccatcagcactggcagtcatccgccacgtcaaaggacagtacctatctggacccgacggtccagccccggatgccctggcaggactaccaaatgcaaattgaagggccagcggtttatgacctggtgcgtaactttgtgtttcgctggaacagttatagtcacccctatccggatcattcgctgaaaacctctgttcctgaactggaggttccggcagcaccgccacggaaaaaaggcagttgccaggtgcaggtgctgcgcagtgcctcactcgacatgcgtaaagatgagcataaacgtatgccggacagcgcaccaaaggccaggctcaaacaggatgatatcctacgcagtatccacctgcttatcagcaaggcggagcactatatttatattgagaatcagttctttgtctcggcgtttgggcggtcatcgattagtgccgggagtgggctaagtccggtggcggatagcattaatccgtcagtagcagcttgggcaacccggctcctggctgatgacacgacaccgcaaaatccggtggcagaatggctgggagaccgggttaaacgggcagtccttagtcatatgcagcaggcgttccatgtgtatattgtactgccggtgtatccagaggggcggcttgatgatccggccattgtggcgcaaattcatttaacccgacagtccttagtctttggttcgcagagcctgcttaaccgtattcgccgtagcttatgggtaaaacaacaacttgagctacagacggtcccgcgcagggagtggtggcagaaaattactgagctggaagagcagtgcggcgataagtataaaaccattccactggaagcatgcaatgagtatgtgacgatgctgaatctgcgcgaccacgctgaactaaacggcagggcggtaacagagcagatatatgtccacagtaaactgatgattgtcgatgaccgctatgttctggtgggaagtgcgaatatcaatgaccggagtctgcaaggtgaccgggactccgagctggcggtactgatatccgatacagcctattgttatacggacctggatgggacgggcgttgctgccccgacccgaaactttgcgcgcgaattgagacaaagtgcatggcgtaaatggctgggcagcgcagcgggagcgtgtgcagatgtgctggataaaccggcactcaggacgggatgggaaaaaattcagatgctggcgaaaaaaaatgccgaaaattacgaagcagtattcaactttattccaggagataattatcaactggatggaggtaacgattatcctgatagcactgaaagtaaaatcaggtcttctgtctggccagtaatttcggttaattctacagcggcagagtctgataaggaaaatatgccgttttcagaaacattctgggctactaatagaacagtccagcatagtaataaactgaacggcgttaagggatattttactatgttacccgttcactggactgagggagagaataacctgattccttataatatacgacttatagccaataataatggcttaaatagtaatgactttcagattgctggtatttttgaaaataatgacagaagtggagtgttgctatga

SEQ ID NO: 200790 - DNA, 1098 bp, Klebsiella oxytoca
atgattaccttccagaatgtgactaagcactacgacaacggttcggtcgtagtagatggccttagcctggtagcgccggggggcaaaattacggtatttgtcggcccttcgggctgtggaaaaaccacctcattgcggatgattaaccggttagtggaaccgtcatcgggccggatcctgcttaacggcgaagccaccgagcaaatggatatcgtgcaactgcgccgccgtattggctatgtcattcaaaatgcaggtttattcccccataaaaacattatcgacaacattgccaccaccgcgattctcaacggcgccgccaaaagtaaagccagagccagagccggggaattactggaagtcgtcggtctggatccgcaaatcgccaaacgcttcccctggcagctttccggaggccagcagcagcgcgtgggcgttgcccgcgccctggcggcagacccggagtttatgttgatggacgaaccgttcagcgcggtcgacccggtggtccgcgaacagctgcaggaagagtttttgcgtattcagaaagaggtgagcaaaaccatcattatggtcactcacgatattgatgaagccatgaagctcggcgacctggtcgcggtacttaaacctggcggcaagctggcgcagatggcctccccaggcgaactgctcaatacgccgcaaaacgcctttgtggcggactttatcggcaaagacagaggctatcgcaaactgagtttccacgccgccgacacagaaaccgggttacgcaacgagccctatgccgagctggactgttccttcgagcaggccaaagagatggccatcgaccgctggctgctggttacccaaaacggcaaagcgtttggctggttcgacacccatcagccggcaacagcaattacccacgacaacatcaatctgggggcgacgttccaccagcaggggagcccgttgcgccatttgctggacgctgcgctgagctcgcccaaccaccgggccgtgatcgtcgatgaacggcaaatcccgctggggaccatccacctcgatcaagtactcgacatgtgtaaatccacgcgccaggagggagcatga

SEQ ID NO: 200791 - DNA, 408 bp, Klebsiella oxytoca
gtggtcgcgataacgcgccaggatctcgctgcctttcagcaggcggcgcaggttttgcgcggtttcctgctgtccgggatgagggcgcagggcgtgcaggcgggcatcgtagccgcgcgtattgccccgcatggcctcgaggcacatcccgcccgccatatcggcgacggggagcagacgctggaaatccgccacggccaggcagcccagcgcggtgatctcataggtgccgccgaccaacgcgtgaccctctctgggaccgggaacatagggcgggatacccgcccgcgtcagcgcctgttgcgccggcagcagttctccctgataccagcatttgccctcgccgaagaccgcaaggccgatatgggcggtggcaatcaggtaaccgacggagccgccggcgggtga

SEQ ID NO: 200792 - DNA, 519 bp, Klebsiella oxytoca
atggaactccagcgcctgacaggcgcacagcagttcgatggcgacgatgtccacggcgttttctaccgccttaagcgctttacgtgcggcggcaacccccatgctgacatgatcttcctgaccggcgcaggtggataccgtgtggatactgaccgggccggccagactgcggttatcgcccgccagcgcagcggcgacgtagggtgggatcatcatcccggagtaccccgaatccggcgagataagaaaggccggcagcccgctgagatgcgtattggttattcggtcgcaacgggcctgggaagcggtgctcaactgggcaatcgcaacggccagcgcatccagcgccagcgccgttggcgcaccgtgaccgttgccccctggcatcacgataagcctgtcttcttctaccagaaacagcggattatcggtcaccgaattgagttcgatggtcataatctgtcgacagtgggtcagctggtcgcgcaccgcgccgtggatctgggggatacagcgtaa

SEQ ID NO: 200793 - DNA, 354 bp, Klebsiella oxytoca; identical to SEQ ID NO: 187637

SEQ ID NO: 200794 - DNA, 1035 bp, Klebsiella oxytoca
atggcagtacgaaaactcgacacaggaaaatggatttgcgaatgctatcccgccggacgtagtgggcgtcgtgtgcgtaagcagttcgccaccaaaggcgaagcgctggcttttgagcgtcatactatggatgaggcagatgctaagccttggctgggtgaatcgattgaccgtcggactctgaaagacgtggttgaactctggttcaaactgcacggcaaatccttgaccgcgggtgagcatgtttacgacaagctgctccttatggttgatgcactcggaaaccctcttgctactgatctcagctctaagttgttcgcgcattaccgtgacaaacgcctaacgggtgaaatctattttagcgaaaagtggaagaaaggagccagcccggtcactatcaatctggagcaaagctatctgagcagtgtttttagcgagctggcccgtcttggagaatgggctgcgccaaacccactggaaagcatgcgcaagttcaccattgccgaaaaagagatggcatggctgacgcatgaacagatcacagagctactatacgactgccaacgccaaagccccctgctcgctttggtcgttaaaatctgcttgagtaccggagcacgctggcgcgaagcggtgaacctcactcgctctcaggtcacgaagtaccgaatcacgttcgtcaggaccaaaggcaaaaagaaccgaagcattccgattagcaaagagctttacgaggaaatcattgccctagacggcttcaagttctttacggattgctacttccagtttttgtctgtgatggacaaaacctccatagtgcttcctcgtggccagcttacccacgttctacgccatacgttcgcagcacactttatgatgtcgggcggcaatatccttgccctgcagaaaatcctcggccatcacgacattaaaatgaccatgcgctatgctcacctggctccagaccaccttgaaaccgctttacgcttcaatcccttggcaacccttaaggccaatgatgtgctaatcatatga

SEQ ID NO: 200795 - DNA, 258 bp, Klebsiella oxytoca
atgtatgattatgtgaaatcacatatatcaggcaacaacgagttcttcatttgcagcctgcgctgctgtgcgttcattctcaattgcgagagattctctatattctttggcatcggcaaacatcgtccaatgcgcatcgatattcatattggctacagtagatttaatatccttaatgccgacattaaagaattctttccgagaattgaccttgttaacctgtttttcattaaatactttatgcaagtgattctctaa

SEQ ID NO: 200796 - DNA, 348 bp, Klebsiella oxytoca; identical to SEQ ID NO: 187630

SEQ ID NO: 200797 - DNA, 306 bp, Klebsiella oxytoca
atggacgaaccgttcagcgcggtcgacccggtggtccgcgaacagctgcaggaaaagtttttgtgtattcagaaagaggtgagcaaaaccatcattatggtcactcacgatattgatgaagccatgaagctcggcgacctggtcgcggtacttaaacctggcggcaagctggcgcagatggcctctcctggcgaactgctcaatacgccgcaaaacgcctttgtgtcggactttatcggcaaagacagaggctatcgcaaactgagtttccacgcctccgacacagaaaccgggttacgcaactag

SEQ ID NO: 200798 - DNA, 588 bp, Klebsiella oxytoca
atgtgtcgggtccttaaggttgcccgtgccggattttatgtctggctccataaccctgtatccgccggagaaaaggataaccagcgactgctggaactcatccgcgactcctatacgctgaggggtggagtttacggttatcgcagggttcatggcgaccgtcgcgaaattggcgaagtgtgcagcagaaaccgggttgccaaaatcatgaggaaaaacaggatccaggctatacatggttataaagtgccacgcggaacccgaggacgaccgtcactgatagcgcccaatcgcgtgcggcgtgaatttactgtagtgaagcccaatcaggtgtgggtcaccgacatcacctacatccgcacctggcagggctggctgtacctggcagtggttatcgatctttttgcccgtaatgtggtgggctggtcgatgaagccaatactgtcacgcgagctggcactggatgcgctgctgatggcggtctggcgacgtaaacctgaagaaaacgtcattgtgcacagcgatagtaataatgccgatgtcagtctttaccaccacttagtttgccgtttaaccagattggtgtga

SEQ ID NO: 200799 - DNA, 1005 bp, Klebsiella oxytoca; identical to SEQ ID NO: 133534

SEQ ID NO: 200800 - DNA, 180 bp, Klebsiella oxytoca
atgatgagaacataccgggtgttgttagtttatgctatgaacaaacaaaaaaaatttgcgaaggatatgatatattattacttaataaaaaaactgtacttgagtttatcactttgcctgattttaatcctatactcccaaaagcaattgttgctgactatatcagacttaaactactag

SEQ ID NO: 200801 - DNA, 213 bp, Klebsiella oxytoca; identical to SEQ ID NO: 190038

SEQ ID NO: 200802 - DNA, 522 bp, Klebsiella oxytoca
atgggtttttcccgccggggatgcgtagcccggacagatgcgcagcatcgcctccgggaaaattctgcaacatcctgcacgcttcccccgggggcggcgcaaagcgcctgcccgggctacgggaacgcagaccgccgggggatgcgtagcccggacagatgcgcagcatcgccgccgggaaaattctgcaacatcctgcacgcttcccccgggggcggcgcaaagcgcctgcccgggctacgggaccgcagaccgccggggacgcgcagcccggacagatgcgcagcatcgccgccgggaaaattctgcaacatcctgcacgcttccccccaagggcggcgcaaagcgtcttgcccgggctacgggaccgcagaccgccggggatgcgtagcccggacagatgcgcagcatcgcctccgggaaaattctgcaacatcctgcacgcttcccccgggggcggcgcaaagcgccttgcccgggctacgggaccgcagaccgccggtagcccggataaggcgttag

SEQ ID NO: 200803 - DNA, 237 bp, Klebsiella oxytoca
atgatctatccggcgctttcatacccaaccgctattcgcgccaccggggtcggcttcagccgcgcgctttccggtattggcagcgcgctggcgctgtttgtgctgccgctgctgcaggcatcgctcggtacgcaaatgttctgggtcgtatcgctggccgccattatcccgattttcttcctgctcgcggtacgccatgagcctacccaatatgacattgacgacagccaccattga

SEQ ID NO: 200804 - DNA, 2220 bp, Klebsiella oxytoca
ttgaaccgcctgcgatttggctacggtagacttattgagaatttgcagaccaccatggcgaaggtcgtcggtgccagctacggggaaaaggagatcatcttgttagtaaatattgacttcgacaatcaatcgacagttgccagtatttcgttggaaggttgggatcaaccgcttgtcgaattcctctcacggtattttaccatccaagaagacattcttcgtttggactactcccacctatcaactaagaacctcattacagctaagagttggccttatagatcgcaaacagagcgtgagcactttacgttcgaattcaaggatgcggcacagcaggggcagatagcgctgaccttaaaaattctcggacacggatccgcggggatcgagaagtcgtcctctatcttggacccaaattcttacctgcacgctcaggatatcttctgggagggcatacttaatggcgatcctccgggcttacgtgaaatcattgtggcggaaatcaagtcaagtgcgatttgggttgaatggttgctcgctaaccgctcatattctcggaacaagtatttggatgatcagcagatcatgaaggcgttggtggtcaatacgtccgaggaagattgcatctatgttcttgatctagtcgaccctcatctggggggggatccttgggctttcgaacaactggtccagcagcattggcagcctgtacgcgactacttggaaaaaaatatcaacaggacgtcggactattcaaaccgcggaatgactgagttgatctcctctctatatgcgaattcgccgacagtgcagaattcccggtgggcttgcgaacaggtttttgaacgagcagatccttcagtatttcctgagctaatccaacattgtcgcgcgatattgccggaggatgtacgtaatctgttcctgcgctggaacatcatttcgaagaaagagaagaaagacaatatcaagcattgcgttgccaaagccttctcgagtcttgctacattgtacgtggacaccataccctcggacctcgcgcttgcggctgcttggcacgagtttggagacccagcgcggtctagtcagcaaagcgtcgttgccagcctcagagaactaccatcccaggcgtgggatagagaaacgctgtgggcccaattaggtccgtccgcccgcgaggcctggcggcaggatctgttcgatcgggttaatgaggaacctgagttagcccaagggctcctcaattttgcctgcctttggctcgagcagacggcattcgccgaagtcgagccagtgcttttgcgattgatggatgacgaggagcatctggcgtttgcgaatcggcttgtcggcactgatgtaaggcaactgcaactgaggtgcaagggactagtgcggtccaagcaaggtgcactggacctagaggggccggtaggtcggagcgagggtgccgctgtgttgcctagcgtaggagcccaaacttggctgggcgacccttcggtggagcgcatcatctatagggcgcttagccagattgaggaagaattttgttgcgaatatccggatacctggggagaggacgaggaggcccatacggcgcgcctcctgagtctgacaaaggtggcgattagcaacgtgagtagccagttgcgccaactctcggctacgacgcgggcgacgtatccgagcctgacagtgaacgtgcgtcaacccagtaagcgggaggaaggggcgaacacacaagccggtgctccgctgggagcagacgtgctgttcctgagccgtatcgtggacaaggggaaaacagtggtccagcgtgcgacccttatgcaggtgaaaaagcgcaaaggcactaattcgggacaggccttcagttcgacggtaggcattaacctgaagcagtgcgaggacatactcaagcagtcagaacacgcctactacctattcacgactccggcctcgcctcgcccggttctctgggttgccccagcgcggctcgtcagaaatttgacccaattgcacacgagcaaatccacggtttcggtgatgcaggtgcgcgacgccagctgctcctacgcggatttttttctgcacgagcttgttggcctgtgggctggcgacgagcatgaggacatcatcgccgtcgccaacggcgatcctcggcttgggcgaacacctcgccacattgttgaaatcgaggttcgccgccaatctgattaa

SEQ ID NO: 200805 - DNA, 480 bp, Klebsiella oxytoca
atggcaatcaccacgacactttactaccccgctgatgttctccctgggccgttgaaagacggctttggaatgaagccgaaatccccggtaaaaatcaccgagctcgtaacggggcgtaaaagaatacgacgtggctatacatctgttcctacggaaacagatgtagcctggatttttactgacgcgcagtcccaggcttttgaggcatggtaccgggatgttctaaaagacggcagcgcctggtttaacatgccgctactgacgccagtgggtcaaaaaaattacgtttgcaggtttaacgatatttatgaggggcctacgcctgaaggaggcttgtactggaggtattcagcatcccttgagttatgggaacggccgctgccggcggttggctggggagaatatccggagtggattgtggggagttcgttactcgatatagctctgaacagggagtggcctaaacatgacagcgattaa

SEQ ID NO: 200806 - DNA, 1176 bp, Klebsiella oxytoca
atggagattgtatttttttgtttctgtttgctagtgtcgttagggatgacgttttttctgaccaagtattcaatcggtaaattgattccactgtcaatgcatgggcgttttattgaaattgatgggttgcgtggttatttagctttaatggtcgccgcccatcacttttatataatatatgcctgggttttaaatgacgagtggaaggcgccagactttatagtttttaataacctgggtgtttttgcagttagtatattttttatgattactggttttttgtttataggtaaaattgacagagctagactgaaagggagtcttgaatttcttagcctaatgaaatctaggatatttaggatatgcccactatatgtattcgcagtatttataacggttatattatcatttcacacaatgctctatcaatttagtgatgctaatagtctggttaaagatatttttaaatggatggtgtttcttggtgactcagtgaatggctaccatgactcaaaaaggattactgctggcgtaacatggacactaagatatgaatggttgttttatatttctcttgcaggtgtctattttatctcaaaaattaaatatggattagtaggcctaggtttagctatagcagtattttccttgatgaaaattgatttcttatattttaatagtttgtatcttatcttctttgttcttggtggggtgtcttattttattaataaaaaatattctgcgaaatttggtaggggtgtatttaaaggtgtcgccccttctttgattctgttactttcgcttgttttggctttgtttacttcagagaaagaacatttattattatttagcattttatgcttcattttctttataattgtagttatgggtggtgatttttttggtttattttgcatgggaacttcaagggcgctaggtgaaataagttatagtatttatttgatgcgcggaatagtttttttcatcctttttagggtaatgtggccagaaataataagcagcaatttctatgcgtatagtttattacttccagcctgccttttttgtgtggtgctgttctcaacatttacattcttgaaaattgagctcccattcattaatgctgggaaaggtaagttgaatttcggcaatatgctataccctaggaaaaaatga

SEQ ID NO: 200807 - DNA, 141 bp, Klebsiella oxytoca
atgaatcagctcttagttgaacgcatccgctaccgctggaaaaagcttcgcctttgccgtcatcgcggcactgtattagttgactaccgcatcctcaaaaactttatacgcacctgtcagatccggggagagacagtatga

SEQ ID NO: 200808 - DNA, 1008 bp, Klebsiella oxytoca
atgagcatcgatcggcgctgtctggcagaaaatacctttaatttgatttccatgtccggcgggaaagactcgttggcgcaatgcctgtatgccgtagagaacggcgtgcaacacgagcgcgtgtttgctgacacaggccacgaacacccgcagacgatggagtatctcgaataccttgagcaaaaactgggcccgattcgccgcgtaaaagccgactttactcgccagatcgagggtaaacgtaaattcattgcagaaaaatggccgatatctctcgttgaagagtgcggcatgacccccgatgaagcagcagagcgtattgctcgagctctggagatccttcacccaaccggcaatccattcctggacctgtgcatgtggaaaggtcgattcccgagcacaaaggcgcggttctgcacgttcgaccttaaacatgagcctgttcgtactcaggttgtactgccggcgcttgatgaatatgacgaggttatcagctggcagggtgtacgtgcccaggagtcgccagcacgtgccggcctgccgatgtgggaagaagatgcagacaatactcctggcttacatgtttatcgtccgatccttaattggctgcatgaagatgtgttcgccattgctaaacgccacggcatcaagcctaacccgctctatcagcaaggctgcagccgtgttggatgcatgccatgtattcatgcaaggaaatctgaattagcggagattttccagcgctggccggaagagatagcaagggtagccgagtgggagcgcctcgttgcatcttgctctcgccgcggaaactcaacctttttcccatctacgcatgacccacgcagggcagaacgccggatagacgttattaccgtagacggttacgggattgaaacctatcgcgactgggcaatgacaacccgtggtggcgctcagtttgacctactggctgaggctaacgacaaatctgtatgcagcagcgtctatgcaggagtatgcgaatga

SEQ ID NO: 200809 - DNA, 360 bp, Klebsiella oxytoca
ttgggcgaccggctcgattactacccgtcgagtctctccggcggccagcagcagcgcgtggcgattgcccgcgcgctggcgatgtcgccaaaagttttactctgtgacgagatcacctcggcgctggatccggagctggttggcgaagtgcttaaggtgctggagcagctggcggcggagggcatgacgctgattctcgtgacccatgaaatgaattttgcccgcgaagtgggcgaccgcgtcgtgtttatgcatcagggacgggtctgggagcagggcgacagcaaaacgctgttcgccaacccgcagaccagcgaactgaagcagtttatttcctccgtgcgcggcctcaatcaataa

SEQ ID NO: 200810 - DNA, 534 bp, Klebsiella oxytoca; identical to SEQ ID NO: 124590

SEQ ID NO: 200811 - DNA, 609 bp, Klebsiella oxytoca; identical to SEQ ID NO: 124591

SEQ ID NO: 200812 - DNA, 132 bp, Klebsiella oxytoca; identical to SEQ ID NO: 124592

SEQ ID NO: 200813 - DNA, 786 bp, Klebsiella oxytoca; identical to SEQ ID NO: 124593

SEQ ID NO: 200814 - DNA, 1113 bp, Klebsiella oxytoca; identical to SEQ ID NO: 124594

SEQ ID NO: 200815 - DNA, 414 bp, Klebsiella oxytoca
atgggcctcttcgccctcctggcgttcttcctgctggccccccagcacgcattcgcctccgagggcaccggcggctctctgccgtatgagagctggctgaccaacctccgcaactccgtcaccggcccggtggccttcgcgctgtcgatcatcggcatcgtggtcgccggcggcatcctgatcttcggcggcgaactcaacggcttcttccgcacgttgatcttcatcgtcctggtcatggccctgctggtcggcgcgcagaacatgatgagcacgttcttcggccgtggcgcggaaatcgccgccctgaccgatggcgcgctgcaccaggtcaaggtcgccgcgctggacgtggccggcttccccggcgaagccgtcatgcgctgggccgagcgcggccacatcgcggggtaa

SEQ ID NO: 200816 - DNA, 258 bp, Klebsiella oxytoca
atgggcggggatcgtgagctggtgatgttctcgggcctgctggccggcgcgctgattttcagcgcccaagaagtgagggcaacggtgttcggcatcgccttgtggttcggcgcgctcttcgcgctgcgcctcatggcgaaggccgatccgaagctgcgacacgtgtacctgcggcaccgccggtacaagccgtactacccggctcgcagcacgcccttccgtgacaacacgccgagtcaagggaagcaatacaaatga

SEQ ID NO: 200817 - DNA, 2559 bp, Klebsiella oxytoca
atgatcgaagcaatcgcaattgccattgctgtgctcggtgcggttctgttgctcatcctctttgcccgcatccgggctgtcgatgccgagctgaagctcaagaagcatcgcgccaaggatgccggcctggccgatctgctcaattacgccgccgtggtcgatgacggcgtgatcgtgggcaagaacggctcctttatggccgcctggctgtacaagggggatgacaacgccagcagcaccgaggaacagcgggaaatggtgtcgttccgcatcaaccaggccctggcgggcctggggaacggctggatggtgcatgtcgatgctgtgcgtcggcctgcgccgaactactcggagcggggcgtgtcatcgttccccgactccgtttccttcgccattgacgaggaacgccggcgcttgttcgagggcctgggcgcgatgttcgagggctactttgtcctgaccgtcacgtggttcccgccagtgctggcccagcgcaagtttgtcgaactcatgttcgatgacgatgcggtggctcccgaccatacggcgcgcactacgggcctgattgcgcagttcaagcgcgagatcaccagcctggaatcgcgcctgtcctcggcggtcaagatgacgcgcctgcgcggccaaaaagtcgtgtcggaagagggcagggaagtcacgcacgatgacttcctgagctggttgcagttctgcgtgacgggcctccatcacccggtcatgctgcccagcaatccgatgtacctcgatgcggtaatcggcgggcaagagctgtggggcggcgtcgtgcccaagatcgggcgcaagttcatccaggtggtcgccatcgaaggcttccccttggagtcaacgcctggggtgctctcggccctggccgagctgcccagcgaataccgctggtcgagccgcttcatcttcatggatcagcacgagtccttgaagcacctggacaagttccgcaagaagtggaagcagaagattcgcggcttcttcgatcaggtgttcaacacgaataccggctcgatcaaccaggacgcggccgcgatggtcggcgacgccgaggcggccatcgccgaggtcaacagcggcttggtggcggccggctactacaccagcgtggtcgtgctgatggacgaggatcgggagcgcctggcggcctccgcgctcctggtcgagaaggccgtcaaccgcctggccttcgcggcccgtatcgagacgatcaacacgctcgatgcgtacctgggcagcttgcccggccacggcgtcgagaacgtgcgccggccgctcatcaacacgatgaacctggccgacctgctgccgacaagctcgatctggacgggcagcgccacggctccgtgcccgatgtacccgccgctgtcgccggcgctcatgcactgcgtgacggtgggcgctacgccgttccgcctgaacctgcacgtgcgcgacctgggccacaccttcatgttcggcccgaccggcgcaggcaaatcgacgcacctgggcatcatcgccgcgcagctccgtcgctacgccggcatgtcgatctacgccttcgacaagggcatgtcgatgtacccactcgcggccggcatccgcgcggccacgaagggcaagagcggcctgcatttcacggtggccgccgacgatgaccgcctggcgttctgcccgctccagttcctcgaaacgaagggggatagggcctgggcgatggagtggatcgacaccatcctggcgttgaacggcgtcaacaccacgccggcgcagcgcaacgagatcggcaacgcgatcatgagcatgcacgccagcggcgcgcgcacgctctccgagttctcggtgacgattcaggacgaggcgatccgcgaggccatcaagcagtacacggtggacggctcgatgggccacctgctcgacgccgaagaggacggcctgtcgctgtccgacttcacggtgttcgagatcgaagagctgatgaacctgggcgagaagttcgcgctgccggtgctgctctacctgttccgccgcatcgagcgcgcactgaaaggccagccctccgtcatcatcctggacgaagcctggttgatgctgggccaccccgcgttccgcgccaagatcagggaatggctcaaggtgctgcgcaaggccaactgccttgtgctgatggcgacgcaaagcctctccgacgcggccaactcgggcatcttggacgtgatcgtggaatcgaccgcgaccaagattttcctgcccaacgtctacgccagggatgaggacacatcggcgctctatcgccgtatgggcctcaacgcgcgtcagatcgaaatcctggcgactgccattccgaagcgtcagtactactacgtctcggagaacggccgccgtctctatgaccttgccctggggccgatggccctggccttcgtcggtgcgtccgacaaggaatcggtcgccaccatcaagagcctcgaagccaagttcggccacgaatgggtgcatgagtggctggccggccgtgggctgaatctcaacgactacctggaggccgcatga

SEQ ID NO: 200818 - DNA, 783 bp, Klebsiella oxytoca
atgagcatcgccgacaccctcaagggcttgatcttcaagaagcccgccaactccgccgagccgcgcgatccgcgccgctcgaaggaaccgctcgccggcggccgccgtgcgggcgaggccgagaacccctacctggccgcgcgccgcacctggaacgatcacgtgggcggcgtcgtctcgcagcgccaaacctggcaggtgatcggcatcctgtcgctgttgatcgcgctggccggcgtgggtggcgtgatccacatcggcagccagtcgaagttcatcccctacgtggtcgaggtggacaagctgggccagacggtggccgccggcccggtgcaggccgcagggaaggccgatccgcgtgtcatccacgccgccgttgcggactggatgagctgcgcgcgcatggtgtcgcctgacgtggccttgcagcgcaagtgcgtgttcaaggcgtactcgatgctcgcccccaacgatccggcgacgccaaagatgaacgagtggttgaacggcacgcccgattccagcccgttcaagcgcgccgagaaggaaatggtcagcgtcgagatcaagaccgtcatcccgcaaacgcccgacacctggcaagtcgagtgggtggaaaccacgcgcgaccgccaaggcacgctgaaaggtcagcccgtcacctggcgcgcgctcgtgactacctacatcgccgaggtcacgcccaacaccaccgatgagcaactgcggaacaacccgttgagcatctacgtgcgtgattactcctggtcccgcatccaatga

SEQ ID NO: 200819 - DNA, 900 bp, Klebsiella oxytoca
atgaagaaaaccctctccgctttgatcgtgggcgctgctgtggcggtgccctccctggctctggccgcccctggcgacgacattgccgacaagtatttcaacaagaccaacccgacgctgaccgctcaagagcgcgcggcgctcgccatcgccaaacggtgggaagcggggtcggcgaccggcatcaagccggtggccggctcgggcggtgccatcaagttcgtgtacggcgcgcagcagccgagcatcgtttgcgcggtgctccaggtgtgcgacgtggccttgcagcccggcgaacaagtgaactcgatcaacctgggcgacacggccaggtggacggtggaaccggccatcaccggcagcggcgcgaccgaggttcagcacctcatcatcaagccgatggacgtgggcctcgaaaccagcctggttgtgaccacgaaccgccgcagctaccacttccgcctgcgctcgcatcgcaccgagtacatgccgcaagtctcgttcacgtaccccgaggaagcgcaagccaagtgggacgcgatccagcgccgcgagaagcaggaacgcaccgacaacaccctgccggcgacgggcgagtacctgggcgatctctcgttcgactatgagctgtccgggtcggcgagctggaagcctgtgcgcgtctacaacgatggccgcaagaccatcatcgaaatgcccggcacgatgcagcagaccgaagcgccgacgctcctggtcgtgcgcaaagagggcggcttgttcaccgacgacgaaacggtgctggtcaattaccgcgtgcagggcaatcgctacatcgtggacacggtgtttgaccgcgcgatcctgattgccggtgttggcagtagccaagaccgcgtgaccatcagccggaggaagtga

SEQ ID NO: 200820 - DNA, 489 bp, Klebsiella oxytoca
atgcgcaagatcgtctctctcgcgctgctcgccctcgccctgggcctcggcggctgcgcaaccaccagccagtacggcaacttcgtccagtcggccgcgctcgatcagcagaagctcgccaccgacgcggtgcagcagctcgccacgctgtacgcgccggcgcgcacgcgcctggagctgcaacagccgacgcccgatccgttcggccaggcgctcgtcaagtcgctgcgcgacaagggctatgccctcctggagtacgccccggccggcgcttccacgcaggccccggcctcggcggcatcgcaggcgagcgcaccggccaccacggccgcgtcgggcggcctgccgttgcgctacgtgctcgaccaggctggcgactcgaacctgtaccgcctgaccttgatggtcggcaatcaatccatcacccgcccttacctggcgcaaaacggcacgttcgcgccggccgggtactgggtgcgcaaggagtga

SEQ ID NO: 200821 - DNA, 1422 bp, Klebsiella oxytoca
atgacagaaaacgccgatcagatggcacctgacgcttcgcctggcgaagtgtccaagaaggcgggcgtccgtcgcgtcaacaacatgcccatgtacatcctcggcggcgtcctgctgtcgttcgtgctggtcatggccctggtcgcggcggatcgcgcggccaagcagaacgcgccggcggacggccccaaggagaaggccggcaacacgtcgatgttcgccaaggagatcgcaggcgacaagaccggcggcttgatcgagccggcaagcccgctcaaggtgcccgacatgccgaccggcccggcgtcggctccgctggagatcgcgcggccgtccaacccggacgcgccgccggccccgccggccaaccccggcaacccgggccagccggtgaacgacgacgaggcccagcgcatccgcatggcgaagatgcagatgttcggcgaagccgtgaaggccaagaccaccgtgcgcgtggatgccccgcgtagcaacggctccgcgccgggtggcccgagcacctacaccggcacgccgcagacgcgcgatgaaatgctgaaccgcatcgcagcggtgcagcagcaaatcgacgcgcagcgcagcaacgatccgaccgccgcctatcaagcacgcctggcgcagattcgcggcatgggcgtcggtggtggcggcgcggctccggccgccggcggcatgggcgcgggcggtgcgccgcagctcctgcaaacctcgaccagcggcggcgggcgcaacagcatggcgcagttcggccaaggtgggcagggcgaccgctggaagctggattcgcagccggaagcgccgcgcacaccgttcgagctgcgcgcgggcttcgtcgtgccggccacgctcatttcgggcatcaactccgatctgccgggccaaatcatggcccaggtcgcgcaggacgtgtacgacacaccgaccggcaagcacctgttgatcccgcagggatcgcgcctcgtcggctcgtattcgagcgacgtggcctacggccaagcgcgcgtgctggttgcgtggcaacgcatcgtgttccccgatggcaaggcgatggacattggcgcgatgccaggcgcggacagcgcgggatacgcgggcttccacgaccaggtgaacaaccactatgtgcgcctgttcggctcggccttcctcatgtccggcgtgacagcaggcatcacctacagccaacgccagaaccaggccacaaacacctatggcgcaccgagcgccagcagtgccctaagcgaagccctcggccagcagctcggccaggttacggcgcaactcatcgccaagaacctgagcatttcgccgacgctggaaattcggccggggtatcgcttcaacgtcgtggtcacgaaggacatgacgttttccaagccgtaccgttccttcgattactaa

SEQ ID NO: 200822 - DNA, 765 bp, Klebsiella oxytoca
atgaagccgaagtttttagccgctaaattggccctcgtcattgctgtttcgagcacgctggcggtcacacctgtgcaggctggcatccccgtcatcgacggcaccaacctgtcgcagaacatcatgacggccatcgaatcggtggcccagacgctcaagcaaattgagcagtacagcacccagctccagcagtatcaaaaccaactccagaacacgatggccccggccgcgtatatctgggatcaggcgcaatcgaccatcaacgggttgatgaacgcggtcaacacgctggattactacaagacccaactcggcagcctggacagctacatcggcaagttccaggacgtgaactactacaagaactcgccgtgctttacggcggcagggtgctccgacgcggaacgcgcagcacttcggaatgtggcccagctcgcgagcgagtcgcagaagaaggccaacgatgccttgttcaagggcctcgataggcagcaaacgaatctcacggccgatgcagcgacgttgcagcgtcttcaatcggcagcgcagggcgcgcagggccaaatgcaggccatcggctacgccaaccagctcgccagccagcaggccaaccagctcttgcagattcgtggcctgctgatcgcgcagcagaacgcgatggcaaccaagatgcaggccgacgccgacaaggaagcccagcaggcggcagcggccgcacaactgcgccagggcagctaccgggccagcccggcgcgcacctggtaa

SEQ ID NO: 200823 - DNA, 228 bp, Klebsiella oxytoca; identical to SEQ ID NO: 110225

SEQ ID NO: 200824 - DNA, 1719 bp, Klebsiella oxytoca
atgagaatgccagccaatctaaaaaccctcgccctgccgctgttcgtctggctggcgttcttcgcggtcgatgcccacgcggccatcgacaacgccggcgtgttcgatagcgtgctggatcgctaccaggccgccgcgagcggctgggccggtgtcatcaccacggccgcaacctggctcttctggacgctggttgtgatctcgatggtctggacgttcggcatgatggccttgcgcaaggccgacattggcgagttcttcgcggagttcgtccgcttcacgatctttaccggcttcttctggtgggcgctgaccaacggccctaacttcgcctcgtccatctatgcgtcgttgcggcagctcgccggcaacgcgacgggcctgggcaatgctctgtcgccctcgggcatcgtggacgtgggctttgcgatcttcgacaaggtgatggatcagtcctcggtgtggtcgccggtggacagcatggccggcatcctcatggccgtggcgatcctggtcatcctggccctggtcggtgtgaatatgcttctgctgctcgcgtcgggctgggtgctcgcctacggcggcgtgttcttcctcggcttcggtggttcgcgctggacttccgacatggcgatcaactactacaaggtcgtcctgggcgtggccgcgcagctcttcgcaatggtgctcctggtgggcatcggcaagaccttcctcgatgactactactcgcgcatgagcgccggcatcagcctcaaggaaatgggcgtgatgctgatcgtcgtcatcatcctcttggcgttggtcaacaagattccgccgctcatcgccgggatcatcaccggcgcgagcgtgggcggtgccggcatcggccagttcggtgcaggcgctgcgttgggtgccgcaggcatggcagcagcagcggccgcgaccggcggcgccgctctggccgccggcgcagcctcggccgccggtggtgcctctgccgtcatggccgccttctcgaaggccaatgagaacgtgtcggcaggcacggacgttatgtcggccttctcgggcggcggcagctcgggcggcggtgcgggcggcggcggcgacgccggcaccggcagcacgcccttcgctcaggctgcgggctttagcggcagctccggcggtggctcttcgtcgggtggcggcagcccctcgaccggcagcagctcgggcagctcgaagggcggcgataagggcggcggcaaagccgacgccggcggccagggcagcagctcgacggccagcaccggcagcagtgccgacaaggccgccaagaacgaacccaagcccgccggcggggcagggcaagggcagcaggccgcaccgggcagcaccggccccggcttgctcgcatcggccgcatcggccctcggcacggccggccgcatcgccgccgacgccggcgcgaacttggcgaagggaaccgccgatgttgccaaggccaaagccgcgagcctgcgcgaagccgcagccgagcggatcgccgacaccactggcggaaagatcgccgccgcgatcaaggcgcaaggaagcggcacggccgagaacatcgacgtgcccgaccagcagcccgcgccgagcttcggcgacaacagcctggcaggcggccccgccgatgccgatcccgagtccgaagtagctgcgttcgccaaccgcgagcaaggccgcgacggcacaactgcgtaa

SEQ ID NO: 200825 - DNA, 588 bp, Klebsiella oxytoca
atgaagaagaaactgtttgccctggccgccctcgtggcagccctcggatcgaccgccggcacggccagcgcgcaagacgtgctgaccggcgacacgcgcctggcctgcgaggcgatcctgtgcctgtcgtcgggcacgcgcccgagcgaatgcacgccgtcgctgtcgcggtacttcaacatcacgaagcgcaagctgtcggacacgatccgcgcccgcctgaacttcctccagctttgcccggtggcgagccagacgccggaaatgcagtcgctcgtgtcggcgatctcgcgcggcgctggccgttgcgacgcgcagtcgctgaactcgacgttggtgatgtggacgggcggctacgacgatgggcgcacgtacatcagcaaccagttgcctgactactgcggggcctacaccggccacgcctacaccgacttcgccagcagcggcacgctgccgcgctatgtcgggacgccagagcggggcgggtattgggtcgaagcgcgcgactatgaccgcgccttggccgagtacaacgaacgcatccggcgcgaggacgaagagcgccgccgtcagtcctggctgaactga

SEQ ID NO: 200826 - DNA, 636 bp, Klebsiella oxytoca
atgccgttcttcgccgatctgccgccgcagctccaggagcgcgtcgtctgctcgatctcggccgccgtcaagtacgaggtgccggtcaacatcgtgttggccgtcgccgagaaagagggcggcaagccgggccagtgggtgcgcaactcgaatggcacgcatgacgttggcccgatgcagttcaacaccgcgtacctgggcgacctggcccgatacggcatcacggcgaacgatgtggcggctgccggctgctactcgttcgacctggccgcctggcggctgcggatgcacatccgcaacgacaagggcgacctctggacgaaggcggcgaactaccactcgcgcacgccgcagtacaacgcggtgtaccgggccgacttgatgcgcaaggcgtcgaagtgggccgattggctcgaagctcggttcgtcacgcttgacgtgacgaaggccggggccacgccctcgacgcccagccagcccgcgacggtggcccagcgggcgacgccggcggccaggccggcaccagcaccccagcaggccgccccagcggccgcagcagctcgcagcgtgtcggtggccggctacgtgccccgcacggtgtctttcaacacttcacgcgaggggtcggccgagtag

SEQ ID NO: 200827 - DNA, 267 bp, Klebsiella oxytoca
atggacaaattccacgccttcatgatgcggtacacgctgggcgtcggccggttgcttcaagcctattgcaagtgggcggaaggacaggccaagaaccagctcgatttgcttctgctgggcctcggcccgatcttcgccttgggccttctgctgtgggcgctgccggcgtggatcggcaagcccatcgccttcgtgctctcactgccagcgctctacatcatcttcctggtgctgcgcgcctacgcgattcgcgggggccggcgctga

SEQ ID NO: 200828 - DNA, 699 bp, Klebsiella oxytoca
atgaaggccctgcggattcctgatggaaccgtcgaagcgttgaagtggctcgcactggttctcatgaccggcgatcacgtcaacaagtacctgttcaacgcgacgctgccggtgctgttcgaggccggccgcgtggcgctcccccttttcgtgttcgtcctggcctacaacctggcccggccgggcacgctcgaacgcggcgtgtacggccgcaccatgtcgcgcctggcgatgttcggcgcgctggcctccgtgcccttcgtggccctcggcggcctgtacgccggttggtggccgctcaacgtgatgttcacgctgctggtcgtcacggccacggcttacctggtcgaacgtggcggcaagctgcacctggcggccgccggcgtggtgttcctggtcggcggcagctcggtcgaatattggtggccggccgtggctttcggcctggcggtgtggtcgtacacgcgccggccgagctgggccgccgcggcggtcgcggtgctggcctgcgcggccctgtggttcgtcaatcgcaacctgtgggccttggcagccctgccggtgctcttcctggcctcgcgggtggatgtgcgcgtgccgcgcctgcgctgggccttctacgcctattacccgctgcacctggcctcgctctggttgatccgcatccccatgagcaaggccggctacctgttcttctga

SEQ ID NO: 200829 - DNA, 432 bp, Klebsiella oxytoca
atgcgaaaacccgttcttctggccctctctctggcgttcctggtcagcgcgcaaagcgcactggccgccggcgacgccggcaacttcggcacgccgatcaagtccggcgtatcggtgtccttccccgacagcagcgcgacattccagccgacgccagaggccctggagctgctggccgacgctaggaatgcggcgatcatctacatcagcgggcgcaccagcacactacggcccagcgcggccgatgaggcccttgcactacgccgtgcgctctcggccaggtcgtacttggtggcgcgcggcgtctcgccgctcaagatcatggtgaacttcgcatcggccgccgatttcgtggcagacaactcgacggccgagggccggcgcgagaaccagcgcgtggacattgaggtggtctacatccccacctactga

SEQ ID NO: 200830 - DNA, 498 bp, Klebsiella oxytoca
atgagataccccggcggcaagggcggtgccggcgtctaccagacgatcatcaacaacatcccgcctcacgacacgtacatcgaaacgcacctgggcggcggcaacatcctggagcgcaagcggcccgctgcccgcagcgtcggcatcgacgttgatcccgaggtgatcgaggtctggcagcagctcgacgtgcccggcctggagctgcaccacggcgaggccgtggcctggctggagtcccaccagttcaccggctccgagttcgtctacgccgatccgccctacgtgatggacagccggcgcggcggcaagctataccgccacgaatacgacgacaagggtgcggtcagcgtcaaagtgcgcggtgaagcgccgatcgtctatctgacgggtcaaacgttctatcagcccaagagcgcacccgacacgcaggtcgtcaacgcttccaagacggacgctgccaaggtgatcagcttccgcctgagcaacagcaagtga

SEQ ID NO: 200831 - DNA, 381 bp, Klebsiella oxytoca; identical to SEQ ID NO: 157168

SEQ ID NO: 200832 - DNA, 267 bp, Klebsiella oxytoca
gtgaccaagctgcgcgcggctttggatcaccgcatcggtgaggttcaattgccggaagtgattctggccgttgacgcccaggtgcgctttagctggatcatgctcggacgtgagccgcgctctaccgacgagctgctgatggtctatgccggcatcatggcccacggcaccagtctgactgcggtcgaatgcgcgcgcatgattccgcagcagaaggcggcgcggcagtgctgcctcaacttcgggtgtcacgtctgtgctccttga

SEQ ID NO: 200833 - DNA, 1095 bp, Klebsiella oxytoca
atgaagcagagcgctgttatcattggtgcgggcataagtggcttttatgccgccacactgcttgaaaaagcgggtgttgattatgagatccttgaggctcgtgacagaccgggcgggcgcgtgctgtcaggcctggaattagcagacgcatccgctggcattcatgtcgatatgggggcagcgtggttctggcctgatattcaaccggacttcgcgcatcttatcgagcggcttaatcttccggtaatagcgcatggccgcccgggtgacatgctctatgaacgtcagctgaattctccccccgaacgctatccggcatgggagagctccccggcgtctttcaggctgaagggaggtatgcaggcgctgacggcggcacttaaaagtcagatcccgactgagaagattaaaaccggccatcaggtggtggctgttttgcgagccagcaagtcagtgcaggtccatacccggtccgaaggcagtaaagaagtcgtattttccggtgaacatgttttcctcgctctgcctcctgctttggcagcgaaaatagaattcaatccggcgatgccggaacatgtgctgtcgaactggcggaaaaccccgacatggatggctccccatgcaaaatatgtcgctgtatataaatcagacttattgcatgcacgacagctttcagggaatgcaggaagccgcgttgggccaatggtagagatccacgacgtatccgagccagattcgggcaaaacggcgatttttggtttcattggcgtaccggcaaaatcgagatggactgtcagcgaagctgttctcaaaaatctttgccgggagcagctcgtacgcttatttggacaggatgcggcagaacccgaagctgagtatataaaagactgggcggccgatccgtttactgcgacggaatttgatctcctgcaggaggtcgggcacgcaatgcctgagcaactttccaccaggggagaatggtcgggagagataacaggtatcgccagtgaatggtcgccacagttctcgggctatctggcaggcgcaattgactccgcgtccatgggcgttcaacgctggctacaacagaaataa

SEQ ID NO: 200834 - DNA, 588 bp, Klebsiella oxytoca
atgcttgaccggattggtcgagagcaggcccgcgcaaccagccttgtcaggtatgcgcccggatccgaatttcccgaacacagccatcccggcggagaggagattctggtgctcgacggtatttttaccgaaaacggggtcgactatcctgccggctggtatctgcgcagcccggacggttcttcccaccaaccctcaagtcgcgacggcacaaccattttcgtcaagctgcgccagatgtctgctggtgagcgccagccggtcaggataaatacccaggatgcagctaactggcatgggcagccgcaaagacaaatctgcccgttattctccggaagcctagaaaccgtgttgcttcagaagcttgccccgggtgagcagatcttctgtgcgccgcttgttggcggagcagaactttttctcctgaaagggcaactcggggctcccgacggctgctatgaggcaggaagctggctgcggtttccgccgggtgatatgcctgctcttatggccaccgcctctggggcacttttttatctgaaaacgggacatatcagcccgataaccctgaccggagcaacattatga

SEQ ID NO: 200835 - DNA, 345 bp, Klebsiella oxytoca
atgttcttgaactggaatgaatatcgcagtggcctgctcgccaccatcggcaaatttgccaaactgcagccagagtttatgaaaggctttcagcagatggataaaggggcgtcagaaaacaagcacctcgatcctaaaacccatgaactgattgcactggccgtggccgtcactacccgctgtgacggttgcctggccgtacatgtggacgctgcggtcaagcacggtgccacgcgtgaagagatcgccgaagcgctggccgttgccattaacctgaataccggcgcagcgctgacgtataccgcgcgtgctctggatgtttacgataatctgccgaacaaatag

SEQ ID NO: 200836 - DNA, 282 bp, Klebsiella oxytoca
atggcttatctgcaaatcaccctggatatcagtaatgaaaaccgtgcggcagccgcgggggtataccagaaatacaaaaccccgtttctgaccaccatcgagggtgccacctctaaagagctgcttgtccgtgacgaagatgtccaggtgctgcacggctttaagactgtggcccaggcgcaggcataccttagcagtccgctgttcacgcaggatgtcgttgcaggattaaaaccctatttaaacagcgcgcctgacgtacgtattttcgacgttatgtaa

SEQ ID NO: 200837 - DNA, 915 bp, Klebsiella oxytoca
atgcgatcgctaaaccgacttaaatggctgcatgcttttgaagccaccgcaaggcacggcagctttaccggcgcggcacaggagcttggcgtaacgcccgccgcagtaggccagctggtacgctcgctggaagactgggtcggacacccgcttcttcaccgcacccgctcaggaaaagagcggctgacgctggttaacgaagcgcaggaggcgctacaggacatcacgcagggactcgacaaactggaaaccggattaaataagcttcgtggtcgccggtcgcgttcagtggtggtggtgacggcatcgcaggtactggtgatgaactggctgatggatcgcctgaaccgtttttcggaaacgcacgaaaatatcgatctgcggcttaacgtcacggaaaagctgatggatgtgtcgcacggcgaggcggatatcggtattcgctgcggccagggcgactggccaggcgtgaataaaacctggctgatggatgaggaagcggtactgatctgcagtccgcacctggtaccgtccgggaaaatggcctgcagtgaatggctcgccacgcaaaaactcattcatgatgacacgccccatcccggggcggattttccgtcatggaatgatgtcctgttggcggtcggtgcccccgaagcgctggaaagcgggctgcatattaactccacctcagctgtgatcctgtcggccctgagtggcaggggcgtggccatcgtgcgatacgctctggtgaaaaagcttatcgaaaccggacagctggtccagctgcatcctgaccatcggtggccgctcaagtggtcttattatgtggtgaccccgcagcaaaaagtcatgcgtgatgaagtgaaagttttccacgactggcttcttcaggatgtcgtctcggatcgttcataa

SEQ ID NO: 200838 - DNA, 777 bp, Klebsiella oxytoca
atgaacgcatcttttgccggtaaaaaactgttagtggtcggtggtacaagcggtatgggcttcgaaacggcgaagctggttctgaaaaacggtggcagcgttgtgctggttggcaatcgccaggacaaagccgagcaggcccgccaggcactggctgcagacggtcaggtttccatcatcgttgccgacctgatgaaagaagaaggtatgcagcacgtggtgaataccattaatgccgaacacaaggatattagcctgctggtcaatgcggctggcgtatttttcccgaaaccgttcaccgaacatgaagcgtcagactatgacatgtacatgaacattaaccgcgcgacattctttattactcgtgacgtggtgcgcaatatggtcgaggccggtatcaaaggctccatcgttaatatcggctccatgtgggcacagcaggccatcggtgccacaccgtcttcagcttactcaatggcaaaagcgggtctgcacgcgctgaccaaaaacctggccattgagctgggtgaaaaagggatccgcgtgaatgcggtttctccggccgttgttcacacgccgattttcgaaggcttcattccgaaagacgacgtgaaggacgtaatgaacagctttgacagcttccacccgatcggccgcgtgggtaccccggtcgatatcgcggaaaccgttgctttcctgctttctgacaagactggctgggtcaccggcgctatctgggatatcgatggtggcgtgatggctggccgtaacgcctga

SEQ ID NO: 200839 - DNA, 483 bp, Klebsiella oxytoca
atgcaaatccagaccgcgcattatgaccttgtcacctcgtggcaggggggcatggccagccggacgctctgccagtccttttccgcagacaacgctctgcctgcgctgcaaagtcatgttatcgattccgatgaaccggtttcgctgggtggcgaagggctggctcctgacccccaggagctgttgctcgctgcgttcaatgcctgcatgatggccgcctttattctcgaagccagggctgaaggtctcacccttacgcatcttgaaatacacactgacgggcaccttccaatggggttaccagcaacaggcgacagacctgcagaggatgtttccgcaaggcttgtgtatgtcatccacgtaagcggtgacggcacggtgcatcagtttgacgggatccatcagcgggtgattaacgcctccctgaaccggtggttactggcccaaaatatgctaatcgaaggtgacttaatactgtgctga

SEQ ID NO: 200840 - DNA, 228 bp, Klebsiella oxytoca; identical to SEQ ID NO: 167035

SEQ ID NO: 200841 - DNA, 264 bp, Klebsiella oxytoca
gtgcactaccctgcctatctggatgcaggcggaacggctgaaaaagcagaagccctgcgattatcctccgcaccacacgtctttaatgacaccgaaacgttgctgattcatcttacggaccagtccacccggaccgtcgtggttgaggagagcgttattgagacactgaaaagtctgttaggtgaaaaagagaccgtggaagctgttgcaaccgtcgccgcctataacatggtgtcccgttttcttgtcgcccttgccatctga

SEQ ID NO: 200842 - DNA, 1008 bp, Klebsiella oxytoca
atgcagatcgtcgcccccggggtgctggaaatgacagagcggccggtacccgctcccggcccggatgaggtactcatcagaattgaagcatgcggcgtatgcggtgccgatctccgggacgcggaaaaagcgccgcaggcgggccagcccggccgtataccgggacatgaaattgtcggatttattgcccgaaagggggacagggtacccgatatctggcataccggtcagcgggtgggcatcgggcgtctgggagggtactgtcagcactgcaaaccctgtcgcagcgggctttttcacctctgtgaaaaccagcttacgccaggactcagctgtgatggcggctacgcagagtacgttgtcatgcggcataccgcgctgatagccatcccctccgcgctctcttccgtacatgcagcgccgatcctttgcgccggtaccgcaaccttcaacgcgctgcgtaattctggcgccagagcgggcgacagagtggcggttctcggaatgggtggccttggccacatggccgttcagtacgcccgtaaaatggggtttgacgttacggtggtggcgcgcggtagcgaaaaagaacgagcggccattgagctgggtgcgcatcattacatcgatacacttaaggaaaacgcatcagaacgtctgaaaaatgacggcggtgtggattttattatggcaacggcaccggcttcagagacggtatcagcccttctgtccgccctcgccccccggggaaaagcgatcctgctgggtaccggacaaacgccggtgcaggtcaggccgggtatgatgatcggcgctgaacgtaccctgacaggatccttcgtcagcacaccggcgcaaaccgagcgcgcgctgcagttcagccacctctttcagacgttgcctgtcacagagttgctgccgtttgaaagggcaaatgaggcgctcagcagactgaagcagggtctggcgcgataccggatagtgctcaccatgaatcaggataattaa

SEQ ID NO: 200843 - DNA, 1206 bp, Klebsiella oxytoca
atgtccgcagaacatttcctgcccgttgcagttcagaaaaataatattatacgtctgtcggccgcacaggccctcgccggtgctaactccgttgtcttttatgccacaggggcaattgtcggtaacgcactggcgcccagcagttcgctggccacgctgcccatcaccatgtttgttctggggatggcagcctgcattctgccgttaggttcactggcgcgaaaagaaggccggaaagccgcctttatggttggcaccggggcaggcgtcatcaccggcctgacggctgctctggccgtcttcatcggctcattcctgctgttctgcattgctgcatttatgggcggtgcctatgcggcggtcgcgctcagctttcgttttgcggcaacggacggcgtcacgcccgaacgccgggcccgggccctgtccctggtgatggggggcggagtgatagctggcgtggttggccccatgctggtttccggaacgatgcacctctggccgcctcataccttcgccgtcacgttcatcgcccaggcgctcgtggccgtcatttcggcattcatactcaaaggcgtgaaaaccacagaacctgctggcgcagtaaaaacgggtggacgacctttgcgcgagattgtccgacagccagggtttgccagaaccgtattcagcggtgcggtcacctatatggtgatgaatttcctgatgacggcagcccccctctcgatgcacatgcacggcatttctcagcaggcctctaatcttggtatccagtggcatgttattgccatgtacggtccgggctttttcaccggcaaattaattaaccgttttgggggcatgcgtatcgccgctgcgggtctgcttatcacggcatgctctgtgctggccggacttggtggaactgatatttttcactactggctgtcgctgatattgctgggtctgggctggaattttggtttcaccggcgcatcggcgaagatcattgaatatcaccgtcccgaagagaaaacccaggtccagtccctgaacgattttgtggtgtttggggtgatgattgttgggtcattttcttcaggagccctgctcagtctctacggctggaacgccgtcctgtggggatcccttgttcccgtcgggcttgcatttttaggtattattaacgggttgcggacaaaaaagcaggataaattaagcttctga

SEQ ID NO: 200844 - DNA, 1656 bp, Klebsiella oxytoca
atgcagggttggcacacaacgtttttggggatgcgtgggctcccccgcgatatcagcgacttcgagatgaaggcatttttcaccttcgatggtgccgagcgcgacgcaatcaatgcacgccgaggtgattcccacaagcttggtctggcgctccatattggtttcctgcgcatgagtgggcgtttgctcggtgcctttcgggtaattccagtagccttgtggcgccaccttggcaacgagcttggcattgcagcaccagaagtcgcctcgctgagagccatgtatgaacgcgggcgcacgctattcgatcaccaacaagtagcctgcacggtccttggattccagtggatgagcgagcaccagcgccgctcactggtacgtgaactgcgcgacgaagtggcgcgctgcgccgaccgcgatcagctactcgtgcgggcgcgtcaatggctgtacaagaacaagctggtgatcgtgcacgagcgggcaattcggacactgattgcggcggcacttgcccagcttgaagttgaaacaggcaccgccatcgccgccagcgttgatccagcaacacttgatcgctggcgagcctcagtttcagagctgcgcccagatggacaaacccagcagagttggctatgggctgcaccggcgaaacactcaacccgccaaatcagcgaggtactggagcgcatcgacctgctttacacgctggacgttcataagcacctggcagacatccccgatctcatcttgcgccgctacgcgcgccgacttgtctccaggccgccctcagccggagccaagatcaaagagccagcgcgcaccgtggaggtcgcatgctttcttcggtattgcctgttcaccaccacagaccagttgatccttatggtgcagcgccggatcgccgatctgtggcgtcaggctgccgccgatgtccccgctaccgtcaattgggccgcaatgtacaaaacgctgctcggcgaacttgttgccttgagcgcgcaaggtgcggtgccagatgctgagttgcgtgcccgtcttgaagccttgatcaccgaaacccagaaacgcaaaccaccgagcagggcctccctggtccgcgagggattgattgatggaattcgccccgtgcggtcgttgctcgtcgccattgcaaagctgccctggcaggccaccggcgagcatcctgccatcgagtaccttgccaagctgcaagctttatatctcaaaggatccagaaagctgccagttgaagtggtggcaccaagtctgggaatgatctggcaggtttcgatctccagcccagaccgggaacgggcgtttcaggcgttggaggtggccaccctgtttgccctgcgccgcgcggtgcgcaatggctcggtctggattgagcacagcctgagctttcggggtcgtgcgcgcttgttcttcacggacgagcgttggcaggcagagtccaagaaacactatgcccgtctatcgttacccagcaaggctgccactttcttgaagcctttgctggccagagtaactgccggtgtcgatgcggtggccgctgcagcccgcagtggcgtactgcgcgtggatgatgaactccatttgtcgccattgcccgcagagggggcagtttggatatcgaaaattattgtacgttaa

SEQ ID NO: 200845 - DNA, 1818 bp, Klebsiella oxytoca
atgtctgaattaacacctcccttgggcactgcaggatttagcgttcttaaagagaacgtagaaaatttagatatcgctttaaatactgatagtgaaagttggctcgatcgaggaaagcgagtaaatgtttcgtggaagggcattttaaataagaatgccgaggctctcaaagaaactcaggacagtatcacgattcttggcctgccgtttaccaccctggccgaagcgcaggcggccgccaatgacggcaaaataccggtaggcgccgtaacgtgggcacgaaatgctggtgatgcttcgctggcagatgagtacatcaacaacggcggtacgctggaggctaccgggcggagtatgccatccggtaacgatattgattttgctgttcatcgaacagcaggcattcgtgatattcgcgagcactctgccagtgccacatacccggacctgatttccagcggcccgattgagtcactcactatcccgtttacagggcgtaaactggccgttatccgtgacctggcgactaaatccattgatacccgttcatatctgtctctcgtggccactactggcgacgcgactacccgccgctttctgcccgctacactgctgatgatgcagggcggagactcctggtcttactacgagccgattaacattctgagcctgagtaacggtgctattgctgaaaccagtggcagcatggtgcgcgtgtcttttgattgcgggaaaacgctggatgtttccgatactgcagcgttcactgtgattgacgtgtccggtatttttgctcccggaacagcatccgtagggatttcctacacagcggcaacggtgatggggagcacgaattccgaacgcattcagtttgttattcctgttgccgatatcgaggcagcggggtattccgcagattcagtaggctctgtttatcagtatctccgcagcgccggtgctgacagctatatcctggttaaaaccaataactggaatatgaacgcggatttatcgcgttatgcgcagattgaaattggagaaggtgataccagtatcagctgtaaggcactgcttgcgagcggtagcgagtcttcaagctcttattctgtgattgtctctctttatgctgcccgtgctgattattctcgatatcagagcgatttcctgcgcctgactgctgacgttgttaaccgcagcacctacggattcacgaattatccgatggagctaaaggccagcctgcccgtggggattgcaaaagacgatgcctgcctcgtactgctggatgatgcaggtaacgagtacccgtgccagttttccggcgagcagcatcccaacaagcggctgcgcgccgaacgttccagacattctgacgggagctttgctacggggtcgctgttttacaccgatacactggcagcaggcgaacagcgtaaccttgaactgcgggcatattcagttccggtacgtgggatgagcaggccgggtctgaatgtggtcgatcaaagcaccaggacggtggttattggcggttataagtacagttttgcacggcagcaaaactggtgcctgacgtccgttaccgacccgacaggtacagtccattctattgttcactcgacacacctggcggggctgagtagtggctccattgctgaagcggctgcggctcatatgccgtcactccgtcttatcacgtccggtcctgttttcgttgaactcgaacacatcattttcaatggtggccagttaaacgtcccggcgaaatcggtagactggccccatgaatctccagacagttggtatcacttaaattag

SEQ ID NO: 200846 - DNA, 609 bp, Klebsiella oxytoca; identical to SEQ ID NO: 31743

SEQ ID NO: 200847 - DNA, 354 bp, Klebsiella oxytoca; identical to SEQ ID NO: 31742

SEQ ID NO: 200848 - DNA, 3336 bp, Klebsiella oxytoca; identical to SEQ ID NO: 117529

SEQ ID NO: 200849 - DNA, 516 bp, Klebsiella oxytoca; identical to SEQ ID NO: 117530

SEQ ID NO: 200850 - DNA, 492 bp, Klebsiella oxytoca; identical to SEQ ID NO: 117531

SEQ ID NO: 200851 - DNA, 219 bp, Klebsiella oxytoca; identical to SEQ ID NO: 117532

SEQ ID NO: 200852 - DNA, 258 bp, Klebsiella oxytoca
gtggcgacgggcccggttgtagaacacttcaatttaatcgaagatatccgcccgggccagatcccgggttttgtatattctcttatcaattgtgtcgggatcatccaggctgaaagcccgaaaatcgacatcaattttcaaagcgttagctgccagtttttcccgatcgcgaccagcaacgattatctgccggcgcagcttccagcgcgtgacgtccaatcatcgccccggtatagcctgacgcaccgtaaatcatga

SEQ ID NO: 200853 - DNA, 402 bp, Klebsiella oxytoca
atgctggatcatatatttattaccgtaagcgatactgagcgttcaatcgttttttatgagcgtgttctgccccttctcggcatcaccaatcgtcacgattatgacggcagcaatggcccatcaggccatcctgacctcaagggatttggtgctaatggacgcgtatttttctggctaagatcgggcacgccttctcctcagaccgtgcatatcgggtttgtggcagattccgaaatcatggtcaaacaggcttatgctgaggccatcgccacgggtgctacggagattcactcgccaggggcgcaactgcattatgatccgcgctattacgccgctcaggtcagagatccggatggatacagtctggagtttgtctataaaagctggcagcacggacgctga

SEQ ID NO: 200854 - DNA, 732 bp, Klebsiella oxytoca
atggagcatgttctgattaccggtggaagccgaggcattggggccagcacggcgattgagtgtgcgcgtcgaggatttggcgtcatccttaccttgaacagcaagccggaagccgccagccaggtggttgagcgtattcaggccgacgggaggcatgcgttagcgttgcagttaaacgtagaagatgccagcagctttcctcagtttcgttctgttctcgagggcgcaatggaatcacactggggaaccagagaacttcacgggctggtaaacaatgcagggtatggtctttataatcccatagagacagtcactgaagcacagtccgacagcttaatgaacgtccatttgaaagggcctttcttccttacccagacgctgctaccacttctacaaccgaatgccgcaattgttaatctcaccagcgccaccacccgcgtggcaaccgccggtgtagcgccctatgtaacattcaagggtggccttgaggatatggcgaaagagtttggtgaaaggaagatccggatcaatgccgtgtcacccggtccaattcgtactgagctggttggcggtttaagtgatgaattcgaagcattgctggccgggcaaacagtccttggccgaattggcgagcctgacgaagttgcccgtgttatcgccggtttactgtctgccgactatggctggattaatgcccagacgatagaagtcgcgggtggttataatatctaa

SEQ ID NO: 200855 - DNA, 939 bp, Klebsiella oxytoca
atgattactaaaaagatagtatttctcgatagagatactttacctaatagcgtaagtctaaaggaaataacattcccacatgaactaacttgctttccgtatacgaaaagtgatgaaatcctttctagagtaaaagatgcaaatataataatcactaataaggtaaaaatatcacaagaagttattgctagtgctcataatttagagttgatagttatcgcagctacggggactgacgtcattgatctggtcgcttgcgaagaaagaaatatagcagttaaaaatgtaacggattatgcatccaaaactgttcctgaacatacatttgcactaatgctaaatttaagaagaaatattaacgcatattatcagtcagttaggaatggacgctggatagaatccaatcagttctgcttttttgattacaagataaaagatctttcaggatcaacgctaggtatcatcgggaatggtgtgctcgggaagagagttgctgaaattgcaaaatgttttggcatgaacgtcttaatttcatcacataaaggtatcgaaaatatggatccactatatactgattttgatgaagtaattagaaaaagcgatatcattacccttcattgtccattgcgtgaatccacaagaaatatgatcgcggagagagaattcaaaatgatgaaacctgaggctcttcttattaatacggctagaggagggatagttaatgaaagcgatttatactatgcctttattaaaggtgaaatagcaggtgctgcatttgatgttgctgtaaatgagccgcctgataacagtgaattaatcatgaagttaactgagctgcctaattttatacttacccctcatatttcatgggcaagtactgaagcaattcatactcttgctgatataatggtcgataatatcaatacattctacaattga

SEQ ID NO: 200856 - DNA, 756 bp, Klebsiella oxytoca
atgagtgttttcagtctggaaggtcgacgggctttggtcactggtggcagcaggggtttaggggcagaaattgtcaaactgtttgcagagcatggtgctcgtgtgggctattgtcagtttggtgatgatgataatgctcaaaagcttgagcaaaaaatgactcagaaaggtcttcaggttcgtcatactatctgcgatgtgtctgatgaaaccagcatagaatctttaggtaaatgggcacgggagcaactcggagacgtagatatagtagtgaactgtgcaggcattggcggtgatttaaagtttcatgaactcagtgttgaagctttcgaccgcatgattgctgttcatttacgcggtacatttctggtcactcgccaattttttcagggaatggtcgacagaaaatggggccgagtcatcaacttctcttctcaacttgcgtttaaaggtgcgccagggcaatcccattactgtgcggcaaaaggcggtattgtcggatttactcgcgctttagcctatgaaggagcacctcatggcgtcactgtgaatgctattgctccaggtcctgtagaaaccgatatgctaatgggtctttcggatgaatggcgtgatatgaagcaagctcaactgcctattgggcgttttggtttccccagtgaaattgcaccaacggcgttacttctggcttcagaggcaggttctttttacattggacaaaacctttcacccaacggtggagatgtaatgctttaa

SEQ ID NO: 200857 - DNA, 936 bp, Klebsiella oxytoca
atgacagagcaatgcattctgataactggagccaacggacttattggccgacatttgcttgaacgtctggtgcaggaaggtcgtcgagccatcggtatcgatttaacaccacgtgatggtagggagcgagtattctcctgctcacttactgacactcaccgactctatgcgctagcgagacaacacgctattaccgatatcatccattgcggtgcagtctccggcccaatggtcatggtggataacccccacggcatcatcgatacaaatgttgtaggaaccgccaatattatggaggtggccagagtgatggaaatgcgccgcctggtattctgctcatcgaccagtgctgtgggaacaacaaatacaccagacaatgacttagtttcagaaccgataccgctgaaacccggcagtgtttacgggagcactaaagcggcatgtgagcaattgctgtcagcctatcgacttcagcatggccaggacaatgtcgctattcgtctttcctgggtatatggcccaggcagaaccactgcatgcattattcgttcgttaatcacatcagtactgaagaaccaatccttttcccttccatggggagctgatttctatcgtcaatacatatatgtacatgacgcaggttcctctttactggcagctctggacgcaaagatatgccctgcaggcatttacaccgcaactggtgatagttacctgacattgccagaagtggctgaaacagtacaacaggtgctggggacaggggatattcactttgcccaaggtccagatcctttagatgacattcaacaacgttttgacatttcacctatattcaaagatttgaacttcaccccgcaatattcgttatcgcgtggaattcgtgcctacgccgactggctggcaccactactatcacaggagaagaattcatga

SEQ ID NO: 200858 - DNA, 1656 bp, Klebsiella oxytoca
atgattttacagaaagatggctatttagcggtcatgaccgtcaaagacttggcgctgacttttggtgatggaccgacggcccggcccgtactcgacggtgtcagttttgagctgatgccaaatgagatactcgggatcgtaggagagactggtgcaggtaaatcaattttggcacgtgtattgatggatttggtgccaaatggagcgactctgagtgcaggaaaaattacccttaatgggaaatccttcaccgagatgtcttctgaagaactgcagaaggtccgtggtgggaaaatagctttgattggcaccaatgctaaagctttgctggatccggttgaaacagtgggcaaacaaatcgtgcgggttttacagcgtcatcgcccacaatccaaagccagcgcctggcaaacaatggtccagctactggaagaggtcggcatcgttgatgcagccaatcgagctaatgcttatcctcacgaattatcaggggggatggcgcaacgagtggttattgcaatggctctggtagcagaaccggccattctactggctgatgacgccacgcttggtctggatgccaccgtatcggtgcaggtactggatatgctggtagcacgttgccaggcccgcggattgtcagtggtgctcataacccatgatttgggcattatcgcgcattactgccagcgcgttgcgattatgaagcagggacgttttgttgaaatcgatacggtaaatagctttttagcaggacctgcactgccatacagccaggagttgctgagtgcagctcgcgcccatccattgcctgctattgcacgagaggggggagaacgccagcccctgcttaacgttgagaaactggtcaagttattccccgggaaccaacccgggaaaacagtcagagcggtagatggcgtgtcctttagcattgaacgcggtcagacccttgccctggttggagaaagtggttcgggtaaaaccacaattggccaatgtctggttcggttgctaccgatgaccagcggtatcgtaacgtttgacggtcagcatattagcgccatggaaccgaggatgttccggcatctgcgcaagcgtatccagatggtatttcaggaaccctacgttgcgttgaatccacgctggcaagttcgtcatttgatagatgaacctctacgtatgcttgaaaatctctcagcaccggagcgccgcgcaagggtcgctgaaggtctggatttggttaatctgcctccccattatgctgaactctaccctcacgaactcagcgcaggtgaacaaaagcgagtaggtattgcccgcgctttgattaccaaaccagatttagtgattttcgacgaacccaccactgcactggatatcagggtccgggcgcaaattattgagctagtacgcgaactgcaatcaagaatgcaacttactgctttgttcataacccatgatctcaattcagtacggtctctggctcatcaagttgctgttatgaaccgaggtcagattgtagaacatggtcccgttgacagaatcttcaatactccatctgagccttacaccatgaaattactttcagccgaactggctgtggaagaacagcaatccatggcagtcccatttcatactttgagtggggtgtga

SEQ ID NO: 200859 - DNA, 957 bp, Klebsiella oxytoca
atgaaacatcttctgtttactttacgtcggccagctgcagtgctgggactgttactactacttatacagatcatcctcatcctgtttgcaccgattctgatgccgtttgatcccatgcaggctgacccattgaccagcttgcaagctccctcggctattcattggttcggcacagatatcaatggcatggatgttttttctcgcgtcatctacgccacacgcatcaacctgctgattagcgtggtttcggtatttattgcgttcgtcatcggtgtgccactgggactaatcatcggttataaccgcagtaacatgtcgagcctggccatgcgcatcttcgattttattcagtctttcccaatattcgtattgggcatggcattggtctctgtcactggccaggaaatctggaacgtggcagttatccttgctgttctgtttattccagtttttgccagattgattcgagcggaagtcctgtccctgcgtgaccgtcccttcgttgcagcagcacgctgtagcggggctggtgatcgccagatcatgttttaccatttgcttcccaacgccatgcttccggccatgattcaggtatctatctctatcgggatggctattttgctgaccgcaggactctcatttgttggtgctggcgtccgtatgccaactcctgaatgggggttgatggtgtccagcggggcacaacaaatgatccttggcgtgtggtgggtttccctgtttccaggtattgcgatcgtcctctcggtgctcagtttcgctttgctgggtgatgccatccgtgacgggctggacccgcgtaaagttcgccgtgagaacaccgggaacctcgcccctgcaccacaagaagcttcattgaatgaagttattccacatgacccgcgccgggaagcattacctacacagtcggcccctcagtcggcagcatccaggtattga

SEQ ID NO: 200860 - DNA, 1047 bp, Klebsiella oxytoca
atgtttaccactatccagaaacagtgggatatccttccacgttggttacagatagtccttgggcgtctgctgctggttgtaccgcaaatgtttggggtactactggtgacttttttcctcatccgactactgcccggagacccggcagtactgctactgggcaatatggcaactcctgaggcggtagcgcaattacgtgagcgcttgggactaaatcacagtgtctggattcagtttgctgactatatccggcatatatttcagggtgatctgggaatttcaatattcacttccaacccggtcactacagatttgctggaccgggcgcccgctactctggaattaattggttattctcttgtgctgatggttgtaacagctatcgttctggctgtcgcctccgcagtctggcgtgggagttttatcgatattttcgtccgcatttatggtctcgcagcaggtgcaatacccgacttctggataggtctgctattgatattcttcttttacagcttgctgggctgggcagctccgccctttggccgtcttgatgccatccttacaccaccacactacgtaactgggttttataccatcgatagcctgttagccggcgatatggaagctttccgatccagtgttggacggttaattcttccagtactaactttggcaatcgtaaatgccggcgctctaatgaaaatgactcacagtattttttccggcgtctggggaagtgaatttgtgcagcacggccgagcatgtggattgtcagaattccagctggtgcgcatggcattgcggaacagcttgccacccatcatcactatcgtcggtttcattacaggtttcctgcttggctcggccgtattggtggaaaccatcttctcctggggcggtttagggcagtatgccgttcaggccgtaatcaatagcgactatccggcattgcagggttttattctggtggcggcagtcttcgtactgctggtctatctggtggtcgatattttatatgaactggctgacccgaggatccgcgcatga

SEQ ID NO: 200861 - DNA, 1596 bp, Klebsiella oxytoca
atgaccagttttaaaaagcgttcattcattctgtcaaccactgcaatactttggttggcctcatcagggctagccaacgcactgactgcatcagaaacactgttagtgggtgggccgcgtactcctgaatcgttggatcaggaatatccaccaactgaagcaagccacgaagcacgacggaatatttttgaacgactattaagctacgcgagtaaaactgatcctgccagtggtgctaaggttgaagactttagtaaaattgaaggtgacctggcagagagctatgaaatagcacccgatcatcgctctataacttttcacctgagaaagggagtgaaaagcgcagcgggtaatgaaatgactgcggacgatgtaatgtggacctttgaacgaggctggaatatgaaagccactttctattggtacatgacccaaatacttaaaattacagattttagcgcgtttcagaaaatagatgactttaccgtcaaagtaactattccacatccatcactgctgctggatcgcctttgggtcaataacgacttaggcattattgacagcaaagatattaagaaacatttaacaactgatgatccctggggaagtcgctatctctcttctcattctgcatcgttcgctccttattacattagtcgcttctcaccgggacaagaggtggtttatgatgccaacccaaattatttccgcggccctgcaagcatcaaacgcgtagtattccgtgaaatgcccacttcatcaaaccgtcttgcagctttacaggctggttctattgatgtcgccgaatggttgacaccgcgcgaaatcagccttgccgacaagattcctacagttaaagtctggaaagtgtatggtaactacactcaccggctggaaatgaacaacaacactcctccgttcgacaaagtagaagtacgacaggcaatgaattatcttgtccagcgctcggaattagagaaaagtgtttatatggggactgcacgagtcaccaaaagtccgattgcagaaatatacccgtcatataccggtgattatttcccttattccttcgatctacagaaggcaaaagatttgttggctaaggctggttatccgaatgggttcaaaactcagattggctaccggaccggtgagccaattgaagaacaattggcaatcgcacttaagtcaacattcgcccaggcaaatattgatgcgcagttagttaatttaccatcatccagtttggttgagcgatattctaaagggcagatgcctatgttcttcatccgcgatatggcaattgttccagatgcagcttacagcgccaatttattcattaacagcaaatccatggtgaattattcccactaccacaatgcggaagtggataagatgatcgataacgcactgatctctactgatagtacttcccgtgatgccgatatgaagaaagtccagcgtacagtcatcgaggaagcgccatgggtatttctctttaaccccggctaccaactggcagtcagtaagaaagtaacagggttctcctggtacactcccaacagcaatagttggtatgactttagcaaaaaataa

SEQ ID NO: 200862 - DNA, 465 bp, Klebsiella oxytoca
atgcatgaagttacggcaataccggttgatgccacagtgtttgaacctttcggtgttcttctgtccggtgccggacgaaaggcaacacatagccacaatgtggctggcagtatcaccagcattgagactatgcaggtatctgaaatttcgcgacctgattattgcgatatcgacaccatggaaaagcatgacttttccacacaaacattcttcccattggatatggctcgttatttgattgtggtctgtgccagtgatgaagaagggctgccagatataacgcaagctcaggcatttttggtacagggcaataccgcactgcaatatcaccccggaacctggcactgcaatataacgacactgtatcgccctggactctttgcgaatcttattcagaaaaataacagttccgatgattgcacttacatcactgtacctcgcttcagggtgaggctggcgggctga

SEQ ID NO: 200863 - DNA, 927 bp, Klebsiella oxytoca
atgtttcttactcaacaaccgtatccaccacgagatctcattggttacggtaaaaacaggcccgctggatgctggcaaaacggtacccgtctcgccatcaatgtcgtggtgaattatgaagaaggttcggaacgttcctttgccatgggtgacggggatcaggagccaatgactgaatggggtagttatgctttcccggcggacattcgcaacatggcaatggagtcaatgtacgaatatggttcccgagttggcgtatggcgcattttggaagcgttggatgatgccaacatccccagtacgttctttgcctgtgctctggcatttgaacagaatcctgaagtagccaaagcagtggtggataacaggcatgaagtttgtagccacggttatcgctgggaagaagtatttcgcctgactcgagagcaggaaaaggaacatatcaaccttgcaatcgcctcgtttgaaaaaacctgcggtaaaagacctgtcgggtggtactgtcgctatggtgccagtattcacactcgtgaattgctaactgaagaaggtggtttcctgtatgactcggatgcctataacgacgatatccctttttttgttgatgtaaaaggcaagtcacaactggtgcttccttatacctgcgacgtaaatgatatccgcttttggaattctcccggattaatccaggctgaagactttttccagtatatgaaagaaagctttgacgtcctttatgccgaatcggcaaagggtcccagaatgatgtccatcggtttacaccctcggatggtaggccgccccggtcgtattcgcgctctaaaacgattcttcgattatgcaggtcagtacagcgatgtctggtttactacccgtgaatccattgccctggattggatgagccgtcaggaatccaactatgcatga

SEQ ID NO: 200864 - DNA, 1461 bp, Klebsiella oxytoca
atgcaaactttcgatttggttattcgtcgtgcgcaggccgttactgccagcgatatctttcactgcgatatcggtattcgggatggggtaatttgtgctttggcgaaagatttaccatcaggtacaacagaaattgatgcagctggccgttttgtaactccgggtgggattgatagtcatgttcatctggaccaacccactggcgatagctcaataatggcagatgatttcaccagcggtacacgttcagccgcctgtgggggaacgaccaccttgatcccctttgcctttcagcacaaaggaggcagcctgcgagaagcggtagaggattatcatcaccgtgccggtaacgataaggcactggtcgattacgctttccatatgatcattaccgaccctagcccagctgtactcaacgatgaattgcctcagctcattcaggcaggttacacctctttcaaactctatatgagttatgcggctttgaagcttaatgatcggcaaattcttgatgttctggctttggcaaggcgagagaacgcaatggtcatgttgcatgcagaaaatcatgattgtgtcgactggctaacagagcaattactggctgccgggctgactgctcctcgtttccatgctgcctctcgcccccgtcttattgaacgtgaagctactcatcgcgctatctctctggctgaactggtggatgttcccatcctgttagttcatgtctcagcgggagagactattgaacagattcgctgggctcagggtaaaggtttgaatgtttatggtgagacctgcccgcagtatttgttcctgacgcgagaatcaatgggacttgatgatgacttcgagggtgcaaaatgtatctgtagcccacctccacgggataaaagcagccaggatgctgtgtggcgcggcctggtaaatggcaccttttcagtattttcttccgatcacgcgccttttcgtttcgctgggagtgatggaaaaaaagcgcatggtgagaatgcgggctttcatcaggtagccaatggtattcctggggtagaaacccgtatgccactgctttggtcagagggggtctgtaccgggcgcattacgccgcagcgcttcgtagaattgactgctaccaatgctgcaaaactatatggcctctaccctcgcaaaggaagcattgccattggatcagatgcagatttagttatctgggatcaggggcaggcgtttaccgtcaccaattccatgttgcaccataatgttgattacacgccttatgagggcatgactttgacggcttggccagctgtaaccttatcgcgtggtgaaatcgtatgggacggggaggtcaaaggccagccaggaagagggaattttcttcgatgcaataagcctgaactgccaccagcaacaaataaggattggaattataccgactacgctcccatttttgagcaataa

SEQ ID NO: 200865 - DNA, 699 bp, Klebsiella oxytoca
atggcagacaatagcagtagtaatgaaaaacttaggggcaagcacccaactgaagaaattatataccagcgtctggttaacgctatcatcgataaacgactccgccccggccaacatctgaatgaggtgaaattagcggaaagctttgatatcccgcgttcacgagtgcgcagggtattggaaaggttgcgtgacgaagatgtgattgagattcgattgcaccatggtgcgtttgtttcccgtccaacggtagaagacgcaaagtacgtttttgaagcgcggcgacacctggaaaatttagttatccagttggtatgtgaaagagccacctctaacgatattgagtcactgcgaaaacttctggttgaggagcgctcggcgttcgattcaaatcggagcgatgttaatcgaatggcagccaaattccatctacagttggcacatattgcgggcaatcctgtcatcgaaagaatggttaatctcttgattcagcgttgtattttagtgcaatcagtttatgaaacaaaagaaggtgtgctatgcctgactgatgagcatgcctcgcttgtcgatagcctggctacccgaaatattgcagaagcccagcacaagatgcaccatcattttgaacatatcttttccagcctcaatctcgactttccgcccagtagtgaaattgatatctacgattttctctga

SEQ ID NO: 200866 - DNA, 2133 bp, Klebsiella oxytoca; identical to SEQ ID NO: 150274

SEQ ID NO: 200867 - DNA, 1668 bp, Klebsiella oxytoca; identical to SEQ ID NO: 86703

SEQ ID NO: 200868 - DNA, 861 bp, Klebsiella oxytoca; identical to SEQ ID NO: 86704

SEQ ID NO: 200869 - DNA, 342 bp, Klebsiella oxytoca; identical to SEQ ID NO: 86705

SEQ ID NO: 200870 - DNA, 429 bp, Klebsiella oxytoca; identical to SEQ ID NO: 86706

SEQ ID NO: 200871 - DNA, 432 bp, Klebsiella oxytoca; identical to SEQ ID NO: 86707

SEQ ID NO: 200872 - DNA, 798 bp, Klebsiella oxytoca; identical to SEQ ID NO: 86708

SEQ ID NO: 200873 - DNA, 1182 bp, Klebsiella oxytoca
atgttgatgcaacatgtcggagtaggctattttgggtattaccgagcaactgcttatgcgatgaaacactctcttatgcccgagattgcgaagttaagaatgaaggccctgaacttctgggataagcatggcatccgtgccgcagctgatgcttttggcgtatcaacacgaacgctctactggtggcgccagttgcttcgcaccggtggtcctcaggcgcttattccaagaagcaaagcccccctggttcgccgttcaaggcactggcaccctgaagtgctcaaggaaatcaggcgcctgagaactgagctacccaatctcggcaaagagcagatttttatcaggctgaaggcatggtgtgaactgcggcattttacctgtcccagcacgtcaaccattggaaggatcattgccggagctcacgataaaatgcggatggtccccgttcgcctcagtgccagaggcaaaatcaggttgataaaaaaacgctcagtgaagcccagaaggcctaaacagtaccgcccggtaaaaacaggcgaactcatagggatggacgcgattgaactcagaatgggggatctgcgccgctatatcattaccatgatcgacgagcacagcgactacgcgctcgccctggcagttccttcactcaacagcgatatcaccagccatttcttcagcaaggccacaaagctctttcctgttgctatcaaacaggttgtcactgacaacggtaaagaattccttggaaactttgataaaacgttgcaggaagcctcgattaaacacatctggacctatccgtacacaccgaaaatgaatgcgaactgtgagcgatttaaccggacacttagagaacaatttattgaattcaatgaattgttgctttttgaagacctgaatttgtttaatcaaagaatggctgaatatctggtgctgtataacagcaaaaagccacataaatcactcgaactaatgacgccagtggactatattttacgtgagagtaaaaattgcaatatgtggtggacccatacatctccttgccttacggcagctaagaggctacgctgttggtgtctagtcaagcagatggcctcgtgtggttggttaatgaaaattaacgtcctacggggctttcttctttctgcctcacaacaacaaaacactcaaatatcatga

SEQ ID NO: 200874 - DNA, 1341 bp, Klebsiella oxytoca
atgcgcaaagagacagttacaatgagctataaggaactcgacaggcttcagattattcagggatctgtgaacagacatattactcagaagcaggcagcattgcgtatgggtatatctgttcgtcaggttaaaagactggtgcaccggtaccgaaatgaaggacctgccggtctggtttcacgtcgtcgcgggaagcgacccaataatgcgtttactcctgaattcaaagcggctgtaatttctctcctgaaagaacgttactcagattttggtcccactcttgccggtgagaaactgcgcgaggctcacggcttatctttatccacagagacgcacagaaagtggatggtggaggaagggctgtggcgcgaacgtcggcgtaaaattgcccgaatctaccagcggcgcatgcgtcgtccttcgtacggcgaactgatccagattgatggttcgcctcatgactggtttgaggcaagaggtccgcgatgcaccctgatcgtctttattgatgatgccaccagtgccctgatggcgctgcgcttcgccccggcggaaacgacccgcgcctatatggagacgctccggggatacctcacagaccatggggtacccctggctctctattcggatcggcacagtatatttcgtgtaaataacccggagcgtgagggagagctgactcagtttacccgggcgattaaaaccctgggcatagagccaatccatgccaacacacctcaggcaaaaggtcgcgttgagcgggcaaaccagacgcttcaggacaggctggtaaaagaaatgcgccttcaggggatcagcgatattgaaacggcaaacgtatggttgccggagtttattgaggcgtataataaccgctttgccaccgcaccccgtgactctgctaatgcccatctcgatgtacaccattctgaagaagagctgaaccatatcttcagctatcaggcgaaacgagttctctcaaaaaacctcacttttcagtataagaccagtgcgttccagatacgcagtgaagggcgcggttaccggctccgtaattcagttgttaccgtgtgtgagaattttgaaggagagattgctgttttgtatgagggcagggcgctgggctgggaaaaatatgtcgacggacctgaacctatacctcttgacgacgaaaaaagcgttcatgagcgggtggacagggcccgggtaaatctgcgctcaaaatactatgtcaaacctaaagcagatcatccctggcaaacccgcagaacgcagagccatgaacaggcaaagccgccgcgattaccagcaaggaaatctgatgtggacataccggagtaa

SEQ ID NO: 200875 - DNA, 174 bp, Klebsiella oxytoca
atggaaaagactcgcgataaagaagaactgatcgcttttaccctgacgcaggaggtaagcggctcgcgggtggaagaagtctgcagaaagatggggatttgtgaagccaccttttacaacgggaaggagaagtttggctgcatgggcgtgactgagctgcgacatctgcgctag

SEQ ID NO: 200876 - DNA, 255 bp, Klebsiella oxytoca
atgacgggaagaggcattaacacagtacgtatcggcgatgaagtgaagcacatcaccgagctcgatgcactaacactcatgcatgaatggtcaaaacttacaaaagaaaatgcagacctgtatgactataaccgtcaggttaatcggggggggcgcggctttattcttcgcctgatgggtatccatttgcctgaaaaaaaccgtgtttgtctttatggcattaatgccagaaaagaatccatatatcccgactga

SEQ ID NO: 200877 - DNA, 213 bp, Klebsiella oxytoca; identical to SEQ ID NO: 149130

SEQ ID NO: 200878 - DNA, 639 bp, Klebsiella oxytoca; identical to SEQ ID NO: 25154

SEQ ID NO: 200879 - DNA, 366 bp, Klebsiella oxytoca; identical to SEQ ID NO: 25155

SEQ ID NO: 200880 - DNA, 237 bp, Klebsiella oxytoca; identical to SEQ ID NO: 149133

SEQ ID NO: 200881 - DNA, 369 bp, Klebsiella oxytoca
atgaccgatagaggatctagcttgtccatccgccgtcccgccgctctggcgggacggtttctcttcggtgtggtgcggatatgctggggggtgatctgcttcctgttttgggggctcattatcctcacaattccgttcgcgcgcctgctcatcctcctaccgctctcgttcacgatcatcggaagcgctggcgctgcggtcttcttcgcctggcagggcgcatgggccgacgccgggtcggccgcgctgatatcgttcgtcgcagcgctcttgttcggcggctacagctattgcgccgaaaagatggaccccaccgttggcatgatgccgccgttcgcgttctggcgatctgactggcggtacgactga

SEQ ID NO: 200882 - DNA, 891 bp, Klebsiella oxytoca; identical to SEQ ID NO: 157163

SEQ ID NO: 200883 - DNA, 567 bp, Klebsiella oxytoca
atgggagcagtgtattacagtggccccatgagcggacggaacggacaggagcttttatcaacgtgggtgccggcggacgtggctgcggcctttaaagcgcacgcccgcggaacggacggcggcacgtcggccgcgttgcgtcgccttgtttacgaggcgacgacggggctcgctccagccgcgccaagaggagctggaaccggcacgcaggttggggttcgtttaaagcctgaagaacgcaccgcactggccgaggcggcacgttcgcgcgggacgagtccggcaaattggctgcgttcgttggcgatcgttcatttgatgcgacaaccacagtggaacacggccgaaatcgaggaactgcggctgctgtttcgtgaggttcgcgcgatcgggaacaacgtcaaccagatcgcgcatgctctcaacattgccgttcagactggcaaatatccgccctatcagggggcggcagctcgagaagcggcagagctgttgcgcctcgaaatgcgtcgcatcgtggcggtgatgacgggcaacttcgaatattggggaatgcccgacaagtag

SEQ ID NO: 200884 - DNA, 183 bp, Klebsiella oxytoca; identical to SEQ ID NO: 157161

SEQ ID NO: 200885 - DNA, 1191 bp, Klebsiella oxytoca
atgatctgctcttcgctgaacctgctccgcttcatatccgtccgactccttcgcgtcggactctactcaaaatcggtcacatttcaggggagcacgtcacccgccatagcggcagaatttggaaccagtcctcaagaagcgggatcaattgcgacggtttctcagcttggttacgcgctgggcatcgttctagttgttcctctcggggatcgaaatgaaccacggtcgctggttaggtacctcctggctggtgtcgcgctagccctctttgccgcttcgttctcaccctctcttggtgtcctggccactctgagcttcgtgatctgtatgggtacatgtgtaccccaaatcgtgttaccgcttgcagccggtcttacccggcctgagagacgaggacgagtaatagcagcggtacagaccggtctcgtactcggcatcctattttcccgaatgctcgctggcataggcgccaattcgctgagatggcggaacgtatacctcatcgcttcaatcctaatggtgatatcagcggttatccttccggttatattaccccgacgaaggtcagcaattaaacctattccttatctttcacttatttcgtcgctcttgcacttgttcggtagagaaagagacctccgcctttcttgtcttttgggtgccgtcgtttttgccgcgttttcggcattctggacgacaatcagcttcaaactagcgcaggcccccttcaacttcgacttagcagaaaccggtctgtttgcgctttggggcggcattggcggcctagcctcccttttggcaggcggacttatagatcggtttggctatgatagggtgaatgcattctcgatagcgttgactgcattctcattcatcatcgtattagctcttcgcgacagttatatcgccttggtcgtcggagctaatcttgtaagcttctctctttcgaccggtcagatcgcaaatcaagcccgaatttttgctattggcgaggaagtgcgcagtcgcgttaacactgtttatatggcgttcacattcgcggggggtgccgttggaagtgccgccgggggatttatgtgggcgtcttggtcttgggtgggcgtatgtgcgttcgcgttgggttgcgccttgatcgccgcagttggccttggattgatgcgtcgaactttcgatcgcacggtcgaaggttaa

SEQ ID NO: 200886 - DNA, 393 bp, Klebsiella oxytoca
atgaacatcaaacgcctggcgaggcgcttttgcgaaacgacggttgtaatcgttcatgaactcttcggcaaatgcgttcgcagcttccatggaactgatgccctggagcctgagctccttgaccagtcggtcctgaagcgtcaggtgcgcccgttcaacgcggcctttggcagcactggtttctgcacaaatggtctgaatgttcagttcatgcatcgcacggccaaactgggtatcgccgtcgccgccggttgcatttttattgttgatcctgaatacgctggctttgtcgctgtacagcgcaagcggtttgccatgtttttcaatatagccccgggtcgcttcaaaataggtgaaagtagactcagatttcacgaaaagaagctgcattaa

SEQ ID NO: 200887 - DNA, 153 bp, Klebsiella oxytoca
atgcacacccgcgagagtgcccgccgcaatgtccgcatcagcctgaacggttacatttatctggattttgccattagcaaacagacggtaacgcgtggtgaatcgtaccgattggattggcccctatatttccagacactttttatcgcttaa

SEQ ID NO: 200888 - DNA, 1425 bp, Klebsiella oxytoca
atgtctgcatggtggactgatgcgaccagcgggaaaaaatttacggtaacggggatgcgcggtgcgggtgacgagcacagggacggcacaacgtacgggccgaccagacctgttcaggccagcattctttatcctgatggcacatcaactcgcatctatctgggctggaaatttcagtatgtaaatgatgcatcatttacaacatggccggtgccgaaggactggacgtgggtgcaggagttctggattgactgcgatgcggatgtgaccctgaacgctcgggatgttatcagcctgccgtacaaccgtccgtgtgggttcctgggcaagtcggcgtttccgacagtcatcaaacagcaactgctgcgtcgcattgaaaaccacatagacggctctatggactggtggtactcgttcgacgctgccggtgccggtggtatgccgtataacgacccggcggcagacagggtgtggcagttcgcggcaatcagttacgatattatgcgccatatccgctacggctggagtaccgtcgataagctctatactacgatggagaggtatgtccgctgggtttacagcgcaacgacaatcaacgatatcggtgcacaatatctcgcagggaaagtgttgctacagttcgcgtcccgcctgtgcgttccgccgcttgagtggctatataagctggcggtcgcggatggaaatgcaacggtcaaaacgaaactggagggctgcattaaatcattcgcagatgccattgcgacctactacgaggcgcacggtggcgtcagcctgaatggttcccagactaacactggcgtatctaactcaaacgcagcggccatgcgtattctggcgctggggatttatgcaggtcaggacactgacggacgctacctgtcagcctttaacggaattgaggcgcttctgtctgacacgacgggttatatgtacatcgaaaacgtcattaaagacggtccggctgaaatcctgccgacgcgaaactggctgcattaccagctctacgcgatgaacagctacgcctgcgcctgttatctcctgaaccgagagccagcgttcagcatgattaactacacgttgctggcgtcatctggaggtggtggttttcatgaaattgactattgcgtatctgagagtcgccgcgggtcattcaatacctatcagctcgcgatgtataacctgctgtatgcaaagtcggcatcagcaaccaacctcgcagcgaagtgcatggacctcttcgagtcggagtatggacctcagccgggatacccgaagcgcgccttcggctttgacggcacaacgtcagaaagttatgcgatcgcagatattccgtttgtggcaaacgggctggcggacatctggttaagggagcatttcagacagctaagcgacaaaaatttttaa

SEQ ID NO: 200889 - DNA, 156 bp, Klebsiella oxytoca
atggtggagggggacaggccctgcattttccgcatctggcagtgctcgataatgtctttagactttaaatcggatattttcaactccgcgatcggggagcgggatagaacgcgaagggaacttttctttgatgagccgatttttatgtttggatga

SEQ ID NO: 200890 - DNA, 1695 bp, Klebsiella oxytoca
  misc_feature (1673)..(1682): n is a, c, g, or t
atgaaattagatcttaaatcatcgccgcgccatattaagcgtttacagaatatagcaaaagtcattagcggcttaggcgatgtaagagttgtaatagacgacaataccaaaggaccgtattttgatcctgtcaataaagtttgtgttttaccaaacggcgattatagcgatgatgactttgtcagtctgattgaaggttttacctgtcatgaagctggtcatggtcgctataccgtcagtgaggtttacagtgacgcctttaatagtgttctcatgtcatctgaagggtttacacgcttcgatgacggaatgaatgcagagtttgagagcctcgctgagaaacgtaaagcttatagcagggcaaaacgtcttaccgggcttataaatctgttcgatgatgtacagatggaagagaaggttggtaacgattatccggatgcaaagcggcggcttgcagccacttacgcactgatggttaaagccggaaggatgactcctgatatatcttctcgtccggaaaatcctgtcctatttattgagtggtatctgcttaactcattgcgagtaaaagtccttcagcaggtaggtcacaaagaaaccctcgatccgttttttgactatgcccaaaagatactttctccagtaatttctgatgttgaggaaatttttcatgatgctcttggttgtgaaaatactcagggctgtgaatcccttgctcgtaagaccctggctcttttagagagactgcgggatgaggcaaaggaacaacagcagcagacagagcaggaggagcaggaggcatatgatgaatccgagaccgataccgataccgaatcagaagataaatcgcttacgtcgactgatagtcgtgaggatgattctgaggacgatagtgaaggtcaggcagatacttccgataacgctgatcttgctcaagagggatgttctgagccttcagaacttgctgaagataacgagggaaataatgaacccaccggtggcaatcccacgggtgataacattattgaagacgatactgatgcgattaacccttccgagagtgaatcagatgaagccagttcgactaacgttgaagatgaaagtaacttttcatcggctcaatgggagatactggcagatttgttggatgcctttcttagcagtgatgaggatagcgaagattatcacgatgctttggctaaagagattgaaggtattgcatcaaaagtatccgatgacgtgaaagccgaattcggtgcttctgaatgggatatccctgatctccttatcgatttgaatgtttacaatgaggctttgtctctgagtcattcaatcggtagcgacttgtctgttttacagcaggttaaaatgcgtggccgaaacaaaactcatgagcgtggaattaccttcgatggaaatcgattaattctgtcacaaatgggagttcgtgatgtcttcagagctcaaagcgaatctaaaaatagagggcatgttggcctcgtattagttcgtgatatttcagcgtcaatggctaatgatgaaagatatattcatgccattaagtcagatcttgctttatcgatggccgctgaaagtttgtcaaaaatgcatgtctccaatatagtttttcccttcaaggaaagtgaatttgagattatcaaaacgtttgatcnnnnnnnnnnatcaaagcgttga

SEQ ID NO: 200891 - DNA, 987 bp, Klebsiella oxytoca
atggtcaggcaaaagtgtagcggtattaggcgcagctatttagacggcgagggcaccctcacgcacattggcgctgccctgcgctcacatacttacacctgcccaggttgtaagagccccctgaccccggtaatgggcgagttcaacgctaagcactttcgccattcggaagaatgctgtgcccttgaaacctatcttcacaagtgcggcaaagaagcattcttctatcgctaccaacaagctctcagccgtgaaatgcctattagccttgagctggagcgccgggttgcctgtaatggttctcgtttagccttggttagagacgaagcacgtcagtgcgtaaaatccgtgcctgcacgctacaacttgactcaatttttcgatcaggcagagctggaaaaacacgataaggtcacagggctgcgaccagacgtgatgttgtatgatacgactggcgaaaggcgttgctacgtagagatttgtgtcacacacccctgctctcaagacaagatcgaagccggtatcccgattcttgagtttaaggtccaatctgcctctgatattcagatgttgcttaccggggcctactcgatcaaggagaagatcctgagagtattcaactggcttcccccgtttcaatctgtggacacctgtagcggcgtctgctcagtaggtaacgtggatatgtctgtctggagtttaagtggttccggccgactcaacgaacaaacgatgccgctcgctgaagtggatttaacaatcaattctgacgtgaacacatggcctagatcgttaggggccgctgagctggctgataacttacgagcttttatccgtcacgccgatcctcattcactatttcccaactgcattatgtgcgagcaagcaggccgatgggaggatggctatctgcaatgtcacagtaaggcaaagatcgttccctacaccgaggcccgtcagtgcgccaattacaaggttaaggcatga

SEQ ID NO: 200892 - DNA, 417 bp, Klebsiella oxytoca; identical to SEQ ID NO: 129191

SEQ ID NO: 200893 - DNA, 1005 bp, Klebsiella oxytoca
atggaaaacattgcgcttattggtatcgatctgggtaagaactctttccatattcattgtcaggatcatcgtgggaaggccgtttaccgtaaaaaattcacccgaccaaagctaatcgaatttctggcgacatgcccggcaacaaccatcgcgatggaagcctgtggcggttctcactttatggcacgcaagctggcagagttagggcattttccaaagctgatatcaccgcaatttgtccgcccattcgttaaaagcaacaaaaatgacttcgttgatgctgaagctatctgtgaagcagcatcacgtccatctatgcgtttcgtgcagcccagaaccgaatctcagcaggcaatgcgagctctgcatcgtgtccgtgaatccctggttcaggataaggtgaaaacaactaatcagatgcatgcttttctgctggaatttggtatcagcgttccgcgaggtgctgccgttattagtcgactgagtacccttcttgaggacagtagtttgcctctttatctcagccagttactgctgaaattacaacagcattatcactatcttgttgagcagattaaagatctggagtctcagttgaaacgaaagttggacgaagatgaggttggacagcgcttgctgagtattccctgcgttggaacgctgactgccagtactatttcaactgagattggcgacgggaagcagtacgccagcagccgtgactttgcggcggcaacagggctggtaccccgacagtacagcacgggaggtcggacgacattgttagggattagcaagcggggcaacaaaaagatccgaactttgttggttcagtgtgccagggtattcatacaaaaactggaacaccagtctggcaagttggccgactgggtcagggagttgttgtgtcggaaaagcaactttgtcgtcacctgtgctctggcaaacaagctggccagaatagcctgggcactgacggcgcgacagcaaacttacgaagcataa

SEQ ID NO: 200894 - DNA, 1005 bp, Klebsiella oxytoca; identical to SEQ ID NO: 53712

SEQ ID NO: 200895 - DNA, 627 bp, Klebsiella oxytoca; identical to SEQ ID NO: 165142

SEQ ID NO: 200896 - DNA, 378 bp, Klebsiella oxytoca
atgaaggcccagattgactggataccccttagtgaaggtgctgttcgtccgtcccagggaaaaacactggccgtgatgcaggtttgcggcggctcgcagtcatttaatacggtgaaccagatgcggatacttggccgctggatgcgaatgttcaccattcccaatcagtcatcagtgccaaaggcatggcaggaattcgatgatgaagggcgtatgaaaccttcagcctggtatgacaggattgtggacgttgccgaagagttgttcaaaatgacgttaatcctcaaaggacacacaggctatctggccgaccgctacagcgaaaggaaagaaagtcatcaggagctctctgcacgggtcaatcaggaaaaaatctga

SEQ ID NO: 200897 - DNA, 837 bp, Klebsiella oxytoca
atgctggcagatattaaatattgggaaagcgatgcccagaataaacattatgcgattgcccactttaacgtgtggaatgcggaaatgttgatgggagttattgatgcagcggaagaggctaagtcgccggtgattatctctttcggtaccggatttgtgggcaatacctcgtttgaagatttttcgcatatgatggtttcgatggccaaaaaggcgtcggttccggtgattgctcactgggaccacgggcgcagcatggagataatccacaacgcctgggtccacggcatgaattcgctgatgcgcgacgcttcagcctttgattttgaagagaacattcgcctgaccaaagaggcggtggatttcttccatccgctgggtattccggttgaggcggagctggggcatgtggggaatgaaacggtctacgaagaagcgctggcggactatcactataccgacccggatcaggcggcggagttcgtcgagcgtaccggctgcgattcgctggcggtggcgattggcaaccagcacggcgtctatacctcagaaccgaaattgaattttgatgtagtgaaacgcgtgcgcgaggcggtatccgttccgctggtgctgcacggcgcatccggcattagcgacgcggatattaagcaggccatttcgttaggtatttcgaagattaacatccataccgaactgtgccaggcggcgatggcggcggtacaggagaaccacaatcagccgttcctgcacgtagaacgtgaagttcgcaaagcggtgaaagcgcgcgcgctggagaaaatcagactgtttggttctgacgggaaagcggaatga

SEQ ID NO: 200898 - DNA, 147 bp, Klebsiella oxytoca
atggaacagatagcaaaaccgcactgcggcgccaggctggatcgcctgcctgactgccgctggcactcttcaatgtttgccatggtcgctttcggattactggtctgctggagtaatgccgttggtggattaattctcgcgcagtaa

SEQ ID NO: 200899 - DNA, 918 bp, Klebsiella oxytoca
atgaacaattcccccgtcttgaaattacaagacattgcaagctcaagctctacagatattgaagagctgctttcacgagccaaaatgatatcagtaaaacttggcttacaagatatttcagactggcttgagcacgagataaatggttatccttcatttgattctctccctgcatacagggttatcaaaaacgttcctattagagcctataacccatatgctgggtggattccatttcagttgggtgatatgagtgaaaatcaccgtgatgtttatgaaattctaacaacattacatctcaccaactctgtttctatgttagtagagttcgctaaaagtaatcagactttatacagtgacttaccccctgtgcaatataactttttacagcaggcgagcgattgtgattttcgccttgcatggagcataaatccagcacagattacaaaaatactttccaatgtgaaatcaaagatacttgattgggccttattattagaaagtaaagggattttaggcgaaggtttattattctcacaagcagagaaaagagaggctgcaacaatgactgttaacaatattaataactttaacggcaacgtgcataatgctggcgctattggtgctggtaatacaggagatattcaccaacagaacagtattacttcaggtgattttaactcccttgcgcgtcagctaaaagagcatgggctggatgatgctgatgtcatagaactggagcagcttgttaaacagactgataaaccgacttcaaaaggtgaagttgaaaagggctttggggcttggattggtaagatgacgggaaaggctttcactggagggcttaaaatcgctggcgcagtggctcctgctgttcttaccaatgcgctttgccattactttaacattcctgtctga

SEQ ID NO: 200900 - DNA, 1152 bp, Klebsiella oxytoca
atgaatgtggttgatttatactcaggggtaggcggtttaagcttgggggcaacgcgtgcgggctttaatttagctggggccgttgaaatagataagcatgctattttttctcacaaattaaatttccctgagtctgcacatctccataaggatgttagtaaacttactgctcaagatattttatctggatgtaatgtcaaagaaatagattgcgttgtgggcggcccaccatgtcaagggtttagttctataggtaaaggtaatgctgatgatacaagaaatgagttgtatgtacatttctttcgactagtgagtgaattgtctccaatttgttttttggctgaaaatgttccgggaattatgaatgaaaaatataattctgtaagagaaaaagcattttcattagttagtgatcgctacactttattgcatccgattaaagttaacgcttcaaattatggtgcgccgacaactaggactcgtatattctttattggtttcagaaaggattattcaagccagttaaaggagtctgatttcttcccaaaaaatattattgagcaaacttttattaaagacgccttatacggcttgccgcgaataattaaaaaagaatggcaagaagaatcacaaggttggcgaaaagtgaaaatggatagaaaaggatatttctatgataggctttgggggcatatccctgacagagttggagatgccgaatctttaaaaaaactagaggatggtctggtatcaggattcttgggcacagtccactcagacgaaataataaagagatatggcagtctttcttttggtgaaacagataagatttcaagatctcagcgacttgatcctaatggtttttgccctacattgagggccggaacaggtagtgacaaaggaagttatcaagctgtcaggccaattcacccgacgcaagcacgtgtcattgcaccccgggaagctgctaggttgcaaggttttcccgattggtttcgattccatcctactaaatggcatagttttagacaaataggtaatagcgttagtccattagtttctgaggctatgctattacctatctataattattgcttaagtgttaaaaaagaactttcgaataccatggtactaccttgtagtattcgataa

SEQ ID NO: 200901 - DNA, 993 bp, Klebsiella oxytoca
atgagcaccggtggaagtatcccatatcatttaaggcaaaataaggccattgaaaggaacctgtttatagagtccttgagaagattgaataattacaccaatatatccgagtatgaatatattggtttcggagggccattccttgaagattttaaacaggttcataatcttttaaaagtcaataagatgatatctattgaaggtgatgaaaatgtatatcgccgtcaacagtttaataaaccactatcatgcatagatctaggggaagaacctgaaatgagtggtgatttcatcaatcgctataattttgatgaaaaaaccataatttggctagattatgcaatgccttccgaactcaatgctcagttgaatgaaattgttaatttaattactaagttaaaaccaaaagatatttttaaagtcacattgaacgcacatcctgaaacattaggcaaagatccgggtgagcgagacccaagaccctatagatatagaaagataaatgaaattttaactgaaagctttatgccagttgacactaccgaagaagatgtcggatttaaaaaatatcctacattactgattaatgcattgaaacgagctgtcgggaatggtttaaaagggcgtaacgatataagaattcaccctttaacatctttcgtatataaagatggacaacaaatggtcactttaacggcaatcgttttggacaatacagacgaagaggaagctaaatttattgattcctcgagaataagaaattggccattttatgctggggaatggcgaaaaccaaaagatattaacgttcctgcaatgtccttaaaagaaaggattcatattgaatcgttattgcctgaagctacagttgagaatattcatgaagaattaggcttctatattggatccagtacagctggagccaatatagaccttaataactttatcgaatactacaaggtagtaccatggtattcgaaagttcttttttaa

SEQ ID NO: 200902 - DNA, 1425 bp, Klebsiella oxytoca
atggtttcgtcaaacgttaaaatcacagcttttccagccaaaagattttttgtggaaatgctaactcgagacattgagttgtctgactctatattggatttattagataactgtttggacggggtattacggaagaacaatttcacacccgaacagacctttggtaaatcagacgtatacaatggttaccatgcgcacattgagtttgacgaaaactgcttcaagatagttgataactgtggtggcattccaggagagcttgcggagaactatgcatttagattaggcagaccttcggaaagggaagctgaagatcttcctaccattggtgtatatggtattggtatgaaacgcgccatatttaagatgggaacatcagctcaaattaaaagcaagacagatacggaacaattctcagttaatatatcacctgagtggatgactgatgacaataattggtcattagatcttgagagaagtgatgtagatttaagtgaaacaggtgtcagcattgccataaatgatctaagaaatgacatcaaggcttcattatcaaaagaccgcgattttgaaagcgatttaataaacattattgctaatcactacagcttaataatcaagaaaggttttgaggttaagattaatgggaaggttgtaaagccaaatagcacaactcttatttttgacgagagttctattaaggataatacggatggcatagccccatatatatataaaaacgaatctaatggtgtttcaataaaggtagctgttggtttctatcgtaatttgccaagtgatgaggaagaagaacaattattgtcaggtcgttcaactacagaaaaagcagggtggactatcatctgtaatgaccgtgtcgttcttcatgccgataaatcaaaattgactggatggggagaggcgggtgttcctcaatatcacacccaatttattggtatttcaggtgttgtgatatttacatcctcaaaagctgaactattacctataacaacaactaaacgtggtgttgatggtaattcagaactatatctttccacaaaagacttcatgagagagggactcaaatactttactgattttacctataaatggaaagctaataacgaagaaagaaagcagcttataagcactgcttcgaatatggtatctacgactgaaactgatttcgcaaaatcaattccacaggaaaaatggtcgacagtacggcgttccatcggtggtcaagtttttaaaccaaaactcccgatgccacgggaaaccgatcctttacgtcagataaagtttagccgtcgacttagtgaaataaaattagtttcagaattcatctttgatgatgcgactcaaccaccaactgaagttggtcaatattgttttgatgaatatttaaaaaaggctaaacaatga

SEQ ID NO: 200903 - DNA, 468 bp, Klebsiella oxytoca
atgcaaaagcccaacagtctgcgaaaagccttaactgatgcggtgccggtactgcgtaccaaccctgatatgctttgccttcgcctggacgatggcaacaatacggcgacgctggcgcgctccctgtcgtttgaaaagcggtacacgcttaacatcgtggtgacggatttcaccgacgatattgacctgttgtttgtgccgattatggcctggctgcgggtcaatcagccggacatcatgacaaccgacgaggggagaaacaaaggatttgcctggtatgctgacatcaataacgacagcagtatcgatgtcagcatcagcctgttgctgaccgaacgcacgctggttaaagaggtcgacggcgcaatgtacgttgagaatatcccggagccgccaccgccggagccggtaacgcgccctgttgagatgtggagtaagggcgaacgggtgagcaaatggaatgaataa

SEQ ID NO: 200904 - DNA, 447 bp, Klebsiella oxytoca
atgaataatttcaaaccctttgaggataagctcgccggattgatagcggccctttctcctgccgagcggcgtcggatgaccgccgacattgcgaagaaactgcgccagcggcaacaacagcgtattaaatcgcagaaagcgccggacggttcgccctttgccccgcgtaagcgccagcccgtcagggcaaagcaaggccggattaagcgcgagatgttcgtgaaactgcgtaccaaccgctatatgaaagcgagcggcaacgacagcgctgcggttgtggaatttaccgggaaagtgcagcgtatcgcccgtgtgcatcagtatggcttaagggataaaccagagcctcatagcaactacattaaataccataagcgacaattgcttgggataaacaaaaaagaggaagatattataaataatattgtactggggtatttggagtga

SEQ ID NO: 200905 - DNA, 666 bp, Klebsiella oxytoca
atgaatacggatgattatgacaaaactttcagtattaaaaagattcatgccagaaactctaagcgggataaaaaccttcttgcttttgaaaaagcgcatgagattagaaagtttgaaattgacctgtactggaagcgaaccacttatttttggaccttaattgctgcactttttgcaggatattttttacttgcctcaaaagcctccagcgatcctttaaaacacatcgacttatatctaacattcatatcactaactggttatattttttcgtttggctggtttctagttaataaagggagtaagttttggcaagaaaattgggagtttcacattgataagcttgaggataatataacaggacctttatacaaaactattttatgtagaaaagataacgaaaataaaaacaatactctagcagatgatgttttttcccctggtagtttttcagtttcaaagataaatcaatttattgctatatatactatgattctatggggcgggttaatgatcgtatcactagagtctttttggcatctgctgtttttcagcatggttttatactttgtcactagtgtgatgtataaaaaaactcgcagtaacataaaagatcactccgcccctctaaaaataaaggcaatagaaagaaaaaccaccttataa

SEQ ID NO: 200906 - DNA, 186 bp, Klebsiella oxytoca
gtgcgaaaccctgaaatcaatgaccgctggaaggataagcgcggcgaaatggtcacggtgaaagatattgcctttaaccgcgtaacgtttgttcgcgagggttacgaatttccctgcatcttcccacaggaaaggtttgttaaagagttcagttttatcagctggggtatgcctgatgcgaaatga

SEQ ID NO: 200907 - DNA, 1761 bp, Klebsiella oxytoca
atggttgcaacttctaaattacatcttttgaaagtcgcatcatctcgtgctgacttggcaaaattgctagatgttaagttggtttttttgacaaatgttctttacagaattggcacagataatcagtataaagatttctctgtacccaaaaaaggtagaggaaccagattgatatccgctccaaatgaaagtctgaaagaccttcaaaagcgaatagctgatcttttaatggagtgtagagatgagatatttaaaatcaaaaaaatcaaaaacaactattcttttgggtttgagaaacataaatcaataatttcaaatgcttttagacatcgcggaaaaagaataatacttaacatcgatctcaaggattttttcaatagttttaatttcggacgtgtaagaggatactttctatccaatagggatttcatattaaatcctatcgtcgctactaccttagcaaaagctgcatgctataagggtagtttgcctcagggtagtccttgctctccagtaataacaaacttcatttgtagtatcatggatatgagattagctaaactagccaagagcttagggtgttcctatagccgttatgcggatgacatcactttttcaacaaataaaaaagaattcccaatcgaattagcaatatctcaccatgagggagtggtattagggagcgttctagttagagaagttaagcgtgcaggctttgatattaatgatgccaagacaaggctttcatataaatccagtaggcaagaagttacgggacttactataaatcgctttgttaatgtggacagaaattactccaataagacaagagcactagctcattcgctttatagcaaaggcgagtataagctaccagatgaggatggtaatctcgttgttagtagcatcgaaatacttgaagggagatttgggtttattgaccagatcgataaatttaataatatacaaaataaattgagcaagcagcctgacaaacatgcacctgttcaaatcacattaaaaaattacagattaaagctgaatgtacgtgagaaggcttatagtaaattcatatacttcaaatattttcatgggcacgtttccccaacaatattgacagaaggtaaaacagatcgggtttatttgaagtcagctattcgttcactttcttcaaaattccccgaattgctcaagaaaagcgctgatggtaaacgcaatgatattgatttgaatattttcaaatccgatgaaaaatcaagttatttcattaatatgtctggtgggagcgcggatttaaagaagttcatcgagagatatatggatgaatattcaaagtattatggttccatacctaagcaaccggttattatgttgctggacaacgattctggttctgatgagattttgaatttccttaaaaataaagtgaaaagttgtccagatgataccgctacaatgagaaaaatgaaattcatccatgtcttcaaaaatttatacatcgttttaacaccattaagtgccactggtgagcagaccgcgatggaggatctatttactcatgatactttatctatcatccttgatggtaaaaagtttaataaaaagaacgatggagactcgaaaactgaatatgggaagcatattttctctgttaaagtagtgagggataagaaacgcaaagttgattttagtggttttgaagtaatattcaatacttttaaagaagttttcgaacattataaaaaaataatcagcatttag

SEQ ID NO: 200908 - DNA, 309 bp, Klebsiella oxytoca
atgactgataaatgggctgactaccttatttctaaggtccggtacaatgattcccacactcacattacccacgtgtatgtacacgttgataagggggactctgttggaggggggacatcagaaacgcgacaatgggtagtaaataagatcgatagtggttatacgttttacaccatcttcaaagacgataatggtaaatggagcaagggacagaaagtgataaaagaccccgtaaacgggactaactacatcactacaaggcccaatggaaccgctaaggacaaccttgagaatctcccggaatactga

SEQ ID NO: 200909 - DNA, 399 bp, Klebsiella oxytoca
atgagactgaccaaccgcaaacaagaaatattgagctacttcgaacctgataaacgcgactgggtgagggatgagatcggcgcacctccacttgatgtatccggcgtggcatacctgctgcatggaactggtattaacaataaccagcactggctcgaatctaccgggcgcacactggaagcaatggtgaaagacgggttgcttgagagataccgtagccgggaggcaaggagcatcattctgggcggcgtgatgaccgctaccgctacagttgtccgttatggtcttgtggacaacgtctcagtggttcgcaatgcggaagtcccagatgattcagtatcaggaaatatgtatactactgtactaattactcccctcaattttttcatttatttttag

SEQ ID NO: 200910 - DNA, 762 bp, Klebsiella oxytoca
atgtgtgtgtatttatgtgggtgtataggtgatctgatttttatttcgcctcataagaaaagcctcagcacttttttacagtctatttttagatttagagtgtcgaaatactctcatgttgcaatatctttagatcaatataatgcgattcactcatcaccaattgtcggtgttaaacaagatattatccatggattgcttaataatacaaaatatgacttttctgttttcagaaacaaatcaattcaagaaaatgagccacttcttattgatttgagaaattcactgctttatcatacttctcagggttacaactatgctttttttattaaaagcccatggcattcatctttttgctcagagcttgctgttcgtgctttccgtttagttggcataaaaatatctaaccattctcctcaaaacacgcttcctgttgatatttataagtatgttctggaagcgcctgactggatagatattacggattattataaaaaagattatttaggggattcatattttaaagtatatgataaagcagcagaatttatgatgaaggtcgaaagtctcaaccaaaatatgtcatttagtcagaagttgatgcttgataaattaaattatgtaacgaaagatagtgaaagtccaaccaattatagtcctgctagagattattggacaaatttattaggggaaaggtttagcttgaagtttttttcaaaaaattatcttaggagacttttcggaaggactaaaaataaatga

SEQ ID NO: 200911 - DNA, 222 bp, Klebsiella oxytoca
atgttaaaacagaaaaagatcgaggtagtgattgaagaactggcacgcctgcggggacatgatctgaacaccgccgaaatgctggagttacgctgccgggtgtccggcacgttctccacgaaagaacgacaggcccactggatgaccacttcaaccttccagtggaaaatcccgattcgccacgcagatgaactggagaacattgttctggaacaattataa

SEQ ID NO: 200912 - DNA, 492 bp, Klebsiella oxytoca
atgagcgttatgaattttcagcacctcaatccgccgcagcccgatgcgcaggcatatggcttttccgggcgccgtatgcagcgcatgcgccagcttcagcaatcggttgaagaagaggaactccctgaatgcccccattctgatgctcatctgatagcggtgagcaaagaggcaaaacaaaatccgatacaggcatttcatcttatcgcggaagggatcccacatcagcaggctattgccagactaaaaggcagcgctcgccagctcagtcgttttacccgtcgggctatggagaaagtttatcctggctgggagttccttgatgccgaagaccagaacatggcggcattccagcacagcatgattaacggtgacacaaacggctatcgtgcaggttttaatgctgccctgtcggcgctggggaagtttgtagagcccattacgtttgatgacatcaccaatagcgttaattcgctggtggaggaagcatga

SEQ ID NO: 200913 - DNA, 1140 bp, Klebsiella oxytoca
atgaagatagtgatcgcaccggattcatacaaggagagcctgagtgcgctggatgtcgcaaccgcgatagaacaaggttttcgggaaatttacgccgatgcggagtacgttaagctgccggttgccgacggtggcgaaggaaccgttgaagccatggttgccgcgacccagggatgccggattgcggtcaccgtcaccggtccgctcggtgaacccgtggaggccttttatggcctgtcgggcgacaggcagtgcgcgtttattgaaatggcggcggcaagcggcctggagagcgtaccgccggcgcggcgaaatcctttgctgaccacttcatgggggaccggcgagctgattcgccatgcgctggatgccggagtgagccaaattattatcggcatcggcggcagcgcgacgaacgacggcggcgccgggatggtacaggcgctgggggcgaaactgctgaccaaagataaccagcagattgccgccggcggacgcgcgctggagagcctcgcgcgcatcgacgttagcgaacttgataaacgcctggccggctgtcgtattgacgtcgcttgcgatgttaccaacccgctgacgggaccacagggtgcgacggcggtatttgggccgcagaaaggggcgacggcggagatgatcccctgccttgacaacgcgctggcccattttgccgatattatccatcgcgatttagaacttgatgtgctgcatcttgaaggcggcggcgcggcggggggaatgggcgcgggcctgtacgccttttgcggcgcaaagctgcggccgggcattgagattgtgaccgatgcgctccatcttgccgatatcgtggcggatgcggacctggtgatcaccggcgaagggcgtatcgatagccagacggttcacggcaaagtgccggttggcgtggcgagggtggcaaaacgctacaacctgccggtcatcggcattgccgggagcctgacggctgacgtcggcgtcgtgcatcagcacggcctggatgcggtattcagcgtgatttattccgtttgcaccctggagcaagcactggaaaatgccgccgaaaacgtgcgtatgacggcgagaaacgtcgccgctgtgctgaaaatgggccggctattatag

SEQ ID NO: 200914 - DNA, 189 bp, Klebsiella oxytoca
atggcgccggttctggttgaaggttgttccgtttttggttacggtcgcatcgataagcgttcagtgctggggtggagtatgagcagaaatggcattcgttcactggttattgttctgaccatctgccttgttgcctggtctgcgaccattataaaaattctgcatgttacgggagtatttaatggctaa

SEQ ID NO: 200915 - DNA, 393 bp, Klebsiella oxytoca
atgaacatctcaacagtaaacgagctcattcagtcgctggagtcggcgggcgagctgtcgatcagagagcagaagttcctggagctggctaaagcgtaccagcagctggctgcggagaatgtggcgctgaaggcggcaattgatgcaaccataggatggcagcaatctaccgatgtggaaaacgttgaaagcgtgagaatgttgctcgatatcaatacccccgccaccgatcgcatcgtagccgggattaagtctgatgaggcgaaattcattttccaaagcattcttgataatcctgccgtaaccgaccttggctctcttgtcgactggctggagcagcacgccaatgatagcgccgcagccgtgcaggctatgcacgagggggccaaatga

SEQ ID NO: 200916 - DNA, 315 bp, Klebsiella oxytoca
atggctgagctacgcgcaggttgtcaggcaatgattattggcggcttctaccgcaccaatgatgggaagtcagtgctggttgtagggttcgtgccgaatggctctcagttcacctggaatggagaggtatacgccgaaccagtgccgatgggcgatgcatggttaatctctggtgacctgatagctcgggatggagccacgcgcgaggtgaaaaggctggatttcgcactgatgccagggaaatacctcataccaatcgacggcgacgacttcagcaatgaagaccagtaccagaagggactggagcatgcctaa

SEQ ID NO: 200917 - DNA, 771 bp, Klebsiella oxytoca
gtgtcagacctgttattgatggtaatcaaaatgaaagaatgtttgattgatggttgtgatcgcgatgccagctctaaggctcacggacgaaatggatattgctcggcgcattaccaacgcatccgcatacacggtgatgcaatgacttataaaaaggtggcaaaaccattcgaattcaaaaaatgccttgttgacgactgcgaaagaagcgctaaccgtatcaatggtggaaagcgaggatattgctctatgcactatctacgagttaagcgatctggcgacccttcactcgtaaagcaggcgccatcccccgcgaaagacttcattgaggcatttaaaaaccacgactctgaggaatgtctgatatggcctttccatcgcagcaaaaaggacggctacggacgcattcatgagtcaggaactgagaagctccttacagcctctagagccatgtgcattgcggcgcatggggagccaccgaccaaacgccacgaatcggcccactcctgcggtaagggtcatgaaggatgcgttaatccccgtcatctttactgggctacgccagaagagaatcagggtgatagggtacttcacggaacatcaaacagaggtgaagcccaatggaaacacaaattaactgtggagcaggtgcgggaagtaaggttgctactcgactcccacaccctaagagaactagctgacatgtattcagtgtcgaccagggccatccacagcattaaaaccagaaagacttgggcttggcttgattaa

SEQ ID NO: 200918 - DNA, 501 bp, Klebsiella oxytoca
atgctgattatttccacccaaattgacctgaacggcgaacgctggtttttccctttcaagaagccagaaggcagcaagaagaaatttaccccagaagaagaatcgctgttcaaacttcgcctgctggtggtcagcagtgagaatccagaatatcgctcacgcaacgctttggtgcgtcgccacatcgataagatggatgcaggttaccaggtagggacaaaagattttaaccttgccagcgtgggcgatatcgactctgttgatgacttgctgatcgacaacgttgcccggtttctgctgaaagactgggatggtgttggccagttggtagatggcgcagaagtcgcaatcgactacacaccagaaattgggattgtcatgctgaagcagcacccggaactgtactggcggatactggccgaggctgcaaatattgctcagggtaaagagcagcagactcaggaaaccgtaaaaaagccctcgaagcgcagcaatggttga

SEQ ID NO: 200919 - DNA, 168 bp, Klebsiella oxytoca
atggctggcgtgccgctcccgttgtccctgagcgatatagaccgctatctggtttctcgttccattctgattgatcgtaccgagtttgacgcggcgatacttgctcttgacgatgcatggcgcaatgagtgggcgacggagcaaaagagacgggacaataccaaatag

SEQ ID NO: 200920 - DNA, 3354 bp, Klebsiella oxytoca
atgacagaacaaacatcccgtctcgcgattattctcgacagctccggggcagagaagcaggccgatagcctaacggttgctcttgataaaatgacccagtctggtgataaggctgtaaccagtattttcaaagtaactaaagctactgatgaagaaaaagaagcgctcaataaattgcgatctgccatcgatcctgtcggcgcggcaatcaatactgttggtcgtcgatttagtgagctaaaaaaatactttgataatgggctagttgatgaggaggaatttcgttcactgtctaagatgctgaacgacactaccgaggaattaagcggtgtcgctcaggctcaacgggaagcgaaaaaggcaggtgaattagcaaccgcgcagcaggaagcgcaggcgcaggcatttcagaggatgctggataaaattgacccactgtcatctgcgctgcgtaatctggatcagcagcaaagcgagctgaataaagcccttgagtcggggaaaattaacgcttcgcaatatgatgcctacagcaaaaaactgcaggagactcgccgggaagtaacaggggaagcacaggccgaacgagaagcagcaaaagcccatgatgaacaggttgcggcactgcgccgactggaagctcaactcgatcctgttggtgaggggtttcgccgacttgcccaacagcaaaagcagctcgattctgcaaaatcatcggggctgctttccccagagtcatatacgaagttatcgggcacattgggtgaaatgcgtgccgagttagaaaagacccaaacacagtttggaaagacaggtatgactgccaggcaaatggctttttctatgcgccaggtcccaatgcagatgactgacattgtgacgagcctgattgcagggcagccgccaatgatggttttgcttcagcagggcggacaactcaaggatatgttcggcggcattgggccggcgattaaaggtgttggcggctacgtcactgggctgatcaaccccttcactttggctgctgcggctgtcggtgttcttggtttggcttattacaaaggctctcaggagcaggacgagttttacaaatcgctgaccctgaccggtaatctggttggtaaaacatccgggcaactggctgacatggcggcccgcgtatcagtcgcagcaaactccacaacaggcgcagcggcctcaacactgaatcagctggtatcatccggtaaagtagctggcgactctctggagcgcgtgacaaccgctatcgttaagaccagcgaggcaacaggcattgctaccgataagctggttagtgattttaacgatatcgccgccgaccccgttgcagccattaccaagctgaatgaccagtatcacttcctgacgctggcaacctacaaccagattaaagcgcttcaggatgaggggaatcagcaggaggccgcgcgggtggccaatgaatcttattcctcttcgctaattcaacgttccaatgacattaaagaaaacttgggcctgttggaaaaggcttgggatggcgtttggggatcagcaaaaaaagcttgggacgcaatgtttgatgttggtcgtgagcaaacccttgccgataagttggccaccttaaacgaaaatatcgctgaggcccaaaagggacaggcagaaggaggattttggaacgggtttagtgctcgatttagcaatcttcctgagatgctcaagcaaagggatgcaatacagtcgcaaatcacagcagaagatacgctaaatggaattttgtcagaccacgacaaagcagaacagaagcgcattaaaactcagcaggaggcggatcgtgttaaccagcaatatctcagcaatgcagataaacgcaaccaagccatcaagcagcagagcgagttcctgaaggctggcgcaatcacggcggaccaatacgctaaaaatgtgtctcgcattaacgagatgtataaggacccaaaagcaccaaaaacgccaaagggtaaatcctactccgaggacgctgcaacccgactccttgaccagataaaccagcagactgccgctatgcagtctcaactggacgccagcgacaagctaaacagtgcgacgcaggcacgggttaagttcgaacagcagatcgctgacctcaagtctaaaacgcagctcaccgctgaccagaagtcgatactttcccgttctgatgaaatattgcaagcctacaagcagcaggaggcgctgcagaactcggttaaaacgctggacgactatcggaagatgcaggagcaggttaagactaaggatgaaaagaccaacgatctgcttaaaacccgtcttgagcttctggaaaaggcaaaagcaaccgggcaattgaaacccggtgagtacgacaagacccgggcagacatatacaaaaatacagacaaccaactgccatctacagtgcgcagcgttgtgggcaataccacgccgactggtggacaactgtcaggcacatatggaggaatgcagcagcaatacagccaactcgaccaggcccaaaaagatttggacgcctggctttcacgtcaggaggaggcatatgccaaggctggtgtcataacggcagaaggcgaagccaggatgcaaaaaactcgcaccgatgctgcaaacgctgctgcggttatagaggcccaaaaagacgccatcattaccagtactacgcaaagcatgatggatagtggattgagtattctggccgatggttttggtcagcaatccggcatttacaaagcagctttcgcagccagtaaagcctacgccattgcacagtccctggtagcgatcaacgcaggtattgcacaggctgcaaacatgccttttccatcaaacttaattgcaatggcatctgtggcagcgcaaaccgcgagcattgtctccaatatcaaagctgttgcggatacaggctttgcttctggtggctataccggtccaggcggtaaatatcagccagccggcattgtccacaaaggcgagtatgtctttgaccaggcgtcaacgaacaggatcggcgtcactcaacttgaagcgttgcgaaatggtcagccgctggatgcgacgctgggccgttccgggtttggtaccggagtgcagaacgtcaacagcgacaacagcaggcgaactactgttcacgcaccgattagccaggagtttaacttgcagggtgttacccctgagcagttgaacgctactctcaaccagaacaaccggcagcttaccagacagttaaaaggagatttaaccaaggaggttatgactccgcagggatcgtttggcaatgctttaaagagccgctatgtgagggggtataaggaataa

SEQ ID NO: 200921 - DNA, 558 bp, Klebsiella oxytoca
atgagtaataacctgatggataccgttgctcaggccgtgaattcgcttgtgtctgcacttaaattgcccgacgaatccgctaaagccaatgacatgctgggcagcatgaatttcccgcagttcagccgggttttgccctataaggattatgactctacgaccggactgtttattaatgccaaaaccgtcggttttatgtttgaggcccggcctttaccgggcgctaacgcgcatatcgtggcctcgctggaaaacctgctgcgaaccaagcttccccgcggcgtgcctgtgaccattaatcttatctcgagcaagctggtcggggacgatattgagtatgggttacgggagttcagctggagtggtaaacaggcagagaaattcaatgccattacccgggcttactatcttcaggcggcagaaaaacagttctcgctgccaccggggatggatttaccgttgaccctgcgtaattaccgggtatttatctcctgctgcgtaccccgaaagaaacattcgaaagcgcagattgtcgagctggagaaccggctttgttga

SEQ ID NO: 200922 - DNA, 471 bp, Klebsiella oxytoca
atgacgaaacgaacggacgatagcgcacagctgcgtcaggcgatgggcggctcagcaaaaacgatactgttggtggctgcaggtatcgcgggcgtgatgttaattttagccgcggttttctggctgagcgacctcgttgtcatggggctgacgactgtctggccgcgacatgcgtgggtggtgagcattaccgcctgcggagcagtctggtgtgtgttggtgatgagtgaatttatccggctcaccctgaacggtgccggactgatgcgaaaggaaaaatatgacgtctggatcggtttgtattttggcgtggtgatgatcctgtcgtgggcactatgtgccgcattgttctggatgctgtttcacctgcagggtggtgaagggaatattcaggtgccgctgatggtggtcagcttattcgtatcaatgctctatccactcattttgacccggctgatacaagatagctga

SEQ ID NO: 200923 - DNA, 141 bp, Klebsiella oxytoca
atggcggggttaattatcgtgattgtactgttgatgaccaccatagccaggttattaacgagtgataatgcttttgttattgtcccatctcttatctttattatttttctcaatattatagccagacggcttttaccctga

SEQ ID NO: 200924 - DNA, 327 bp, Klebsiella oxytoca
atgattatacttagcgagattgaaacgttagagcaattgaaaaagaaaggaccatttaataaagtaaaagcaagtataaacgagattatccccattaaagctagaggttgggatcatttgtgggcaaagatattagaattgcgtatctatgctaaatgcaatgacatattccgcactgcaaacttacttagaataaaagacatatcgctcattaaaaaatacttatggctagtcacggcaaccagaagaaaatataatctgtacatcagttctaaatacgaaggaattgattatttcaaatctggagaggtatgccatgaaatataa

SEQ ID NO: 200925 - DNA, 594 bp, Klebsiella oxytoca
atgaaatataatggaactgacaagtactgttataaagaatgccatggtgtactgataaatcattttaatattaaagatgatgaattattggatagaagaataatatcagagcagatgttagtcattgatgaaataaagatatttcgcccatatgatttaaacacattatgtaaaatacatagaaaaatgttcttatgtgctttcagttgggctggtgaaatcagagatattgacattagtaaaggtgaaactagattttgtagtaacccatacatagaaagagagggagaaaaaatatttaatagagtcaataagttagataaagaaattctatcaaaggggatagataacatcactaaagatgaaaaggaagaatacattaacgtgttagggggaataatcactgacttaaattttcttcacccttttcgcgaaggtaatggccgcaccttacgcttatttatagaattattcttgtataacttgggaattaatcttagctggccctcatccccagagagatggatgaaagctagtattgatgatgatatgagagaatttacctctctcatattagaaaatatatcaatataa

SEQ ID NO: 200926 - DNA, 2607 bp, Klebsiella oxytoca
atgcttttcaatattgtactttcgatatggttctttattaccagccttaacattttagatgacaagaaacgcgatcacctcatgctgaagtattttcagtcccagattgtagaaaatcatattctgcgttcccttaaatactcatggatacagtatcctggttcacacataggtaaggattatataaagggaataaccattcttccctactctgtctcaagcgaagaaagtatggactcggttaaattccatattgaggatcatatcgaaatcagcgatgtgtatcttggaccactaaattttcttttacaccggctgaaacctgtgcaggataagaatggctcgattgttattctgccgtcactggcaaaaagggataacaaaataacactgttttcctcaactgaggtgattatccctgggtggtggccgttctttttcagacaatgttttataaaaggcccgaaagtaaactggaaagagtacagacacattacccgtgatttttatggtgaggtttatgatgctctgggagacaaaaatataagtacctttatcatcgcaacagaccggctgattgatacatacacaacattgaaaaaaagcttccggtatgctgatggaaactatattgatgaatgtcatggttcaggtatgtcatttacattcagccagtcattctatcatgatttttacagtttcagtaacgaggtggtaaagtcactggaaacaacgggtgaatatttccgtaaaattattgatgtaccattctctgtatatcgtgattcagacagccgtgaaatcgtcgattttcagcagtgtatggaatctcttttctacgtatggtacgtgttgaacaactggaaaagaggatatgcagaaactctgtcggtcagtcaggagcaacgtcacagggaagttgtcaaagattttataggtgaatgggaaagctggtacatgtggcgacgtattaaggcccgtggcgagaaccggtttgatgatgactcggccgaactactttatcatctttatgagacagcccggatagtcatgacggctgtgatgtcagacgaccgctatgcctcagatcacagtgcggatatgcttttactctggttcagccggaatcggtttgaactgcactttgaacaataccgctggcacagctttttcctgacgccgtcgtatcttactcaggcatctgacaaaccggcctggcaggccatcctcagaggaaatgcatattcagaaaaagctgcacgggcaatcatttttttcaatgcactgacagatattcgactgcttactgccggatatattctttcgcatgttcagcagaaaaaaaatgtacgtctgaaaaatgttataaagcgacttcttacttctgaacctgtctatccgacaggtgcgcatgatctcatgacgacgttgttaacttcttcgactgatattattgacattattatcaggctggaatgtcgtccgtgcgacagtgaggattcctggtacaagacgatgtctaatctcgtaaaggcgttttcatcatttaatgaaactgagatcatatcaggacgtatctatatgggaacctatgaagatgtcaggaatatttatgccagttatgcagatatcgctttttatctttccgctaagtccctgcctgtcacccagcgcgtaaggatggcactgaacgacaacctgtttacttatcatcagaaggaacagattatttatcaactccagtgtttcaaacgccgtgaagacagcccatcggatggatatttaatgtctgataaagcctttaaagataagattgtccgttttaacgaaaccctcgatgcctatattcaggctttcagccggagcatgcattcagagcttcttaacgctgagattgatactgagctgctgaaaaataccgatcttactcttacccgagaactacccttaatgcttgcccgggatgcactgctttcacaattttcttacagtacatcaaacagcggggagatagcgtggacagccaagtcagttaacggaggcatgtccaaagatatcttagcccgtgggatcagcagcactaattcggtaatactgacacctgtttctgacattaaacagactctgcttggtgatgtttaccatggactgagtcagctgcagcccctccggacaatcaacgtccgcgacgaatatgaactgctgaagcatttaagggagatgactgccgacaacgaagactatacgctgattttcttcggaacccatctgggaagcgagctacgtgagatgagctaccacgcagaaaggtttgcggaactggggatcatactggatatgaagagtaatctcgatggccttataccagtcaggattaataactgtggaatctatcaggtatgggataatgatggaggatattactccctgcttgtccggaacaatgtctttggatcccttaacatgctgagcgatcccgacggacagcctttcagtacctcatggcatgcaagtgatgaagaccctctgtcgggctgggtgactaccagctggaaacaggaactcgggattagtggttccgtcgtggcaagatttaatcactcctga

SEQ ID NO: 200927 - DNA, 882 bp, Klebsiella oxytoca
atgactgagccggttaccccgattccagacagcgaagagggccccgtaaccttcgttgatagcgctctaaaagcgaagccgccacaacctgctatatccgggagataccgccggtcacaccgtgacggtgaacgatggttgtggacagttgtcgtcttttttagtgcggttattctgctcgccaccatctcgggacaggcggtgaaaaatggtgacgtggctgcctgggtatcgatgctgtttaatggtgttatggccactgccgcggtaggggcgtacctgaccgcacggaaatgggttccacaactgacgacccaagaaggttataaagtggccatctgtctggtgaacgaacattatatttacctcggcattcagaatccgctgttacgcagcacgaaccaggcgctgtcctgctataacgaatttctgcaaatctataatcatacaagcagcgcggactatgcccggaaaatagccatattatcccgtgccatccttaatgaaaaagaacggaaagacagtatcgaacaggctgattttcggctgcggacctacggcctgtatgtgtccccggcttattcagacagcatgaatgccatgaaagatgcctttacccacagtatagatgcagcgtgttctctggaagcgatgctgcagagcgatctcattctccagaagaagctggaagggcttgacagcacgtccgtgcagttcgtctcagacatggagaggttacttggagcacgcgaacatctgaaggtaaccatcctggctgacggtgagcgtttgtcgcaaaaatggaatgaaatggtggcgctgcagggcgccatttttaatacacatcctcgcatcggcgagttattttcagtcagaaactag

SEQ ID NO: 200928 - DNA, 621 bp, Klebsiella oxytoca
atgcctacgaaacacatagacgacaacaccgccgcgcagctggacgatctctacgtccgctgtgtgactctgacccagcaaccagtgaaagaggtggaagtgctccgtctggcgatcctgaacggtatcggtaacattacggataacgatattctcgcctcgatgtccgtcaaacccacggtctgggaaaaacaggccgacaatatctgggctgaagtcacacagggatggccggctgcgggtatccatacgcgtaattttgttgagaaggccgaactgtattcaccgctctggaggacctttaccaacgacgtctgcagagaagccatccgtaagtcgcttgaaccgcgcctccgtgagcatttattcaatgatctgtttggctttagtactgctttcacggaggaagaaaacgaacgggaagcacaggaaaatatggaaaaggaaaaagaatataaggcactcctgcccaacctgaagggtaaattgtattccgcgctgtcgccacaggagcaggaagtcgcgctctattacagcgatcatgaacaactcgttagcttcacccctgacgggaagggggattttaccgtctgcctggcggagccaggtgatcatgactga

SEQ ID NO: 200929 - DNA, 996 bp, Klebsiella oxytoca
atgaccgattgcgtgacccggactgttgacgacaaaacaatgtggctcgtgacattgccggagatcattacaaatgacagtaccccccaggaggaaaatctggtcgtcattatgagcagggaggaatcgtgggggccaccttctgaacattatcccgacggattgcatcgggcctcctgcataatgacactgtacctggccgatgcagaacagacgaagactcagactttcactgcaatctactggcctcaagagggggccctgcatctgtttacagatgagttcagactggaaggccgcctgcagggacacggcctgggtagctggatcacgcagcagtttgtgctctgggccagagtccttccgccagaaacctgggttttgccgattgaaatctcgcaggttgatgaaaaaaaagaagaaaaaaagaaccggagagacaggctgtggcacgcaatggggttccggttcccggccggggaaacccgctcaatgccgctgcgggcagacgaactgcagttgccgcggggcaggtgttcaacgctccgggtggagcccctggcacccgggatacgccggctggaagactgttatcgcgggctgcaggaaaaaatcgtgcagctcgaaggcaaaaaattgtcgcaaaaacagttgattgcttcactgaaggcgcgtcatttttttcatctgtggcaccggaaagggggccagctcccggacgggaaatgtgatgccctgccgctgcgggcagaaaaattgtctctgccgcagagcggggattcagacctgaaggtggagcaacgggcaaccggggtcatccggctggcaaccctgtgtggtcagtcgcagaaaaaaatcgttgggctggaaagggatctcgtttacctgcaggcacatcccttttctcacctgcgggtgaaatactccagccaggccgtgttctgggggtgggggatgggttttctgttctttatctactggatattagggacatga

SEQ ID NO: 200930 - DNA, 1206 bp, Klebsiella oxytoca
atggaaaatttagaacagttaaaaaaagttgcttcaagggcgcacaaaatgttgtcctcccttagcgagcacattcaacaacagaaagaagagtttcaacttaatgagttttatcaggtatacagtaaagcctctctgtataaactcccgaaacttagtaagggaagcgttgaatacgctgtgagtgaaatggagtctcaggggtatattttcaacaaacgcccttccggaaacaccatgaaatatgcaatgacacttcagaacgtcgttgatttatatcatcatcgtggagttcctaagtaccgtgatcgtcatcacgaggctttctgcatttacgtatcaaaccttaagggcggcggttctaaaacggtttctacggcttctctagcacatgccttaagagcgcacccgcacctattgtttgaagatttgaggattcttgccatcgattttgatcctcaggcttcactgactatgttcttgaatcatcaaaattcaattggtctcgtagaagcaacagcagctcaagctatgctgcagaacgtaagtcgtgaggagcttatttcggattttatcgttccatctgttgtccctggagtcgacattattcctgcttctattgatgatgctttcatcgcagagagatggaaagatctctgtgctgagtatctcccggggcaaaatgtgcatgcagttttgaaagaaaacataatagagaagctcaagaaagattatgatttcatcctggttgatactggcccacatctcgatgcttttcttaaaaatggcatagctgctgcagatctactgttaactcccctaccccctgcaacggttgacttccattcatccttaaaatttgttgcaagcttgcctgcattagtcgagagcatcgaagcggaaggacataaatgtaatttaatcggcaatatcggctttatgtccaaactgttaaataagagcgatcataaaatctgccatagccaggcaaaggaagttttcggtgcagacatgcttgatgttgtactgcccagactggatggttttgaacggtgtggcgaaacattcgacaccgtaatctccgctaacccagcaacgtatgacggtagcgcagaagctttaaaaagctccagaattgctgccgaagattttgcaaagggtgtgtttgatcgcgttgagtttatcagaacgaataaggaggcctga

SEQ ID NO: 200931 - DNA, 969 bp, Klebsiella oxytoca
atgactggccacagaaaaacaattggcagaaattttaattctcaggcagtagttgagtcgtctacttctggattacaggttcagtattttacattgaagaccgggcgaaaagtaaaattctccttcgttatcgtccctgcgtcagaggtcgctgataaaacgtttgtccggcaagaaaccaatggtcgggatcagtctgcgttaaccaaagattccttaaaagacattaccaggaccctcagattccagcagttctttgcctgtataggggttatgaatggcgaaaaaattgagattctcgatggttccaggaggcgtgcatcagccattgaaatacatgctcccctcaatgttatggtgacatcggataaactcaccgctgaagaggcaagacaacttgctaaagatatacagacagcgaaggaacataacatccgtgagattggcctacgtttgctctctcttaaggagtcaggtctcaaccagaaagaaatagcagaacaggaaggtctttctcaggcgaaggtcacccgcgctatacaggcggcgacagtaccacaagaactcatctctctattcccggtacaatacgagttgtcattttctgactataaaaatctttcagagctcaatgaacgactaaacgaaaagaatattgaattttcacagcttgttgaaaatatatcttcgcaactcgttgagttagtggccgatgaccaacttcaggaggatgaaaagaaagcagcaattcttaaactgattgctaaaggcgcaattgctttgatcgctgcgccacccaaagaaaaaaccatagtttccacattgtgggactttgctgacaaagataagtttgcacgtaagcgtgttaaaggccgaagctttatttacgagtttaatcgcctgccaaaaaaccttcagaatgacattgaagcagcaattcaagatgttttaaaacgtcatataggttaa

SEQ ID NO: 200932 - DNA, 273 bp, Klebsiella oxytoca
atgagcagggacccgccgcaacgtcggagcgcggcacgcgaaacggcgttgcgccttacagcccggcggccgttgttcttcgacggggtgcagggagcgcaggacacggcgcgacagggcggcgcctccggaacggaggctgcaagcctgctgttgacgttgcgtcatgggatggaaacccgctgccccaaaggggccgggcagagacggcgcagctggctctgtgcgaagcatgacagcccgcccggacgcccactgcaggacctgaactaa

SEQ ID NO: 200933 - DNA, 654 bp, Klebsiella oxytoca
atggggcgctggcttgctggcagactcatgaaagagctggggctggtcagttgccagcagccgactcaccggtataagcgtggtggtcatgagcacgttgctatcccgaatcatcttgagcgacagttcgccgtaacggaaccaaatcaggtgtggtgcggtgatgtgacctatatctggacgggtaagcgctgggcgtacctcgccgttgttctcgacctgttcgcaagaaaaccagtgggctgggccatgtcgttctcgccggacagcaggctcaccatgaaagcactggaaatggcatgggaaacccgtggtaagccagtcggggtgatgttccacagcgatcaaggcagtcattatacgagcaggcagttccggcagttactgtggcgataccggttcaggcagagtatgagtcggcgtggaaactgctgggataacagcccaatggagcgcttcttcaggagtctgaagaacgaatgggtgccggcgacgggctatgtaagcttcagcgatgcagcccacgcaataacggactatatcgttggatattacagcgcactaagaccgcacgaatataatggtgggttaccaccaaacgaatcagaaaaccgatactggaaaaactctaacgcggtggccagtttttgttga

SEQ ID NO: 200934 - DNA, 1857 bp, Klebsiella oxytoca; identical to SEQ ID NO: 194060

SEQ ID NO: 200935 - DNA, 540 bp, Klebsiella oxytoca
atgtctggcatactgcttaatcgcctcactactaaagtcagagcacaactcaaacgcaccctcaaaggaaataagacatataagaagcatcgctggaaccttgttgaaagggcgcaggtttactgctccacgcattatctgaaggccatgtttttgctctggtctatggcaggcagtgctgtcctcatagcgataggctttcgtgctgaatttagtatctttgcggctaattacctaaaaaacgtcactaaacttcctgaatggatgtcaaacctgctgggcgcccagctgacgataatcgggattgtgttcccacttgttgtcggactgatcagtgtgctctttcagaaaaaatcctcgcgaatccacattcagaccgcctatcagttgcattcgggttatatgtttgcaggactcagtgggctatcacttgctgcttttatactgataagtgggttatttttatctgccggtgacaaatatcttgatacggcatttgcggttacggcggctttgttgaataaatcgaacttttgctga

SEQ ID NO: 200936 - DNA, 264 bp, Klebsiella oxytoca
atgaaagatcatacccaaactcgcccggaatttacatggttattcctggcaacccctaagcagtatcccgacagcacaccagttgtactgcgcattgatgccgatacggaagaggaagcccgtgctgcgttctgcggctggaatatggttttcgccgccagaatatgtactcagatacgctggataataacgttttacagcgatgattatcgtttgtccgccaacgttgaatccgagccggtagagggggtgtttcatgcttaa

SEQ ID NO: 200937 - DNA, 183 bp, Klebsiella oxytoca
atgcttaaaaactatcaggtttacgggttcgccgttaataagcgcgggcacacggtaggcattcactacaccctgaccagcacaactcctgacgatgctaaattagctgcgcagctactggcacagcaaggtggttataagcatatccgtatcaactttgttcgggaggtgtccaatgactga

SEQ ID NO: 200938 - DNA, 126 bp, Klebsiella oxytoca
atgatatctatcaccttctggataaaagctaccctgaatttaaacacctctcagatgcagagttggctgagtctgctgatacatatgcaggggcgggttttgccatcaatagtgcgctcacactga

SEQ ID NO: 200939 - DNA, 1467 bp, Klebsiella oxytoca
atggctgctcaaaatttagctcataaagagctggtggacaacttactgactcggataacgagaagaaaggcgaatacggtaatgcctggcacgactacacataaaccagatggcgccaatgatgatgatattttagccgcgtcaggaaagtgggaagcctgtccccccccctataccaacgcctgcatgaaaatatgtgctgcagctgcaaaaattatcctcaatgcatcagatatagcccgtcgttcaaaatacgaaaaaaataattacctccgtattgattttagcaaagccggaaaggttacattttatgcagaattcccaaaaaagatgggacttaaaggcaaaaagcttggcgaatggccagagctagcgattcagatagcccgtgagaaagcgctagatatggcaaagggaggacttcgtgctgaaactgttcatgctgcactggacatgtaccgggatgacctcaaagccaaagtggccaggcagaaactgagcccggctagcttcactacttacggggtacgtatcgaccggattaaagcaactttcggcgagcgggaagtattcagcgacgtaacatatactcggctggtggacgtgctcgacgaatggatcgctactcgctctaacaataacgccctggagttgttcgccgagcttcgtcgattttggaagttttgcgcgcctaccctttgcaatggtcgaaacgttgctgccagcctgccggatgactacgtatcctctcgcgtacagaagcctactcccacccgtctttttacggatatcgaatccatctcccgcctatggctcaacgttgccgcctgcacctcagtacaccagaagaacgcagttcgcttcatgatcattacgggcgttcgccctatcaatattcataacttgcgctgggattatctgaatgaagaggctggagagatagtgtacccggaaggtgtgaccgggatgcgtggggcgatgaaaacacaaaaggctttccgcctgccgatcacgccagaactccggcgtattatcgacgagcagaaagcctggcgtgattcagttcctgagtgcaataaagaatatgttttcttacagcctcgcgatccaatggaaccattttctaaacggtcactggataaattggtgaaaacgtacagcccggagggggccgtaaaaggaatgaagcatgacggaacggttaaagggagagagggggcatttaatacgatgtgtcgtaagttcttaaagagcaacgttatcgccctgatgaaggaaagaggctactcccggtcggaccgaagggagataagcctcctttgccttcatcacagcagcaagtcagatgatccaatggcagaacactacgacttttcagatgaaatattgcaggaggagatcgctttgaagcgagaagcatttgaggcccacgaacgcagtatacttgcacaggttagactgttatga

SEQ ID NO: 200940 - DNA, 690 bp, Klebsiella oxytoca
atggatgagcagagaaaaaaagagttttttagagtgttttatcatgagatcggtcattggtttgtggcaaagcaagtaagttttactcctcaagagataaaaatagagtcgcgtagcttatccaaatgggagtcacatggacactgttcaactgtattgtacagaaagtgtgagggtttagatgacataattgaatacttacatgatagacaattagtgttattggccggcgcagtatttgaggcggcgatgacgggtaacggggtagattacgccattcattctcttcataatggttcttctaatgatgattatagaaaatttttagaattagctatggtttctctgaattttaagcttggttcgataagcgaatcacttgatgaaataaaccaaactatcaatgtgtttggttgtgatgagcttttacaaagtttgctcgctcatagaaaacaattagcttgtgagatgtttattatgtgtaagaatgaggcacaggttaaagcttttgtcgatgagggtgtgagtttagttgatgatttattgatgagaaatactgattttactaatattgaattcactgagagtcagttgaataatttatatgtatccacagtaaatgaatactgcttatctaaaggaaaaaattattttaaccgaggaccattgagtaaattacacccaaaataa

SEQ ID NO: 200941 - DNA, 999 bp, Klebsiella oxytoca
atgacgaaccataatcagatgagtcaaatttattctaaattcagtaaagccggatttaatctctcttatatccgcaggttactccctgactggtgggatgagaagcttgctgaaaccccatcagggcgccagtatgcgtgcctgcacctagcgcgtatgtttagcattctcccggatagcctgaaagatggcagcgagggtgtatgcttcaattttggtggtaaccataaatataagcatcgccaaaatgtagccgaaaacgatttagatatcgctactgccgttgcttacactgccgcaggcattgcctcatctaattttaaaaccccatttgatgctagcgctgtactggatcctatggttataagaggtcaaatcctcgctcatgagccatgggtatcacttggtagcttagtagcgttttgccattcaattggtattcccgtggtttatcttaaatgcttcccacaagctgcaaagaaaatggccggattggcgttaataagccaagggcgaccggtgattgtcctaacccagcctcagaagtatggctatatgatatttgaccttgcgcacgagctgggccatatcgccagagggcatcttaatgcagaaaacgggcagtgccacgtagacttgaagattgagaatgcttcaactgataacattgagaaagaagccaacgagtttgcttttcaggtcatctcggggcagaaatcgctacgtatcgggccaacaggtggtaggctaaaaggagccgacttagctcgtgccgcccatagatatggaagtgaaaaccatatcgatcctacgcatattgcgctgaattatggtttcgctcaagactgttggggcgcagctgttaacgctgtgaaactgctatgtgcaggcaaagattcagatcaggattttgtaagggctatgatgaaaagtggaatggatttggaaaatatccacgaagatgatcttaaggttttagaaaatctaatcggggagtga

SEQ ID NO: 200942 - DNA, 639 bp, Klebsiella oxytoca
gtgatcgttctttctgacaatgacgtcattctgaagctggcccagtgcaacctgttagcgcaattgccagtgatttttaatcaacccccagaacaaattttcatcaatcccgccgctcgtttccagcttttaccgaaaaacccagacaaagctattaataaatgtggtagtcaagtcgtttatgagcaggttggtgctttcattgcatcagtacaagatattccggaagttcaagacactcagctaattgagcttcttggtggtgtacctgggatagatgtgggcgagcagctactgcttgcatcgtgcattgaaaatccagaggctatcttcatgacaggagatcgccgatgtttatctgctattaccgcaaaccagccagccctcgccattgttcgccaacgcttactagacgccgtagttacgtttgagtcttctttgctgctatgcgttgccggtacaaatcaagcgcacgtatatcagaatctggtaagcaacccaaaacccgatggaatgctgaaattggctttatcaaatgcgggagccgccatgtgcgaatgtatcttttctcatactcgtgagttttatgattatcttgcatttaaggagcgtcttccgcacagggaatggggtatgtga

SEQ ID NO: 200943 - DNA, 852 bp, Klebsiella oxytoca
atgcgtgataatacagatttaaggttgatacaaggttatttgacggaagggtttgaatcagagctattttatgctgctgtctataatttatcagatgtcaataatgcattgagatttagtaactatgcttatgcatttcgagagttatttcatcatgtgttaaaacgattggctcctgatgatagcgtagagggatgtacgtggttcaccggccgaaatgaacaaaacaaagtcccgcgtagggactcatataaatacattattcaaggtggattgacggacgaatatgttattaatgaattaggtgtcgacaataatgaaatattccttgggctaagagatgctttttcctcattaaatcgactaacacacataagcgaagcggtattccctgttgacacagatcgtggcctggaaatagtaactcaggttgagggatatatagcagagctttttaggcatcttgatgattgtcactctcgaattattcatctgctgagccagaaagtagggcgtgctacaattgaaagctctgtttctgatactattgaatcaatagatatcttgtctactcacagctctcttgacgcggtttatatagaccatatcaaaataattgaaattaatcatgaggaaataattttcaaagcgtcaggtagtgttgatgttggtttgcaatggggttctaactctgatatcagaaatgaccttggggctgtaggtgagaaatctttcccattttcatgtgaagttagaagccctgtcgatgatccagaaaatacctcatgtgatgaagaggcattcattgtagatactcggtcttggtttgaggattattatgattatgaataa

SEQ ID NO: 200944 - DNA, 951 bp, Klebsiella oxytoca
gtggcgcgctttctcatcgtctggagcgtcttcagcgtaagaaaatggtccgcgcagctgagctggcgctaccggcctcttaccggctacggccaaaaagcggtgcgtagagtcatgcgttttaccccgatgccgctgctgctgctggcggttcgcgcgctgtgtcggctgcggctgctgggcagacagtaccgtggccgcagcgccgtggcgacgcaaaactaccgctgcctgacgggcgtcgagggccgaattgatgccggatggatagccatgcgtcgccagttgctggagacaggggcgacctggggacagcacccggccaccctggcccagatgcaggcatgcacgcgagagcttgacgccgttgtcgctcccctggcggcgcaaaagacgccggtcgtccttgcgccgctgcactgcgtttccgatatcttagcggcgatggtcggggctggcgtgacgccgggcaaagccagcgtagtggtctcttccagcgcggaaagctacaccgtcgccagccgaaaaatgggcggcgtcgcgctctcttattgctcaatccaccaggataatacatcgctggctagcgagcttatggcgttaatgactaatgtatcggcagggcgggaaaatatgattattttccccgacattcctgccgattacaccgtgcagaccccggaagcgcagtccgggaaaataagctgccggatatttggccgcccggcaaaattacatagcggggtacagcggttttctcgcatcgtatcggcgcaggtggttttttatcacctctattatcagcacgggataaaaataaagatctattctccgctgaggccaaaagaggtcgcggcaaagctaccgacgatgattgaaaacaccctgcgtgactatccgcaggattggcttttgtggcacagccattcgctctattttattaatcactga

SEQ ID NO: 200945 - DNA, 369 bp, Klebsiella oxytoca; identical to SEQ ID NO: 196714

SEQ ID NO: 200946 - DNA, 168 bp, Klebsiella oxytoca
atgtacaggttttttattatcgctttcatgccaaagcttccaggcattggacaaaagcacatcggcattatggctggaagcctggatgtacctgttataaatgaatccttcagacacatcgtcatcggcatccagaaacatgacccactggcctttatgcttgtctaa

SEQ ID NO: 200947 - DNA, 384 bp, Klebsiella oxytoca; identical to SEQ ID NO: 197970

SEQ ID NO: 200948 - DNA, 282 bp, Klebsiella oxytoca
atgacaacaggaaataattcatcgctacattatcctcttccgccgtttgttgagcagccgcagcaggctccagggctggcatctgaaatgaagccccttcccgaccatggtgagaccagctatatcggctccgggaagctcgcgggaaaaaagcgcttattaccggcggtgattcaggtattggccgcgctgtcgctatcgcctatgcgcgtgaaggcgcggatgtcgccatcggctacctgccggaagaagagtcggacgcggctgccgttatcgcgctga

SEQ ID NO: 200949 - DNA, 1380 bp, Klebsiella oxytoca
atgggtcgtagagcagggaatgttttggtcctgattatgagtatcatttcgatttcatcttcgcaggcagatgtgttgaattatgcccgtgaatggacgtcacgcaaggacgaaaacaaagccatcacatccccgtctcagccccagacggaggaagaaaaatcctctgctacgcgtcaaaaatctgctgtaaagcgttctctgcctgataaggagaaatcgacagctcagcctccagcagtcatcagaaaaacaatcgcgccgccggctgttggcgctgacaagcgaatgcaatcaccggctaacaggccgacggaaccgacagctaagaaggcccgaacggcttcgggtgacaacgtcacctcagccgctggtgtcacgaaaaatagcgctttaccggaaccgcacgttttagggggctggattaaggctttgatacaacatatgacgcttagcccggcagagatcgatttacgtaaaaacctccagttagcgcgtaaagaggtacagagattgaagaatgaactcattctgcttcgccgcgaagtacaacagtcagacagtacattggcggagcaggtcgtggctctccaggcaacttatgagcaactggctgcggcagaggaaaaaaatgtcactcaacagaatgagctccaggcgcttactgcgcgcgctacccaactggaagaaaaaaatgcgcagtggcaagtattaaccagaaaattacagtcgagccttaaggaagcgcactatcccgcactgccagcaactgacggtgaactggcggattttgcggccgggatggcgatgggttatgacattttggcggtactcgaacaacgggatgaacaacagatacatattgataaggaagtctttctggccggcattacggaaacgatacgcggcgaacgccgattgtcgcaggaggattttgagcgccaccttaaacgcgccaatcagcgagtagaagaagcgatgcacaagttcaggcaacaaaaggaagcgcgggatagcgcatggctggcgcaatttattcaagaggaagggacgcagagtgcgggtgaacaggcctggtataaagtcatccatgcaggcgagccgctgttcgaggatgagcacactgaagcggcgctaaccatttcggtcaatcgtcgtctgtctgatggtaccgtgattgcggacaccgatataactggcctggtattacaagaaaaattttccgacctccctggatggcttcggaaagtagtgaaagatatccgtctgtacggtgaagcagagttagccgttaaagttgatgaatatggtgttccacaagaacgcggtaattatattgaacattggcgcatacgtgtaattgaacgacagactatgtaa

SEQ ID NO: 200950 - DNA, 1746 bp, Klebsiella oxytoca
gtgagtgcgttaaccaatgacgtattcatcagtttgggtgaattgacagatggggtcgtagcacaaacagggcccactgatgattttgtatatgttgacatcagcagtattgatcgagaaacgaaaacaataagtgaagcgaagcatttaacttatgctcaagctccaagtcgagcaaagcaagtgttaagggctggtgatgtcttggtttccatgactcgtcccaacttaaacgctgttgctttggtgacaaaggacctggatggcgctattggatctacaggctttcatgtgcttagatcatcttggttgcatcctaagtatttgtttgcactagttcaaacacagagtttcattgatgcaatgtcgtcagtggttcaaggggctttgtatccaacagttagaccaaaggatatttctgcgtatcgagtgaaactggaaacttctaggcaacagattcgtatcatagaaaaactagaagagcttttcactgagcttaatgttggagtaactgagctaaaaactgctcagaaaaaaatagttcaatatcgtcaatcactgctaaaggacgcagttgaagggaaactaactttaaagtggcgagaggtcaataagcccactgaaagtggaatgcagttgttggagaatcttctgagtaaacggcggattcgctgggaagctagtcagttggctagctatgagaaacgaggaaagaagctcaagaaggattggcagaaaaaatatcccgagccgcgaaagccagagacaactaatttaccaaaccttcctgaaggatgggtatgggctagtatcgaccaaattgtgtctgaatcgtcctacggaacatcagttaaatgtgattacgagggtaaaggggatccagttttacgaattccaaatgttagtaatggcagtattaatcttaatgatattaaatttgcgactactgaattgaacattggagaaacagattttttgtctgtaggtgatgtcttgataattaggacaaatggtagtattggcttagtaggtcgagccgcagctgttgttgaaactctgtcttctcgatactattttgcatcatatttattaagattgcgttgtacagaaacgaatattttacatcgttggttattagtagctctatcggctcaatctggtagaaaatggttagaagcacgagcttcctcgtctgctggtcaacacaacataagtctgtcgactctactatctatgccaattccactccctccgttagatgagcaacgctatgctctagatttaattgaggaagttaacgattcggtagctcagcaagaaaaagcaatagaccaattgctcaaacactgtactgcccagcgacaaaatattcttagagcagcctttactggccaactggtaccacaagatacaagtggcgagactgtaagtgctctgcttaagcgcatttatgccaaaaatattaatattaaacgtgcaacgaaacccaaacaacgcaaaaccaagaaacaggagagctcaaaggtggagcgcaaattagtcgatgtactcgctgaaactggtgattggatgttggcacaagacgctttccaacgttgtggtattgatgatggtacacacactgaagagatcgaaactctttatgctgagctacgtgcattggacaaggcaaagcgattagaagtcgatgctgtcatcgatgagcagggacgcaaaattgctgatcgtataaagttggtgggctag

SEQ ID NO: 200951 - DNA, 864 bp, Klebsiella oxytoca
gtgacatcattcgaatatctggaaatgcaaaaatctttggtgaaagacattaactcgatacttagtaagcatggtgtaaagaatgaaattaatttatcagatattacgataactgacaaattggtttctgatcttgtaaaagatgataaggttttatcaaattcaatcgtagaatctatctggccatctgtagatagcttaacggtttatcactacacatctaaaaatgctgctgaatcaatcctgaattctggtgagttccgattatatagtttgctcaagagatttgatgagcaggaaataaaatcattttgtgaaaatcataaactcagtggatatttagaatatgccaatggagacccgaagtataaaacactaataatgagcaatatgtactatgcatcttttactgatactaacctgacagtcgatcaagaacagtacttttggaatatatttgctcctattgatggcgtaaggctcaaacttaaagtgacggcatcaaatccaaatttccgtaaaatggtttatgaaaaaacaaaaggaaaaccgttagatttattaagcgatctttcgcagtgtattaaaagtaaatatgataagaactttgtgttggctggaatatctagactatgtgcattttatctagcaaaagaatttgatattgaaaacgaatatcgtgccttgtacagagcgtgggatgggtttggtccagcacccaaacatgatgggaatcatgaatatatagatatccctatcggtataatgagtgacactggttatcaaattgatattgaggaaatacaatccaatgaaaacctcgctattccaagtcagtacggcgttgtgccaagaaatacataa

SEQ ID NO: 200952 - DNA, 249 bp, Klebsiella oxytoca
atgaacacgttaccattgaataaagaccgtatcgtcggtcaaaaaacaccacttcagatatcttatatctggggaatccgaatcaggtttgaacaagaagataagatgtgcgataggctttggacagtaagctacgaggctgtgatctggtcaatatcaaagtatctgatgtggcatatagtagctcggtttccagcagagcaacgatgctgcaacagaaaaccggtagccctgtgcaatttgagataa

SEQ ID NO: 200953 - DNA, 2028 bp, Klebsiella oxytoca
atgagtgatcagtttattagcaaaattattaaggaaaaaatcaaatcaccaacacgtgctgattttaatcttgaaaaatggaatgaggagtgggctaaggttgaattaaattcttcagcgagagataaaaaagtctatacaatgggtataatcacggatagtgtgctgaaggatattagagcgaaattagcagatttgtatgggcgggcacctaaaacaaaccatgaaaaactaatgatctcttatattgcaagttccaataggacatcagctgttgctcttaaacttgcaaaaaaagcgccaactacaaatgttcatgacataatgcttaaagcaaatagactagggaataagcaaagcttaggagagatcgttcatggagctgtcgatggtttccaacttgccataagagaatgcttaagaggcatagaaaaaaatagccaaataataatttctgctgatccaatagatgagatggatttcatccaacaagaaagctggttatctcagctatataatacttacatccatctttggcaatgcattctatggagtgactataatctaatagacgttgattctgaaaataaaatattcaaaatagaacagccaaatacaccatttgaaattgcatttaataacagcagtcaacgaaaagaaagcctttctgtccaactgacacttatcgcatcacaacctaatatagctcagttctttagtagtgataaatatatttttattactcgtggaaataaaaaaagagtagcaaacgttgcatctattagtaatgcaactaaagaattaataacgaccaatgcacattggagagtggaggagaataaccttgaagactattttcccaaagaatggttaagcaacgattttggtaaagggttttgcttatcagaagtattgaatgtaatgagaatattgatgctcatcgcaaatattgagactgaaaaatatccagaagatgatagtgcatttaatgttaataaattaagggaattttgcccaaccgttcaagcaagctcattagaacgtgccttgtgtgaagcaacagaaatgagtatagttaaagttattaatattcttaattttctgacattcaactcatctccaactggagatatctggtgtcagcctttagtaaaattaaagaaaaataagtatgcattattgactagtgcattaaacgcaccggtgatgtttaggcttattgaacgttgggcatttctttttaatattgatcttgctgaaaaaggaacgacttacgaaacaagagttgtagacgaaattaacagtgctcttggaaccaatgcttttataactgactatgacaaagcggtatctaaaagaatcaagatagaatccattgaggaagagattgacttattggcaaggatagatgacttgattttgattggtgaagcaaagtctatagttacgactgattcagaaatatctaagcaccggacgtctgaagtacttcagcatgcgggagaacaggttgtaaggaaaacagagtttataaaagctaatttagaaactgtttttgaccgattaaactggagttatgatgcaaataaaaattataaattcgcaggatttataattaacagtagtcggatatttgttggatatgcttttaattcaataccagtgattgatgagaaaatacttcgagcctacttctcctcaaatgagataaatttattaaccgtgatttcacaaggtgagtttaaacctgttgcctggtacagattatatgataacattaatgaattaaaagataatttcggtaaatatataacaaccccaccacaactgcatgccaatactaagcgttatgagtataatgaaataggctttccgtatttaaatagtgattcttataaaatctctaaaaaatatcttgtatttaaatcaggtgacctgcttgcacccatggagcaggaacatagtttcccagtgatcaaatcagcagattacgattcggaggttgaaactattaacgtggctctttga

SEQ ID NO: 200954 - DNA, 1314 bp, Klebsiella oxytoca
atgactgattggaaaaaaaccaccttaggtcaagtcgctcaagtgtttacagggtttccatttaagagtaatggctactctgaagatcctcatgatattaagttattgagaggggataacatcgctcagggaattcttagatgggatgatgctaagaagtggccaaaaagtgaatacgaaaaatacgatcagtatcagcttaaagaagatgatgttgtgcttgcaatggatcgtccttggattggtgctggattaaaatatagtgccgtccggaaaaaggatctgccctcattgttagttcagcgtacagcaaggctacgtggcagcgcggaattggatatcatttatttaaagtatattattgctagcccttggttctgtaaatatatccaatcaataaatacaggatcattagttccacatattagttctaaacaaatcaaggatttccctgtcactttaccgagcgttcaacagcaaaagagattatcttctgttctggcggcaattgataataaaatcgatattaacaatcgcataaatgcagaactggaggcgatggcgaagacgctgtacgactactggtttgtacagttcgatttccctaacgcgaacggaaaaccgtataaaacatccggtggaaagatggtgtataacgccacactgaaacatgaaattccggcgggttggagtgtagatactttatcgggttggattgctaatgataaaactggagattggggaaaagaaaatagagaaggaaactatacacttcaggttaattgtatcagaggtgctgatattaatggtctgaatggttatggcattacatcgatgccagtcagatacatctccgcaaaaaacgaaaaaaaattgttatccgcttacgattttgttattgaaatctctggtggaagtcctacacaatcaactggacgcatgacctttatcacaaaggaaatgttagaccgtttcgctcacccagttatatgttctaatttttgtaaggcaataactctcagagataatttgtatttctataactttgcgtacgcatggaatgacatttataacaaaggaatattatttggttgggaaggtaagaccagtggtataaaaaatttactttttgattcttttgtcgataaacatcatttatgtattccacataaagatctagtaaaggtctttcatgatgttatggtaccgctccaccaaaaaaaacaaaaaaatcttaaggagaatgcggaattggaaaaactccgcgactggcttcttccgctgttgataaacgggcaggtcacggtcaaataa

SEQ ID NO: 200955 - DNA, 909 bp, Klebsiella oxytoca
atgactaaacaacataaaatcggcttagttaaagtgctcgaaactactacggtagttttggcctttttcaacgagtcgtggactttcgttgaaaaggtgctgagcctctttaacatagtccctaactacatgactttaaaaatgagtacacctagcgattggttgcataaatttgaaatcaaggctgagcgttgggtttttgttccgagcaaagaaaccctgaaacgaggacagcaaatccatgcttacattaagcaaaaatggaagtatccgcgctatatgttccatttgagaaatggtggtcatgttgcggccgctaattttcatttaaaaagcaattactttagcttgattgatgtaagtgatttttatggtgcgactagtcaaagtcgtgttacgagggagcttggtcgattagttccttacgttaaagccagacaaattgctaggctgtcgacagtagcaaacccaaatagaaacggatttaagcacgtcattccctatggatatccccagtcgccaatattggccagcctatgttttcacaactctttttgtggtggggtcattagttcgatcagtaaatctgagcgtgttttcgtcagtgtttatatggatgacattcttctatcaagtgacgacatgaatctcttggtcgaggcatttgataccgtaagacaggctttacggaagtccggttatacactcaatgaaaacaaaacacagcccccatgtcccaaaattcaagtattcaacttggagcttgggcacaatcatttacgtgtcacccccaaaaggattgttgagtttcttaaggctttcacatccagtgccaatgagcatgaaagaaaggggattgcttcgtacgttggcagcatcaataagtcgcaagctaaactcttcagatag

SEQ ID NO: 200956 - DNA, 609 bp, Klebsiella oxytoca
atgactgagcgcggaatgatttttaacggggagatggtacgcgccattctcgatggccgaaagacgcaaacgcgacggacagtgaaaccgcagcctgatgaagacggtctggctaaagtaactaacggacccagggttgataccagcgaacggaattaccgttgcccattcggtgatgtaggcgatcgcatctgggtgcgcgagacgtgggcagaagctggcgccagcgcgccggacctaaagctttatcgtgctaattaccctgagcatgttccatcacattatgaaaacgtgccgccggctaatgaaattcgctggacgccatcaatccatatgccgcgctgggccagccgcattctgctggaaataaccggtgtgcgcgttgagcgccttaactcaatacacgatgtcgatgctatgcgagagggaattcagaacctgacaacatgttcacacgctgattttggcattcctgatgtcgtcaatgcgcaacatcctgcacgagcgtttcaactgctatgggaatcaatctacggtgctgaaagttggaaggctaacccctgggtttgggttatcaagttcaagcgcattaaaggtggtgaagcatga

SEQ ID NO: 200957 - DNA, 234 bp, Klebsiella oxytoca
atgagaatcgacgtaaccattgataagaacaagaagctgcccgatggtgctttagcggcgttgcaggaagaactgatgcgcagaattaatgagaagtattgtgatttctcgctgtcacttcgtcttgccagtatggatagtctaagcgttcttggtggcgaaaagggcgacaaggaacgaattgagcaaattctgcaagaaacctgggaaacggccgacgactggttctactga

SEQ ID NO: 200958 - DNA, 219 bp, Klebsiella oxytoca
atgttccattgtccaaaatgccagcacgcggcacatgcgcgcaccagtcgctatctaagtgagaacaccaaagagcgttaccaccaatgtactaacataaattgcagttgtacgttcgtaacgatggaatcggtggaacgttttattgttacgccaggaacgataatcccggccccgcctcatccgacagttggtggtcagcgcccgctatggctctga

SEQ ID NO: 200959 - DNA, 408 bp, Klebsiella oxytoca
atgaaactcttaaaaataacgcttctatgtactgtcgcagccctttcaagtagagccttttcacaaagcattgatgcacaaattttaatgaaaagtcttaaaccgtggcagcccgttggaattgaggttaagacggcctcagtgaaaataaagttaccaactgccactgtaacctcggatgcatatgaagcactgatatcgtccggtgtctgcactcctgtttgggttaaaagtgcccctgagggatatctcaaaaacaccaaagagatacatgtcgttaataaattttcagcgcagggctatacgtttgaaaaccctctgaatacatgtaaaaagatgggtgcgctgatggacgatgaagcaaagactttgatgtatgaaaacacccacggctacgtttcaaaatga

SEQ ID NO: 200960 - DNA, 1071 bp, Klebsiella oxytoca
atgggttacttcacgcggctgaccgataaggggaaagcgttattcgcggcttctgccatttcaggcgaaccggtaggaattacgcatatgggtgtgggggatggcgggggaggctccccgctagcagaatcacttcagcagggtctgattaatgagcgctaccgggcggcgctgaaccgccttgatattgcagaccaggccgctaatgttattcgcgcagaaatgataatgatgccgcagattggcgggttctggctgcgtgaagcggcactttataatgatggcggtgagtgtattgcggtggcaagtatacctccatcatacaagcccctgctcgctgaaggttcaggcaggcttcaggcggtcaatctctggattgcagtcagtaatacagctgatgtacagctgattgccgatccctcagtggttctggcaaccgcccaggaagtgaaaagagccgagagtgcggcaaaagattacaccgacgagattacaggccagcttgataaggaaatcaaacaggcgattgcggatgcggtcaaatcagcggtacgcgatgcctgggaagaagataatccgccaggcaccacacgcttttttaatcagaacctgaacccgaatgagcgctggccgtggtcagaatgggtgtacaccggcgaaaacaaaacgatccgcgtcggaaaggctgacggttcgaacgtcgggcagagcggcggcagcgataacgtcacacttcagcaggcaaacctgcccgccgttcagattgacgtgaccggcgaaaccagcgaacaggagcagcaggacctgacgacatcgggcaacggaaggcaccggcacagggcaggggatggggcaccgggggatacctggcaggaagccacacacggaacggataaccagaaatatacggggtggaactataccgactatgcagaagaccatcagcatagcgtcacgatcccgccgcacaaacactcgaccagcggcaaaacagccagcctcggtgagggcaaatcgttcagtgtggtggaatcccacacgctgctgatgtgctggagtcgtgttgcctga

SEQ ID NO: 200961 - DNA, 291 bp, Klebsiella oxytoca
atggcctttaaattactgactccgcgcatggtacaaatccactatatgggggtttatctgtgcgataaagaaatcgatattgaattaatttataccgttgaaagcgtcaggcaagatgagggcggaaccataaaagcctctttatccgttcgctacgatgaccaggcaaaaattatgctggatgattatccggttacgattaattctgagtcctctgacacgtggaccgaacaggcagaaagagaaattatggcgctgcatgagttcaccagtgctgaacgcattgaataa

SEQ ID NO: 200962 - DNA, 2550 bp, Klebsiella oxytoca
atgacaagcattagtgaaatccctgaatgggaaaaagatatttatcagatttcccgtcaggataaagtcgaaggggggaaagatggcgcggcgaataaacaggcatcacagctcgctaaccggacctcatatcttaaagcgcaattagataatttatcaggtgcggtctattcaggggcaaatatctatatttcagccgatgccggattgcagaatacgagtgaaggtggtttttttaaagtcccggtgagcggtgtgaatacggtatcttatattctctatcagaataaatccggcgtggcggttgaagttctcagggaaaaaagcccttatgcggctgaatgtcagtcagcaacagccgtcagcagtgattcagctaacgccattaatatcactgtgccggggttgttaacggatggctgcctgatttatttcctttcgcctgagatgaataccggtgcagttaccctcaacgtaaccgatgcgaaaggtcggagcgtaacccgaaatgtgctaaggcggtctaacgccgcgcttaccggaggggagctgattaaatataatccggtactggtggtctatcgcggcgcgccggttgataactttatgctgatagcgtccggtcccacggcatcagaagtgacggcccggcttgatgcgtatatggcaaccagtgacgcgttaactgcactgctgaaaaatcaggtgcctgttcctctaacggtttccgctgtggctgatgatatttatacggcaacgtcagccattaccagcggagagctacagaacgggcgtctgttcgtgtttacaccgccctcatctaatatttcccgctcgcctaagctcagactcaatgcgtggggtgcctataacattacccgaattgacggcgggcaggttgctgccggagacctggcatcaggccgggcgcatctgctgcactggcacgccggtagcagcagcttccgtgtgatgacgtacaccgatgagcgcaccagaatttacggcacggttctgcgagccacaatgatcagtgacgcaggcaggcccaatgatttgacctgcaaagttgatggttacattaacgatggcacgctgattgcgctggagccaccggcgacgaataccgggccggtggccttaacggtgactgaccgttatggaaatcagattgtgcgcagcgtgtttaaaggcgcaaacgttgccctcgctggcggagagttacagtatgctcagcctgtgttgctcatgtaccggggttcaccgcaaaataactttaaaatcatcacctcgggcgacctgacgacagatatcagggcgctgcaatctgatgtggaagtcctgaaaacttcttttactgacccgtatacgaagctggcaaaaaaacttattggcgatggcaccatcgccgatactggcccgttcggggatatttcgtaccggaacggcgtaaaagcgattgccagaaagcgtcttgtgtttacctcaattggttcctccgtaggcgttggtgccggttctgcggagggcggtgctgcaggggcaccgtttgcacctaacaccctgctggtcaatgcaatgaggtcacatttagacgggtatggtgagtttgactttattgatgataaccagtgcattcctacacaatcgcttgaccagttctcggcgcaactccgtaactcgcccttttttaccagtgcaaacccggatgactggccggattttgtgctgattatcggggggatgaatgatgctccggtgggtaattttaataatggcctgacgtttccgaagcaacgagcagtcctgagaaatctgattgatgaatgctcagctaaaggggcggtggtgattgttgccaccagtcctcatcataatgtcgagagtgcgaaagtcacaaatatcacacttgctgacctcaatgtttcctggcctgtcaggacgtttaatgttgacacaaatttcacatttgacgcggcggcaaaaaccatcaacagcaccgcctttgtttacgataccggaaacgcggcgacaagctggggcgggcaaattttgcgaccggggcatactctacgcgtaatgagtggcgataacgccggagattacaccatctcagctatatctgatgaccggcagaccatcacggtagccgaagattttcatgtatcaggcacgcagaaaactcttatcaggcatattaaactcgacgcgcttcaggaagagattctggtgccgcctccatcaaaatcctttgtagagcgggactggtcaggcagcggaattaaagcggtcggtgcggtacgctttggcctttataacgcgatggtaagggcgactgcgcgggagaaatcggcgtttgtaatggaatgtgaaattccatggtttaaacagggggtggaggttcacggatgggcagcattgtttaaaacacccaattacaaccatccaaacgacctgggctattccgtcagctataaggtgggggcggatgtggtggcatttaatatctgcaatttaatctatggtgagaaatattactctgtcacataa

SEQ ID NO: 200963 - DNA, 609 bp, Klebsiella oxytoca
atgaataattcgctgatggcgaacgggtcatctctgctggaacagcgagccgccgcagcatgcgcctctatcagcgatttatctgtgccgctgcgagatttgtggaatccgtggaaatgtccggtgaaattcctgccctatctggcgtgggcgttttctgtcgaccgctgggaggaaacctggtcagaaactgaaaagcgccaggctgtcagtgatgcgttttggatccaccaacgcaagggaaccgtcgctgccgttcgtcgggtgattgaaacgctgggctacaacatgacgctccaggagtggtgggaagtggccgaccctgcaggcacattccgtcttgagattgaccttaatgataatggcataaccgagccgatgattgccgaacttgagcgaattattggtgatgcaaaaccagtcagtcgacatatagcacaaattaaattaattacccgtactgagggaattgcctgggcgggatgctgtgcttttgatggcgaggtgattaccgttttcccggaaaactttacacccgcgcaggatatacattatgacggtcagatttattttgaaggtgattatttgttttctgagggggaacaatga

SEQ ID NO: 200964 - DNA, 258 bp, Klebsiella oxytoca
atgggaaaacacgatagcaactatcaaatcgtttaccgcggcgaaacgttacaaaagtacgagcctggcgggtgggtatttttccaacgaccaaaagaatgtggtggtggttactggtttggccgcacatacgatggtgtttttatgctggatctggaaagacctgtttcacttcatgacggcataatctttttaaatcagttgaacgaagtcgcgtctaacttcatgacttttgatgatgattttaagctgagttag

SEQ ID NO: 200965 - DNA, 708 bp, Klebsiella oxytoca
atggaactgaataaaagagaggcatttttcgcggcgatatttaacggttttttatctcataaagaccagtttaatgatgctaatcctgatgaggctatccgcgaatgctgggcgatggcttaccgtattatttaccactctaaccgagtggaatcaccacgcgagattgctaacagatggattaataaaaatatcgttattgttgataccgaaactaccgggctggacaaagaagccgaaataatagaaatatcaatcatcgactgtaccggtgctattctgcttaacacccttattaaaccatccaaaaatattcctgcagaagctaccgagattcatggaatcactaatgaaatggttgaggatgcgccaagctggaaagaaatgttacctcaagtcttagagttaatatcgcacggttgggttgcttataatgcgaaatttgacgcgagaatgttagagcaaacgtcaggctctcgtgttgacactgattattttggtgcgcctgagtgtgctatgcaactctatgctgaatataacggtgagtgggataaaaaacgccgcaaatacaaatggaagaaactaaccgacgccgctacatcgttggatgcgtggccggaagaaattgacgagaatccgcaccgtgcgctttatgattgctatctgacgttgggtgtaatccgttctattgccgggggtaaaaaatga

SEQ ID NO: 200966 - DNA, 813 bp, Klebsiella oxytoca
gtggttacgaaaaacaaaaaggatgagttagttcaaagtctccatcctactactatatttcattttaccgataaagaagatgccttttataatattctttctgaacaatatttcaggccgtccctttccacagaaagaataacaggagtggaaggtagaagatatttttcagtcccaatggtatcattttgtgacataaaattatctcaaatactctatcatagcattaaatatggtgagtttggttttgggttaacaaaatcttgggcagaaaaaaacgcgctacaccctgttctttacatgagccaggcgagcacacttttttcaaaatataacgcaagaattcgcttgcttaaagataaattaatgccactttggtctcaaaggcttagcttggcgagcaaggacttggttgaatttgaaaatttaaaatcagaatatgcagatctttataatcttttgcgttatatgaaaaactacaaagggacgttaaaaagaagagataaaaaagatgttcctaattttatgtttgcagatgagaaagaatggcgctacgtgccagaaccgttcgttggggatttttggccaagtctgaattgggaaaaggtcaaagaacgtgatgatgcaaagttaatgagtgagaagttcgccaactatggcgttaggttcactttcgaagacatcaagtatattatcatcccgactgaaaagcacatcaataagctaatctcacatatatctaagctggagaattatgagccttcaataataagtaaaattattactatggaaaaggtgagaaatgatttctaa

SEQ ID NO: 200967 - DNA, 1167 bp, Klebsiella oxytoca
atgactttttggaatgattcctaccagagcgaattaaaatcaatagacctttggattgataaaaacatcagatataatgatgttattcctggcgatcttagcaagctcagtgatgatgagtttatagaagctgtattgtttcttagttgggattattttcgaaacttatttgtttcccacagggattctctcaacaaatatactcaattcaatcagcgctacttacaagaaagagctctcccaaggttggataaactagagtcaaaccgtttttattttttaaacattctaataagaaatgtgtacgagcactatttctggactcaagattctgcacatcctcctgtttttgtagaaagggagacacttgaaagattagaccaactagcctccccctctgatagagatgcgcaattcttgtggattgagcgctcaatgcctgctgcattaataaagagtattttatcatcggaagaatttgttacattgagaaagatggctaacgatgtcagtgggtatgaagaaaaattcaccaaccagatagagttaggaactcagaaagctcaagaacaaatagaaaaagcttctgataaccttaaggcgttaattaatagagctgaaaattctcaaaaagatatcagtacgtatgttgacaagcttaatgaatataaaagcgagtataacttcgtcttgttgagcaaagcattttcaaatttactacatacaaaacaagatgagtaccaaaaaaatcaccatagcgttattttcttttcagttttattggttcttatccccacaggggctttgataaaccatattttcgagctgtataaggttgaattcaaccttagcgcacttgcttattacttaccgatactatcgctagagttgctaatgttttattttatgcgactttattacattgaaggaaaagctattaaggctcaactcttacagatagaacagaggctcagtctatgtgagtttatacatgattatgtggagacaaaaagtaaatcaggctctgaaaaggaatcgtggtcattatttgaaaagctaattttcagccctatacaggtttcttcagaaaacataccgtccttactggatggtgcatcatctattgccgagttagctggaaaagtcttgtccagagattcaaaataa

SEQ ID NO: 200968 - DNA, 735 bp, Klebsiella oxytoca
atgctgtataaatatattggcaatcatgataaagaagaaacaattaaatgccttaaatactttctagaagatggaacaattaaagcaagtgatcccttctcatttaatgatccctctgaattaaaaattgacctaggactcgatactaccagggagatagccaaaaaaaggtatcgcaaagatcggcctaacgaatcgaactttgatcaatggttttctggcttgaaacaggccaagtggtacacaataaatacgacaagacaacaaataatgtcaacgtatgggatcgtttgtttaacacccaaccctgacaattatctcatgtggtctcattactccgcatcccacacagggttctgcatagggtttgacgatgatttcgttcgaacgataggtgatgtagcgttagccggttcagttcagtatcgtgaaaatgttcccttatttaatttctttactgacccaaaagaagaatttgctcacaagatatttttcacaaagcataattgctggagttatgaaaatgaatatcgagtaatttgtgatcctcaagggattaaaaaatttgataaatcgttcatcagagaggtgattttaggctcgcatgtttcctatgagctagaacactacgcaagaagttttcttaacactggtattaaaatatacaaaatgatttctccatataacacctactcagtagttaaaaaagaaattacagatgaattgtttttttaa

SEQ ID NO: 200969 - DNA, 1446 bp, Klebsiella oxytoca
atggcaatgtatgaagttggcaccgtaacgggggcagcaaacctggcaaaggttactggtatttcaacaaagtggtcggagcccgctcttggtattcaggaggggtcaattcttgtcgtttatcgcagtgggagcgcagatctgtatgcgatcaaatctgtcgacagtgatacacagctgaccctgacgcgaaatataacgtccgctttcactggagtgaaatatggcattattacagcagaaactgccagcacatcgtcttttgcgaaccaactagccagcgcattcaccctctggcgtaacgttgtccaaggatggtctacagccctgaccggaagcggcaacattacgatgacagaccctataacaggggcgtctgtgactgttcctgctgtatctgggatggcgaaagcatctgatctcgcggaactcaggaactcactgaaggattcagcgaagacgagcgcagcaaacacgttcacacagacgcaggtattcagtaagggggttactttcagtaccactataacggctgcagggcaaattctcaggaagaatagcaatacgcagttcactgccatcgacgccggcaaccttgaaattagcagcgacactacaccgtatattgattttcaccataaaggaagcgctgcggactacacacataggatcatcacagaagacggagcgctggccatctatcctgggctacgcattagggggaataccggatgttatggtgccgttacactctatggcgatctgtggtggggttacacagcaacaagagagacagacccggtaaatccagcgatcggaaccctgattaactcccctaacctgaccttaaggttcaagcaacgaggtgctgacagcaaaggggcaaccgctggaatgtcggcgctgtactttgaggaacaggtagggtctaaccaccgcctggcgatcaccgttcaggggttcaacgctaaccagcagtggtggcagttcctgagcgacggcaggatctacggaagccagaatgggaacgtccagttccagggaacgtccgacgcgcgcatgaaacatgacattaaaccgacagacggacagctatctgtcgaccgcatccgggcgcttgagctggtgacgttcgtctataacgacgacgagcaggaaaggacgcgccggggaattatcgcgcagcaggcgagggaagttgacccgcagtatgtgaagcagattaacacggcatatatgcgtaacggcgaacgggtgaatgacgaccgccttcagttagataacaacgtgattatgatggatacgctggcagctgttaaggtgcttattcagagagttgaggtgttggagaacaaacttaactcatccgaagagaaagagccctccgtgaatacaaaccagaatactttagatgctggcttggctatgaccggtggatataagtaa

SEQ ID NO: 200970 - DNA, 483 bp, Klebsiella oxytoca
atgaactatatcgccactgtaaacactcccgcgcatggcaccatctctgtcacatactccgacattgaaaagaatatcctgggcgcctggcgcgaagaagagaccatccagctgtccgggaaagagaagcagcagatcgccaaagacatcatttgcaaccgtcgattcacgcgggtatttgagaaagcgtatgtggtaaattctgggtttggaacatttgtcttcccggtgcgctccgggagattctgccagtccaagctgactgagtttgcctcgcagatcgctatctggattaagactcaatcgtcgttcgattttagcgatgatgaagcaatagcgcagggtatgcggatcgccaacaatgcaattaaatgcaaaaacatcacgtatgccgctggcgttgactcatggaaactgttttgcgctaactttatgctgaatgtatacgccagcaatcgaattcacatactggctggcaagtaa

SEQ ID NO: 200971 - DNA, 195 bp, Klebsiella oxytoca
atgacggcagaagacgtgattaatgatgtgctggtggagctgggtaagctacctgatcatctcctcatagccaccgtatttgacaacatacctgctgagttaaaggcactggccaatgagtggggatggatggatacggaagttagagagcagctctatgcgatagcctggcggatagttaacgcgcaaccatag

SEQ ID NO: 200972 - DNA, 279 bp, Klebsiella oxytoca
atgaccaaatcaaccataaccagagagcgactgtcagatattttagagttcggcagtggaaggctcatcaagccaattagtgatgaagaaatagagttgatggcccgcatggcgctggccgcaatggacagcgagcctggtaagatcatcgaagtcaatgtcggcggcaatacttgggtgcaatgctctgagaaagccttcgagaatgcaaaatccaaaggggagctcacacgagtactttatgagtatccatcggcagctgttttcttgaaagattaa

SEQ ID NO: 200973 - DNA, 540 bp, Klebsiella oxytoca
atgactgatatcaccgaactggcgcagagccttaaagcggcggcagagaaagcgactcctggcaggattggcgaccgcattgatggaagcgggagcattaaatatgaatgccatggttatgacggctctcttgttcttcgcaccgaccataagaatatggagtatggatttatcggtgataactctttagccgatgaagaattcttcagggcatgcgttcctgatgccatcctcgcgctggtagaggcgctggagaaggcgcagcagcggattggtaagcttgagaaaaaattaactgaccacaagagaatgaatcaagagatggcaaaagcaatgcttacgcctaatgattccgatgcggcagggatggagattgcagcactgcgccagcgcatcgccgagctggattccttccgcaccgtgaagcttccgctaccatcgtgtacttacgctgaccacagctatccggcatactcaaagcgccaggttatctctcttctggagtcactgggcatcacagtcgttgagggggatgtatga

SEQ ID NO: 200974 - DNA, 537 bp, Klebsiella oxytoca
atgaaagtagaacgaatggacgttatggctttcactattaccaacgtcgatcgcctcgacccaatcagggtgatgattgaaaactacgagcccggaaagggccgtatcacaatcacctgcttcggcaaggcatggacggctgcctggttcgccatgggtggtgattctgttcaggcttttattaagcgcgttagcaatgactatctgattggttgcttagatcctcaacttgaaagctcggttgacgacgataacgaagcaaatctagcgttcgttaaggcccatatcattaagcttcgtcgcgaacgggaacttgatgctgagaaagctcgcgaaatgtgggatgaagccgaaaatgctgatgacgttaaggcatgttgctgcgactacggcattggtaatgaacttttggagctttttggcgacgacccatgttacgcacgatggccctctgtgcctaaccctaattatcaatacctcgatcgcatcctgaatgcggttcgtgtcgggctggtagaaatggagcgagcagcatga

SEQ ID NO: 200975 - DNA, 642 bp, Klebsiella oxytoca
atgtcgagtgtatctaaagctttcatgtttgctgccggcgctcatggtggtgttggtcagaaacggaaatatacaggtgaggattacatccaccatccagactcagtccgatcaatagttgcctggtatggcggtactgttgagatgcagattgcagcattactgcatgacgtagtggaagatacccatgtaaccattgagatggttcgggaacacttcggtgagcgtgtcgctgaaatggtgctggccctcaccaatatagccaagccagaagacggaaatagagtgcaacgtttcgttattaacgttctggagctgtcacaaagccttgatatgcagacacgcatgataaagctggctgatctgctggataacacgtcgtctatcgtcgaccgcgatcctgagttttcggctatctatctcgctgaaaaagagttaatgctcaaggtcctatttgagaataaggaaattggcgccgacgagcgtgtcgttgaccttctggagaaaaaaggtatcgagcatgcattactgattaaagctcgtgatgtggtagtggaaggtatagccagtcttcagccagtacacatgaaacgttttgaaaagcacaaggcgctgatttggggcgcatgggagagcgcatga

SEQ ID NO: 200976 - DNA, 177 bp, Klebsiella oxytoca
gtgaagaggctctgggatgcggccaatgccgcgctcgatgttatcgacgcagaaatcgcccaaggcttacctgagcctgaatgggccgctcagctgcgcgaggtcattgctctaatagatgagctatcacctgaacaggacgattgctccccttctctcgatcataataataagtaa

SEQ ID NO: 200977 - DNA, 234 bp, Klebsiella oxytoca
atggaattaatcccaatcccaaagtcaaatgtgacagtgccacgtagttaccgggtaaccatcgtggacgcctggtggctggtgaaagatggacacgtattcaaaacgaagcaccccggaaattacatgttcaacccagacagacgagtggttgagcgtgtctttaccaaggagctgcaaaacgactatagcgttgaacagcttcccctagcgtttatcgagtacagaggatga

SEQ ID NO: 200978 - DNA, 300 bp, Klebsiella oxytoca
atgccccgcacgattaaaggcatagccatcgtcgctacctcactaatactttccggatgcgccttcccagacaaggatggcgactttggtgcatatgtacacagctgtcaacaatacgcctatggtaaatcctatgcttttgaacatagagatttagcttataagatttgcaaagatgcggcgaaactctggggcgacgaagtccctgcctatgttattcggcaaatcaagcttcaccccgaaatcccagaagatgagattaaatacgcggcaatggccgggtcattgggaaataactaa

SEQ ID NO: 200979 - DNA, 381 bp, Klebsiella oxytoca
atggttggctgtgctggcatgaagataccgaattatgatgaggtcaaaacaagcccgcactacactgaatgtcgtgagttcgctgccgatgtttacaagaataatggatacagtaaagaggccaacacggtgattttgaacatggacgatcgcaaggcccaagcgattgtttcaggatgcgtcgtgacaatgagcaagaacagcatcgaagaagcaaaggcagacttaaacaaaaaggctgcagcttatgggatgatcagcggtgcttgttataacacatcatgtcgagtcgacactgaacagcagttaaaggcttatacccttgggagctattacgcttcatctaagaaatttcctgagcagatgaaacctgaattttga

SEQ ID NO: 200980 - DNA, 819 bp, Klebsiella oxytoca
atgtctgagactttagttgttgtagcccctgcgccttccgcacctagtatgacttatggcggcggcctgatttatagttcaattccgtctggccctaatgaagggcagattttcttccaaacagttctaccagcttattccagccccaatttttgcaccgatcgtttacgttggatggttaaattcatcaacgaaaatggtgtaggcaatccggatacctggaaaacattagctgatgtaattcgctattacgctagtgcggacacagcaatctccaaaaaccccaaaaccaacccatacgatgcttggcataaatgcccttggccgccggctagttttgatgttaagactatgtcagtagaaaaattcagcggcagcgtgaacactccaattgtggcatttggtcactatctctggggtgaagggaaaccacgttcagtagatctttctaccgtaggcttaaaggtgcaggctaatcaaattgaccctgtgatgatcgccgtgaaatcatatggcgccggcacctaccaaattaacgggaactttaaccgtaatacctttgatgatggtgtcatcccgggtctttaccttggtaatatcacccttaagactgagggcacgcttaaaatcgagaagaatggctcttggaattacaatggtgttattcgcgcatttaatgatacttatgatgctaatccgagtaaccatcgcagccaagctgcagaggatttaactaccttattgcgcattactcaagggaccccatatgaaattcgcattccaggtgaaatcaaagtaagcggctcaggtaagaagtaa

SEQ ID NO: 200981 - DNA, 411 bp, Klebsiella oxytoca
atgaacaagaggctaagtttcagacagttccttgagattaacagcaaacttatgcatatatcaggcgcgtggtcagacctgtgggttatgatttattacacacaattaagtgttggaaggctaataagacttaaatacgatgatataagtgataactcatttaatacaggcaagcgagggcaactggaggaactatgtattgaatcaacaggtccgattaaacagatactgaaacgcaggcgaaagaggtatccggatgatatatatgtgttccagagtcattcaaaccgtgtaaaaaaatcccctcgcccggttacggtcatcgcattcaatgcagccttaaggaaggaaggtgcaacaagaccaggtctgcctgtgagcagcagcagcgcgaaatacattaccggataa

SEQ ID NO: 200982 - DNA, 1497 bp, Klebsiella oxytoca
atgaataatgataaaaatgaagattgtcgtcgagacagtcgctggggaattatatctccgtgtaattatgctgcatcaggcctgagtcatcttcttaaaagtgtctttgaaaaagagtctgtgagtgtggtcatcaatgaagatactgacatatctgagattctcctgaagatgacaaactcggaagttaacagctatatggtttaccttcctgatgaacctttttattttctcttggtcctgagaattattattaccgcagataaatattattgtcctcagtcgaagttcatatttgtcagtggcgtgtcgtgcttctgggtcagacagaatattttacacatgtcagaaggctcttttgatcatttcgtaaccaaggttatttcctcaaaactgggtgtaaaacgtcttggtatgtatatcgagcggactgaattaaacctgccttatgaagtaagagaatactatatcgccgaaaaaagcggcatcgacacaccggcactgaccttgcgtgaagtcgaggctcttatcgactatttcagtttgcccgggagcacacttgtcccgaggaatagtcaggtagcacccaagacactgtataatcagagaaaatcgggactaaaaaaaatggtcgaaaactcagcagagctggccaggagactttctggtgcatccaggagatggaaggcagcgatcgcccctgatgaattatcttccggcgagaaagaatttatagcaggtattgagatgcaggaggtataccctgtttttcaacctatagtggacacttcacgacagatatgtggggttgaaatactaacccgctggtgtcagaagggaaagaatattccaccagaaacgtttataccggaactaaaatccgaaagtgttttgttgctgctgacggcgatgggtctcaaaaatgccattgacggcattaacaggtacgatgggaaagtcttcttttcggttaatattcattctaaattagctgggtgttccgggctgataagaatgtgtgccgaggcatgccgtcagataaaaaatatgcaatggcgaaaccggctcgtacttgaatactctgaaaaatcagactttcacaagtcgcacgatattatagatgtgctggagtccatcagtacgctgggcgtgacactttatctcgatgactgcttctctgaaggaagtgtatttttcccggtcagaaaatactccttcgacgggtataagctggataaaagtattgtagataatatattgaccagcaaagaagatatggcattaattacttcgcttgcaggttattgctctatgaccgggagacactgcatcgctgaaggggttgaagatatgtttaaatttgaaaaactaaagaagttaggtattgaactctttcagggatatctgttctataagcccgtgagcataaccgaccttacatctttgattcagggatcgaagtgtgctgatagtctgaagcatacagatatttcctga

SEQ ID NO: 200983 - DNA, 903 bp, Klebsiella oxytoca
ttgagagtctttttacagtctgattctatcgccagagaaagtaacttttcgtacgttactcatcattgcctcgggaagaaagttagctggtgtctgttaaattcacttattattctgggcatgctgagtcagtcggggatggcatcaccggtaattaataatactggtggtgacagcagtggtaagataacggctgagcaactggatatggataatgttggtcaggcaatggcgatgtatctggtacaacatcctgagtttttagttgccgcgagtgaaacattacgtcagcagcaaaaaattgcacagcagcaggcgatggcacaggcggttctgggtcaactgaccggattattgcattcagtgagtacaccatcattcggtccggaaaaagcgccggttgctgtggtggcatttgttgatttcagacagcccgagagccttgcactgattccccgccttgttaacttgtcatcagaacatccgcaagggattcgggtgatcattaaaggtgtatctcttccggggggagtggataataaccatgaagaggaaatcattgtggcaggtatgctcatccgcaaagataagggggaggttatttacaaaacatatctctcacgtatcgccgatattttatctcacgatacgccacacaagaagaacgtaattgcagcgacaataaaagagtttactgacgaggtatcgttgcctgattctagagagaaaaaccagaaggtattgaaggacgatcttactctggccggcagtctgggattgaccagatttcccgcgttgcttatcatcccgcgaaacggggccaacctgcagaacacaactgtattaacagaaagaattaatgaagatgcaatatcgcagggggtgttaagagcaggactctag

SEQ ID NO: 200984 - DNA, 783 bp, Klebsiella oxytoca
atgagtggggaatattcacggcgcgatgctttttcgcggcttgttgttttctgcctgttaacgctgactgggattccatccgcccacgcagggctggttgtatacggaactcgctttctggttaccggtgagaagccggcaacaggagtgacggtggagaataccgggacgctgaattacctggttaaaagcgacattgagtctgcagcagactgcgcgccagagaatgtacaacaaaaacagagtccgtccgggatgtgtgcaaagaagccagcactgatcattactcctccgctcatcgccctgaagcctggccgcagtaaccagctactgatgtcatgtatagagtgtggattgttaccgcaggacagagaatccttgtttcgtctggctgtcagcgcaataccgtcagggcattcagggcctaattcggtgcagattgctgtacgctcgcgctttaaagtattttatcgcccgaaagggctgaacgccgctgacgcccgtcaggcctataaaaaactgacatggcagaacagggatggacacttatgggtatcaaatcctacggcttattacgtgacgctctatgaactgaatatgaatggtcgtgaagtaccaacagtcagtccccttcctccttattctagccggcaggaagatggatgtgaaaaaagagaagaatgtcaaattgaatggaaaacaattgacgatgatggaagggtattgcctgcaactggcgtcctaacaaagaagtacagggccactgaagaaagaatgccctga

SEQ ID NO: 200985 - DNA, 549 bp, Klebsiella oxytoca
atgttttctctgagaccacagcttcgtgcttattcggcctatatcatgctggttgtcctggcgacaatacctgaccgggtttcttatgctgccggcgggcaagtgaatgttacaggcaatatcattgctaacacctgtactgttctgccggccgatcaggaaaagtcggtctcaatgggatcggtcccggttaaacaattcaccaatggcaatggcgaggcctctccgacttcatttatgctgacgtttacggattgtgcttcacaggtttcaggaatatcggtcaaattttcaggtacaccggacagtagcaacactgaactcttatctctcgatgacgatccttcggttgcctccgggattgctattgccctgctcgacagcaacagagcacggatccccctgaaaacatcaacagcggcgtatcctttgcctgcgggcagtaccagtctgaccatgaagttctatgcgcagtatgtcagaaatgggctgcccctgtccgccggtaaagccgatgccacaaccagcttcacggtaacctacgaatga

SEQ ID NO: 200986 - DNA, 606 bp, Klebsiella oxytoca
atgaaaatccggaatgtttatcattttgacttcggcaggttcaagcaggtgacaaaatccagtcactttttcctccataaactcaatgttgccgtgctggtaacgggaatattgacggtatcgatagccggggcggcgacctgccccagtaacagttgcaacctcactgtcactggtaccgtcacggcaacgtcctgtgatgtggaaacaacatcgcaaaacatcacggtgccgcttggtgacgtgagcataggcacattccagtctgtcggtgataccagtcaggcaaaatcgttcagtattcacctgaaagactgttccgattcggtatccggtgccaaagttacttttcagggaaatgcagatccggacaatactgcgctcctgcagctcacccagaaagaaggggcggcaaccggcgttggcgtggagattctgcaggggaatgctgagagcagtatcgcactcaacacgcaggtcagtgcgggcgcaatttctcctggtgaaaatactttgacatacaggctcaggtataaatcaacccgtaatgtggtcacagcaggcttcgcagacgcagttatgttttttgatcttgaataccagtaa

SEQ ID NO: 200987 - DNA, 1125 bp, Klebsiella oxytoca
atgcatttaataagtaaaaaatcaatcgtatgtaggctagtattccttgtatttaatcagtggttaaaattgacacattgtgtgttactaaccggaaaaaatatcagtcttgcgatcgttttacaggcgaacaacgagaagagaaaaatgagcaaaatttacttattactgattgccactgtttgctccctgacatctgcatttgctgcaactacagttacactcagtttgaataacacactaaccacgacaaataacacaacaggaacgattataacttcatctacgtttactgttcctggttttccttattcttgtacagggtactgtgcgacatcctttagtgatataaatggggtaatacctgcgtatcaaacccgcccgtcggactgggttttccaggatatggatgattatatttctgtagctgtagcgatgtcgcaagcatgtggatacatttatgctccctttaatcgtagagcatggggggcacttacctgtggagatttaaaaaaccacgtgagatggaatcccacaacctggcattccagaattaaaatactaaaacccatgatcggtggtacttattcatcaaccaagcttcttggtacctggagaatatgtttctcagacgcaagttgcaatggtggtacagaaacggctttagtatatcttaactataatattacagtccctgaaacctgcactattatgcctgactctgtttttcagatcgatttgggccagatagcgcagaaaaattttgtttctggtggcgcaggaaacagacccaccgggtatataaaccgtcctttaaccgtcaaggttatgtgtgcaggcggtgttgaacaaaatgccagcctgaccgttcgtcttcaggggcaacctacaacagcttacccaaatgcactcgcgacggataacagtgctgtcggtgtggttatcaccaagcccgatggcaccacaccactcgtaccaaatgatatcaacagtacaattccgttacagctttccgggggaaccgggaatgttattatccaggcttaccccatcagccttacgggtaccgctccaccagtaggattatttacatcattgtccgttttgcgatttgactttaattaa

SEQ ID NO: 200988 - DNA, 2664 bp, Klebsiella oxytoca
atgaagcatttctcttcagctaagtacactgccggcaaagattacagggacagtcagacattaccaggtctttattgcagacagctcccgatcgctgccgcgttaatcggagcgttatcctgttatccacagggttcccatgctgagcaaggggataacgaaaacttttttaaccccgcattcctgtcaaacgatcctcatgccgtcgcggatctttcccggtttcagaaaaaccagcaggcacctggtgagtatcgcgttgatatttatctgaacaatgagtttgtggtaacgcgttcccagctttttaacgaaaagcccgcacaagataatacgtctgaggctgtgcttgacagttctgttgatgacggaaccgggctcgtaccctgcctcaaattaaaatacattgaggcactgggcgtcaatacagccgcctttgaccgactcaaagcggcctcggacgaagagtgcatcaatctgccggcatcaattcctcacgccagtacatcattagattttgaccggcaacggcttgatatcaccattcctcaggccgctcttttgaatcaggcccgcggatatatcccgccagaacaatgggatcaagggatcccggcccttctgcttaattataattttacaggcagcagagtcagcggagatacgcgaaataacagttactttctgaatcttaacagcgggctcaatattggcgcctggcgcctgagggataattccagctggaattacagccagagccggactcagacgaatagtgactggcagcatgcgtcaacttaccttgagagaaccatcattcctctcagggctgcgcttacactgggggacagccggacaaacagtgatgtattcgattcattgagttttcgcggcctgcagcttgcctccgatgacaatatgctgcccgacagcatgaaagggttcgcgccaacgatccgggggattgctaaaagtaacgctcaggtcacggtgaggcaaaacggctatacgatttaccagacttacgttcctccgggcccgtttgtggtgaacgatttatacccgacttcgtcaagtggtgatctgaccgtcagtattaaggaagtggatggaagtgtatcgtcctacaccgttccctactctgctgtacccatacttcagcgagaaggcggcctcagatatgcactcactgcggcccggtacagaagcagtataagcagtcagacagaccctgagtttgtccaggcctccgttgtcaggggcataggccatggattcacggtgtacggcggcggtcaggtgtcagataagtatcacgcttttgccgctggcgcaggtaaaaatctgggagactggggggcattctcaatggatgtcacacaagcgaacagtaagcttgccgacggtagtacgcacagcggacagtcaatgcgattcttatatgccaagtctctcaacgagactggaacgaatttccagttgctggggtatcgctattcaacccagggtttttatacgttagatgaaacgacttacaaaaaaatgaaggggtataactatcagaccgaagatggattacgctcctatggtgattacttcaatctgcgttatgccaagaaagggaaaattcagcttaacctttcacagcaggccggacgcaatggttctgtgtttatatctgcaagccagcagtcatactggcatactgatgagaaaacggcccttctgcaggcaggctacgccggaacatggaacgatgttagttacagcctgacatataactataataaggcacagggacaggccggttcggaccaggtcttcgcctttaacatgtccttgcctctgggaagatggctcttcccggacagcaataaaccgttatacgccacactcaataacagcaccgataaacacggtaacatgactcagatggcaggcctgagcgggacgactctgcgggacaataaccttaactacagtgttcagcaggggtacagcaatcatatcgggggtggtgctaatggcaacgccagcctggattaccagggaacatacggaaatgtcagtaccgggtacagttacagcccgggcttcaggcaactgaactacggtctgaacggcggtgtggtattacatgagcatggactgacattgagtcagcctctcggcgatactaatgtgctcattgaagcgccgggggccgatggcgtgagtatagagaatacaaccggggtcagtactgactggcgtggatatgctgttgtcccctatgccacaacatatcgtcgaaatcgtgttgctctcgatgtgacatctcttaatacgcataccgacattgatgatgctgtggtcaatgtggtcccgacaaaaggtgcactggtacgcgctaaatttaatgccagagtcggggtaagggccctgatggtgttaatgcataatggtaaacctgttccgtttggcgcaatggtcagcataccgggtaatgataactcgggcattgttggtgatgacggacaggcatatttgtccgggttacctctgactggaacagttaaagcccagtggggacaggaggctcatcaacagtgcgtggctaaatatagcctcgaagagaaaagtcttcaccaggccatcacccggacgaaagcagaatgcatttaa

SEQ ID NO: 200989 - DNA, 720 bp, Klebsiella oxytoca
atgaataagacactgaaaaacatttctgtcactttatggctgatgggcttattaagcacaggttatattctgccagccagtgcggcggacaccaaaaaaggggggacctcacttggcgccactcgcctgatctatcctcagggggcaacagaaatatccgtaccggtgacaaattcatccagcacgtcacgttatctcattcagagctggatggaaaatgccgcaggtcaaaaaacgacggactttgttgtgacccctcccttgtttgtcagtaaaccaaaagcagaaagcacattacgaattatgtatattggcggtgcactcccggcagacagagaaacggtgttctatctgcacagtaaaacgataccgtctgtgaaccccaataccattcagagtcagaatgtattgcagattgcgattgaaagcgtgattaaagtctttgtccgcccaaaaggattacctgtgccagcagataaggccccggcacagctgaaatgcaccagaagtggtgggcagttgaaaataacaaacccctccccttattatgtttcactggttgaggttaatgtgggactccagaaactggacaacaccatggttccaccaaaaggaaatatttctctccgtgttccccagaatgcggcaggcagcgtgacctttaaagccgtcaatgactatggatcttatacacctaaattaacctgctccgctggctaa

SEQ ID NO: 200990 - DNA, 546 bp, Klebsiella oxytoca
atgacatatacccgaaaaaaactttgtttatgtgtctgcctttacatacttgggacggctgtcactttcgctgaaaacagaacccagtacggcggtgttgttcatcttcggggcgcggtcactgacggcacctgtgcggtcagtacggagagcgagaacaaacaggtttatatggggcaggtgcaaagctcccgtttcgaagaattaggggcgtgggcagatcctgtggcatttagtctggtacttgtcgactgtaccgtcgcctcagaaaagcaggtaggaattatgttcaatggcgtcagcgatggcaaagacccactcgttttccgtgcaggagaaggcgcaaatgctgcacagggggtcggaattgggatattcagtgcctctggtgaacttatcatacccaatacccggcctcagctgctgacatctcttaacggcgaaacggtgacattaccgtttacagcccgttatcgggcaaccagccggcaggtcattgctggtgatgcaagctcgaatgtattttttactctctactatccctga

SEQ ID NO: 200991 - DNA, 546 bp, Klebsiella oxytoca
atgaaaatcaaaacactggcatttgttgtcacctctgcactggccctgagctcaactgctgcgctggcggcctcaactgctaatggcggcacggttcactttactggtgaaatcaccaacggaacctgtgctgtatcagcaaacagcggcaaccagactgttaaactcggtcaggctaaagcgacttccctggcaactgcaggtaaagtttccaaccagaccgcctttaatattgacctgattgactgtgacaccactgttgctgcgactgctgctgtggcattcaacggcccggccacaacagccggtgatgccctgtctgtcagcagcatcaccactccgggtgttgctgcgaccaacgtaggcattcaaatccttgaccagaacaatgccattatcaaaccgaactcgggtgtcccgggcgcagctaaaaacattgataactctactgtaacacttccgttcactgcacagtttatctcctacggctccgccaccgcgggtgctgcggatgctgatgcgcagtttactgtttactacaactaa

SEQ ID NO: 200992 - DNA, 279 bp, Klebsiella oxytoca
atgttctggttgggtattttcgctgcttgtttcatctcttcgctgaacctcattagccctctgccagagtccgacaaaacgaccggcgttgcttgctgtataccgaacggtatgacggatgttgcggtgaccaaggtaatcctggatgaggcgggtatcagttcccctttctgccagttcaaatccacaagaatgcctcagcatatggggatgagtttcaataacaatgccagccttttctcctgcgcgacgaacaatacgataagcctgctggcgtga

SEQ ID NO: 200993 - DNA, 297 bp, Klebsiella oxytoca
atgactggcggcaggattataacgagtgtcgtccccattctaatggcgtcactgccaggtagtatgcgcaaggttactgactgcagtctgagttttgaataccggaaaatagtgttgcgctcaacgcccataatgcgtgtaaaggtacagcatccgacgccgtacatacccgcatcaatgatttttaactacgtttttctgtccaaccgtatacgtggagacttgttgctgaaggactataaagcgcttgaatggctgcacgtaaaaagacgaagagaccgggacagtcctgattaa

SEQ ID NO: 200994 - DNA, 186 bp, Klebsiella oxytoca
atgaacacgatcagagttgttggtgtcgatatcgccaaatctatatttcaggtatgcgtctggaatgttgatggatctgtcgcatggaataaaaaaatctctcgttctaaattgctggatacaatccggcagttcgagcccggtacaattattgcgatagaggcctgtgctacttcgcatttctga

SEQ ID NO: 200995 - DNA, 831 bp, Klebsiella oxytoca
atggggtattgcacaaggcttatcccggcacaacacttgaaaccttttgtccgcagccagaagaatgatgccaatgatgcgctggcaatttgtgaaaccgcattccgacctggtattcactttgcttcggttaaaaccatggaacaacaggatatcaaggcgcttcgaaatacacgtcaactgatggttgagcagagaacggcgctggctaaccagcttcgctctctgctcgctgaatatggtctcatgatccctgttgggatccagagtctcctgcagcaactgcatgaacttattgaagatgcatcgaatgagttaactttcactctccgtcgtttactttattcattgcgggaggatatgcaggcaatgaatgaacgagtcaccggtctggacaaagatattgcggcattgtcttcacagcagacagcatatcgccatttattaacgatcccgggagttgatccgctcattgcggcggcatttatcagtgaagtgtatggaggacaattttccagtggcagagaattatccgcctggtgcggcctggttccccgacagcactgttcgggaggcaagcaacgattatcctccgtgacaaaaaatggcaatcgttgtctcagaacattaatcattcatggtgcacggtctgtcatgcgctgtgtgaaaaaacgcggtgacagtccgggcctttggctgcaaaaaattgaggcccatcgagggttcctgaaaactaccgttgcgctggcgaataaactgacgagaattatctggcgtgttttgagtgatggtgttgattttaatatgcagaaggccgttgcgataaattaa

SEQ ID NO: 200996 - DNA, 501 bp, Klebsiella oxytoca
atgcagaaaaatgtgactctcggcaggcgtaagggctgccctaactattctcctgagtttaaacatcagctcgttgccgccttctgcgaacccgggatatccatctcaaaactggcgcttgaaaatgacattaacgccaatgtgttgttcaaatggcgtcggcagtggcatgaaggtaaactcctgctgccttcgacagaccttcctcagctacttcctgtaacgctcaacgcctctgctggaccactggcggtgcagtcagaactgccaacagaagagccggagaccctcaatgtcacctgtgaggtggcattccggctcggaacgatccgcctcttaaaatcatggtcgctaatgtggtggaccatgtggagttgctgcttgccatctcctcaacaagcaggccaattcaggtataattattctgccagcaggtttcctcaatgctgtaaataccggtcccgcaggctgtgcagcgtttttccccgctgtaatggttag

SEQ ID NO: 200997 - DNA, 447 bp, Klebsiella oxytoca
atgaattttaagaccgttaacagagaggaacagaacgccggaattcgtatgctgaaatgctacctcgccagtgaccaccgtgggcattttgtgaccaccagtgaagcggcgagcatgccgggacaggtatggagctgcgtatcctgtggctgtcgacttatcttccatactggcacgcacgctgactcaccctggtttgaacatgaccagaggacagtagctgccagtacgttgatgagctgtgcgcatattgacccagcaatgaaagcggaggtacgcagcagagcattacgcagtcttttcaacacactggattccccggtaatgtcgctggcctggtactgcgtctggtgcactaaccattacagcggggaaaaacgctgcacagcctgcgggaccggtatttacagcattgaggaaacctgctggcagaataattatacctga

SEQ ID NO: 200998 - DNA, 219 bp, Klebsiella oxytoca
atgaccacgaccagtagcctcattctacgtcctgaagacccacttatcgatatgacattcatcaccacgtacaccggtatgaccgacaagtggttttacaaattaattcgggatggcaggttcccgaaacccatcaaactgggacgcagctcccgttggtataaaagcgaagtccagaactggatgcagcaagctattgcagactcacggggggcctga

SEQ ID NO: 200999 - DNA, 570 bp, Klebsiella oxytoca
atgagttacacatacaacccttactggcaacaacgcattgccgataccttcaattgcaccctgaacgcctatacccgcgtactggccctgcgcgttgacctccgtttaccggatacaccagcggcaaccgatgccgctgttatctcccgcttcactgacgccctgaagtctcgtattgatgcgtactttgccctgcaacgtcgtgaggggaaacgcatctggccgaccacgctgcgttttatctgggcgcgggagttcggcgaaatcaaagggaagaagcattaccacgtaattctgttgttaaaccgcgatacgtggtgtgggccgggggattacaaggacccggattcgcttgcagggatgataaaacaggcctggtgcagtgccctgaaggtggatgcaaaggcgcatgccgttctggcgcgttttccagcgagtcctgcatcctggctgacccgtggcgaagatgttccgctgcagcaggcactgttgcaggccgcctatcttgctaaactcgaaaccaaagtcaccggtgacggtgagcgtaacttcggctgtagtcaaggctga

SEQ ID NO: 201000 - DNA, 471 bp, Klebsiella oxytoca
atgcaatgcgcagagccaggcgggaacagccactttcgctgcgatcgtaaactcacagagtttatcgacgatgccggtgagggaaacggtgattacctgtcatttctgaagccagaactacagcggcttaatagctacgatctccgctactggcctgacattaccgggatcattcgctcgctgggtatggaggaggtggaggtaatatttaaagatgaagcgacagaggcaattatcaacgccagcaggccctcacagacggatttcttcagagagttattcgataacatcagtatgcaaaaaaccggggatcagtacggattaccacgaacgttcaaattctcagatgcagcactggcgacgatttgtaatatcacctgtgatttgccacccgatgacctcattgatgcggcttatgtgaaaggcacccgccaccgactacaggctcagggctttagcgcagtatggtga

SEQ ID NO: 201001 - DNA, 972 bp, Klebsiella oxytoca
atggttttacattgcgagaatggaaagcaccagctcataaaaagccgtaacctgagagtttgttcattttatgccgggtggctgcatgtcaataacataattaacaccagcgatgttccccgccaggatgctgacagctgccgaagagccttaaatcaactcattaacagggccatgccggataaagagcagcaggagagactgttgtctgatatggaagcggctctggataaaaatatcattccatttgaacatttcgattgggtcaggctggatgaacgggcagcattctggctgtggggacatctttatcaggacactgacttcacgctgggaataccatcaccttcaggccctggatataatggcatgaactggtataaacgaaatgaattaccgcacgctcccggtagccatcaggagcgagccaatatcattatttattttttcgataacattatttttgccgcaccacagatgaatcacaggtcgcatcagattctggatagtctaaaagaccagtggaaaattatttacaataaaccactgccgttaaaatggttgccgaatgaagaagatgctgtcctgtgggcatggaataaccttcaaaaagtacagggggataaagttggttacatcgacagaatctacaagagtctgaaggctcccgaattaacctcctggtttacaccactaaatcatgctgaacgtaaccttgcattgcgtgccgcactggatttatgggatgacgcaccagatacaaagcgtttatttcttctcaatctgaataaagcctggaatcagcaaaaattacgtcagtcccgtaccgataaaaaagcactcaatacgtatctgaagaatgaaaccaaaaggcgactggactttatagcaaaacgtaatgagattcgcatcagcgacatgctggaaaaactgattaatgagcattaccgtaaaatctgtgacggggagtaa

SEQ ID NO: 201002 - DNA, 729 bp, Klebsiella oxytoca
atggctgtttaccgcaatgatgctgatttagacctgctggggcagtgcagcaatgaagagctgcagctactggtgaccattctgaccagggacccccgtgacggggacacccgctggacggagagccttaccgggaccccggagtatcgtttgctggcaccagaccatcgccgctactggcaactgattgccgctgagcttcagcgctacggtgccaacacgctggccagtctggtacgacgcggacagggggtgacttaccgggaaatcctcggtgatgtctgtgacaaagtggatgtgaattacaacccgaaaagtaccaccgaaactatcgagctttgcctgttgatgaaggtactggagaagagcctggaccagatgacgccggatgagctggaagccttttcccgcacgatgcaccttgacctgacccgcccgacgcctcagctcattctgatggcagtgcaggcggcaatacggacgtcctcgctggcggcacttgagtttgccacggtgatgtctgccagcgtcataacctctctcgggggcatagccacctgggggacggtcgcggtggcatcacgcaccctctccgtactggccgggcctgtcgccatcgtgctcagttccgcctggatgatttccgaccttgccggtccggcttaccgggtcactatccccgcctgcatcattgtggcctggctccggcagcagcacctttcccgttaa

SEQ ID NO: 201003 - DNA, 678 bp, Klebsiella oxytoca
atgactgaaccgggacaccgctatgaccggctggccagccgccttgccattctggtcagtcgtctgtttatgggcgaatcactcagcgtcaggcgactggcgcaggagtttggcgtctctgagcgcacggttcagcgcgacctgcgtgaacgcctgcgttacctcgacacggaatacactgacggtcacgtcagtctccgggatgcccggggaccttttcgtaccaacaacgacattctccgctttgcccggataaccagcgtggcacattactttccggcgctggacccgaaactgttgtccgtattgctcgatggcggtcaggactccccctgcatcatctggaatgctccgccacacgaagccccggcgctgtttggcggcttccaggtcattgttcaggccatcattcgtcaccgtcgcatccactttctgcatcagggtcatcttcagtcagcagtggcgccttaccggcttatctgtctggaagggcgctggtatctgaccggggtatcgaaagagcgtattcaggtcttcaccctcgcagctattacagacgtggtgatgacggtgagcggttttgtacgtaacagccataccagccgcatcattcaggacccgagatttatccaggcattaccccattttcagtacatcagcgggctcatgagggaatga

SEQ ID NO: 201004 - DNA, 465 bp, Klebsiella oxytoca
gtgaatcaaaaattacttcgcagcatgacactcgtcagtattctgacacccgccgtggcgctggcatttggtaacacccatacctgggtcagcggctgggggcagggacactctgaattcatcatcaaagggaaggggaagtcagagctgtatatcgcctgtaacaattatgaccccgaatccgcgacgctgatatttacggatatcaacggacataaggtcagcatggattccgggaaggacctgtttctgaaaattgatgatgaggacaacatcgatatcagcagcacggagagccgggtgggtgacggcaatattaccctggcatggaaccatctgcgcacaggaaaaacggtggttgtctccggtgaaggcgtccggcccgcgactttcacgctgaacggggcgggtaaagtcttacctgagttcggcacagagggatgtacctcaaaatttgccctgtaa

SEQ ID NO: 201005 - DNA, 513 bp, Klebsiella oxytoca
atgacagaaatatcgaccctcagccagcgtctgaacactcccacgctgcattttgttctgctcagcctcgtcaccttcggcgtctggccacttctctggttatataaaaaacaggatattatcagtgacaccaccggcatgccggtttacggcaatgtgtttatcatctggctggccgtctgctttggtatcggacgacagatggccgccactgcctctccggatatgatgggctatgacccggtcagcgataccctgctggcactgagcggtctgctgtcccttgcctgcgccgtgatgtatatcgtctgggcctttaaggccagagccgcgctgcgtcactacgcgctcaacacctttcactttgacctgaaaatgaacgcgttctacaccgtggtgttcagtatgttctatatcacgtactgcattaacgatatgccacaggcgctggcgaaacaccggattattcgtcagtcgcttcagtcttcctctgacacctctccccggacttaa

SEQ ID NO: 201006 - DNA, 213 bp, Klebsiella oxytoca
atgacctttctgaaaatgctggtgacagccctgggccaggttctgacctggtgcgggggtcatcaggcccggcagtatattgaaatccgcttccgccaggaaggctacgatgacagcagcattgatgcggccagagaagcggtcacgctcctggtcacggcactcattaccaccctgatggcacagatactgcgaattctggacagccactga

SEQ ID NO: 201007 - DNA, 390 bp, Klebsiella oxytoca
atgcaaaccaaatcatctcccctcatgcgggcggtatcgtcacgcccgtctcctgttgatgtctggcagaccctgctgaccagcctgctggaacagcattatggcctcacgcttaatgacacgccgttcggtgatgaacgggtgattcagcagcatatcgacgcgggtatctcgctggccgatgccctgaatttcattgttgaaaagtatgaactggtccgcactgaccggccaggcttcagcatcagggagcagtctccgtttatcacacccatagatatcctccgggccaggaaagccacggggctgatgaaccgtggcacgtataaagacgtggcggctattaccagaggacaacattcgcaggtcagcgctccagacaagcgatga

SEQ ID NO: 201008 - DNA, 477 bp, Klebsiella oxytoca
atgttcaaaaaaattagacttaaatatcataaaattagtgtagcatttacatcattagcaactttattttttatcttatcggcctatctttattttcacaaaagagagatccctgagtgtagtggtattttaaacgtatacaatgacgattatatcggcaaattatttatacatgtttctccagtatcatctgatgaagtctcctttgcaataaatggaaagatacactcgaaagcaaaaattcttgacatatctcaaatttatttattcagatataataaagccacctctatatttagatttaacttaatcaaaacaatgaactcgagggacgccatacctggagattttcaaccactttttttagcttcacccggaaatgtttttcttataaaaattgagcaaatcgacaaacaacagatgctattcatcaataacttctcgcctctgtttatttgcagtaggttaaaatcatga

SEQ ID NO: 201009 - DNA, 384 bp, Klebsiella oxytoca
atgctgtttcggaaactggtgttgttgggaggggcctgtaccttacttttggcctatcacggtggttattggcttagcgactggccgtggttgttttattatgcgttgatctcatggtggtttgcatttagctggtatattttcattacccctaaagcagcttctgttccgggaaagaataagaaaaaggaaaaatcattgcctatcgttagtcaatctccgactcaccggtataaacagactgatagtgatgattcttcactgattttacacagcatttattactcatcaataagcaacgttcagtcggatagtatcgttaataatggagcagattgtagttattcggactcgacagattcaggttgcagtgggggtgattaa

SEQ ID NO: 201010 - DNA, 420 bp, Klebsiella oxytoca
atgactgatatcaccgaactggcgagagagcgcctgaaagagaaatttgatgcgtggtgggagcgagagtataaacatctcgaatcctcgaaatataccgatgcagtgccgcatatcaaatacggtttctggatggcatatcaggccggtggcgctgagctggtagaggcgctggagaaggcgaaggggatggaagcctactggaaagttcaatgccgtgggataacggaccattgcgaggtgttgcaggcgcgtatcgccgagctggagccccgcaccgtgaagctgccagctgaaagattttgcccttcggagtacgcgggtagtcaattatggtcagaaactgaagtttggaataaggcgatcactgcatgtgctgacgcacttcgcgccgatggcatcaaggtggaggttgagtga

SEQ ID NO: 201011 - DNA, 684 bp, Klebsiella oxytoca
atgaccaaatcaaccataaccagagagctcgtccactggcttcacgatgctgcaaccgagttcgcttccaccaaactgaaaatgactatgaagcctgatgaggtactggcgctgactggcgctctattggcctcaatggataccgagccggtggggtggactgacgaggccgagctgcgtgacgttgaaaaagatggttgtggctatctgttcaaggccaaccctatctctccgcacgctgatcctcgccgcgtaattaagctttatcgacacgcgcagccagcgccggtagtgccggatgatgtgtcgatattcgaagcggcaattgaagaatgtaaaacgtgcgactcaattgatgagcatgcctggaatcacggtgttttggctgtgatagcaaaatatgaatcctgccgcgccgccatgctcgcagctgccccgaagtcacccggcagtgaaccggccaccgtgccgggtaaatggattccggtaagcgagcggatgccgccaagtcgtcatgaggttttggtcgggcgttggtggggagagaagccgcggtggtgttgcaaatgggctacgtatatccctggccaccctgattcgcagagtagcggctggttgatccccggcgcgtcatggacgccaactcactggatgccgctgccggttgccccgcaggaggtgtag

SEQ ID NO: 201012 - DNA, 162 bp, Klebsiella oxytoca
atgaaattctctgtaaaatcaatgaaaacactacttgccagccacggaaaaaaaatgaaattaacgggtagttttaaaaacggcgaccgcttctatgctgtgacagggtggagtggcgaatacaccattaagggcattgcctggcaactgggattagtgtga

SEQ ID NO: 201013 - DNA, 411 bp, Klebsiella oxytoca
atggttcagtttacaaattttatttattctattgttaatactgtcgcaccttttatgacaggtactgttgcaatatatattgttgcattttctatggttgtttttatatacgacatattttttggggatggttctatttttgaatggttttgctacattatgataggtctggcactggcaggactatttgtctatattctggcattatttttatcaccaatttacgaaaaggaacaggactggcgaaactgggctaaagaacactgtaaagttatcgaaaaaagagaaggcgctaccacgacgggagtgggtatttcattaaaaggtcaggcgggtgtatttcttggaggggaacctgatcagacagggtatctctgtgacgatggtgtaacgtactggaagaatgaataa

SEQ ID NO: 201014 - DNA, 216 bp, Klebsiella oxytoca
atgtctagtcaacaccagtatggcctcttaccgtgcaatttgcaaggagaagaaagccatgaagctaccgcgaaacgccctggtctggtgcgtattaatcgtgtgtttaacgctcttgatattcacatgcctgacccggaaccgcttatgcgaagtccggctaaaggacgggaacagggaggtcgcggcaagcctggcttacgaatccaacggtaa

SEQ ID NO: 201015 - DNA, 450 bp, Klebsiella oxytoca
  misc_feature (417)..(426): n is a, c, g, or t
ttgatagaaggtgaccaggcgacaagcactaaagttcagaaatggctctccggtgtttacgatgaactgtcgggtaatgtaaataccttcaaggagcagattgacaaaaatgtcgccagactgcctctggatgattcatcattcgaagggtttgactatggtgaatttgaaattcgctggaaccacccaatgacctataaattactggatattatccagaccatcaacgtcctgactcgtcaggcacatcagttgtggttatacggtcagatatcacaacaggttcatgaccgaattatcctgcaactcctgagctcactgcgggttgcgatggacaacatcactaaaatactgaacgctgaaaaccgcgtgaatggaaaatacgacgcattgccattcatccagagcattaagcgnnnnnnnnnnttatattgccagtctcgaaactaa

SEQ ID NO: 201016 - DNA, 201 bp, Klebsiella oxytoca
atgttagaaggctatacaattaaaaccgtagaagaccgcgaaagagttcttgccgttcaagctgcgttagaaattgcaaaggcatcggtaggctctgttggagccagtacccaatcaagagtagcggcagacctcaaggcggttgctagtgaaattaatgatcttgcagatgcgattcaggcagctatcgctaataaataa

SEQ ID NO: 201017 - DNA, 555 bp, Klebsiella oxytoca
atggatgctaattatatagcttatgaaacgctcgtggctaatcgcaatgcagctgagtgggcgttttggtcaatgattgctgcatttattagtggcactgcaagcgtagtcactttgatttttgcttatagagccctgacaacctggcgggagcaagaaaaaacaaaagtaaaaatggagtttagatttgcgatcaaacaattaagagtcgccttgttaaatatgccactagaccttgaccgagatgaacttgaggaagagagggagcaggttattgtgaggtggctttttaaagatgtcgatctcataagtcagcagatagatgctggggagcagaatgtgcagagatttgataaccttctaagcatctttgacgcctgccaatcgtcttggcttgctactgagcacttatttgatgggactcaacttgctagagactggataatattcgaagacgactttgaacattatatcaatggagaagggactaaggcaccattagtgcagttgcttaataaaataacatcttcacgatttgtctttgattcaaaataa

SEQ ID NO: 201018 - DNA, 273 bp, Klebsiella oxytoca
atgaaacagaaaattacagatgcattggttaattttacgcatagcttgaacgacgcgcttcacgcttccattgaaaggaaaatctcagacggttacgacctggcatatcctaataagaatgattttgaacaccgcgagtccactacaaaagccatacgagagttttactaccagcggatgatgaatacggcctcgttgctgctcacaggtgtgtcactacttgtggcattggttgcactgatcgttgcgatagtggccattaaatattcttag

SEQ ID NO: 201019 - DNA, 276 bp, Klebsiella oxytoca
atgggtattgaaacgattatcgggctggcagcggcagtgatagctgccatcgctggcgcttttggcctgggtcacattcgcggaaccaacaaggcagaagccaaagccgagcagcagcgtaccgaagagaacgccgccgccaccgtcgccgcggcagaacgtaaggcagaagtcacgaaagaggcaagcgatgtacagcagactgttagccatatgcctgatgacgatgttgatcgggagctgcgcgaaagatttacccgccccggtggtggttga

SEQ ID NO: 201020 - DNA, 213 bp, Klebsiella oxytoca
atgaattcagcacaacgccgcaaggcataccgcaagctaccaaaagcaggaggaattgtaattttacgcggcgtccctcgtttagttctggggctgtgtacattcaatagctttactggcgaagaacgtagcaaaccatcagtaaaccgtatcaaagttcaaatgtcaggcggctcaacggcagcccctctggtgcgtaatttgaagttttga

SEQ ID NO: 201021 - DNA, 579 bp, Klebsiella oxytoca
atgcgctttcatgttgtgtgcctgcttttttccacgtcaggcgaggtgggtcctggttattccccaacaacaaggattcggttaatctggatatccccgacaatgagaaggttaaacaaagtgattgctgaattatctgctgctatggctgctattcgtgaaactgcgcagctcgcaaagcttattagtgatgctaaaactgagtctgaaatcagtgctgcggttggtgaattgcattcaaagctggcgtccattcaacgtgaatgcgtatctctcgttgagttggtgggctcttatcaggaaatgaatgcatcgctcaaagcaaaaattgcagatttcgaagactttaaaagccagtctgaaggttattttattaatcaacttgactctggttcgcttgtttattcgaaggagcaaatcgtgggtgagaaagagataatggtgcatctttgcccacactgttttattaaaaagcagatatcgatattgcaaccgaaagaagtaagcgagtatgcgagttataagcaaagtcgttgcccctcttgtaagaatgagttcgatatggatcaaaactgctaa

SEQ ID NO: 201022 - DNA, 252 bp, Klebsiella oxytoca
atgaccaataatgcactgctattaggcgaaggcttcaccctgatgttcctcggcatggggttcgtgctggcgtttctgttcctgctgattttcgccattcagggcatgtccgccgccgttaaccgcttcttccctgaaccggctccggccccgaaggcggcacctgcgcccgccgcgcccgccgacgatttcgcccgcttgaagccggtgattgccgccgccatccaccaccatcgccgacttaacccttaa

SEQ ID NO: 201023 - DNA, 234 bp, Klebsiella oxytoca
atgccgtatgaactgtctcacctgaatgccctgtgggatgcgctggggaaaacaacggtcagggatgaggagggtgaagttgtgaccgacgaacccttcctgcatttcccgacgggtacccctctcttccatatctggtcatggtttgaatcactgcacaacgagttcgtcgttgccgcaaaactgtacaacacagctccccccgacgtgtcaaaagacaggaaaagcaaatga

SEQ ID NO: 201024 - DNA, 1509 bp, Klebsiella oxytoca
atgaacgcaaacacccttgtccaaaaactctggaatttctgtaacactctgcgcgatgatggtgtaggttatggcgattatctggaacagttgacttacctattatttctgaaattagctaatgaatatgcacaaaagccctttaatcacgatacaaaaattcctaaaggatacgactggcatagtttagtctcaaaaaacggtgaagctctcgaggcgcactatatggctactctacacaaactgggtgaagagcctggtatgttaggggcaatatttttcaaagctcagaacaagatacaagatccggctaaactttctcggctagttcaactcatagatgcagaaaattggatcaacttagatactgatactaaaggtgatctttatgaaggtctgttgcaaaagaatgctgaagatacaaagagtggtgcgggtcagtacttcactccacgtgctattattcaggctgtagttgcttgcatacaacctgaaccgatgaaagtaattgcagatcctgcctgtggcaccggtggttttttcttggtcgctaatgagtggttatccggctctggacactggcttgaggataatgctagttggttacaacgcgaggtgccaaaactcactaaggtggaaacacgttttttgcgtgagggaacattttacggaaatgaaattgttccaagcactcgtcgtatgtgcctaatgaatctttttttacacaatattggagatctatatggagaacctactatagatcgttccgatgccttgatttcagaacctaaaattaaggtggattatgtgcttgctaatccaccgtttggtaaaaaaagtagcatgatcatcactaatgaagagggggatgaagacaaagatgcactgacatacgagcgccaagatttttgggagactacatcgaacaagcaactcaatttcttgcaacatatagttagtatgctaaagatcgatggcaaagctgctgttgtcttacctgataacgttttatttgagggaggggccggtgaaaaaatccgtcgcaagctaatggaaacttgcgatgttcatacaattttacggcttccaacaagtatcttttatgcacaaggcgtcaaagctaatgttgtgttttttgataaaaaacctaagaatggccagatccataccaagggtatttggtattacgaccttcgaactaataagcatttcactctgaagacacgcacgcttaagttagacgatctgaaggatttcgtaatctgttataatgcgaagaaccgtcaagagcggcaggaaaatacacgctttaaatggtttagttacgaagatttggtggcaagagacaaagcaagtctagatcttttttggttaaaagataatagccttgacaatctagatgatttgccacctccagatgttctccagcacgagattatcgagcatttagaagctgctttgacggcatttcgagaagtagcaaacaatttgccaagtaatgaacactga

SEQ ID NO: 201025 - DNA, 804 bp, Klebsiella oxytoca
atgagatatatcgacattgaagaattagtgttgcccgatggatggctagataaagccgctgctgctgctgctgcagtaaacgctggtgccgaccccgaggattattcgaaagtgtggcgcgagcttaaagatgccttggctgatttattcccagataaaaagtgttggtattgcgagtcaactgtagatcgtgccgataatgcggtcgatcattttcgtcctaagggcagagtaagcgatgcagcacatccccatagcggatatcgctggttaagctttgaaccaaaaaattatcgttatgcatgcacgttttgtaatagtcgacgcaaagacgttttaaatggtactgctgggggaaaagccgatcgtttcccattaattaacgaaaatgatcgcctctacagtccagggcctttgaatcaagaaaaaccaatattgcttgatccatgcaactttgatgactgtgaattactaggatgcaaacaggaaaacggcaaaccctgtacgacgagtaatgaacctgtagcgaaaaaaagggctgaagaatctatctctatttatcatcttgattacgagccgacttgcaaacaacggcacgcagcttctgttcggttaattgctgatattgagcaagccaagcaattcttcggacaaccaggtatggatgagcactttacaaccgttgcgaggaagatacgcagagctattaaccgcaaatctccatttagtggggatatgattttcctcctgaaagggcagcggaatacagaacatccttggattcaaaaattgttggaactttga

SEQ ID NO: 201026 - DNA, 825 bp, Klebsiella oxytoca
  misc_feature (545)..(554): n is a, c, g, or t
atgaacaattcacccgtcttgaaattacaagacatggcaagttccagtgttacagatattgaagaattgcttctcagggcaaaaatgatatctgtgaaattaaatttgcaagacatagcagcttggcttgaacatgagcttaatggatatccatctaacaatctccttcctgactatcgcattataaagaatgctccggtaagagcttttaacccttatgcagggtggattccatatcagctaggtaatacaactggacaatataaagagatatatgactctttaactacaatccacatcaacaaccccgtatcaatgctcatagaatacgctaaaagtgatagcactctatatagtgacatgccagagttcatgactgatttattacaaaaggctggaggttgtgactttcgcatggcttggaaaataaaccctgcgcaaatcactaagattctctcaaatattaaatcaagaattctggattggtctttagcgcttgagagcaatggaattcttggagagggactattgttttctcaggaagnnnnnnnnnnccaacagaacagtattacttcaggtgatttgaactcccttgtgcgtcagctaaaagagcacgggctggatgatgctgatgtcacagagctggagcagcttgttaaacagactgataaaccgacttcaaaagttgaagttgaaaagggctttgggtcttggattggtaagattacgggaaaggctttcactggagggcttaaaatcgctggtgcagccgctcctgctttactaactaatgcgctttgccactactttaacattcctgtctga

SEQ ID NO: 201027 - DNA, 237 bp, Klebsiella oxytoca
atggggtttaacttgctgcgcatcgaggggctgatgaggctggaggtatctgactgcgaacaacgggattattttcaccggctgcacattatgagtctgctgtggcttctggtatccgactgcgaacaacggggttgttttcaccagctgcacataatgagtctgccgtggcttcaggtatccgactgcgaacaacggggttgttttcaccagctgcacattatgagtctgctgtga

SEQ ID NO: 201028 - DNA, 291 bp, Klebsiella oxytoca; identical to SEQ ID NO: 23348

SEQ ID NO: 201029 - DNA, 543 bp, Klebsiella oxytoca
atggaaaatcagcttttacacacggcaagcaccatctgccatatcgcgtttgcatcgacgggaataacgacaccgtcagatgagcagggtttttttcatctttccgacagcatccataatcgcctgcgtgcgatttctcctgactttcatgtccgttgtgcctcttatttattcctgcctgtcattcatacagagttaaaaactggcgaccttaaaaaccattttcctgcttatatcctgcaacttgttcaggaacttgcaccgttaaaaaggactacctgtccatccggaaaaatcaggtttgataaagagctggacgccatgttttcagccagtccagatgctgtcagcattcgtctggccgaatatctttcgggcccatcccgttttctccggatgataaaaaaccctgaccgtaaggcgagagttgagaaaatactcactgccagaaaatgcaatctttcgcatcagctggcactcctgatgcaggcagaagaaaccgtgtccagatttaaatcgccgggtaatacctggcgtccctga

SEQ ID NO: 201030 - DNA, 252 bp, Klebsiella oxytoca
atggattttaatgcacttgttgatttgttaattaacacgggctatacgccggaatactacccgctcaaggtcaacaggattgtcgaagttctcaacgggatgtcggaagctgactataaagactattgcctggtatgtaaaaagcccttcatacatgcgccggacaggtatgattcctgcccgacatgtagcgcaaaaaaatgcaaagttgctattatgcgttattctcagtccgtaattccctttgaataa

SEQ ID NO: 201031 - DNA, 2403 bp, Klebsiella oxytoca
  misc_feature (1778)..(1787): n is a, c, g, or t
atgaaaattaatttacagactactttaatactaatcgccctctccgctttttcactcccctcatatgctcgtgtgtatgaatatgtattcaaggatgtctatggaacggataaatcagtcagtgcggaagcaggtatcctaaataccaatgaaaaaattcaggtaagaataatatcgggactcgacagaaaaattcaggtaacagtaaagaaagacaatgttggagtatatagctttactactgagagcgtgacggtcaatgaccgtataaaggcatcaactggtgaagaattttatggtaaaacgctgacattgccaccactgagtgatggaagttatgtaataacgtcagatatcctgaatactcaaaacactgttatcgacagcacgtctcacaattttattattgatactgtagggccttcgtcagataacctgagcgtggaccaaaaccccggatatgatatggtcttaacaggtgagcgttgggaactgggcctcggggctgaagcaaagctgtacctgaatgtgaaaaacgtcaaatctgccaccggttttgataaagcgactattcaggtgataaaacctgatgatactgttttttcaactacagatatggtttatgacagtggatcagcatccctttcaataccttggacaaaagggaatatgagtcggtcatcatggatgcctgtatcaaacgctgatgtggaatatcgtttccgtgtgacgctctatgataaagcgggaaaccgtaaagttttgccggatcagaagttcatatttgactcagatcttggtgaatatactttatttgctgtttatgacccgacttctaaaacaagcgtagttccgggatttagtgaaggttacatagcatataagccgggaatgaccgttaaccaaaaccctttaacactcgtgtacagggttccatcgaataatcgaagggaatacagtaaagctggtttgaaatttggcacgattatttccgaagcgaatggatacagttatgtatccgcgaaaacggcctataaggtagcttacgtcatccataacggatatcaatggggtggaggctcactatcctataatatcaatttaggaagtgaggctccggccagcccggcagcacctggagtatggttaacttcagataaaaaaggagaaatgaattcgagtagctacctttgggataccatagatctgcccgtgaaattcagttctgtaaggatcactgcgtctccacgaaattatggtcagagggcgatgagtggaaacactgagatatgtcagataccagctggtgagactgagtgtaccggtgcggtatcatggtctattccaaaatcaggtaatggtattacaacttatgccttcaaattgactgatatggataaaaccctttcatcagtcaccgtagaaaagagacatcactggaacactgatcttttacccaaaataaccggatacagttaccaagaggaaaacaaaactgtactcttatttgtgacgcaaccagggcgcggaaaattccgcgatttgttgcaactcaaatctgctgctctgattgattcagataccggggaccaactactgtcaggtatccaaacagctctatctggcgaggattacacatatagttttgatctcagcaaactggccgaaggtaaatacaatttaggctttctggcaaaggacagctttaacaatgaaacttcatcaccattcataaatctgattaacgacaagacacctcctgttgtaaattttaaatnnnnnnnnnngctatcccccggtgctactgttttcgggcttgagaacatcagcataacgctaaatgatgagttaacagcacccagccttgtcagacttgaacttaaaggaggaccagcgttggatagcgttatcttggggtttaatcagaatacggacggtagttatacacctgattaccctcgtctcttccccagtctggattcaaatacggacaaatatacactaaccgcatatgctaccgacgcgaaaggaaacactactcaaaaaagcattcagttcgcctattacccaaaaaacctggtcacccttgagaagctgaaaactttgggtgttgtaaaggcgctaaaaaccagtgacaacacaccgttggccgtcatgcggacgggacagctacgacgtaacgatggctcactggctaagggtatacaaacggcaaacatcacggtcaggaaggacgcagattatgcgataaatatccttgggaacgttattcaccccggggagacaaaagaaattcagatagaccttggaaccggtgaaaactcaactgttcctattttcacagcagaaaacggttctacaggggaaagcaatttcattatcgaatttccgcaaatcaagtaa

SEQ ID NO: 201032 - DNA, 570 bp, Klebsiella oxytoca
  misc_feature (546)..(555): n is a, c, g, or t
atgactttcactctgaagtccatcgaatcagcgtctacgatttacggttacgtccgtccttacacttcgctggttactcagcaatcagggaatacctgtaagattttctctactgaagaagacgctcaggcgtttcttagccagttcggaactgcggtttatggaacggcctgttatgttcagtggaacaacgttccatctggtctcgaattttactcgaagtctaaagttcctggcctgacgggttacttctctaaagttggcgataacgtccttgactacaacgtctatgtgattaatacaaaaggctctaaagccattgccactcataaccgtaaaaccgttaaagccgttgaaccgtttgcacctgaaatttcatacaagatgagtaaaacggtagagactcttggtaaggatacagcactggtttatatcactggtggggacgcagctaaggtgcttgcaaaatcagtaccggctaacgttgtccttacaactaaggttgaaggccaggacgctgaaactaaaacctacaagaataaatcnnnnnnnnnngtgatacgccggtaa

SEQ ID NO: 201033 - DNA, 852 bp, Klebsiella oxytoca
atgaaaagaacactgacagctgtactggcctgctctcttcttgcaggatgcgcaacacaaccatcgagtccagaaaatcgcatgttcactaaagaacacggtgtttattggcatgcagatccaaaaaaatccctcgccgcgaatgcgtattccctggctggggttcaggtaaatgtcgaggaagcggagaatgcttcgggaggcgttgatgaaggtcttgcctccaagatgcttttgaacactgctactggagcaatcaccggcggacttaaagcaggtattggtatgtttacggcctcactatacagtgaggcggatgctgagtacctgcaggtgcctcaatttgttgtttttgtaaagaacccacacaaccttccgatcgacgattcgacactagttaagtctggcgcatcaattattattgaagccctcaaggatatacccaaatataataattcgaattatgacagtcagaaagtagcactcaatcaatgtgtcgtcgtcaaatctgtcataaataaatgggatacttgtgatacaccttctgctgtaactggcgcaggtggcagtggcaaagaatttctcacattccaggtcatacgccctgctaccggtgatgaactatcaattttaaacttgccgaagggaaattattcaatcattcgctatatggggtttgttcctaaagatttggttttcgatacatcttcgtttcctggttttcggttgatgcctcaagactcacgaacgtctcctggcttcgcaagcgtaactattaacggaaaagagtactatttcattaaaggtagtcttggagaaagaggtttccctctcaaaaaacacattggataa

SEQ ID NO: 201034 - DNA, 978 bp, Klebsiella oxytoca
atgcctgatgcatgttcaaaatactcgacaaactctgcatgcaccatgtccagccaaacatgcgctgagggatggttcgattctgctactaatcaatgttacatgtacgaacaaaagtggacctgtgatgaaggaataacaaggactgtgacagtaacaaacgaagcaaacacctgcgtgggcatgatcccatgttcaggaggtacttgtaataccggtgcgaatgaacaaaacaatgatttcggtaaggtcgcagcctatagcagcatggttcagaacatgcagggcgatgctatgtgtagtgaccctaacgaccccaatagttgcattgtcttctccggagagaagcaatggtgtggccgttctgtaggctttgtaaacgggttggcaaaaacagattgctgcgaagctcctaaaggtgcagccggaaaactagaggcaattatcttagccgggacaatgctcagaaacacaaactgggaaaaaatatcagcaaagctgacaacctggactggtggtgagtcaggtacgtgggcatcgatgacgaacgccgtcggacaatggacctccggtgtatcttctagtgtaggacaaatgtggcaacgtgtgacagaaccactaacttctgcatatgaatcgatagcaggaaacgtatcgagacttattggctcatcaacagttgaaggtggaggttccgctgttacaactgagctcaccaaagacggattacaggccggcggtctcgctgcaataaaacagcagttgatgaataaagcttacgacttgttgccggatacgatcagagactttgtttttaaaaatgcagcagaaacaggagggcaggctgtattctcatcggcagtaacaaatttcatgcttgcattaaacgtaatagggtggatttatacagcatatcaaataactaaaatgttattagaaatgctattggcatgcgaccaaaaagaaatgcaagcatga

SEQ ID NO: 201035 - DNA, 459 bp, Klebsiella oxytoca
atgacagatggcatgatttaccatggggtacgaaagcaggaacttctcaagattattgagcgctctggcttaaacttcgaagaagcaaccagtaattttgggtttgctgacaacacccgcaatccactttctttgatcctggatgggtattttattcagataattcctatggcccgagaggaacacaattgggaaatagctccagtagatactgttatcttatccattattatacccccttcgcttgatgaagacccagatgaaaacacgatgacaataatgtcggattgtggaatagctgagtttgagcttgaagatgcaggcatcagaattaacagaatgataacatttgtaggtggtgcaacagcagaaaatttcctacatcaacttagaattctttacattactgcatgccagacccaagggggatttgatgacgatgaagatagtgagtattaa

SEQ ID NO: 201036 - DNA, 483 bp, Klebsiella oxytoca
gtgctgaccgtggccctgttcccgcaaatcggcctgaagttcctggagaatcgcaataacccggcggcgttcgagccggtaccgcaggctgaagaggtcaaaccggcggcaaaagccgctaaaccggcggcctccggcgtctacaccgtggaagtggagggcaaggcctttgtggtgaaggtcagcgacggcggcgatatcagccagctgacggcggccgcgccggcagcctcttccgccccggctcaggcggccgccccggcaggcgccggcacgccggtgaccgcgccgctggcgggcactatctggaaggtcattgccgcggaaggccagacggtggccgaaggcgacgtgctgctgattctggaagccatgaagatggaaaccgaaatccgcgctgcacaggccgggaccgtgcgcggtatcgcggtgaaatccggggacgcggtggcggtgggcgacaccctgatgaccctggcgtaa

SEQ ID NO: 201037 - DNA, 465 bp, Klebsiella oxytoca
gtgctgaccgtggccctgttcccgcaaatcggcctgaagttcctggcgaaccgccacaacccggcggcgtttgagccggtgccgcaggcggaagccgcgcagcctgctcctgccccggtaaaagctgccgcctccggcgtctacaccgtggaagtggagggcaaagcctttgtggtgaaggtcagcgacggcggcgatatcagccagctgaccgccgccgcgccggctgcctcttccgccccggcaggcgccggcacgccggtgaccgcgccgctggcgggcactatctggaaggtcattgccgcggaaggccagacggtggccgaaggcgacgtgctgctgattctggaggccatgaagatggaaaccgaaatccgcgccgcacaggccgggaccgtgcgcggtatcgcggtgaaatccggggatgcggtggcggtgggcgacaccctgctgagcctggcgtaa

SEQ ID NO: 201038 - DNA, 204 bp, Klebsiella oxytoca; identical to SEQ ID NO: 177970

SEQ ID NO: 201039 - DNA, 612 bp, Klebsiella oxytoca
  misc_feature (417)..(426): n is a, c, g, or t
atgagccctggtagctttgccagcagtattgatgaaccagccaatgataaatttgagtctagcgatttatcggggttgaaccacttaactgatctgattaatgaaagaaacactacttctgcaaaaatatctgagcacaacgtgcttaatcaaagtcaggaggaactgaccaataatatattcatgcagctgaagaacaaacttgaacaagaaaaaatcgatcaactgatctcatcattgaataaaaacaactcatccagcgaaaagttgaattctagcattcagcgtctgatctctatacttgaaagccaaaaacaaagccatgatgcggtcatctctaaaaatataactgccgaagcaaatgttttaaaatcaacaaaaaatgacatgattgagttaatggtggaggatttgggnnnnnnnnnnttgggtgcagacgctcaaaagctaaaagtcgacattgagaacaacgatcttcctagaacgacgccgttaaacgaatctcaagcaatggatgatctcaggagccaattgaaagcgttcttcctcacaatttgtgtggttggtctgcttgtttttatcgcatgcaagaacacgactcgcaaaaagtaa

SEQ ID NO: 201040 - DNA, 387 bp, Klebsiella oxytoca
ttgagcgggaagcagtatgtttataaacccgtcgaccttgagttattcaggaaaaacatcgtctctatacagatgaatttccttgtcaatctatggaatctggccagatttaaaccggcttatgtcagggcttatttggccctgtctaatgacgcttttcagatgctccttgatacagagatgtccgcctttgtggaggtgacaaatgtggttcttttcccccggtttataacctatgataccggacgacgtgatcacaaagtatatgcatggggttacgagattatggctgatgttctggaaggtttcattccaagggaaaatatggaaaacttacgggtcgaatttgctcttaaagattcatatgagaagctaaagttattttag

SEQ ID NO: 201041 - DNA, 315 bp, Klebsiella oxytoca
gtgaatgtacataaggtatatgatactatcaaccactaccatttagattggttgacccctgctggcgactacccaaaatcggctctgatggtagttgaatgcaaggatggccggtggatgatagttcaggagtttggagaagagtatggctgcttcgaaggtgtgttgaagaatgatagcgatcttcatactatgccttctttttatcctgacttccgcagtgctgtgaagtccgcttttggaatgatgaaacgattatacccccagtacaacgacaagccctttagtgacttcctttcagaaattacggaatag

SEQ ID NO: 201042 - DNA, 141 bp, Klebsiella oxytoca
atggttcacagccatggcgacaaatcacttgtttttataaaagacattcatgagcctataaaagttaatcatagacttgaagagattgaaggattgattcagacgcagaattcaataatgaatctggatgataaattctga

SEQ ID NO: 201043 - DNA, 1107 bp, Klebsiella oxytoca
atgacaacggcacaactcgatacgcctgtcgtctcccgccgcttctggtccgggatgaccctgttggtctgcgcgctgctggtagcgccgatggtcgccagccagctcggcggcaactactgggtgcgggtcatcgacttcgccctgctctacgttatgctggcgctggggctgaatattgtggtcggctacaccggcctgctggatatgggctttatcgccttttacgccgtcggcgcgtatctggcggcgctgctggcctcaccgcatctactggacgtcttcccgattttaaatagttggtttccggacggcctgcacacctcctggctggtgattattccgctcgccgcgctggtggcggcaggctgcggtatcgtgctgggcgcgccgacgctgaagctacgcggcgactatctggccatcgtcaccctcgggttcggcgaaattatccgcatcctgatgcgcaacctcgaccgtccggtcaacatcaccaacggcgcaaaaggcatttccggggtcgattcgctgaatctgttcggcctcaagtttagcggcgtttatcactggtttggctttaaagtcccggcgctgtggctgtggtactacctgctgatgctggtgattgtggcgattattttcgtctgcctgcggctgcagcattcgcgcattggccgggcctggcacgccatccgcgaggatgaagacgtcgcccgcgcgatgggcatcaacctgcggaactacaaactgctggctttcgctatcggcgcctcattcggcggcgtggcgggcgcgctgttcggcgcatttcagggcttcgtttcaccggaatcttttaccctgcaggagtcgatagcggtcctggcgatggtggtgctgggcgggatggggcatatccccggcgtgatcctaggcgcggtgctgctgaccgcgctgccggagctgctgcgcagccaggcggcgccggtacagcaggcgctgtttggcgaagtgctgattgacccggaagtgctgcgccagctgttctacggcctggcgctggtgctggtcatgctgctgcgccctcagggcatctggcccgcgcgacatcaaggagcgaaagcatga

SEQ ID NO: 201044 - DNA, 720 bp, Klebsiella oxytoca
atgtctgatttattaaccgttaaccagcttagcgtccactacggcggcatccaggcggtgcgcgacgtctcattcagcgtgaaagagggcgagcagaccacgcttatcggcgccaacggcgcgggcaaaagctccaccgtccgcgccattaccgggctggaaccctttcgcggcgaaattctgtttaacggcaagccgatccgcaaacgtcgggccgaatccctgttgcgcgaaggtctcgtgatggtgccggaaggacgcggcatctttgcgcgcatgacggtgctggaaaacctgcaaatgggcgcctggctccgacgcgacgcggcggcggtaaagcaggagatgggcgccatcttcgctaatttcccgcgcctcgccgaacgccagcatcagctggcggggctgctctccggcggtgaacagcagctgctggcgctcaaccgcgccctgctcagccagccgcgcctgctgatcctcgacgagccgtcaatgggcctggcgccgctgatggtcgagaacatttttcgcgttatcgccaccctgcgccagcgcggcgtcgcgctgctgctgatcgagcagaacgcacgtctggcgctggaggcgaccgacagcgcctgggtaatggatagcggcagcatcgtcgagcgcggtccgtcgcagacgctgctggccgacgatcgtattgcacagatttatttgggcgaaatgcccgtttaa

SEQ ID NO: 201045 - DNA, 768 bp, Klebsiella oxytoca
atgccaaaattggcgctaaaagcgaacgaaatcagcagcgaattaatcgatatacttgcggctcggggtacgatatccgaaatgcaatattttcgatatctaagagatatagaaaagttgcgcgacagtgcatctgaggactatctcaaagcgttggctaatggtgcttttgggcgtaaggattcggctgttgcattctttgaagaagcattgaagcataacaacctactcattgctcaaaattatgtagtttaccttaacgattacggcagttttcgtgaagttgaacaagcggtaaatcgattagttgaacgttataactcgcctacaatgttgtcccatgcatgggaagccaacttgttcttggggcgtattgacaaagcgctctactatgctgagaggttgataagtatggtagatgaaaaggaggctgaattggttaagcacctcgcagccacagcactggcccaatccacgactttcaaaagtacaactggaattactgatgaagaattccaggatattgcaaatcgcattgtggatatcatgagctaccataaggttggtcctgttgctatgtctttctgctctgtccctgaagagcggacgtcatcgtatgtcatgacagttaatactgaagattctgatgttctctctgatatgaacctagatatagcattttctcttgcagaaaatgaaagtttgattggaaaacctttcagcgtctggtttgaaggacattcggaggaacctgcgcgtgccagttaa

SEQ ID NO: 201046 - DNA, 1764 bp, Klebsiella oxytoca
atgatggacgataaggggaaactgaatatatgcaatctacgaggtcctgcgattgtatttgctctttttacccttattgttgtgtttcctgctcgtgctgagccgggagacttccttgataatatatcgaaactcgaaataaacaatccgccggcctcaggcgccgccagcggggagtcggtctcgtctaagcaaaataacgatagccctgataaaaaaacgcctcagaagcaggacgtcgtcagaaaaaaaagccatcagaataaaacagagagtacgattaacgctctgcggaaacagaatgcggagctgagcgctgccgccaaagcggcggagaaaaagcgcgctgaaacgacgcgcgaactgtcggcgcagatcgccacgctgaaggctcagagtgaacagcgtgtacagaaagagagcggcgaaactgccgccgtgagcgcgctgagcaaaaagaacgccgagctggccgccgctgccgaagcggcgcagaaaaaactggatgagaccacccgctcgctgacggcgcagatcgccgcattgacggcacagcgtgcacagaacgaaagcgggcagaccaccgcgcttgatgcgctgagcaaaaagaacgccgagctggccgccgctgtcgaagcggcgcagaaaaaactggatgagaccacccgcacgctgtcggtgcagattgccgcgctgaaaacgcagaaggagcagagtgagaacctgcagaaatcgacgatcgatacgctgacgggaaagaatctggaactgcgcgccgctgccgaatctgcacagaaaaagcaggatgagacaacccgcgcgctgtcggcgcagattgccgcgctgaacaagcagcgcgtggagagagaaggtcagcagaaaaccgcgcttgatgcgctgaccaaaaagaacgccgagctggccgccgccgccgaagcggcgcagaaaaagcaggatgagaccatccgcgcgctgtcggcgcagatcgccatgctgaacaagcagcgcgcggaaagagaaggccagcagaaaaccgcgcttgatgcgctgaccaaaaagaacgccgagctgaacgccgccgccgcaaccgcgcagaaagaatatgatgtttcagtcgctgctttaaacgataaaaataaaaaattacagtctacgctcgatagcctggccatcaagcaaagtgatttaagccttgcggataaaagtcataaaaatgcctatgcgctcggcgttttctaccttacccaggcgctatccgatgtgaataaaatggccgacaataatgtcaagctggcgccttcagcgttggtttccgggtttaacgacgcttataataaaaaaattaaaattaaagaaaatgaaatagaaagtatcgttaacatgcttaacgaacaactatcgtctaagtacgtcgatattgaaaaaagaatcatggcaaaaatcaaaaataaaaaatatgagattttgcctaatggcgtatattttgtggttgataaaaaaggaaaggagccgtacaagtcgaatgagactttgtctatgaatatccttgagaagaagcttgatggtacgccgatactcaatacgatgaattcaaagatggtttacgataagcaaatcgatccgctaatggccaaagtattatcatccggattaaaagggggaacggtcacgctatatggacaggccggctcgctgtatagcagcacgcctgcggacctgaacccggataccttaatctccattaccttcgaactcattccctga

SEQ ID NO: 201047 - DNA, 531 bp, Klebsiella oxytoca
atggctgatggtccaaaagatttagaccggttagatttaatgtgcaaggtcatcactagaacagatggatttcacaactacgcaaacacaaaatcgactgttatattaacattcaccaccgcaatattagccttaattattgctaatgtaagccatttttatgaatttttgaacacaagtaccgttcctcatgttaagttagtattctcgatattactatttgctgaattgctgctactattttttgctttgttgcttatatcaaagactctaatacctaatactgataaaagtaaaacaaaaaacatttattcttttgtggatatttatacaaatttcaatgctgaagaatataaggctgaagttctaagtgttacgagagatgatcttattgttagcatgtgtgatttacaatataatttatctaattccttagataaaaaatatatctgtcataaaagagcagtgtggtgtttgaagaacacattaattttaatgctaatatcatccctgattttaataattgcatag

SEQ ID NO: 201048 - DNA, 564 bp, Klebsiella oxytoca
atgactaatttaaatcaagctgtaagaattgaatcgccagttgcaagcatttcctacttattaccgttcgaacagaaacagcatattgaaaagttgtacttcccacggattcaacaggccactgaccgaatgagtaaagctgaatttgaatatcaaaacgctctacaatcccgctcaatgcttattcaacagaagacggctgagtatttggctaacccgtctgaaagacacggttttaaagttgttcaggtttacccaacaaaccagcaatctgtgattcaaagcatggcggaacaaggttataccgttcatcgtgtaggaatgggcttaatctatttcatctcatctaaaaagaatgctctgaaagacgcaactgataaagctgaagctgaagctgaattagccattgaaaagatgattgaacgtctgaaggtaaaaacctctgaagctgtacaccagcgaaataagattgtgattgaagcccgtaaagctctggatgctgtaaaagactttacagattacctgaacgtgattgtaaccgattctgaagaggtgaccgaataa

SEQ ID NO: 201049 - DNA, 1077 bp, Klebsiella oxytoca
atgccgcaaacacagcaagatatattacagttaagcagggatgttgaatcggggcaagctgtttatatgcaactattgaaccgccagcaagagcttagcatcgcaaaatcaagtgctataggaaatgtgcgaattattgacgatgctgtagcacaacctcaaccggttgagcccaaaaaggtaatgatcctcttggtcgggtttatcttaggtgcagtaatatcacttgggttagtattgcttcgaatgtttttacgcagaggcattgaaagtcctgagcagcttgaagatgctggaattaatgtgtatgcgagcattccagtttctgaaacttttgctaaaaagactgtgcaattggccggatggaataagaataaaacaagtgagtatcaaagctttttagctgtagaaaatcctgcagatttagcgatcgaagcaattcgcggtctaagaactagcttgcattttgctatgatggaggctaggaataacatattgatgatttctggcgcaagtccgaatgctggtaaaacctttgtaagttcaaatttggcggcaataatttcgcaaacaggaaaaactgttcttttcatagatacagatatgcgaaaagggtatacacataagttattcaacttagataatagtaatggcctttccgatattcttgcagggaaaatttcagctgctgatgcgattaaaagtgttaaggatgcaggatttcattatatatatagaggggttgtaccgccaaatccagcggaacttttgatgcaccgtcgtttagatgaactgctgacatgggcaagtaaaaattacgatcttgtaattttagatacgcctccaattttagccgttactgatgctgctattattggcaactatgttgggacaacattgctagtagcaagatttgagcaaaatacagtcaaggaaattgaagtgagtgctaagcgttttgagcaaagtggggtcgttattaaaggttgtattctaaatggtgttataaaaaaggctagtagctattatggctacggctataaccattatggatatagctatacagaagataaatga

SEQ ID NO: 201050 - DNA, 894 bp, Klebsiella oxytoca
  misc_feature (853)..(862): n is a, c, g, or t
atgtcatcaatcaaaaacaaaaatgtcgataaagaaaccgatgaaattgatttaaggcgtcttatgggtgaggtaatagaccatagaaagctaatcgtatcggttatttcgctgtttactttaatagccctaatatacgcactatttgcaactccaatctatcaagctgactcgctgctacaagtggagcaaaagcaaggaaacgctatcttaagtggtttaagtcagattctacctgatagtcagccgctgtctgctcctgaaataactctcctacaatcacgaatgatattaggtaaaactgttgatgacttaaacttacaagcgagggttgaacaagagtattttccaatttttggtcggggttggtctagactcatgggtaagaagcaaagtagcttggatataactcgtttgtatataccagcagaagcagctaatactcagcaactgaccataaaagttaaagacagtactcattatgaaatcgtttttaatgggcgcaaaactgatggtcgcactggagtattagttaacaatggtgatctgactttaaaaatagataatattgacgctgagcaaggggctgtatttactgtctcttatattagtaagctcaaagcgattactgacttacagaaagtttttacagtgttagaacaaggaaaagatacaggaatgttatcattatccttaactggagaaaatcctaaagtactggagaatatacttaatagtattagcaataactatcttacacagaatatcgctcgtcaagctgcacaagatgcaaaaagcttagagtttttaaacgcccaattgcctaaagtacgaaatgaattagattctgctnnnnnnnnnnaaccaatatcgccggcaaaaggattcagttga

SEQ ID NO: 201051 - DNA, 282 bp, Klebsiella oxytoca
atgtatcaacttaggatcctggtttttaacgttacccaccgcgcgggaaacagagtgccatgtgaaatggtcagctggtacagacccatcagcagcaatttctcccgcctctttccctacgatatcctgcctcatccattcgcgcgcagcttcaggaaccagaacgagcggccgacggtcgtggatatcgaccaacccctgatcggctgcagctgtcacaatcaaaaatccctctgcttcatccccgcgctcttaatcattcaaaggaacatatccgcttaa

SEQ ID NO: 201052 - DNA, 1266 bp, Klebsiella oxytoca
atgtttgcgctttgcgatgtgaactccttttacgcatcgtgtgagacggtgtttcgtcctgacctgaaagggcggccggtggttgtcctcagcaacaatgatggctgcgtgatagcgcgctctgctgaagcaaaaccgttcgtcaaaatgggggagccgtactttaagcaaaaggagcaattccgccggcagggcgttatctgcttcagcagtaattacgagctttatgcggacatgtcgaatcgggtgatgacaacgttagaagagctctcgccgcggtgcgaaatttacagtatcgacgaggccttttgcgaccttactggcgtccgcaactgtcgcgaccttaccgactttggcagggaaattcgcgagacggttctgcgcaggacgcacctcacggtcggcgtcggcatagcccagactaaaaccctggccaagctggccaatcacgctgcgaaacagtggcagcggcagaccggaggcgtggttgatttgtcgaacttggaacggcagagaaagttaatggctctagtgccggttgatgaagtatggggtgttgggcaccgcatcagtaaaaagttggaggctatgggcatcaaaacggtgcttcaactggcggatacggatatccgttttatccggaaacatttcaatgtggtgctggagcgaacggtgcgggagctgcgcggtgagccttgtctcggtcttgaggaattcgcgccagtaaaacaggaaatagtctgtagccggtcgttcggcgggcgaataactgaataccatgagatgcggcaggcgatatgcagctatgcatctcgcgcagcggagaagctccgtggtgagcatcaatattgccggtttatctctgcattcgtcaaaacgagcccgtttgcactgaacgaaccgtattatgggaacagtgcatcggtaaagctgttgaccccgacccaggatagccgggacattatcgctgcggccaccaggtgccttgatgcaatctggaaagatgggcacaggtaccagaaagcaggggtgatgcttggcgacttctacagccagggcgtagcgcaacttaacctcttcgacgacaacgcaccacggccgaacagcgaaaagttaatggaagttctcgaccatctcaatgcgaaggatggcagggggacgctctattttgcaggccaaggtatccagaccgcttggcagatgaagcgagacatgctttcaccgcgctataccacaaggttcagtgatttacttcaggtcaggtga

SEQ ID NO: 201053 - DNA, 420 bp, Klebsiella oxytoca
atgaagttttatacaccagcagaattacgtcagatcgtattgctccccttattcagtgaccttgtccaatgtgggttcccaagccccgcgcaggattacgttgagcaacgcatagacctgaacgagctgttaattaatcaccccagcgcgacgtattttgtcaaagctgcgggcgatagcatgaaagatgcgggcattagcgagggggatcttctggtcgtggatagctcaaaaaccgcagttcatggtgatatcgtgattgctgcggtggacggggagtttaccgttaagaagctgcagttgcatccgcgggttcagcttaacccaatgaatagcgcgtattccccgatagtcgtcggaagcgaggatactctcgacgtgttcggggtcgttacttacatcatcaagtcagcgggttaa

SEQ ID NO: 201054 - DNA, 288 bp, Klebsiella oxytoca
atgcgcaagatcaccctggcctttggggccgtctgcttactgttcacgctaaatagctccgtcgttgctcgcgcctccacaccgcagccgctgtggacgggcaccaatatggcgaaactcgccgaacaggcgccgatccattgggtttccgtcgcccagattgaaaatagcctgctgggacgccagccgatggccgtcggttttgatattgatgataccgtcctgttctcagcccgggcttctggcgcgggcagaaaacctattcccccggcagcgatgattacctga

SEQ ID NO: 201055 - DNA, 318 bp, Klebsiella oxytoca
atggaactcatcaatagcaaccaagcagtcattaaacgattcaacattcagcttatcgaaagcaaaacgcagagtggcatgagtacagaccataatgtcgtcaggactcgccataaatcgtttaaaggcttcaaccttcccagcctctccaccgccaatgcacagattattttcaggttttactttccagtcagcaaagaaaccgtgcttcgtaagttcagtatctttaaacgaacctccgatagacatttcagggaccgcaacaatagctttgcgtatcccctgattgacgagtttatccagggcaaggaacattaa

SEQ ID NO: 201056 - DNA, 276 bp, Klebsiella oxytoca
atgaacgacaaatggtcaccgcgcgaggtcctgcaccgcgactacagcagccatcctcccgcttacgccccgggctataaaaccagcgtgctgcgctcgccgcgcaatgcgctcatttccctgcagaattccctttctgaaatcaccggaccggtgttcagcagcgacgatctcggcgcgctcgataacgacctgatcctcaactacgccaaagacggcctgccgattggcgaaaggataatcgtccacggctacgttcgcgatggatttggctga

SEQ ID NO: 201057 - DNA, 210 bp, Klebsiella oxytoca
atgacggatggctggccgctgtatgaatcccgcctgaagggaaagctgcacgttatcagcaagcgttacactcagcgcattgagcgacataacctgaatctgagacaacatctggcaaggctgggacggaagtcactgtcgttctcaaaatcggtggagctgcatgacaaggtcatcgggcattatctgaacataaaacactatcattaa

SEQ ID NO: 201058 - DNA, 210 bp, Klebsiella oxytoca
atgcgcagcatcgcctccgggaaatgcagcgattctgcgctctgctccgggggggcggcgcttgatgcgccttgcccgggataccgcctctcagacggctgcgaactcgccgcgccgtccccgggaagctcttatgataccggtactttttgcgttctgaacgcgctcggcgagcagccgactaagcggttaaaaaagcgggaaaaatag

SEQ ID NO: 201059 - DNA, 312 bp, Klebsiella oxytoca
atgaaacgaaatcagctgattttatgtttactaatgtttttcttcttttttgcctggtcatcatcgcagtcgctactgtcagtatggttgaaccaaaccattggcctgcaggcaacgcagacaggtattattttttcggcgttatcagtatctgctttgtgtgcacaggtatgttatggctttattcaggataagctagggttaaggaaaaatcttctttggtatatatcgattatgctggcgctctccgggccggcatttattactttcggctatttacttaaggaaggtgcgaacaagtccctgatatga

SEQ ID NO: 201060 - DNA, 348 bp, Klebsiella oxytoca
atgacccataacaaaaagctgtatcagcataccctggtacggctttgttcatttctaatagcttgtcagacccatcatcccaccccgtcgctgcctgtagaaagctgttatacgataacaacacgcttgccccgtcagccctggcgtgccatttcatttaagagcaaggatcatccctactgccccagctacgagaacggcatcaatgagaagctcgaacgtgtgcgtctggagtttctggacgagacgtttcgcaatcatcgaaccgacgaacaatgcgatgccgatggcaagtccatgtgtgaggacaggctgtgcgagtgcgcccgatataccgaacgtagctaa

SEQ ID NO: 201061 - DNA, 1269 bp, Klebsiella oxytoca
atgtcccttaccgacgcgaagattcgcactctcaaagccaccgataaaccctataaagtctccgattcccacggtctgtatctgctggtcaaacctagcggttcccgtcactggtatctcaagtaccgtattaacggtaaagaatcccgcattgcactgggtgcctatcctgccgtctcactgtctgatgcccgccagcagcgcgaaggtatccgtaagatgctggcgctgaacatcaacccggtaatgcagcgggccgcagaacgcggtgcctgcccaactgagaaggtgtttaaaaccgtggcgctggcctggcataaaagcaataaaaaatggtcgcagaataccgctgaccgcctgctcgcaagcctgaacaatcatgtctttccggttatcggatatctgtcagttaccgaacttaaaccccggcatttcattaatttgctgaaaggaattgaagaaaaaggcctgctggaagtcgcgtcccgcacgcggcagcacgtcagtaacatcatgcgccatgcgctccaccagggattaatcgataacaatccggctgcaaaccttgaaggcgtgacaacacctcctgccagacggcattaccccgccctaccgctggagcggctgcctgaactgctcgaacgcattgaggcatatcatcagggccgtgaactgacgcggctggccgtcctgctgacgctgcatgtgttcatccgctccagtgaactgcgctttgcccgctggtcagagattgatttcagaaaccgggtctggacaatacccgcgacgcgagaacccattccagatgtgcgttattccgggcgtggtgccaaaatgcgcactgctcatatcgtgcccctctcacagcaggctatagctattctgaaacggattaaggaaatatccggggtttatgaactggtattccccggcgaccacaacccgtacaagccgatgtgtgaaaacacggtcaataaagcactgcgcctgatgggattcgacacgaaaaaagacatctgtggtcatggctttcgggcgatggcatgcagtgccctgatggagtctggtctatggtcgcaagatgcagtggaacgccagatgagtcaccaggagcgcaacaccgtgcgtctggcttacattcataaggctgagcatctggaagcccgcaaggcgatgatgcagtggtggtcggattatcttgatatatgccgggtcgcatacgtacctccttttaacacaggacgggataaaaacaacgaagcggcatga

SEQ ID NO: 201062 - DNA, 498 bp, Klebsiella oxytoca; identical to SEQ ID NO: 170069

SEQ ID NO: 201063 - DNA, 252 bp, Klebsiella oxytoca; identical to SEQ ID NO: 170070

SEQ ID NO: 201064 - DNA, 207 bp, Klebsiella oxytoca
atgcaactatcaacaatttctgaagcgttgattggtggtttagttggtggcactatcgcagcaggttccatccgggtattattcattccagaaaagtttgagtggatattgttagcctgtgttgtccttgccactgttgttacctttttctttggccactctataccaaatccatttatgatgataagcaacatgtatagttattga

SEQ ID NO: 201065 - DNA, 1614 bp, Klebsiella oxytoca; identical to SEQ ID NO: 155823

SEQ ID NO: 201066 - DNA, 267 bp, Klebsiella oxytoca; identical to SEQ ID NO: 155824

SEQ ID NO: 201067 - DNA, 219 bp, Klebsiella oxytoca; identical to SEQ ID NO: 155825

SEQ ID NO: 201068 - DNA, 324 bp, Klebsiella oxytoca; identical to SEQ ID NO: 155826

SEQ ID NO: 201069 - DNA, 864 bp, Klebsiella oxytoca; identical to SEQ ID NO: 155827

SEQ ID NO: 201070 - DNA, 156 bp, Klebsiella oxytoca; identical to SEQ ID NO: 170075

SEQ ID NO: 201071 - DNA, 399 bp, Klebsiella oxytoca; identical to SEQ ID NO: 155828

SEQ ID NO: 201072 - DNA, 486 bp, Klebsiella oxytoca; identical to SEQ ID NO: 155829

SEQ ID NO: 201073 - DNA, 867 bp, Klebsiella oxytoca; identical to SEQ ID NO: 155830

SEQ ID NO: 201074 - DNA, 249 bp, Klebsiella oxytoca; identical to SEQ ID NO: 155831

SEQ ID NO: 201075 - DNA, 1119 bp, Klebsiella oxytoca
atgaccaatgagaaagattctgagcagcaaggccagatggttaccagggctttctctgtaacagagagagagacaggtaaagaaattattttacgtcctaatagcagcaggacggttcagtctatcgcgctcatgcgccttgggttgtttgtgccatcaccaaaaagcgttggccgtcagagtcgtgaatacaaaactgttggctttgatgccacgaaagaactacagacactttctttgatggagagcgagggtttcaccaatatctcgatcgtgggtcagcgcctcgatatgtctgttgacttcaaaacgtggatgggaatcatccgaacgctagctaaccatccgattgataacgataagatcagcctcaaatttactgagtttctgaagctctgtaaccctgaaaattatcgttcctctaccgcatcccgtaagcgtatcgacgcgtcgttacgcaggctggcatccgtgatgttgtccttcaccagcacccactcgtcaaaggtgtatacgacgcacctggtgcagtctgccttgcttgacccggactctgatcaggtagagctacagatagaccctaagatattcgagttgtatcagtacgaccacaaggttttgatgcagctgaaggctatcaaggaactggcgaaaaaagagagcgcacaggcgctttacacgttcattgagtcacttccaccaaatccaatcccgatctccttaacgagacttaagaaccgattaaatcttaagacccgtgccaacagccagaacgccacagtacgtaaggcattggaggagctggcatccattggttaccttcagtacaccgaagtaaaaaaagatgggaaggtttatttccagatccacaaacgcgatcctgatttgaatctgaacaatatccaaccaccacctgatggtgatggcgagggtgatgctgatgaggagaacaatggcacgtcgggtaaaaataatggtgagccactggaaggtgaattgtgcccaccagatgagcccattgatggggatgaaacgttaaccatccatgacttaacagctgaagaacttcactacattcgcagccttagaagccagaaaaagaacaatcccgccagctag

SEQ ID NO: 201076 - DNA, 270 bp, Klebsiella oxytoca; identical to SEQ ID NO: 155832

SEQ ID NO: 201077 - DNA, 630 bp, Klebsiella oxytoca
gtggagtaccggagtgtccatgaatttatgacactaacccgcacgggaacccctgctgatgcccgccagttccggctggctgttaaagctaagggaatagctatctggcctgatgatgacccacgcgtagggcagcaatttgcacgtgacggcattcgctgggaagttcgtctgaagaccttccggcctgagagtcaggattcatttgacgatgacctggatgagaaagtctcaccaaaacgctttggatatcgccggtacggtgcgatgtcccgtcctgatcagaagaaattcagcgacagggtatacttcaactgcatggagcggtgtgtcgtcaccggtgtgaagacaaaatgcaggggagaagcagcacatctgattgagcatcataaagcgggctctgaccactggagtaatggcctgtggcttcgggcagacatacatcggttatacgacaacggcctgtgtgtgattaatcccagcaccctgacaatccatttccaccccactatcctggctaaggatgacgatctcatcgcgtatgaagctcggccaatattaccgacaagaaaacctgtaaaccctgcctggttaaaatcccggtgggatgaacttacctggccgaagtaa

SEQ ID NO: 201078 - DNA, 426 bp, Klebsiella oxytoca
atgaaactcgaaaacattaacaaagagcagcagctctatgttcttaaatgtggctctattctatcaagctacggatttgatctcctgcatacaaaagcaaccgccgtagctgactggatggacgttgaagcaccagtagctgcactgggtacagaagaacattttgaacaatgtgcagaactcatgcggcgcgggcaggtatatgctaacgcttcccggaaatgctgccccggtaatctttccccccaactaattgggcttgaaggttgtcgtgttagagtcactaccgatgacggtgaggaacgctgtttctgggttgcaaaaacgaccggatggatgccgggtcacctcgaagttccacgctcgaatacggcttatggccaccctgcacaagcgcattacaagtcagttcagactattcgataa

SEQ ID NO: 201079 - DNA, 303 bp, Klebsiella oxytoca; identical to SEQ ID NO: 155835

SEQ ID NO: 201080 - DNA, 546 bp, Klebsiella oxytoca; identical to SEQ ID NO: 155836

SEQ ID NO: 201081 - DNA, 525 bp, Klebsiella oxytoca; identical to SEQ ID NO: 155837

SEQ ID NO: 201082 - DNA, 192 bp, Klebsiella oxytoca; identical to SEQ ID NO: 155838

SEQ ID NO: 201083 - DNA, 324 bp, Klebsiella oxytoca; identical to SEQ ID NO: 155839

SEQ ID NO: 201084 - DNA, 3378 bp, Klebsiella oxytoca; identical to SEQ ID NO: 155840

SEQ ID NO: 201085 - DNA, 246 bp, Klebsiella oxytoca
atgcaagttgctaaaaacaagtacgccgttctggacagtgcgatcatgaaaatactcggcaaagagccggttccattttcactgattatgcttccagacgtagctggtgagtgttcccgactcgctgatgaggagaggaataagccgatgccattccgcattcttgaccggcggttacaggcgctaagaaaggctggcaaaattcagttcgtgaccggaaaaggctgggtaaaccctctttcctga

SEQ ID NO: 201086 - DNA, 660 bp, Klebsiella oxytoca
atgatcgttctcaaataccctccttacccatcgcccttctggttccggggggaaaaagataaaacgggtgtggttaccgaggttggaacagtttatgtggaagcaacaaaggataacctgctgctggtggagggcacactccctccggtaggtgcgactttgtttcttacacctgaccggttcgatattaaagctgaaactgagattgatagccgggcccgacgagaggaacaggccagacaacgtctgacacggcaagaagaagaacgacagcaaaaggccgctctcgatatgaagctgatgcaacaggcgcaagagcgaaacgctcgtttgtatcttccggtacgatggacaagcggattcaaatcggtgatttccgggctgacggaaaacagtagcggtaacggtataaaccggcgaactgtgattcacgtgcttttacttgaggacatacgtgatgggcgcctggtcagaaatgaaggggattttctttgcaccgccgcaggtggaagtaacggcaagctttgggttaacccagccacccatagtgatggtgagtacgggccttacgtatgtgaaataacgtgtaagcagtgtattaaggctgctctacgttggcaggataaaaataaggccgtcccaccggaatgtgttccgtag

SEQ ID NO: 201087 - DNA, 825 bp, Klebsiella oxytoca; identical to SEQ ID NO: 155843

SEQ ID NO: 201088 - DNA, 351 bp, Klebsiella oxytoca; identical to SEQ ID NO: 155844

SEQ ID NO: 201089 - DNA, 348 bp, Klebsiella oxytoca; identical to SEQ ID NO: 155845

SEQ ID NO: 201090 - DNA, 375 bp, Klebsiella oxytoca; identical to SEQ ID NO: 155846

SEQ ID NO: 201091 - DNA, 2436 bp, Klebsiella oxytoca; identical to SEQ ID NO: 155847

SEQ ID NO: 201092 - DNA, 144 bp, Klebsiella oxytoca
atgtctgtagatgaatatatccgtgaagggcgctctgaaatgcttaaggcagttacgccgggagaaattctaaagctcacaaatgccattggcaaaccaatgagttgtcttgatcaattatttccatccccgattactaaataa

SEQ ID NO: 201093 - DNA, 201 bp, Klebsiella oxytoca; identical to SEQ ID NO: 155849

SEQ ID NO: 201094 - DNA, 1419 bp, Klebsiella oxytoca; identical to SEQ ID NO: 155850

SEQ ID NO: 201095 - DNA, 369 bp, Klebsiella oxytoca; identical to SEQ ID NO: 155851

SEQ ID NO: 201096 - DNA, 522 bp, Klebsiella oxytoca
atgggggtcgcgttgaatattcagactaattatatcgagctgcaaaattggctcgaaaaggcaaaaagtatttattcctccgcaggatgcccgcacgaaagagttgatgatggcattttaaaaattgcaatgcaggtagcggctattagaaaaacaaaaccagatatgctgcatgtattccttcaggagttaattactgagttcaagggttataaactcattcagtgccgattcaataaatccaattatgagcattttgttatgaccccggaaattcagattctgatcggtggtcttatggataaagcgtcagagggaataatgctggcttctatctgccacatgctacaggtagatacgttatccgaacttctaagcctaatcccaacgggaatgccagacaccgatgtactggatgcgctatggcgtgatcagaagacgcccgcaggactgaacctgcttgatgacttcgtacttctggataccgttgcgctggctaataagcgggggattgctgcatga

SEQ ID NO: 201097 - DNA, 1176 bp, Klebsiella oxytoca; identical to SEQ ID NO: 155853

SEQ ID NO: 201098 - DNA, 687 bp, Klebsiella oxytoca; identical to SEQ ID NO: 155854

SEQ ID NO: 201099 - DNA, 750 bp, Klebsiella oxytoca
atgacaccacgtcaaattatcctctcacatattacagctgagaaagcactcccacgaggaacgctgatctggttattctacgagaatgccgatgatttaatcagcctgaatgaagtggacgataatcttgaaaggtggcatcaacgagttgggtcgcctgaagaaattcaggtgatactggatatgcctgatgacgattcagaagtctggctattcagcccaacaaaattattctccccacgggtaaaaacccccgttctgacagccagagatagggcagttgctcgctatggcgtttctcgcgttatgacggcggagaaagttgtttttctgtattcagggtatcttctgcacctctatagacaggcatatggtttcaccggccctgcgcctgaagttcgggtcaactggagtgccaaacattcatggggcggcaggagctcaatcactatttcaccatcgtccatttatcctgacagtgatacaccgcgctatcgctaccatgagtacgcacatatagagcagcgtaaggacatcggagcattttattcaatcaatcaactggatcatatcaaaggcgtagtggcacatgagcttgcgcacttttgccagcgccacactggaaaagataattttaaatttggttttccggtactccctgaaaaagatttcagaacggctcatggtgatgggtggcagttcttgtatgcatttttcagaacagaattaaataaaagaattcagcgataa

SEQ ID NO: 201100 - DNA, 318 bp, Klebsiella oxytoca; identical to SEQ ID NO: 155856

SEQ ID NO: 201101 - DNA, 174 bp, Klebsiella oxytoca; identical to SEQ ID NO: 155857

SEQ ID NO: 201102 - DNA, 225 bp, Klebsiella oxytoca; identical to SEQ ID NO: 155858

SEQ ID NO: 201103 - DNA, 1632 bp, Klebsiella oxytoca
atggcactcacgataaaaacagaaacactaaaagctaccacaagcccaacatttgaggctttacgtaatcgttatagccaccgtagttctgacgatgagattgccgtcgatccgctatgtttatctcgggatgatctgaatgaacttttacaggcatgtcgtggtgatggagagtcaaaaaatcgacgagctcttgaatcgatcatcactgcactggaaggtgatttcgataagcctgtgagcagttttccggcattcggtcgtgtgttactacagtatctgaagtcaaatcgaattgatggctggatataccgacgcggtcatgacggcaacctgtaccccggtcttgttacagcaataaaagaagtaaaatcagaaaaaaactctgaccgtcccccatcactattgttacaaatcagctggtatgggttcggcgaatattcgcactccaaaaaggtttacggaacccagcttaccgccctgaatttcgagcctaatgaggtggcgcggcgcagtgtcgctaagacactggccgaccgtgatatctaccatgaaacgcatgagctgaaacaagagtacctggaacaactaacgcggtttaaggaagtggtcgacgggcaatttggcaatcagtttaaagcaaccggcagggctgtcagaatggaatcgtatagctacagcgaccggaatctggaaatagcagggcataaactgatacacgatttgcctgatagtgagtgcgatgcctacggtgcagaagtggagtcgcctctttttgaagatgaccagtttggccttttacccgaaattcctgtgcagcgttattttgatctctcgctgcaagactttatctggatacatgccaataacgtagaaccatacaagtatgataaagaactgccaaaaaagatggttttgccggaagaccaccgtgatttactcgatatactgaccacggatatcagcgctttcaccagcgatattgttgaagggaaaagcgcgggtaacatcatcatgtgcgtgggctcacccggacttgggaagacattaactgctgaagtgtatgcagaggtcattgaacggcccctgtactcaattcatgctggcgcactgggaaccaacgccgatgacattgagaaaaatctgcggacgattctgacccgggctaaacgctggaactgtgtcctgcttctggacgaagccgatgtgtttgtcatgcagcgtggagcatcactgactcaaaatgccatcgttgcggagttcctccgtacactggagtatttcgatgggttgatgttcatgacaagcaaccggggtagtgacatcgatgaggctatcataccaagatgcgctgcaatcattcactatgatgtgccggagaaatcagatgcccaaaagatctggaagattatgggtgagaactttggcgtgaacattcctgatgaactggtcagatcacttgtaaacacttacccagaacttccaccacgtgacatcaagatgttgctacggctcacgttgcgaatgagcgtgaaagagcaggggagtggtagcatcccgacactggatattgtgcggaaatgcgcgatgtttcgtgggatagaacgaaagagaaaagaaaaagccctgtga

SEQ ID NO: 201104 - DNA, 402 bp, Klebsiella oxytoca; identical to SEQ ID NO: 155860

SEQ ID NO: 201105 - DNA, 1005 bp, Klebsiella oxytoca; identical to SEQ ID NO: 155861

SEQ ID NO: 201106 - DNA, 1254 bp, Klebsiella oxytoca
atgaatctaatagataaaattgcccttgtcgggcaacgcatgaagtccgaacaaatttcattgaaagaatcgttactggcttcttcccgggtatctgtatcagatgacagtgtggagggggtagatcgccttatctataaccactgcctgaataaaaaaaatctctccgacttctttggaaaatctcgagttaccttcaataaaattctcgctgatctcgaagaaaaaaggctggtgggtcaacctatttatcagaacaaaaaccacctttatacccgctgggatgtccagaatattatggatgccctgggttatccgcgctatagagattactaccagagccgaacaatcattgttcagaatcataaaggtgggacaggaaaaagcacgacctcagtggctctggctgtagcagcagcacttgatctccagttgaatgccagagttttagtaattgaatgggatccgcaaggctctattggtagcggtatgattcaaagcgtatctgaagacgacgtattcctgactgcaatcgacgcaatcctgggcgtgtatgaagaaggttctgaatataaaaaatacctcgacatgggttactctgaggctgaaatcattgagaatatgccgttctcaacccatctgccaaatcttgatgtaattactgcgttcccaaccgatgcgagattcaaagataaatactggcagtgcagtaaagaagagcgcactcagttgttgctacgattcaaagaagtgataatgccagtcctgaaagctaagtatgaccttattatcttcgatacccctccagaagactcgccaattatctgggccgctgatgaggccgctgacggtattcttgtcgcagtttctccgcgagaatacgactatgcatccacaactgattttatgctgacgatcagtgagcgattccgtcagtctcccaataaaggtgaaaatattaaatggtttaaagtactggccgttaacgtcgatgataaaagcccatacgaaaaaatagtcctcgataagttaattcgaaccgttcaagacctgtttatggcaaccaatatcaaaaactctgaagcattcaaagcagctgcgtcacggggtaggtcggttctcgatattaagaaatctgaagagttatgttcaccaaagcagctggatattgccgaagaatccgtaatgtccgtatatcaacagtttattaatgagataaagagtttttcagcgaaggaaggagttaacgcatga

SEQ ID NO: 201107 - DNA, 270 bp, Klebsiella oxytoca; identical to SEQ ID NO: 155862

SEQ ID NO: 201108 - DNA, 522 bp, Klebsiella oxytoca; identical to SEQ ID NO: 155863

SEQ ID NO: 201109 - DNA, 843 bp, Klebsiella oxytoca; identical to SEQ ID NO: 155864

SEQ ID NO: 201110 - DNA, 165 bp, Klebsiella oxytoca; identical to SEQ ID NO: 155865

SEQ ID NO: 201111 - DNA, 444 bp, Klebsiella oxytoca; identical to SEQ ID NO: 155866

SEQ ID NO: 201112 - DNA, 279 bp, Klebsiella oxytoca; identical to SEQ ID NO: 155867

SEQ ID NO: 201113 - DNA, 843 bp, Klebsiella oxytoca; identical to SEQ ID NO: 155868

SEQ ID NO: 201114 - DNA, 318 bp, Klebsiella oxytoca; identical to SEQ ID NO: 155869

SEQ ID NO: 201115 - DNA, 447 bp, Klebsiella oxytoca; identical to SEQ ID NO: 155870

SEQ ID NO: 201116 - DNA, 459 bp, Klebsiella oxytoca; identical to SEQ ID NO: 155871

SEQ ID NO: 201117 - DNA, 231 bp, Klebsiella oxytoca; identical to SEQ ID NO: 155872

SEQ ID NO: 201118 - DNA, 267 bp, Klebsiella oxytoca; identical to SEQ ID NO: 155873

SEQ ID NO: 201119 - DNA, 555 bp, Klebsiella oxytoca
atgttaaatccagctatctgcgccatgttcatgtttcagggcttccagcatgaagtctcccgtctgaccgcattatcagtggctaatcctatccccctcaccttcaactgtgacagcgtacagacaatgatctgtgaaacgctggctggtggcgaaattgaatgtgctcactggatgttggatgccgcagagcagatctgtaaagcctgcgaacctgcgtatcaggcatctgaagaaccgggagtctggtactacgacattgctgaacgtctgggcgctgaagtggcctgccgttgcgtaaaaggtgatatcagcactgaccaattggtcgctgttgcagttaacctcactgagtcatggaacacgctgagcgaagacagcaatcaggagcctgattgcggatcatatgaaaataccgtcaggacgttggtagaacgtgctgatacagcagaagcggcttgcgtagaagcagtcagaatccttgatggtggtgagcggcaggcgttatcaaaggcgatagcaattcttcgccctgtggccgcaacgttgcagtag

SEQ ID NO: 201120 - DNA, 342 bp, Klebsiella oxytoca; identical to SEQ ID NO: 155875

SEQ ID NO: 201121 - DNA, 444 bp, Klebsiella oxytoca; identical to SEQ ID NO: 155876

SEQ ID NO: 201122 - DNA, 339 bp, Klebsiella oxytoca
atgcaggaactcgactttgaccatatccagataaacctgaacccgcgagcgtgtgctgtcacacctatcccggaagacctgaaaagggagctggcttatctgggcgctatcgcagagagaaagaaattcgcggcaagcctgattgttaatctctacaacccggacgtttgtggggcgaatatgtacaaactcacggcctattgccgtaacgagtcatgcgatacccttcgcgatggcatgatgaccctgatacagctttgtgcatacatggagtcacatgagatctatggcgagacgtttgtcaaaaagctgattaaacaatgggagtttcgtaagtag

SEQ ID NO: 201123 - DNA, 327 bp, Klebsiella oxytoca; identical to SEQ ID NO: 155878

SEQ ID NO: 201124 - DNA, 399 bp, Klebsiella oxytoca; identical to SEQ ID NO: 155879

SEQ ID NO: 201125 - DNA, 288 bp, Klebsiella oxytoca; identical to SEQ ID NO: 155880

SEQ ID NO: 201126 - DNA, 531 bp, Klebsiella oxytoca
atgttccgattattacagaagtggttagtcaggtttacctgtcaggacgatatagattgtatgtcgacccggcgctctgcgggcgagttctggctggaaatagatgcccgtcgtcactggattttcctggacatcgacggtgtactccaccgggcggaaaacgggtcactggagtttatgcctgtgctggatcacgtgctgacgcaatgcccgcagacgggaattatcctttccacaaactggcgtaccggcgtaccccgggagatggtgctgagtcatttccctgcgggtatacgcgatcggattgctggactcaatcccgatctggatgggctggtgaataaccacgtgcgttatcacgaatgcatggcggtcgttaaacggttcggcctacagcattacaccttcgtggacgataccgctcgactctttccaactgactgccctgccctgttcctgactcaccggcacgaggggctgaatgcaacgcagggtagcgctttgatagaccggattcggttaatgaaatga

SEQ ID NO: 201127 - DNA, 618 bp, Klebsiella oxytoca; identical to SEQ ID NO: 155882

SEQ ID NO: 201128 - DNA, 555 bp, Klebsiella oxytoca; identical to SEQ ID NO: 155883

SEQ ID NO: 201129 - DNA, 159 bp, Klebsiella oxytoca; identical to SEQ ID NO: 155884

SEQ ID NO: 201130 - DNA, 309 bp, Klebsiella oxytoca; identical to SEQ ID NO: 155885

SEQ ID NO: 201131 - DNA, 240 bp, Klebsiella oxytoca; identical to SEQ ID NO: 155886

SEQ ID NO: 201132 - DNA, 672 bp, Klebsiella oxytoca; identical to SEQ ID NO: 155888

SEQ ID NO: 201133 - DNA, 633 bp, Klebsiella oxytoca; identical to SEQ ID NO: 155889

SEQ ID NO: 201134 - DNA, 141 bp, Klebsiella oxytoca
atgtcagaagcattccgtacccgaaaagcgcgtgagtggcagcgtgaaaatggcgaactctattacggccatgattccgccgtcatgtatgcacatgaaaaatgcattctgaatctggaaagcaaatttacctcaaattaa

SEQ ID NO: 201135 - DNA, 459 bp, Klebsiella oxytoca; identical to SEQ ID NO: 155891

SEQ ID NO: 201136 - DNA, 696 bp, Klebsiella oxytoca; identical to SEQ ID NO: 155892

SEQ ID NO: 201137 - DNA, 192 bp, Klebsiella oxytoca; identical to SEQ ID NO: 155893

SEQ ID NO: 201138 - DNA, 321 bp, Klebsiella oxytoca; identical to SEQ ID NO: 155894

SEQ ID NO: 201139 - DNA, 2073 bp, Klebsiella oxytoca; identical to SEQ ID NO: 155895

SEQ ID NO: 201140 - DNA, 294 bp, Klebsiella oxytoca; identical to SEQ ID NO: 155896

SEQ ID NO: 201141 - DNA, 306 bp, Klebsiella oxytoca; identical to SEQ ID NO: 155897

SEQ ID NO: 201142 - DNA, 273 bp, Klebsiella oxytoca; identical to SEQ ID NO: 155898

SEQ ID NO: 201143 - DNA, 276 bp, Klebsiella oxytoca; identical to SEQ ID NO: 155899

SEQ ID NO: 201144 - DNA, 477 bp, Klebsiella oxytoca; identical to SEQ ID NO: 155900

SEQ ID NO: 201145 - DNA, 459 bp, Klebsiella oxytoca; identical to SEQ ID NO: 155901

SEQ ID NO: 201146 - DNA, 267 bp, Klebsiella oxytoca; identical to SEQ ID NO: 155902

SEQ ID NO: 201147 - DNA, 594 bp, Klebsiella oxytoca; identical to SEQ ID NO: 155903

SEQ ID NO: 201148 - DNA, 1173 bp, Klebsiella oxytoca; identical to SEQ ID NO: 155905

SEQ ID NO: 201149 - DNA, 705 bp, Klebsiella oxytoca
atgcaaggtacaccacgctggtggcagaacggtcgtcgggtgcaggccgttctcgcagagaatcagaccgcagatgtaaggctaaatatcggcccagaaaatgacttctggtttactgatgatggtaataatcctgttgctgtgcttagggttatcggcccggtctgtccactggatccgctaaaattcacctccagtatcactgatgtccttcctgaagatgtccatagctataaaaaagcccttcaggaacaccagatgataaaccggcctgtctcgttctatcttgcacttgccgatgcctggttgcttgttaacgaacagcagccggtttaccagttccgcatccgaaaccagtacaacggcatgactactgaatggaattccgttgcccgggacaaagtcattgaagtgattaagatgcagccggaaaccgctgaattccgggttctcgtcccatcggctcctgagcctgctgcgaatgcccggcagttgatctcagaaattgaaggtctgcgtgaagctattgggaaactctacccggcaaatactgatgtacgtcgtattgccagaaacagcggctggatgcatgtatacgacgacaccaatgccaaaatgaactttgcagacaatgccagaaataccccttatctcgatgcctttgtgactcaactgcatctcttcctcacagatgatcgagagtag

SEQ ID NO: 201150 - DNA, 384 bp, Klebsiella oxytoca; identical to SEQ ID NO: 155907

SEQ ID NO: 201151 - DNA, 273 bp, Klebsiella oxytoca; identical to SEQ ID NO: 155908

SEQ ID NO: 201152 - DNA, 417 bp, Klebsiella oxytoca; identical to SEQ ID NO: 155909

SEQ ID NO: 201153 - DNA, 564 bp, Klebsiella oxytoca; identical to SEQ ID NO: 155910

SEQ ID NO: 201154 - DNA, 690 bp, Klebsiella oxytoca; identical to SEQ ID NO: 155911

SEQ ID NO: 201155 - DNA, 1023 bp, Klebsiella oxytoca; identical to SEQ ID NO: 155913

SEQ ID NO: 201156 - DNA, 531 bp, Klebsiella oxytoca; identical to SEQ ID NO: 155914

SEQ ID NO: 201157 - DNA, 561 bp, Klebsiella oxytoca; identical to SEQ ID NO: 155915

SEQ ID NO: 201158 - DNA, 531 bp, Klebsiella oxytoca; identical to SEQ ID NO: 155916

SEQ ID NO: 201159 - DNA, 531 bp, Klebsiella oxytoca; identical to SEQ ID NO: 155917

SEQ ID NO: 201160 - DNA, 771 bp, Klebsiella oxytoca; identical to SEQ ID NO: 155918

SEQ ID NO: 201161 - DNA, 2658 bp, Klebsiella oxytoca
atgaaaaaccttttccgcaaaaaatggttttacagaccactctgcacaataacgatgttatgtcaccttggtgttgtatcctacgtgccgtatgccttttcagcaacgacccaggaaaacgttacatctgccactaatttctataaaacactgccgcaagtttcagctacgtcaaatggtacggttcagtatggaaaaggccaggccgttgatttgaactctgcttatccaaatcaaggttcatcaacttcactggatagcctgaaaggaacctacggagatgacagcaacacgctaaaactgggcaatacaaccaacgccaatctgaaaaccgaaaattcactgcgcggcgaagcttaccgaacgctggtgggctcaacgaaaactacagcaaacattaaacctgatgattccatctttgatggccataaagacttcctggagaatcaggataagtacatgcaagatcttggtgattgttctatgaccaagaccatgacgaataaggacaccgtcaaccatatccctgattatcgcgaatgtacccgtaccacaagtgtcagcggcacattcaccctctaccatccttacgttgccggtatgctctcgcattatagtggcgcggcgaacatcggttcttgcggcactaactgcatcgaactctggctcgggactgtcggtgataactactgggacggcaactgcacaatatttgaacaggcaatggccgtcactgtctacaatccccaggcagttaccagcgccaagatcatcagggctaaatgggatgattacatgcagatttatgtcggtggtacagataggggtagtttggtttgggcagggccaaaaggtttaaacgtcttcccgccagagacatcaggagcctgtgaattaaaaacaagctgggatcagtcgattaatgtagatgtaacagcacaaatccgaaataccccccaaaatggcgttcttaatttcaaaaaccgtgtgtcagtgactggcagcggcgaaggttatgctctcatttatatttactttgacccaaacaaaattatctcggataacgcctggactgttgataaacctgaacaattcgatacgttgctgaaggccatcaacgccgggtattgccagaattacacggtaacctgccgcgagacagtcattcctgatgcaaatgggtgcgcaaccataaatggcgcacgtatctgcgaaaaccagcttgctaagccgccgatcggaggtctctcacctttctgtaagtctgcaacggtagtttccaactgcggaaccgacggtggcgttaacaatacttgcaagcagtacgatgcaaacactgcatgtaaattcattaagtccacttgcataacaggtgcggagggtgacaaaaatgggtgctggcaggcaaccgaggtatgggattgcggaacggatgtcgttgtacccaatacctcctccaccgatacctatacttgtcctggcgctgtgcaatgccttaatgggtcttgcctacagccttctgctgaaccaagcggcgatttcaacaaagcagttgcaactcttcaggccgcaacttacgcattgaatgaaatgaagtgtggcgatgatactgacgaaaccaaccgttcctgcactctttttaaaggtgagtctgcacaatgtaaatcggcgatggggggatgggtggattgttgtgatcagcccgtagatgtcagctggattcagtatttgcagttgtcctactacactctaaaaattgctgatgctgtctctgtaaaagccggtatgttcgaacagggaaaaggtatttttgacatgggttccgaacttatgactaatgccatcgatacaataactcgaccagctatttccgctttcaacagtctggttgggtcggcaggtactgaagcggctcagcaagctacagaagcaggtttgtccggtttgatgaatcaggctataggagcgctgacgaaacaagttgctcaatggactcttgataccttcggccctgctgcgacgaatctgatatttgaaagtgcggcctctggcggtggcgcagccgtaacatcgtctggcctggctacatctgttcaattgtcgtcaactattgtttcggcaatatccgtggttggatatgcttacatggcgtaccagattgctaatatactggtcaacatcatctgggcttgtactcctgatgaatttaagcttgccgttaagaaagaaacaaaattggccgtgcatatatccagctggtgtgaaacaaagtttctgggtgtctgtatcgagaaacggtcaagttattgcacgtttgattctcagattggtcgcatcattcaggaacaagggagaccaatgttaggtatcggctggggggataaaaagaacccggattgtcgaccactgacgttagaagaatttggacggattgattttaacaaactcgatttgtcagagtggattggttcactttacgaggcgaaacttttacctaaagcgtcggaaataaatctggataagataaccggtaaaggaaacgtattgaatatagatggatctcgccagaactccctggagcgattccagagcggtgttgacagtatcgatgttgatgcggcgaaatctagcacagaggttgttttgaaaactcaatag

SEQ ID NO: 201162 - DNA, 198 bp, Klebsiella oxytoca; identical to SEQ ID NO: 155920

SEQ ID NO: 201163 - DNA, 3519 bp, Klebsiella oxytoca; identical to SEQ ID NO: 155921

SEQ ID NO: 201164 - DNA, 1443 bp, Klebsiella oxytoca
atgaagatttcgcgcaactataatataaagaatgtattccgtagaaacattcttgcaatttctatctgcctctccgggttgacagcttttcaatgcgaggccaccagcattagtactcagctagacagtatgttcggctctatgtcgaatgttacagctcccggtgattatcagagcgttacacgtgatggatataccggtggcggatttgttctacgtaataagctccgtacattgacacctattagtattagtctcccttctgcgtcgggaggatgtggagggatagaccttttcggcgggtcattctcgttcatcaacgctgatcagttcgtccagatgctacgtaatattgcttctaatgctgccggtctagctttccagttggccctgaacgctatggatgccgttctggataatgctatttcgaaaatgcaggcaatcatccagcagatgaacgatctgaccgcaaattcgtgtcagttagcgaaggggttgttagtcgacactgcctctgcatttggtgacagtgcaaaggctgctgtatcttctcagctgtcctctgatggcctctcagaccaatttaaagccatgtggggcaatatgggtggtggtaaagcacccgacgtacaaaaacaagaggcagggaaaagaaaggcatgtgacgattacggtaacattgtgtggtgtttgctccagaatggtagctttagtaatcaattcatcggctccgaagatgagcaaaaagaacttattatgtctatgaccggcaccatcatcgtcggtagccagttgggtacagataaagatgggtcagctaaaaagagtgtggttaggattgctccactcgcaacttcaaatgtcctggattcttttataaatggtgatgatagtttcgatttctggtcttgttcaggtcagactagtacttgtgagaatcccaaaaaacagaccaaaataattaaaggtctcgctgccaatatcacactcttctttatcgataacggatatttgagctcggccagaactggttcaaaccctggggatgctaaattacggcaagcaaactactacaacgtagctggtgctaccagtaaagcgactcaaattgcacgtcatgatttagccgcatcttattcctatatacgtgaactatctcctgtcatagcctattcagctgcttataactacctcagcgaaatgcttacggctgctgcgaccggcgcacggctccagcaggaaaatgataaatcggcgtcagtttattataaggatgctggagagctaatcgaaaaggcaaggcaaaatctgtatgtctcctataacgccatgatatcccgttatggtggcgaggcccgtatacctgaatcattcagcaactatatgacaacgcttccgcaggttcattatgaatctgaaggttctcttgatggctcgctctaa

SEQ ID NO: 201165 - DNA, 1101 bp, Klebsiella oxytoca; identical to SEQ ID NO: 155923

SEQ ID NO: 201166 - DNA, 522 bp, Klebsiella oxytoca; identical to SEQ ID NO: 155925

SEQ ID NO: 201167 - DNA, 390 bp, Klebsiella oxytoca; identical to SEQ ID NO: 155926

SEQ ID NO: 201168 - DNA, 261 bp, Klebsiella oxytoca; identical to SEQ ID NO: 155927

SEQ ID NO: 201169 - DNA, 222 bp, Klebsiella oxytoca; identical to SEQ ID NO: 155928

SEQ ID NO: 201170 - DNA, 309 bp, Klebsiella oxytoca; identical to SEQ ID NO: 155929

SEQ ID NO: 201171 - DNA, 501 bp, Klebsiella oxytoca; identical to SEQ ID NO: 155930

SEQ ID NO: 201172 - DNA, 1914 bp, Klebsiella oxytoca; identical to SEQ ID NO: 155931

SEQ ID NO: 201173 - DNA, 1356 bp, Klebsiella oxytoca
atgactatcaaatccaatgccactcaggttctggaacaacttattctcgtttctctttctgatatcaccagtattagtggtcgtcgtaagctgaaaagagaagatcttggtaacagtgctgatttgccacctgatgtacttgtttcattaggtagcaagaaaatcattgacccacaactcatcaatccatttacccgcaagaagaattcagctcacgctttatgtcttgaagcgggtattaaatttatgggaggctatgcaattccagccgacaaggttaatgatttaattggtaaactgaatgtacttaagggcgagttttacgattacaaaaaggaatttatgaaagctgattttaatagctggattaattcttttgaagaaaagtatcgctctatacttttgcgtgatgctgcgatcgatttgtcttatatggatagccagatacaatttggctttactgcgattcatatcacaccttatggtaacagtgtcattcaggatggtttaactgggcaagttaaaagtttagcggatgaagtttatgaggatgtggctgatgttgttgaaggtttccttaaaaacaggaaccccgatgcgttttctcagcacacactaaatcctttacgccgctgcggcgataaactcgcttccctagctttcatcgcaccaagcgtccagtctcttagcgactatgttaatcaggtaatgaaagacattccgctaaccggcaaagtgacgggcaaaccttataacgacattctctctctcctcaataacctacgcgacccaattcatgcaaaacagtttgtagaactgctgtcatcagccagtactacagatggtaacgatgcgattgacccatcactttcaatgaaccttattggagatgatgatgccatgactttagcggccatttcggcaactcaggttcaggtagaaacgcttcctcctccgcatacagatgcgtttgcatctgctgtggtagtagaagatccgatcggattgcaaagcgttgattcactcgctgaagccccatctgttctggtagaaatcaatggttcagctgatacgtctttggcaatcgaaccggttaatacgtcggctgatactgacgttaacgacttgtccgatacccaggagcatggaattgttaatgacgctgtaataccggcgtttagtgcggttatagtcgatgatgattcatttttgggcggtgattcgattgtaccccgctctctgccagactcagctcttatttcgggtttggattctgaaaaagtcattgatggaaaagagcctgaaattgtaatttcgtcttcactcgatgatgacgaaacaataatggtgttttaa

SEQ ID NO: 201174 - DNA, 492 bp, Klebsiella oxytoca
atgtccgccgtcgtggataaatccggccccgctatcctcttcacccactctcagggtggcgggccaggctggtacacggcgatgaaaaatgacaaggtcaaagccattgtcgccttcgagcccggcagcagctttgtcttcccggaaaaagaactcccagcccctatgccaagcgcgttcgacacgctgaagggtgagccggtgccgatggagcagtttatggctctgaccaaaatcccgattctgattatttacggcgataacataccggataagcctgtcgccatgcccgcgcaggacagctggcgagtacgtctggcgatggcgcgtgagtggcgtgacgtggtgaacaagcatggcggggatgtgacggtaacgcatttgcctgaagtgggaatcaaagggaatacccacttcccgttctctgatctcaataatgtgcaaattgctgatttggtaagtaaattcttggaagagaaaaatttgcagtag

SEQ ID NO: 201175 - DNA, 249 bp, Klebsiella oxytoca
atgtcgagattagttcttctttcagtatgggctgaacacgaattcggagatccggttcctgcgtcgtcaacactgaacaagtacgcgaagaatggaatgatatccccagcaccacaaaaggttgggaaaagctggcgggtggagcaggacgctcgctttgttggaatgacaacagcacctgaggtgaaaaaacaagatcacccgttgttgaggagaattcttgaagatgggcagaccacggaaacataa

SEQ ID NO: 201176 - DNA, 396 bp, Klebsiella oxytoca
atgaactttgaagaaaggttacaaagggctattgaggaggccggaatctctcaatccgagctggggcgccgtataggtgtgaactctcagactgtcagccattggtgtaattcagggattttccctcgcaaggaaaagcttgccctgctcccgggggcactaggtaagcctctgtattggttctttttatctgacgaagaagagcaaaagattgtaaaaactattgcgagcaaaacgattctaagcccaaagcaggcagcaattctggatgtgtttgatcagctgcctgagtcggaacaagacagattcatatcgttagcaaaaacaaggcttgaagagttagatgctttcatggctgagtttctacgtaaaagaaaaatagatccagccccttaa

SEQ ID NO: 201177 - DNA, 1056 bp, Klebsiella oxytoca
atggcagcgctgccctacatgcaactttacattgctgattacctggcggacaccatgcatctgtcaactgaggagcatggcgcatacctgctgctgatgttcaattactggcaaacaggccgggcgattcctaaaaatcgcctgccgaaaattgctcgcgtttctgatgagcgctggaaagaactggagccagtaattaaagagttctttgaagaggataatgataactgggttcacctgcgtattgagcgggatatagaaaccgttaccagttcaccgagaggcaaaaaattacctgctggagaatctctgaaaggatttaacggctatgtctatttcattaaaaatccgatatcaggattgataaaaattggttattcaaaaaacccctgggctcggctgtctgaacttcgtcgtaactacggtagtgatttatccgtagtagctacgataaaaaccgtagataagtcggaggtgtccattcataccgctctatcgaaatatagggtggagggtgaatggtttactgaaagtgaatgcattaaatcccttatttcactcattgtagcaggtgaaataactactgtagatgctacgaactactacgcatctaactacggtagtgctcctacggctactacaaatacagatccagatatagatacagatctaaaagaaaacccagagagagaaatacgcgcaagggatgaaatttcgccggaggaatatcaaccgggaacttttcctgcccctctcggtaaattcgcagtcacgaagagctggacgcctgacattgacttttgtcgccgtgccgcactgtggggaattaacctcggacaggaaccggggtataccgcagaggaattacagcaattccgtgattactggtcgcctgaagggaaggttaaacaccagcagcaatgggaacagacatttgctcagagcttacgcacttcgcgtacccatgccagcagaccgatatcaggcgcaaagaaaccagcattgccgaaaatatcgaagccaggcacaacgatcccatccgggttcagggggtaa

SEQ ID NO: 201178 - DNA, 741 bp, Klebsiella oxytoca
atgaagaccaccagtgacttgtttaccagactgcaaaaaatcatgcctgagggggttaagccgcggttcagtacagcagctgagctgatggaatggcaacgaaccgaaggtctgaaacgagcggaggaagttggcagagaaaatcgtaagagcaggactgaaaaaatccttgggcgttctggcatccagaatctgcataaggactgtaccttcgcaaattaccaggtgaacaacgatggccagcggcgtgcgctgactatggcaaagagctatgcgcacaattttggcgaagggtttaccagtttcatcttcagcggtggatgtggaaccgggaaaaatcacctggcagcggctatcgggaattatctgctcagtaaggaccgcagtgttctggtcataacggtaatggacctgatgttacgtgttcgtgagtgctatgacggcggaaagtcagaggcagagttactggatgacctgtgcaaagttgatttgctcgtgcttgacgaagtaggggtgcaacgagaaacaaggggtgaacaggttttactgaatcaggttatcgaccgccgtctggcagcaatgaaaccagttggagtgctgacaaatcttgatcacgacgaccttatgaaaacattgggtgaacgagtaatggatcgtttgaccatggatggcgggatctgggtgaacttcacctggaatagttatcgtaaaaacgtgacccatttacgggttgttaagtaa

SEQ ID NO: 201179 - DNA, 381 bp, Klebsiella oxytoca
atgaacgagcaagccaataaaatacttatcgaccttttacagaaagccgcgaacggggttgatgctgccatgtcttttagccaggctcaggttcctgacattatccggcagttgatggtgtggaaggcagcggcttacggcatgcggatcttctttatgtcgctatttctcctcgggtgcatcctgttattccgcagggcgctgaaatggcatgaatcatttgattatgaggcgcttggtttcttttcgttactttcctctgcattgacggggtcgcttcttgttgtcgggattctggcgaacatatccaacctcatgcagctctggctggcgccaaaaatttggctcatcgaatacacggctgaattgctgaagggttag

SEQ ID NO: 201180 - DNA, 414 bp, Klebsiella oxytoca
atgaacgaagattttgaattgcaagaagtattgtcctttaaagtcaaagactcagatttatcatttttgaatggcatggtaaacaaagcagactttgggattggaatcacattgttcgttaaaggatgcgtaattactggttcattaatatcagggagaaaatactatcgtattgtctctgataatttgaagtcatccggtgtagttggagaatccctgtctgcgtactttgaggtgaagggtagggacggctatacaagtcctgacccggattttgaatatcctaataatttcttgcatttagagaacataaaaattcgtggcggaagtggggttattggatctttgagtgacgccatgttaagagttaaaatagaagaaattgatggccacttcattggaaatattagttga

SEQ ID NO: 201181 - DNA, 393 bp, Klebsiella oxytoca
atgagcgacgacctgaatcagtttcgtagtaaagggccggaactgttggtggaactggcacagcacacttctgagaccgtccgcgagattattgaaatcgaacccgtagttgccgaccagattggtcaggctgtcgcaaaccgcatgatgcaggtctggggcgggcaaaacgtctattttccgatgggcatggtctggaaggtgagccagcgcgatcgggaaatcttccaggagttcgacgggcgcaaccatcatgaactggcccgcaaatttggtgtttcgcttcagtgggtttacagcgtggtgaagcgggtcagaaaagaagaactggatcggatgcagggtaaactgtttgatggcgaacccgatgccgatacggggaaaaaggagtaa

SEQ ID NO: 201182 - DNA, 429 bp, Klebsiella oxytoca
atgatgactaaacagcgtcttattcaactcattcatattgcccgcagcgatctccagatggatgaggacacctaccgccagatgctacaggggctgaccggcaaagcctcaaccaaagggatggataccccgcagctaaaccgcgtgctcgaatccatgaaaaagaaaggctttcgcattaagcctgccggaaaagccacgtccggcttaccgctggatagtcatccgcagtcaaagaaaatccgtgcgctatggcttgaaatggctgcggcaggcgtcgtccgtgacagttcagagcaggcgctggcgctgtgggttaaacgggaaacgggcatcagcgcgttacgctggctcagcaatgagcaggcaagtagcgtaattgagaaactgaagaagtggcagcgcagggctgcgggggtgaagcaatga

SEQ ID NO: 201183 - DNA, 690 bp, Klebsiella oxytoca
atgccgcagaataatgaaaagctgctggagaagttaaaaaagttgctggcgctggctaaatccgacaaccctcatgaagctgcactggccctgcaacgcgcccagaaactgatgcaggcctataacatcacccaggctgacctcgcactcagcgatattgatgaaagcgtcagtaactactgggctgcaggtagcgttaatccgccgcgttacatgctgggtctgctggatattatccaggtagcatttggcgttaagtctattattcactccggctttaaacccagcgttggtttttacggtaataaagaccgggttgaactggcctcatatacatgggaggtactggccagacaattaatcgtggctcgtaaaaactatattcgacagcagaataaaagaatcaaaaacacgaccaagaccagtcgtggtgacaagtttgccgaaggctgggttctggccgtgcgcagcgaggttcatttgtttgctatgtcccgcgaagaacgggagctggcaagcctctggcttgaacaaaaataccctgactcaggcacaaccacgggccgtggggccgggaaatcacgtgatgcagacatgtcccgccacatcggttacagagaaggggaaaacgtccgcctgcatcagcccgtcggcgggaaggaacagcataaactgagggctgaaagatga

SEQ ID NO: 201184 - DNA, 297 bp, Klebsiella oxytoca
atgaaaggcatgaaattatataaccgctcgacgatctaccatctggccctgaaaacctttggccctgaagcacaggcgctgaagttgatggaagaagccgccgaactggccgctgccgctgcccgcaacatgaacggactgggcaatgaagttgatctggctggcgaactggctgacgttgaaatcatgattgaacagttccgcctcaacgggatgggcctgatgattgactttcataagcagaaaaagctggaacgccttgccgaacgtctgggggtaacttatgccgcagaataa

SEQ ID NO: 201185 - DNA, 189 bp, Klebsiella oxytoca
atgtccatcaaatgttccaactgtaagaaaggtatcaccactctgaagttcagcgacgccagcgtcattacctctggcaaataccatgttccagccgtcctcatcacgctggtatgcccgcactgcagccagcattactacaccgaagtcccggccattgagttcatcccctgcgaggcaaaacaatga

SEQ ID NO: 201186 - DNA, 612 bp, Klebsiella oxytoca
atgagcgaagtaaataaagaagactacatgaaagaccgcaaggggcgtctggtgccggttgaccaggtgtctgactatgaccttgcgatggactctttcgttaaagaacaggttgccgccgcgaagattaagcgtgatgaactcagcgacttcaagcgtcgtgcctttgacgagtgctatgcctggcttgaccttgtggccgagaagtacggcagaacgcgcggcggtgccaaaggcaacgtgaccttcagcagcttcgacggtgctcagcagatcaccatccgcgtgcaggaaaccctgaccttcgggccagaactgcagattgccaaagacctgatagacgagtgcgtcaccgagtggtcggaaggcgcgaacgccaacctgcgggccatcatcagcgatgctttccaggtggacaaagagggccagcttaataccggacgcattctttccctgcgccgcgtcaagattcaggacgagcgctggaaccgggcaatggaggccatatcggaatcactgcaggtggcaatgtccaaaacctatattaatttccgggagaaagataaacacgggaagctaattaatattccgttagatatcgctgccatttaa

SEQ ID NO: 201187 - DNA, 270 bp, Klebsiella oxytoca
atgaaatccatcgccgatatcaatcagcagatgagtaaggtgcagtccgccattatggcgctcaacgccatgaacactaccgtacagagcgtcatgattgctggcagtaagccggttatccgtatcgcccgcaacgggcactgtgcccgcctgctggagcagggcaaggcaagttatacccatgttggccatgacggctcagggcgcttccgtcagggcgtctttgaactgcatggctgccgcattacctggtcagagtcattacattaa

SEQ ID NO: 201188 - DNA, 1167 bp, Klebsiella oxytoca
atgctggtactgaagcaacaactgaaagaggcccgcatcccgcaggcggtggtggcaagagccgtcgccgtttccgaggccacgctggcccagattgtgaaccacaacgagtggccccgcaccagcccggaggcggtgcgccagcgtctggcgtcctggctggaaagtcaggggattgatacagcgaagagttttgatgctgtacagggcgcagccacgccccgtacagcgggtactaccgataaaaccaacctcagcgaggcagagaacatgttactcaaaaagcaggtgttatttccagcaaccaaaaaagcgtttggccttttccgtgacccgttcgccgatgaggccatgcagggcgcggacgatgtgttcaccacgccggatatccgctacgtgcgtgaggcactgttccagaccgcccgtcacggtggctttctggcggttatcggcgagtctggcgcgggtaaatccacgctgcgccgtgacctgattgaacgcgtcaaccgcgagaacgcgccggtgattgttatcgagccatacatcatcgccatggaagacaacgacgtgaagggcaaaaccctgaaggcagcagctatcgctgaggcaatcatcagcaccatcgcgccactggagagcatcaaacgcagccaggacgcccgtttccgccagttgcaccgcgtcctgaaggacagcagtcaggcgggtttcagccacgttctggtgattgaggaggcccacagcctgcccatccctacgctgaagcaccttaaacgcttttttgagctggaatcgggcttcaaaaaactgctgtccatcgtgctgattggccagcctgagctggcggacaaactgtccgaacgcaacatggaagtccgtgaggtcgtccagcgctgcgaggtagttgaactgctgccgctggacaacagcctggaagagtttctggcgttcaaactgcaacgcgccggtaagcagctggccgacatcatggacgccagcgctgtggaagccatccgtgcccgcctgagcaatctgggcagcaaccgtaaaagcatggtcagcctgctgtatccgctggccgtcagtaacctggtgatagcggccatgaatctggccgctgaaatcggggttccgcaggtcaacgccgacgtcgtcaaaggggtttaa

SEQ ID NO: 201189 - DNA, 1770 bp, Klebsiella oxytoca
atgagtgccgccctgactgaacgactggtttatgttgcccgcgcggcacgtgacgcggggcatggtaagcgcggtgcgatatacgacgccgcctgcgctgaactgggcatgtcccgcgccaccctgctgcgcaagctgaaggaggtatcagtgactgacaaacgtaaaaaacgcgccgatgccgggcgcagcgccctgagccgcgacgaagccgcgctgatatctgccacgctgcgcgaggccacccgtaagaacggcaaacgcctgtattccatcgcagatgcggtggagaccctgcggtcaaacggctttatcaccgcaggcagaacggacgaggcaacaggcgagtttttcccgctgtccgaggacaccatcagccgcgccctgcgtaactatggccttcacccggaacagcttgacgcaccggccccgtcgtccgagatggccagcctgcatcccaaccacgtctgggagattgatgcctcactttgtacgctttactacctgagcaacggccataaagggctgcaggtgatggacagcgcgaagttctacaagaacaagcctgccaacatcgcacgcatcgccagtgaccgcgtgtggagttacgagattaccgaccataccagcggctggatttacgttgagtacgtgatgggcgcggaatccggtgagaacctctgttctgttcttatcaacgccatgcaggagcgtggtggcgctgacgtgttgcacggtgtgccgaaaatactctacctcgaccccggctcggcgaacaccgccggtatgacgaaaaacatgtgccgctcgctgggcatcaacctgatagcgcacaagccgcataacgcccgtgccaccgggcaggtggaaaaggcccgcgacattatcgaacgcaagctggagccgggtctcaagttccagccggttcacagcctggaagagctgaacgcgctggccgtgaaatggcgcagccactttaacgccacggctgttcacagccgccacggtaaaacccgcacggatatctggctgaaaattaccgctgaccagctgaaaaaagcgccatccgttgaggtctgccgtgaactggcggtggccgcacctgaactccgcaaggtcacatcaaaactgcgtgtctcgttccggggtgctgagtttgatgtttcgacggtgccgggcgtactggtcggcgaaaaactgatgattacccgtaacccgtggcgcagcgatgttgcgcaggtagtgctgaccggcgaagacggccacgagacgttcttcctggtcgaagaggtcagaaagaacgagtttggcttcgccgaaagcgcggcggtatttggcgaaagctacaaagccctgccggagaccccggcgcagacggcggcaaaagaaatcgaagagctggtcaccggcacagataacgccgccgatgcagctgctgcacgcaaggcgaaggcgctgccgtttggcggacgacttgacccgtataaacatatcgacgacaccacgcttccgacctatatgcctaagcgcggtcaggcttcagacgtgcgcggcccgcgtattgagcagcgtccgctgacccatgtggaggcggcgaaagccctgcgcgagaagttcagcgcgaacggccatacctggacgccggaatgttaccgccagttaacggcgcagtacccggatggcgtaccggaagctgcgctggatgaggtgatggtcaccctgaccgctccggcccacaacagcgttatcagcatcgttaacggcaactga

SEQ ID NO: 201190 - DNA, 909 bp, Klebsiella oxytoca
atgggacgcacaaaatcacaaccagttgaattagtggaagatgcaccgctgaccgatggtctcagtgtcaatcttaatgctatgtctgaacatcgcctcgaaatcatgcagcagtttggtgatggcctgccatatgaacgtgaccgcatcgttcacgagacacgcttctacatggctcagagtgctgaagccatgctggaagctggtaagcggctgattatccttaaagagaatgagccgcatggcgagtttgttgagattgtcagggagcatctcggcattgaacctcgcattgcgcaaaaaatggcgcaggccgcactcaaatttctatctccagaactggagtcaaaagcgaaaacgttttcgcttttaggacgctcaaagttatacgaactaatgctggaagatgatgaagaactggctcaattagcagatggcggcacagtggcaggcctgacgctagatgatgttgatcgcatgtcggtacgtgagttgcgccagtctcttcgcgaagcccgcgaaaccaacgcagcacaacagcgcgtactggccgacaaaaacgaaaaaatcgactctctctccaccaaactggagaagaaatcccgtattcagccacccaagcctgatgaagaagtgaagaagatgcgggcagaagtgacggcgttagcggttgaggcggaatctgccatcgccgttcgactgtcctgcgcctttgagaccctgtgtgcatactgcgctgaaaacatgattgatacccccagagactttatggccggtctggtctgccagctggaaagcaccgcgcgtagcctgcgctccacatttgacctgccggacgagccgacaggtaacgccgccccttcatggctgactgacccgacgccacagattaacgggcaggaggcataa

SEQ ID NO: 201191 - DNA, 306 bp, Klebsiella oxytoca
atgagtaaaccaaatacatcaagctcaggtacccgtattttgcgtgtccttaaagctttacgcggtcacgctctgaacggtgtttctaacggtgaactggcatcggctctgggtgagtcaccggcgaatatcaaccgtgcgctgaatacccttatcgaagaaggactggccctgaaactggataacgggcgttttgcccctggagtccagctcttacaaatcgccatggcgcacagtaccgaaatggcacgggcgcaggatcgtatcaatgaaatcaaccagcgtgttatggctggcagtcgctaa

SEQ ID NO: 201192 - DNA, 411 bp, Klebsiella oxytoca
atgagtataaaagagagattgcgcgaggcgatggatgctaagggtttgacaataaaagcattgtcagacttgtcgaaaattccatatcgctcacttcaaaactatctgcgtggagagagagaacctaatgcggaggctcttgttgcgttaagcacccatttgaacatatcaatagattggctacttactggtaaaggggacgctgttggggtagagaaagcacagccagctaatcaggagcagcatttcaaccagtctgatctgaagttattggaactgctcaaccaactggagccagaggtgcgaaaagagttgctgcgaggcgctgaggaaaaacagcgaatgattgatatggaaaaacagcttaaggagctgtccgcagcgttcgatagattaaaaaatacgggttaa

SEQ ID NO: 201193 - DNA, 534 bp, Klebsiella oxytoca
atgactatgcgcaaattatttttaccgttgatatttgttttatctgggtgtggagataataccgatcctgctgatacgtccaccacagctaaggagcacacggtttttagcgttgaaacagataatccggttataaaacgcgaattaccgtttattcgccaacaactccccggcctggataagtacgcggacagttttgaaaaaatcgaagtatccgaggatagcgaacgcccggtgacaacggtgcagtttcatattaaagacgaaaataatattccaagtgactacatagcctctggtcataattgttatttgttcatatcaaataatgcccacgaagtgaaaatatctaaatcagcatgtcaggctgtttttttcgataaaacggatgttcccggtggagacctgaccgtgaaacttgataaggaaaaagttcctatgacagatgatggtaagcccccgcgagcaggttgtttgaaggcttattcaccagagccagataatgattattggacttgtccaaggcaggattaa

SEQ ID NO: 201194 - DNA, 771 bp, Klebsiella oxytoca
atgaaagaacaatctttacccatcgttccatggattggcggcaaacgtcgtctggctaagcatattctgccgctgttcccagcccatacctgctatgtggagccgttctgcggggcagctgcgctctattttcttaagacacccagcaagatcgaagtcattaacgatatcaacggcgaactggtgaacctctatcgggtggtaaaacatcacctggaagagtttgtccgccagttcaaatgggcactggtcagccgtcagatttacaaatggctgcaggatacgccggaggagacactcaccgacatacagcgggcggcccggttctactacctgcagaaacaggcgtttggcggtaaggtcgccgatcacactttcggaacctctacaaccagtgcgccgcgcttcaatctcctgcgcatcgaagaagaactgtcgatggcacacctgcggctgtccagaacgctgatagaacatctggactggaaccagtgcatagagcgatatgatcgcccgcatacgctgttctactgtgacccaccgtactggggaacggaaggctatggtgtggagttcgggctggaaaactatgatcacatggcagagctggcgcgtaggatcaaagggaagatgattatatcggtgaacgatatcccggaaatgcggcaggcgttcaatggactgaacattcagacagttgatatcagctacaacctgaaggtaacaggcaaacccagcccgaagaaagagctggtaatttgtaatttttga

SEQ ID NO: 201195 - DNA, 567 bp, Klebsiella oxytoca
atgggtacgtattacacacttgattccgctaatcgtctgccttcgccttgccatgtaattaccgggaaatacgaacctgaagcgcctgagttagccgccttccttcatcagatgtatcccgatggtctttccaagcacggtcataactatctctataaccccggccctaaaatggaagatgacagtggagtcagcagaagtctgctggtcggtctggtgtttgagttagttcgccgtagccattttcctgacaaaccctcccgctatcagtcactgtttgcctgtcagcatctgagtgaagtcaggaagttccggggattactggccgatgagagaggcgaagaggaaatcagaacggcaccgatatatgaagtcatcacagatgagccggtgcatcgtggagatatgagattattgaacagtgattgcccggtgctggaactgtatcaccgggcctggctttactggtcgggagaagctgccccggttaagactggtgaggaagaaccgttctgggaactgctgattccgcttccagtcttcgttggtcgcaggataactgagtag

SEQ ID NO: 201196 - DNA, 324 bp, Klebsiella oxytoca
atgactgaaccgaaacagcccggttttaaaaaagggttcctctttgggatcagaaccggagagaaaaataaaacttacacactaagcgtggatgcatgttgcccaaccgaagcgattgcagaactgaaaaacgcgctggttgcacttgaagagagaagaagtcatttcgccagcggagaaaacaacgtcatgatgattggcaatgtggcggcgacatcacgatataaagccgcacctaatcctgctactcagttatcctgcgaccaacgaagactggaagcggaatcagcagttcccagaacggttcttcctcaccagtcttaa

SEQ ID NO: 201197 - DNA, 351 bp, Klebsiella oxytoca
atgaaaaacctgaaaaaattcattccccctgttaaaaagccccgcctcagcggctggctgctgacctctgtgctgttgctcggcaccatcggtctggtctcgccccagcagctgccggtggttgtctacaagctgtcgctcatcacgctggcggctgtgctgggctactggcttgaccgttcgcttttccccaaagcccgtcccggtcagtacctgaagcacgatgacaggctgatggctgatggtcgcttccccgtccagactggccttcacctggtcttttccgctgcgctaatccgccgtgcgctgattgttgcagcagtctgtctggccgtagcgacgggactgtaa

SEQ ID NO: 201198 - DNA, 729 bp, Klebsiella oxytoca
atgaactggcctcaaatcactctcatcatcctgcttgcctttggtctgggcgtaactgccatcaagcatggcgagccacgcaacgataaatacagcttctggtggcagcttgctggcaacctggtgattgcctggctgctctggtgtggcggcttctttagtcaggcccacgcagcccagccaccgcaggccgcgctgcagtatcgcgacgatgtgatccgtaatgcccggcttgaatggggactgtctgcgccggtggccgatttcgccgcgcagctacatcaggaaagcggctggcgacctgatgcggtctcgccggttggcgctcaggggctggcgcagtttatgcccgccaccgctgactggataagtcagctgatgccggggcttaacagccgtgagccgtttaatccggcatgggccatccgggcgctggtcagctatgaccgctggctgtggcagcgtgtcagcgccgccaacggctgcgaacgtatggccatgacgctgtccggctataacggcggtctgggctgggtacagcgggacaaacggctggccttacagcaggggctggatagtacccgctggtttggacatgtcgccacggtgaatgccgggcgcagcgctgccaactggcgggagaaccgccactatccgcagcgcatcctgcgggagctggctccgcgctatctcacatggggaggcagcagctgtgtggaacctggttaa

SEQ ID NO: 201199 - DNA, 651 bp, Klebsiella oxytoca; identical to SEQ ID NO: 15579

SEQ ID NO: 201200 - DNA, 333 bp, Klebsiella oxytoca
atgacgttgcaggttgaattctggacggtggtgggctttctcatcaccttcatgagctttgtcggcggtatggccaagtggctgttcagtaaagcggaggagcgtcaggcggcgcggttcgcctcccttgagcagtcgctgcaacagttcgcctccaactggggcgagctggaaaaagaatttatgcggtttaaggcggatttaccgctgaactacgtccgccgcgaggattacatccgtggccagacggtcatcgaggccaagctggacgcactctacaacaaactggaagtggtacagcagtaccgtcatacaggaggtcaccatggttga

SEQ ID NO: 201201 - DNA, 312 bp, Klebsiella oxytoca
atggttgatatcgcccgcgtgcgccgggaatccctgcgctggagtctgctggttgctctgaacaaaacccgcccgtataccgccagcgagacgctgctgctggatgtatcccgcgccatctacccggacaccacgccgctggagctgcgccgtgagctggattatctggccgaccgcaagatggtagatctggagaaaaaaccctccggcgactggtttgccgacctgacccgcctcggcgtcgacctggtggaatacaccgtggaatgcggccccggcatcgcccgcccggaaaagtactggagtgaataa

SEQ ID NO: 201202 - DNA, 546 bp, Klebsiella oxytoca
atggccagacgcagcacgatagaaaagctgccggaagatgtgcgtcgctggcttgagcgggcgctgactgaatccggcttcagcgggtataacgagctggagtccctgctgcgtgagcagggttacgtcatcagcaaatcggctatccatcgctatggccagaagattgagcgccgctatggcgctatccgtgcggcgacagaagcggcccgcatgctgaccgagggagctgctgacgatcaggatgcgcgttcggaggcggtgatcgccctgattcagaccgagctgttcgagagtattgtccagctgcaggaagcggaagaaggcgaagtcgaccccaaagagcgcgtggcgctgctgtcgaaggtggcgaagaacgtggccacgctgtcccgcgcgtccgtcaacctcaagaagttccagtccgaagtccgggccagagcgcagcaggcagccagcaacgccgagaaaattgcccgtaagggtggactgtcaaccgatgcggtacaggcgctgaagcgcgaaattctggggattgccacatga

SEQ ID NO: 201203 - DNA, 1524 bp, Klebsiella oxytoca
atgagccagcttgctcccgttttgcctgatacctcggcgctggatatccccgccgttctgatgccttaccagcagcgctgggtggctgatacgtcgccgctcaaggtgattgagaagagccgccgtaccggtatcacctgggctgaagcgtccgatgatgtgctgaccgcagcctcttcagcacctgcgggcgggatgaacgtgtattacatcgcttataaccaggacatgaccgtcgaatatatccaggcctgtgcgatgtgggcgcgggcattcaactatgctgccagtgaaatcgaagagggtttctgggaagaggacgaagacgacaaacacatcaagacctacaccatcaaattccctgattcaggcttccgcgttgttgcgctctcaagccgcccgtctaacctgcgtggccgtcagggcatcatcgttatcgacgaagcggcgttccatgagcaactggatgaactgctgaaggcggcgctggcgatgcttatctggggtggcaaggtgcgcgttatctccacccatgacagtgacgataacccgttcaatacgcttatcggtgatatccgggccggacgtcaggggggcagcgtacatcgtattactttccaggaggctgtgtcggagggattgttccaccgcgtctgcctgcgtaccgggaaagaatggtcgcaagcgtccgagcaggcgtggatggcatcggtgtacaaattctacggtgccggtgcatccgaggagcttgactgtgtcccggccaacggaggcggagcctggctgtcccgcgccctgattgagtcccgtatgtcggctgacacaccggtgttacgcctgacctgcccggagggctacgagctgaagcccgacgacgtccgctggagcgagacgcaggactggctggacgaacacctcaaaccattgctggaggcgctccccgctgatgcacggtcgtttttagggcgtgactttgggcgcagcggtgacctgtcggtggactatcccctgctgcaggagaagaacctggtgcgtcgcgtaccgttcgtgctggagctgcgcaacgtgccgttcaaacagcaggagcaaatcgcgtggtatctgatggacggcctgccaaacctgatgggcgcggcgctcgatgcccgtggtaacggctcttacctcgccgaatacgccatgcagcgctacggctccagccgggtcaagcaggtgatgcctaccgagagctggtatcgcgaacatatgccgccggtcaaggctgcgctggaagatggcaaccttgtggatttaccgaaggatgaagacacgctggacgacctgcgggccgttcaggtggtcaacggcgttccccgcgtgccggaacagcgctcaaaagcgaagtctgacagtggcaagcgtcacggggattcagccatcgcactggcgctggcgtacttcgccagccgtgaaattaacaaagggccggtgaaggcaagctcacgccgtcgtcgtcaggcggcccgtatgctggaggattactga

SEQ ID NO: 201204 - DNA, 1497 bp, Klebsiella oxytoca
atggcccgtggactctgggtttcacccaatgagtttgtctcttttgccgaacccaataaaacgctgacggagcagatcgcctcgcgcagccgctccatcgacttcttcgggctgggaatgtacctgcctaaccctgaccccattctgaaatctcagggccgggatatccgcatctatcgtgaactgcgtaccgacccgctggttggtggctgcatccgcaggcgtaaggcggcggtcaagtcgctggagcgtggtcttgagcgcggtcatgccccggcgcgggtattcagcttcatccgggatatgctcgacgatctggatttgtcacgcatcatcggcgagatgaccgatgccgttctctacgggtatcagccctgtgaggtcatgtggggacgctctgttaaatcctggggcatcgccgatatcgtgggcaagccgcctgagtggttccagttcgacaatgacaacctgctgcgctttcgtgctaaagacgccgggctggaaggtgagccggtaccgctgaacaagttcgtggtaccgcgtcaggatgcgacttacgacaacccgtatggcttccctgatttgtctatgtgcttctggcccgtgaccttcaaaaaaggcggcatgaagttctgggtgcgctttgccgagaagtacggttcaccgtgggttatcggcaagcatccgcgtgggacggcccagggtgagattgacctactgctggactccatggaggccatggtggaagacgcggtggccgctatccctgacgattcctccattgaaattaaggaggccgcaggcaaggccgacagcagcgatatttatcagaacctgatcacgcttgcccgcagtgaaatctctattgctctgctggggcagaaccagaccaccgaggccaacagtaaccgcgcctccgcgcaggccgggctggaagtcaccgatgatatccgtgacgctgactctgatatcgtggaaagcgcggtgaatcaggccatcaggatggcggtatcgatgaactttggcgatgtggccagccccgtctggaagatgtgggaacagggaacggtcgacgatactcaggcaacccgcgacgagaaactcagccgcgccggtgtggtcttcaccccgcaatacttcaagcgtgagtatcagctgcaggacggcgatattgacgagacaccaccgtcagagcgccagaagaacacgctgccgctgtcgttcgccgaggccatagatgccgatattcaggcccagcaggatctcgatgatgcgctggatattctgatgaacggtggcaccttaaacggcgtacttgcgccggtgctggagccgctctttaaccaggtgaaagacggcgttaacccgtctgagctgctgggggcgctggctgaactgtacccgcagatgaatgcggatgacctgcaggaacggctggcccgtatcatgtttgttgcaactgtctgggggcgtctgcatgagcgtgacaacggctga

SEQ ID NO: 201205 - DNA, 822 bp, Klebsiella oxytoca
atgagcgtgacaacggctgaactggcgtactgcatgacgctgcccccaaaacgggccatcagctacctgaagtccaaagggtatagcttcacctgggactgggaggagatgtggcaggatgcccatgcccgcgcctttaccgtcgccaaagtgacccggctggatatcctggaagatatcaggaacgccctgcagcaggcactggatgagggcaagactgaccgctggttccgccagcagctggagccggagctgcagcgcaagggatggtgggggccacgtgacaccaccgacccggtaacgggcgagccggtcaccatccagcagggcagcccgtggcggctcgacaccatctttcgtaccaatatgtccgtactctacagtgccggtcgctgggcggagcagatggagaacgtcgacgacaggccgtactggatgtataccggcatcaacgacagccatacccgcaagagccatctggcgctgcatggtctggtgctgcgctatgatgacccgttctggcaggcgttctacccgccgaacggctggcgctgccgctgtggcgtcattgccctgagcgcggcagatgtgcgtgcccgtggcctgaaggtgtcagattctggcacagccatgggatgggagctgaagctggtctcagagaaaacaggcgagatgcagaacgtcgccaccttcaataccggcaccacgaaggtggccaccgacgtcggctggtcttatgcgccgggggcagcataccgtcccgaccttgcccgctatcagggtacgcttcaaccgctggcacagcaggaactgagaggataa

SEQ ID NO: 201206 - DNA, 459 bp, Klebsiella oxytoca
atggcttccgataacctggtcaatatcaccattaacgatgaatccctgcgccggagtctccgtgcgctggacctggctgccacagacctggaacccgcgatgcgcaaaatcgccggaaccctgctggcggaaacgcagtttaactttctcgatgaggggcgtccggggtggactccctcgctggcagcacaggagcgcgacggacaaacactgcaggataccgggcgtctgatggggtcagtatcaaccgaccatgacgaccggcaggcagcggttggcactaatgtcgtttatgggccgattcaccagttcggtggtaaaacggggcgtaatgagtccgttgaacttccggcccgtccgttcctgccgctgacaggggacggtgagctgcagcctgaagtggttgtccccatcctcgatacgattgtccgccatcttgaagcagcggcccgtcgctga

SEQ ID NO: 201207 - DNA, 1098 bp, Klebsiella oxytoca
atgccagccattcacatttttaaagccggtactcataccgatatgcacggcactaaactgccgttcacgcaaagcgatcttgccgcctgcgtgaaagcctatgacccgtccgtccatgaagcgcctctcgttattggtcaccccaaaacggaagacccggcgtggggctgggtgaaatccctgtcgcttaacggcggcgatctgctcgctgagcctgaccagctcgacccgcagtttgccgaactggtgggcaacggacgcttcaagaaggtctccgcctcattctatctccctgactcaccgaacaacccgaagcccggcacgctttacctgcgtcatgtcggctttctgggggcgcagccaccttccattaaggggctgaagcaggtttcgtttggtgagaaagaagaaggcgtcgtggagtttgccgactggagtgatatcaccaatgcctctttatgggggcgtctgcgcgattttctgatcgcccagttcgggctggacgagaccgacaaggtgcttccttcatggcaggttgactccctgcgcgaagaggcttaccgcgacacagggaagtctgaaccggacttcagtgaacacaatcccaaccctcaacaagagaacagcaccatgactgaagaagaaatcaaagcgcttcaggcggaaaacacacgtctgaaagcggaagccacccagcgggcagaacaggaagcgaagaacaggcaggacaaactgcacgcggagaacgtctcctttgccgagaagctggttggcacggggcgcctgaccccggcagcaaaaccggttgttgttgccattcttgatgcggtagccggtggcgataagcctgtcgagttcgctgagggcgatacccgcaccccgctggccacggcgtttaagacactgctggatggaactgccccggtactgaatttcagtgaacacgcgaccaaagaccgcgtgagcacggatatcaaaacgacgtcagcggagtttgctgaagccgacccggaacgtctggcgctccatcagaaagcgctggaactgtcaaaaaaagaaggcatcagctacgacgctgctgtctcccgctgcctgtaa

SEQ ID NO: 201208 - DNA, 954 bp, Klebsiella oxytoca
atgtctgactatttaaagggtaagcgcgtcgttgacccggtgctgaccagcatcgctcgcggttataaaaatgccgcgttcatcggtgagcgcattttccccattgtccttaccgataaggaaggtgtgaccgtgccgaccttcggtaaatccgcttttgtggagtacgacaccgagcgtgccgtgggggctgacagtaacgttctggtgcgcgagaaaaccggcaagctggacctggttctcaacgagcacgatctggccgcgccggtggactatcgcgagcaggcagagtcgatgttcaacgaagaggccaaagccattcgccgtgtgacgagcggcgtcaacctcaagcgagaactgtatgcggcccgtctggcccaggacaagaacgtctatcgcgcggctaacgtcaaagcgctggccgctgccgaccgctggggtggtggcaagggtgacccgattggcatcattgaaggcgggatcgaagcggtgcgtaacgccaccggcctgcgtccgaacctgatgaccatgggggcaagcgttatgtcgctgctgaagttccacccggcgattcaggccgcgattggtgccaacgagcgcaagcgtatcaccatagaaattctgaaagaccttttccagctggaagatgtggcgatcggcgagccggtctccatggcctccatgaaagacgcgcagaacaaggacaaagtcccgaccgatatctggggtgacaacctgatgctgcattacgttggcaaaccgcagccaggcaccgacagcgccgacgaaaacgagccgtcattcggttacaccctgcgccgtaaagggatgccggtggcggataaatacgacggcgtcggcggcaaagtgaagtactgccgttataccgatatctacaaagtcgccgtggtcggtggcgatgccgggtatctcgtcaccaacatcgtgaaataa

SEQ ID NO: 201209 - DNA, 357 bp, Klebsiella oxytoca
atgggtacaactcaacaggtcattctgaccaccaccgtgacggccagcgcggcgctgacgcaacagcgctttgtcggtgccgataatggcccctgtcaggccggagccgtcgcgctcggcgtggcagaggtggatgccgctgccggtgatgtaacgccggtcaacgtactgggtattgttgccgtcgaggccggtgcggcagtttccagagggcagatcgttcagtcggatgcgaacgcctgcgccgttcctcaggtccccgcagccggtgagaccccggcaggcatttctgccgggattgcgctggatgaggcgctggccgaaggtgacgttatccgcatcctgcgcggggtgtga

SEQ ID NO: 201210 - DNA, 498 bp, Klebsiella oxytoca
atgaggcgctggccgaaggtgacgttatccgcatcctgcgcggggtgtgacatgtactgcaccctggcggatttgcttgaacaagtaccggaaaggacgctcattgagctgaccaacgagtcggtgggctttgatgagcagcctccggtcaatgctaccgtggttgagagttgcatccgctacgccggtgaactgatagatgcccacctgcgtgggcgctataccctgccgctgacggaagtaccgaccgttctgcgcgacattgccatcacgctgacccgttaccgcctgtacgtccgtcgtcctgaaggtgacctgcctgacaccgtcaaggacgacaacaaagaggcacggcggcaactggaggctatccgcgacgggaagctcacgctggggctgcagtccactcagaaagatgtgcctgagtccggtgaaatccgggcacgggcacgccgtcccacctttggcgggcgcgatggcttactggagaaatactga

SEQ ID NO: 201211 - DNA, 465 bp, Klebsiella oxytoca
atgaatgttctgcccgttattgatgcggttgtcgcccgccttaaggagaaactcccgacgctggcagtggaatatttcccggagaaaccagcggaataccggctcaaccatccgaaaggagcgctgctggtgagttatgccgggtcgcgcttcgacaagcccaatgacaccagcgcggttatccaggctcagaccatccagctatgcgtcacggtggtcttccggcagctcaacggtaaacagggcgcggtggatgtgcttgacgtggtgcgccgcattctcggtggctacaccccgccgaactgccgccgtcgcatctggctgacccgcgaggtgtttatcggtgaggtcaaggggctgtggcagtacgccctcgactttgccactgaaagcgtctttatcgaagacagcgatttaccgtccggcccgctgttaaccgaagtgaactatgaggaaagcgagtga

SEQ ID NO: 201212 - DNA, 252 bp, Klebsiella oxytoca; identical to SEQ ID NO: 140793

SEQ ID NO: 201213 - DNA, 1428 bp, Klebsiella oxytoca
atggcagctaactatctgcatggcgtcgaaaccattgaggtggaaaacggtgcccgcccggtaaaaacggtgaagtctgccgtcattggcctgattggtaccgccccgatgggggacgtcaatacactggtgcagtgcctgtctgagaaagatgccgcggcgtttggcagccagctcaccggctttaccattccgcaggcgctggatgcgatctacgaccatggggcaggcaccgttctggtcattaacgtgcttgatccggctgtgcataaaaccgctgtggccgatgaagatgtaacgttcgacaaggcgacgggcaaggcacagctggctaatccggtggtcgcgcagctggtactgaaaccggacagcgatggccagccttatgtggaaggtcaggactactcgcttgatgcacagaccggggtgattaccaacctcggtaagagcatcgcggcagatgcaacggtgaaggccagctataactatgctgatccgaccaaagtcaccccggctgatatcatcggtgccgttaacgcggcgggcaaccgtaccggcatgaagctgcttaacgacagcttcaacctgtttggctacttcgcaaaaatcctgattgccccggtcttctgcacccagaacagcgtctcggttgagcttatcgccatggcagaaaagctgggcgcggtgacctacatcgacgcgccgattggtaccacttttgctcaggctctggcggggcgtggcccggaaggcaccattaacttcaacaccagctccgaccgcgtccgtctgtgctacccgcacgtcaaggtgtacgacgcggccaccaacagcgaacggctggagccgctgagccagcgtgctgcaggtctgcgtgccagggtcgacctggacaagggctactggtggtcgtcctccaaccaggaaattctgggtatcaccggcgtggagcgccagctgtcggcaatgattgacgacccgcagagcgaggtgaaccagctcaacgaacagggcatcaccacggtcttcagcagctacggcagcggcctgcgtctgtggggcaaccgtatggcggcatggccaacggtcacccatatgcgcaactttgagaacgttcgccgtaccggtgatgtgatcaacgagtccctgcgttacttcagccagcagtacatcgatatgccgattacccaggcgctgattgatgcgctgacggagtcggtcaacgcctacggtcgcaagctgattggcgacggtgcgctgctgggcttcagttgctggtttgatccggcccgtaatgaagagacggagctggccgccggtcacctgttgctgagctacaaatacacgccgccaccgccgctggagcgactgacgtttgagaccgagatcacctcggaatacctgttaaccctgaaggggaatagctga

SEQ ID NO: 201214 - DNA, 522 bp, Klebsiella oxytoca
atggcaaagattgagatcaaccgcatcacgaatgccaacatctacctggatggcgctaacctgctgggccgggccgaggaggtcaaactgcctgacgtctccatgaccatgcaggagcataaggcgctggggatggtgggcaaggtggaactcccggcaggcttcgacaagcttgagggcgagatcaagtggaacagcttttaccgcgacgcgatgctgtctgctgcgaacccgtataagtcgctggcgctgcagtgtcgctccagcgtccagcgctacagttcgcaggggctgattgacgaaatcccgctggtcaccttcctgacgatcatgttcaagaagaacccgctggggacgttcaaacagcacgaaaacgccgagttctccagcagcttcacctgcacgtacatcaagcaggtactggatggtgaagagctgctggagctggactatctggccaacatcttccgtgtcggtggtgttgaccagttgactgactaccgtatcaatatcgggggctga

SEQ ID NO: 201215 - DNA, 282 bp, Klebsiella oxytoca
gtgaccgtcgagattgaagataaaggcgggaactgtggttcgattggcatgggaaatggtacgtggtttaccatccttgatattccgggggtggaaaacctttttaatacccagaaaaccaatgacccgattgactgcacacgctctaaagcactaaagctggctgacctgattgaagtatgggagcctcctgaccactggttcaccggcatcggcaaatccgaaggaaaggcacttcttatcgccttcctgcgtaactgcaaaggctttcgcactcactga

SEQ ID NO: 201216 - DNA, 315 bp, Klebsiella oxytoca
atgtcacagctacaactcgaagtattcattccggcctatccattcacaaccgctgtcggaacgcgtattgagcgcattgaactcaagcgtctgactgttaaggacctgaagcaggttcgaaaaatctctaaagacccggctgactgggacgaaccactgattgcccgtagtaccggcttgctcccggaggacctggataatatggacctagctgattatctggagctgcagaaacgatttcagcaagtcactgggctgggcaagagcgacgaaaacgctgatgcaggcgcaggggctgctggcgaggtggtttag

SEQ ID NO: 201217 - DNA, 213 bp, Klebsiella oxytoca
atgcagaacagccgcgagtggcggctgttaaatgataaggagttactgattgtcgccgaactcgcttttgatttgctcttcagcctgttccagccacatttccagatcgtcagtgtcgagggcatcaatctccccaggctgaaatctaaaccacctcgccagcagcccctgcgcctgcatcagcgttttcgtcgctcttgcccagcccagtga

SEQ ID NO: 201218 - DNA, 2466 bp, Klebsiella oxytoca
gtggccaatgaattttcagtcggcgtcattattggcggcattgtcgggagcagcttccgctcagccgtcagtggcacccgacgcgcccttgattccctgggtgatacatcccgacgcctgcaggagcgccagaacgccttaacccgtgcgactgaacgttatggccagttaggttcttcgcggatgcagcgcctcaacagcgagctgctgcgggtaagccgcacaatggagcaaattgagcgccagcagcgccgtctgtcggcggtgtcggccaccagtgatgcgctgaagtccaaccgtatggcgctctatggtcagggggcagagacttacggcatcgcccgaacgctgggcgcaccggtcatggcctctgtcaaacaatattcgtcattcgagtctcagttacgagatatcagtgtcaccggtgatctggattcaaggcaggaacaggccatcggtactgccattcgtcgggcatctctgcaggtcaatcagctccaggaatctctgttgggcggcgtgggtcaactggttgccgatggcatgaatccgcaacaggcggcaacctttgccgggatgcttggtaaagcggccacggctaccaaagcggatatgaccgacctcgccaaaatgacctatgccttcagcgatgccctcaaaattaccgatgcgaaagagctggagcaggcgtttgggattgcggcaaccggggccaagctcggctcgtttgaactcaaggatatggcgaaagcattacccggtatggccaaagccttcgctgctcgtggaatttacggtaaagacgccataacccagatcgtcgccagtctggaagtgggtaaaggcagcggctcagcggaagaagctgtcaccaatatgtccaactggctggcggcaatgggacgcggagataccacgcagaaatacgctaaggctggcgtggattaccaggggtcaatgcaaaattatgtagcccaaggcctctctcaatatgaagcctcgctgatgattgccaaccgatttatcgacggtaaaggcaaggcattcgtacagcaatggaaagctgcaggctcaagaggcgatcaggaaggccagcaaaagctgatggagtccttcggactggcggaagtattcaccgatattcagactgttaaccatctgctgtcgatgcgtcagggttgggataaataccagtctaataagcaggaaatgaatactccttctgcaatgtcgacgctggacaaggatgctgcgaaacaaaatgatacgctcgaagggcgctggcgcagaacgcagattggctttaacgactcggctattagtatcggtgaatcattacgcccagcgttgatccagttaggggaaacgttcatcccattaatgaacagcgttggaaaatggatcgcggctaatccgcaactcgtgagtggtacgattcaggtaatcggtgcattacttgcttttaagatggccactatcggtctcaagctggggctgaatctgctgttctctcctttcaccagtgtctggaaaaacatcattttattgcgaaccaactggcttcgtctgacgcttgcactgggtgaaggcggtaaactccgctggctggtgaccggcttcagcgctgtcgccaggggtgccagaactctggggggcgtgctgtcaggtgggctggttcgcggcattatgatcgccggacgtgccgttctctggattggtcgggcgctgctgatgaatcccattggccttgccatcaccgccgtcgcggcggcggcttatcttatttatcgcaactggggggctgtcagcagttggtttaaacagcgctgggctgacattaaagaggcgtttaacggcggtatcgtggggattggtaagctgctgattaactggtcaccggttggtctgctctataaagcctttgcgactgcgctgaaatatctcggcgtagatctgccagcgaagttcactgacttcggtggccatcttatcgacgggctgataaacggcatcaaaaacaaatgggagtcgctcaaaaccaccgtcacagatatgggcgacagcgtgggcggctggttcaaggaaaagctgggcattcattcgccgagccgtgtgtttatcggctttggtgacaacatcgcgcagggtgccgctatcggcctgcagcgcaccacaccgctggcagcgcttgccggacaacgcctggcaacagagatgactcctgatgttccccgtatcccgtcgccggaaatcatggctgcgggatattcaggccgtggcgcagctgcttctggtggcggagcgtctggcggtatccaggtcagctttaatcctcagtttttcctcaatggtaaggaaaccgcagcgccagccggactgaccggcgcactgaatatgagcctgcatgaactggagaaaatgctggaacgtctgctggctcagaaacaacgtcgggggtacgaataa

SEQ ID NO: 201219 - DNA, 885 bp, Klebsiella oxytoca
atgtttgcggtactgggtgatattgagtttgaactgattacctactgggacggctttgaggccactttcggtgtcgattatgccgaacatgcccgcatcgagggtaagcccggcctgcagttcgtcggcgataagctggacgaaatccagataagcctggtcttccatcagcattattgtgtgcccgacgtggagctggcgagactgagaacggccatgaaatcccatcaggcgctggcgctggttttcggcaacggtgactatcgcggctggttcgtgattaccgacgtgaccgcgaccagcgagcagaccgacagcaccggcaacgtgctggccgtcaatgccaccgcgtctctccgggagtacattggcgacccgaaaaacccgctgcagccgcctgcaatacgcacccaggttcccggcgtcggggcggtctccggtgccgttccttcgccctccggggtggcgcagtacgttcgcgacggcgtcaactatgccaaacaggcgcagtctgttctccagaccaccatcagcgccgttcgggtggcgcagaaaatgaaggataaccccgccgttgcactgacccgcgtgccggggctgatgagcggactgggcaacgtgtccggggcgttaggccagagcgttcctgcgtttaatgcgctctctgaatccatgcctgatgccatcagtctggccagagccaccagtgatgcggccacgtatgtccaacaagcacagtcttcgctgagcggcgttgacggcagcaatatcgcggcagcgctggatgctgtttccgggcagctcaactccgccagcaccacgttcacccggatgtcgccggggttaagcactatggcagccaaaatactggcgaggagtgtgtga

SEQ ID NO: 201220 - DNA, 213 bp, Klebsiella oxytoca
atgtttcttgaacatgtcacccgtgacggagagcgctgggattctctggcatggcagtactacggcgacccactgggctatccccggataattgccgccaatccgcacgtggccattacgccggtgctgccctccgggttgttgttactgatcccggttatcgaggctgaagaagccagtacagaagaggatattgccccatggctgagataa

SEQ ID NO: 201221 - DNA, 1170 bp, Klebsiella oxytoca
atggctgagataaacagcacggcacaggccgcatcagcgttaaccggcgtcagcgatgttctgagtccggtgttcaccctgtggtatctgcagaagaacatcaccaccgatatcgccccctatgtcacccgcgtaacctacagcgataacatcaaaagcgagtccgataccattgaggtggagctggacgacaccgatggtcgctggctggataaatggtatccgggcaagggcgacacgctgacgctcaagatgggctatcagggcgagaagctgctgtcctgcggtacgttctctatagacgagatcgaggtgagttcgcccgcgtccgttgtcgctatccggggcgtggccacgtcggtcaacaacgctctgcggacaaaatccagtcgtggtttcgagagcaccacgctggcggctatcgccgggcggattgccaaaaagcatcagctgaagctggttggcagtattgagtccatcaaaattgaccgggtgacccagtatgcagaaacggacgtgagcttcctgcgtcggctggccagcgagtatggttatgccgtaaaagtggtcagcgaccagctgattttctctcatctggccacgctgcgcggtcaggagccggtaaaacagttgaagccacaggatgtggacagcttttccctgcgtgacaccatcaaccgcgtctacaaatccgcgaaggtaaaacaccagaagagcagcgataaaaagctgatcgtctacgaagctgatggcggcaccagcgaaagcgacaaacaaaccaaaggtggtaaggtcaccagtgccgacacactgaaggtcaacagccgcgtcagcgacccggacagcgcccggattaaagcggattcggctctggccaggcataacgaataccagcagaacggttctctgacgctgatggggacgccccagttgactgcaggcaacaaaattgaactggtgggttttggacagttatccggggcatggctgataaccactgcccgccatgcatttgaccgcaacagcggctacatcaccgaactggaggtggcgcgagggccggtcacgcagggcaaggcgaaaaaaggtaaaaagaccggcaagagccagacactgaccgtctataaaccggacggcagcacgtccacggtaacaaaggagaagaaataa

SEQ ID NO: 201222 - DNA, 513 bp, Klebsiella oxytoca
atggcaggcgtcacccgtcaggtcggtacggtcagcgccgtcgatgccgacaaggttcaggcccgcgttcgtctgcctgaatgcgataacctgcgcactaactggcttaacgtgctgcagcgcaacacccaggataacaaggattactggctccctgacgtgggggagcaggttgaggtgctgcttgatgccaacggcgaggatggtgtcattctgggcgcggtgtactcagacgtcgataaaccgccgttcagcgacaaaaacgtccggggcacgaaatacgcggatggcgcagagttcagctataaccgcgcgacccatacgctgacggtcaaaggcggtatcgagcgcgtagtaatcgaggttgcggtaggtatcaccctgaaggggaaaaccattgatttgaccgctgacaccaccacggtgaacggcaaccttgaaatcaacggcaatgcccactccacaggtagcatgctgtctgacggccagaactctaatcaccattcccactga

SEQ ID NO: 201223 - DNA, 348 bp, Klebsiella oxytoca
atgaaaacaacctccgtattctggcaaccggccctgcaggcccccggcgaaatcgtccgggggctggatgatatctggcaggccattcaaatcatcctgcgaactcctcgtggtagcgacccgcatcgcccggagttcggcagcaatctgcacctttatatcgactggcccatcgaccgggctattccgcatgtggtgcgcgaatccgtcgatgccatccgccgctgggagcctcgctgccagcttatgtcggtcaaacccgccgtcgaaggcgaacatcttacgctccgggtgagctggaaaggctctgacggacagccccggactcaggagttgctatggcgctga

SEQ ID NO: 201224 - DNA, 1104 bp, Klebsiella oxytoca
atggcgctgacagaacccgattttattgaacgcgatgccgacaaaatcacggctgaaatgattgcacagtacgaagccgcaaccggcaaaacgctataccccgctcaggctgagcgcctgttgattgacctgtgggcataccgcgaaatgctggtcagggtggcggcgcaggaagcggccaaacagaatctggtcgcctttgcccgtgagccgatgattgattacctcggtgaactggtcggtgtatatcgcctggccgcgcagcctgccaccaccacgctccagttctccgtggatgaggcactggccattgatgtgctgattccggcaggaacccgcgtcagcgcttccgacagcattatttttgccaccgatacggacgtggtgctgaaagccggattgctgctggtcaatgccacggccacctgtaccgagccgggtgctgctggcaacggctggcaacctgcgcaggttagtcagttgctcgatgagattgataatgtcgacctgcaggtgaccaatctggcagccagttctggcggttctgagcaggaagacaatgacagactccgcgagcgtatcaaactggccccggaatcattcaccaacgccggaagccgtatggcataccgctttcatgccatgcaggcccatcccaacatcgtcgatgttgcggtgctttccccggttcctggcaccgtagaactgtatccgctgctcagcaccggcctgctggacgacagcatcctcacgctggtagagagtttctgctcggacgaaaaagtcaggccgctcactgataccgtgcgggctaaaacacctgtgcaggtggattacgccattgaagccaacatcactatctatcgtgaccaggatgctaactctataaaggacaacgccaacagcgccatacagaactgggtagcgtcccgtaccgccacgctggggcgcgatattgtccccagtcagattatcagcgtgctgtccgttgccggagtgtatcaggtcgaactggtgacaccggtgctgaaggtggtggcagaaaacgaatgggcaaactgtacggcgatcactcttaacatgaccggggtgtccgatggctaa

SEQ ID NO: 201225 - DNA, 579 bp, Klebsiella oxytoca
atggctaagccactacaactcccgccaccgcttgagggtgatatcagtctcagaacgctgggaagactcgccgggcggctggataacatcgacctgagcgtactgatggtctatctcgtcgatatcgtcgacagttccgcgctgccatcgctgggcgagcagttctcgctgtttggcgatggctgggagctggcggaatcggacgatgtacgccgcatgcttatcaaatccgctatcgagctgcaccgctataaaggaacgccgtggtcaatccgggaaattatccgacgttttggcttcggcgaagtggatctgattgaaggcactggccagatcggctacgacggcaaacacacttacaacggacttttcgtccatggcgatgcggaagcctgggcggtctatcgcgtcatccttcaacagcccataactaacgaccaggcagcactgttacgtcagacgcttgctgcctttgctccggcccgctgccatctggcgagtctggagtatcagtctgtcgccattcgctacaacaacaccgtcaactatgacggtagctataaccacgggagcagttaa

SEQ ID NO: 201226 - DNA, 378 bp, Klebsiella oxytoca; identical to SEQ ID NO: 155934

SEQ ID NO: 201227 - DNA, 1110 bp, Klebsiella oxytoca; identical to SEQ ID NO: 155935

SEQ ID NO: 201228 - DNA, 1557 bp, Klebsiella oxytoca; identical to SEQ ID NO: 155936

SEQ ID NO: 201229 - DNA, 765 bp, Klebsiella oxytoca; identical to SEQ ID NO: 155937

SEQ ID NO: 201230 - DNA, 501 bp, Klebsiella oxytoca; identical to SEQ ID NO: 155938

SEQ ID NO: 201231 - DNA, 612 bp, Klebsiella oxytoca; identical to SEQ ID NO: 155939

SEQ ID NO: 201232 - DNA, 747 bp, Klebsiella oxytoca; identical to SEQ ID NO: 155940

SEQ ID NO: 201233 - DNA, 1068 bp, Klebsiella oxytoca; identical to SEQ ID NO: 155941

SEQ ID NO: 201234 - DNA, 1314 bp, Klebsiella oxytoca; identical to SEQ ID NO: 155942

SEQ ID NO: 201235 - DNA, 273 bp, Klebsiella oxytoca; identical to SEQ ID NO: 155944

SEQ ID NO: 201236 - DNA, 2487 bp, Klebsiella oxytoca; identical to SEQ ID NO: 155945

SEQ ID NO: 201237 - DNA, 765 bp, Klebsiella oxytoca
atgaactttatcaaacatgtcgcgactgcggcacttttggtggcactttctgcatcagcttctgtattcgccgatacagtaaaaacaaacaccgggaatatcgatacgattttcaatgaaaaagcgttcaagaacattcctcagaattcgcaggaagtaaaacgttttgtcgtccctactaacggcatcatcgcactagagattgatgggaaagttaatttgctgtcttctaatggccgcttcgttatacagggaacgctctatgacacatgggctaaaaagcctctgaccaccatgagcgaaataaccaagaacgccagcatcattccgatgaaagagctgaacctaaatatcgcggacttgcgcccagccgtatggggcgatgggcctaaaaaggtcatgatatttaccgcacctggttgtgaagcctgtgcagccccactttcagcacttgctgacctcgacccgaaagaattcaccgttagcgttctgtcgctcggagctctgggcccggcaagccagcagcgaaatattgaattgtattgtgcatccgaccgctaccgcgcagaccgcgcaattatcagcggaaattccactcagaaattcgaccaggtaaagaactgcgatatgcaggctctggctcgacgtgaagttacggctcagatactaggtgtcagcatgatccctttcattgtgcgtgatgacggctcctacgtactcggctcaccaaaacaaggcctcaaaaactttatcgagaacaagtaa

SEQ ID NO: 201238 - DNA, 1599 bp, Klebsiella oxytoca; identical to SEQ ID NO: 155947

SEQ ID NO: 201239 - DNA, 567 bp, Klebsiella oxytoca; identical to SEQ ID NO: 155948

SEQ ID NO: 201240 - DNA, 1398 bp, Klebsiella oxytoca; identical to SEQ ID NO: 155949

SEQ ID NO: 201241 - DNA, 1119 bp, Klebsiella oxytoca; identical to SEQ ID NO: 155950

SEQ ID NO: 201242 - DNA, 627 bp, Klebsiella oxytoca; identical to SEQ ID NO: 155951

SEQ ID NO: 201243 - DNA, 285 bp, Klebsiella oxytoca; identical to SEQ ID NO: 155952

SEQ ID NO: 201244 - DNA, 819 bp, Klebsiella oxytoca; identical to SEQ ID NO: 155953

SEQ ID NO: 201245 - DNA, 294 bp, Klebsiella oxytoca; identical to SEQ ID NO: 155954

SEQ ID NO: 201246 - DNA, 651 bp, Klebsiella oxytoca; identical to SEQ ID NO: 155955

SEQ ID NO: 201247 - DNA, 387 bp, Klebsiella oxytoca; identical to SEQ ID NO: 155956

SEQ ID NO: 201248 - DNA, 1977 bp, Klebsiella oxytoca; identical to SEQ ID NO: 155957

SEQ ID NO: 201249 - DNA, 2703 bp, Klebsiella oxytoca
atgctgagacacattaaaaatattctgaatacttttttgcctgataacaaaaaggctaccactgatctattcggtgacgaaatcgatatgtcagtagatgaagaaatcgggaaactcatttcatcacgagataatatgcgctatccggcaagcgaaatcggattcccggctcaagtaccgggtgagtacgtattacgtcattaccagaaaccacttgtgatggcgattaaacgagaactggatattagggactctgagtttaatcagcttattcttcctatgctgataaatttcgctaactttgttcacctcttcccggcatccgaaaaccatcatcaccgtgctgcaaccggattgttgcgtcattcattggaagtgtgtttccagtgtatccggcgttctaaaaacatcgagtttgattcaatggcggttcccgtacataaatcaaatcgtgcattagcatggcgacttgcagtcgcagctggtgggctacttcatgacctcgggaaaccatttaccgattttgaagtatggaacgaagacgggaaaattcactggcctccaggccatgaaccaatccatgtctgggcaaaagagaacaatgtaaaaagatactatcttgtatggaaaccaggccgtcaccgccagcatacctccagcacgagcaatatgttgttgatgatcatgccaaaagaaatgcatgtttaccttcttaacggcgggaatgatattttcaatgaattgacccgggcactgaatgccagtgcgcagctcaatgcagaaaaaatcagtggtcaggacgtcaaaaacaagatcctcactaccattaaggccgccgactcagcatccgttaactatgatatgcggcaatacgccggtgatgcgattcgtgcaagccagtcaggtgtacctgcggttcagcgtgtagttgatgccatgcgccatagattgaaaaaaggagattggattcccaacaagccaggaagccctgtatgggtgactacctatggcgtattcatcgtctggggtgttgcggtcaaggatattattgagaccgttaggaactccggcgctgttattccacaaacccagaatagtctggctgacctgatgctaagttatcatctctgtcgaccaaacgttcaccaggacgatgacactgcatactggcgtattgcccctcatatcttgaatgataaaagttcaagagaaagcaaagaccctaaagttgcgttgagctgcatccttctgatatctccagaagtactatttgtcgatactgttgaccctctaccatgcagcagccgcatccgtattgaaggtaaatgggtggaatacctgaccgggaggccaaaccagccaaaactcgtcgaaagcgaaccctacattggtcagaagccggttccgtcaaccggaataccgaatgaggtcgaccgctcagttttacagggcggaacaatcattgctgatgaacaggaatctccactggagagtatttttggaaaccgacaggttacgccggaaaacgcccacgaactgctgcataagctcaatctgctttctgatgaggactacaatcgtgtaaaggaaagaaataccagtaccaaaaatcaaaaagattgtctggatgacactaattcaccaacaactgagctggcgggcagcggggaatcaaaagggctcaaagataatcaaccaaagccagtgtcggagaataatgaacccaagcgccgtctttccctcaaagaaaccctggcatcggcacaaacagagattgagttctctgtacccagttcacttataaaagaaccaaaccataaaactctgaacgaaacccttgagtttcattcaatcatcaactcgtataatagcaacgaaccaacttcaagcgatgcattggatcagacccagccctcacctacccgtcaggcattaaaggaaattcagctgcaccaggatgctgtcgataccggcattcagtctggtgaggtaattgatgattattcaatttacgaagattatgattccatgtggcaggatgacgtgaaagctgataacgattttggttactcggctcatgcggatacttcggccaacataccggctaacgtaaaattttacgataaatttagtcagctatacgtatctggtcttgaagcggccaaagaatttctcgttaaatatgttaccgaccactcagacgatcttttcattgaatcaggccacttaatcattgctattgataaagattttgatgagcgtaattatgctctgcttcaggactccaactggttatggcaaaggtttatggaagccccagcccagtattatttccatcgtactcagaagtgcttatatctcagaaaagaacttaataatgatatcgacttgctgatggatgggaagtttaacgatctgctttactctgctttaactgatgtttctgataaagattacaacattacagatttatgcaatgaaatgatttcaaaaggtatgctgaagcgaacctattctggagagcctgtcattgccgtaagcgttgccttaaagcgacgtattgcggatgaactcggcattgatattactcaattgcagaagattatgctgatgcactttgatttctattcaaagaccggtgttgactacattcttcctaatagtgaacgaatgcataatcaaatggtggataaagatgagtga

SEQ ID NO: 201250 - DNA, 570 bp, Klebsiella oxytoca; identical to SEQ ID NO: 155959

SEQ ID NO: 201251 - DNA, 900 bp, Klebsiella oxytoca; identical to SEQ ID NO: 155960

SEQ ID NO: 201252 - DNA, 1476 bp, Klebsiella oxytoca; identical to SEQ ID NO: 155961

SEQ ID NO: 201253 - DNA, 288 bp, Klebsiella oxytoca; identical to SEQ ID NO: 155962

SEQ ID NO: 201254 - DNA, 336 bp, Klebsiella oxytoca; identical to SEQ ID NO: 155963

SEQ ID NO: 201255 - DNA, 573 bp, Klebsiella oxytoca; identical to SEQ ID NO: 155964

SEQ ID NO: 201256 - DNA, 693 bp, Klebsiella oxytoca
atgacagattcatgcatcgacggcttaaggctggtttcgaccagttaccacattggtttaccctggattgaatggtcagaggcgagatcctacatcgtatgccgagcactggtagatcagggagtaattgccggaactgctactataggaacacgtcgaaaaaaggtcaaagaacgcatcaatccaggagatcgtgggttataccaagtcactgaaactcagtacggatggatagcacttaagggtggtggcgtgatcgatccctgcggctttcttggtaactctttttccggcccggaaccccagttttgtatccttgagaatgatgagtgctatatcaggggtataaatcctgttcagtgcccgagaactcacttacctgaacatcttgtaagtgatgagttattcccgctaacacgcggtgttatgcgcgatacatgcagccgtctgctgggttacaggttgcatatacagggattgactatgtcagaggcagcataccttctgtcgagaccgcttaccgattttgaccggtacagccgcctggtatatgaatactttattaaaatgggactaagcagcattatgccattaagcaacatcaaaatgctgcatccgaatttagcccgtaaaggttggcgttcattttataacgacctggatatggacgaacttgaagcgtttcttaaatga

SEQ ID NO: 201257 - DNA, 1329 bp, Klebsiella oxytoca; identical to SEQ ID NO: 155966

SEQ ID NO: 201258 - DNA, 1095 bp, Klebsiella oxytoca; identical to SEQ ID NO: 155967

SEQ ID NO: 201259 - DNA, 369 bp, Klebsiella oxytoca; identical to SEQ ID NO: 155968

SEQ ID NO: 201260 - DNA, 309 bp, Klebsiella oxytoca; identical to SEQ ID NO: 155969

SEQ ID NO: 201261 - DNA, 636 bp, Klebsiella oxytoca; identical to SEQ ID NO: 155970

SEQ ID NO: 201262 - DNA, 309 bp, Klebsiella oxytoca
atggggaatgagacctctgaggttcctaggtgtgccagggggattgtcccagtaacgggaatcaagcgaatggtctcggttatcaccggccataaagtagtatccttcgggaatgatccatttcttacccgttttcacgtagccgatacggttatctgtctggaagatataactttgaccggcagtgtcggtatctgcctggtattgagtagtaaaaccatcttttttaatctggtttccgttttgtttaccgtttatcgagaagattttctcttcgttgtatgtgacggtatcgccaggaatacctaa

SEQ ID NO: 201263 - DNA, 168 bp, Klebsiella oxytoca
atgaaaataaaaaagcccgcttcaaaagcaggcttttcaaatttggctcctctgactgggatcgcctttgccagtaactggctaattattaagctaaatcagaaatccccttctgtcaagaccaccagagtgaccaccaatgacacaggtgacataaaactagtttga

SEQ ID NO: 201264 - DNA, 807 bp, Klebsiella oxytoca
atgacacctctcaggagcgccttttcttcgctggcgcccgtcttctccgtgctgggtagcggtattaaagccgtctgggagtggttcaaaaacctgttaaccccgatgcagaccagcaaagagacgctggataaatgcgcctctgccggggagaccttcgggcgagtgatggggacggcgcttagtgtgctgctgtggccgcttcaacagttaatgaatggcgtcagctggctgcttgaaaaactggatcttattcctgacgggatcgaaagagccaggcagcaggcagacaaagcccagcaagcgcttgaagcatcagcgacggcgctggccgggcatcagctcccccttggtcaggctaccgtatccggcactggcggggctaagccaccggtcattactggcgataacggcacgctgcggcgcctgaacaacatcgctgataacacgaaggcgacggccaacaatacgaagaaaatcggccccggcgatattgtctttaaaaacctgccgcgtgctttggcgctgcgtggcgcctatcaggaggcgcgggttattccgcaaccggtgccgcgcgtgtctgcggccgcggccggtggcgttctgtcggtgccgacggcgacacagggggcaacatctgcgccggtcgctgcctcgtcgggtgctgcaccgttcttccagctggtctttaacgacgtcggcaaacgctcggatcaggagcttgaaaaaatggttcgcaacgctgtgcgtgatgcgatggccagcacccgcaaagctaaccgtggttcataccgcgatcgggaataa

SEQ ID NO: 201265 - DNA, 444 bp, Klebsiella oxytoca
atggataactttgcagagtcagggcgtgaaacggtcattccggaagcaaacattcctgacgctaccgaagacagtaacctggctgccgatgatgacttcgatctcgcgatgtggttctggtcgaccatcatcgagatgtacgaacgcgccgcagaattcgatggaacgctggcaaaaccaagagagccaaattttgttcgctgggcgcaggaagttcgtctgctgaggcaggagcacggctgcagccacgcccaaatccgcaccatgattgaacgtattcaacgcgatcagtggtggtgcggaaaggttcaggacatgccgacgctacaccgtaaatggcctgagttggtgctgaagctgtgcccggtaaatcttgctgtcggcagtaaccttggtttcagcggcaaagttcaggcagatatcccgaaaggtttcaggggctaa

SEQ ID NO: 201266 - DNA, 654 bp, Klebsiella oxytoca
atgatcgagcgtggaattatttttaatggagaaatggtgcgtgccatcctcgacggccggaagacgcagacgcggcgcccagtgaaattccctgtacatgataaaaaccttgggtgcgagctggctggcaatgaactggccggggaactgtcggcaggcaactatctgaacagcgcatttggcaagccagacgatcgaatttgggtgcgcgagacgtggggagtcgtcagccacgaactggatgaggatggtcgaatccaatcatggactccagatcggcctgctacagccattcacgaaatgccgtttggcaatggctattactctggccacgccatttatgcagctgatggtgattttacctggggtgatgaggatggttatgaagatggtcgttcgtgctggaaaccctccattcatatgccgagagcagccagccgcattctgctggaaatcaccaatgtgcgcgtggagcggctgcgcagcatgagccaggacgatgcacgcgccgagggtgttattgctgcatctggcccgatggaagccggtttagcattccgtgagctgtgggactctatctacggcgaggaaagctggaaagccaacccatgggtttgggttattgagttcaaacgatgtggcagcacaaactga

SEQ ID NO: 201267 - DNA, 384 bp, Klebsiella oxytoca
atggggtatgttaaatttttagctcctttacttttaagtttgcccttttttacttttgcctcaggggtatccggaccgccaatcaatataatttgtggtaaagacaattacatattatatgagagcgtgaattatcagcatgcagctattaaaaatggcgtactgatgagcgatacaaagggattttcaaacccttatgaagatgacgaaaacgccgttatttttgagtttgatgaatgggggcagaacggaggcattcacgtgcatcattttctcgtattcaatacagttcacaaaacaatgacactgcaaaagcgcactcttgatgccgataatctaccaagaggtgacggcactactgaaaaatgcaagcttaaaaaataa

SEQ ID NO: 201268 - DNA, 204 bp, Klebsiella oxytoca
atgaatgtactgaaacccgtagttattcccgtctttggcgggcatcagccccatatctacgcgcattccatccccattcccgagaattttaattttctgggatgtgacagtttgaccattaatcttgaacatagaatcagggatagcctccattcggaaaccaccacactgcatagtaatggtgtcggcagtcgccacaaatga

SEQ ID NO: 201269 - DNA, 1065 bp, Klebsiella oxytoca
atgtctcagaactggatgcggcacttcgaattgcaattagtcgattcgaagggtaacgctactgattttggtagcttcaagagcacttttactatcgactggtttaatctcagcagcgaaacgcgagtaggaactttcaaaatctataacctttcagctgataccgtaaaccggatcgtcggagaggaattctcccggattagggttatcgctggttacgatggtattgcagctgacgttcccgccagccaggtaggcgtcgccaggacagtaaaccccgatgaagtcgggcagatggacggtcgaaattatgggctgatttttgacggggaaatccgctacaccatcacagggaaagataaccccgttgatagctttgtcctcattcaggcggctgattctgaccgggcattcgctacctccatcactgcgcagacgctggcggctggctatacagtctctgacgtcaatgcagtgctaatgaaggacttcaacgctaacggggccacagaagggaataccccttccatgcctgcaacggtgtttcctcgcggcagggtgctttttggtatgaccaggcatctgatggataacgtcgccgagcaatgcaaggctgactggatgtttgtcgacggtaagcgggaaatggtggcgaaaaatgaggttgttcacgaagccattaagctgaacagcgccactggccttgtgggtatgcctcagcagaccattggtagcggcgttaacgtccgttgcctgattaaccataacatccgcgttaatggcctgatcgagctgaatcaggcttctgtgttccgtaccgtgctggggaataatgatatcgccatgacgcaagggcgtatcactgaccagaacaacaacggaaacatcaccattgaaggcacaactgcacagcctgccagtattgcgactgacggcgtttatattgtccgtggcattatgtacactggcgacacaaggggccaggcgtggtacatggatatgatgtgtgaggcgcgtggggcacaggatattgcatccagttctgctttgcagaggggtttgtag

SEQ ID NO: 201270 - DNA, 303 bp, Klebsiella oxytoca
atgacgatcagcgaaatccctctttcccctgaaaaccagcgattctccatatctttggcaggtcaaagtctgcaaatggctgtgacctggcgtgctgctttctggtgtctggatattatggatagcagcggtgcggacctgataaaggggatcccgcttatcaccggcgccgacctgctggcgcagtatcgctatctcgggcttggcttttcgctttatgtgggctgtgacaaccagtccagcgaaaatcccactgaggccgatctggggatttatagccatctttatgcggtaacggagtaa

SEQ ID NO: 201271 - DNA, 315 bp, Klebsiella oxytoca; identical to SEQ ID NO: 155992

SEQ ID NO: 201272 - DNA, 963 bp, Klebsiella oxytoca; identical to SEQ ID NO: 155993

SEQ ID NO: 201273 - DNA, 387 bp, Klebsiella oxytoca; identical to SEQ ID NO: 155994

SEQ ID NO: 201274 - DNA, 405 bp, Klebsiella oxytoca
atgaggcgattgattgagccagaactggcagaaaaggccgtactgaaaatggatgccaatggctttgaagaatgcctgtctttgtgccaaaagctgcgttccgcatatgaacgtagggatgtttatctggcgcaccagctaaacctcactctgcggctgaagctttacatatacgccggtctgcctgagtttttcaaaattgtaacccaactgtggattaacctgtggccaactctgagttacacgttcgaatctgactcggaggataaatggccaatatttttctcgtcgcttgaactcgctctttcaaacagggatgcaggggcagcagcagatgccattagagagtcactggataaggggttgcggatctatctcagcttgttaaccgagcaaggtgagtaa

SEQ ID NO: 201275 - DNA, 1812 bp, Klebsiella oxytoca
atgccgttaattgcagggatcgatatcggcaacgccaccactgaagtggcgttggcgcaggatggccggtttatcggcagcgggattgtcgccacgaccgggatgaaaggcacgcgggagaatatcgccggggtggtcgcgtccctgcagcaggcgctggataaaacgccgtggtcgctgcaggacgtggcaaaaatctgcatcaacgaggccgcaccggtgattggcgatgtggcgatggaaaccatcactgaaaccatcattaccgaatcaacgatgattggtcataacccgcaaacgcccggcggcgttggcgtgggcatgggaaccaccatcgccgtggagaagttggcggcgttgagcgaggatcgatttgcccagggctggataccgttggtgggtgaggagatggatttccttgaggcggtttggtttatcaatgaagcgctggatcgcggcgtcaacgtggtggcggccatcctgaaaaaagatgatggcgtgctggtgaataatcgcctgcatcggccaataccggtggttgatgaagtcactctactggagaaggtgccggaaggcgtgctggcggcggtggaagtggcggccccgggacaggtggtgcgggtgctgtcgaatccttacggtatcgcaaccttctttgccctgacccctgaggaaacacaaactattgtccccatcgccagagcgctgattggcaaccgttccgctgtggtgctgaaaaccccgcagggagatgtgcgatcaagagtgatcccggcgggtaagatctttatccgtggtgaaaagcgtggcggtgaagccgacgtagcgcaaggcgcgcaggccattatgcaggcgatgagcgcctgcgcgcccgtgtgtgatattcgtggtgaagcaggcacgcacgcaggcggcatgctggagcgggtgcgaaaggtaatggcgtccctgaccggccatgagatgagcgcgatatacatccaggatctgctggcggtggatacgtttattccgcgcaaggtgcagggcgggatggccggcgagtgcgccatggaaaatgccgtcgggatggcggcgatggtgaaagcggaccgtctgcaaatgcaggttatcgcccgcgaactgagcgcccgactgcagaccgaggtggtggtgggcggcgtggaggccaacatggccatcgccggggcgttaaccactcccggctgtgcggcgccgctggcgatcctcgatctcggcgccggctcgacggatgcggcgatcgtcaacgcggaggggcagataacggcggtccatctcgccggggcggggaatatggtcagcctgttgattaaaaccgagctgggcctcgaggatctttcgctggcggaagcgataaaaaaatacccgctggccaaagtggaaagcctgttcagtattcgtcacgagaatggcgcggtggagttctttcgggaagccctcagcccggcggtgttcgccaaagtggtgtacatcaaggagggcgaactggtgccgatcgataacgccagcccgctggaaaaaattcgtctcgtgcgccggcaggcgaaagagaaagtgtttgtcaccaactgcctgcgcgcgctgcgccaggtctcacccggcggttccattcgcgatatcgcctttgtggtgctggtgggcggctcatcgctggactttgagatcccgcagcttatcacggaagccttgtcgcactatggcgtagtcgccgggcagggcaatattcggggaacagaagggccgcgcaatgcggtcgccaccgggctgctactggccggtcaggcgaattaa

SEQ ID NO: 201276 - DNA, 429 bp, Klebsiella oxytoca; identical to SEQ ID NO: 128822

SEQ ID NO: 201277 - DNA, 585 bp, Klebsiella oxytoca; identical to SEQ ID NO: 128821

SEQ ID NO: 201278 - DNA, 429 bp, Klebsiella oxytoca; identical to SEQ ID NO: 77556

SEQ ID NO: 201279 - DNA, 354 bp, Klebsiella oxytoca; identical to SEQ ID NO: 128819

SEQ ID NO: 201280 - DNA, 531 bp, Klebsiella oxytoca; identical to SEQ ID NO: 128818

SEQ ID NO: 201281 - DNA, 153 bp, Klebsiella oxytoca; identical to SEQ ID NO: 128816

SEQ ID NO: 201282 - DNA, 1098 bp, Klebsiella oxytoca
atgctaaaagttattcaatctccagccaaatatctccagggacctgatgccgccatgctgtttggcgaatacgctaaaaacctggccgacagcttttttgttatcgccgatgacttcgtgatgaagttggcgggcgacaaagtattgaacggcctgcatagccacaatattagctgccatgcggaacggtttaacggcgagtgcagccatgcggaaatcaaccgcctgatcgccattcttaagcagcacggctgccgcggcgtggtgggtatcggcggcgggaaaaccctcgatacagcgaaggcgatcggctattaccagaagctgccggtggtggtgatcccgacaattgcctcaaccgatgcgccgaccagcgcgctgtcggttatctacaccgaggcgggcgagtttgaagagtatctgatctacccgaaaaacccggatatggtggtgatggacacggcgattatcgccaaagcgccggtacgcttgctggtggccgggatgggcgatgcgctctccacctggtttgaagccaaggcctgcttcgatgcgcgagccaccagcatggcgggcgggcagtccacggcggcggccttgagcctggcgcgcctgtgctatgatacgctgctggcggaaggcgaaaaagcacgcctggcggctcaggctggagtggtgaccgatgcgctggagcgtattgtcgaagccaacacctatctgagcggtatcggttttgagagcagcggcctggccggcgcgcacgcgattcacaacggtttcaccatccttgaagagtgccaccatctgtatcacggcgaaaaagtcgctttcggcaccctggcgcagctggtactgcaaaatagcccgctggaagagatcgaaaccgtgatgggcttctgtgaaaaagtcggcctgccgatcacccttgcccagatgggcgtgaaagagggtatcgaaagcaaaatccacgcggtggcgaaagccacctgcgcggaaggcgaaaccatccacaatatgccgttcccggtcaccgcggatagcgtctacgccgccatccttaccgcggacctgcttgggcagcagtggctggcgcgttaa

SEQ ID NO: 201283 - DNA, 504 bp, Klebsiella oxytoca; identical to SEQ ID NO: 156044

SEQ ID NO: 201284 - DNA, 240 bp, Klebsiella oxytoca; identical to SEQ ID NO: 156043

SEQ ID NO: 201285 - DNA, 1266 bp, Klebsiella oxytoca; identical to SEQ ID NO: 156042

SEQ ID NO: 201286 - DNA, 891 bp, Klebsiella oxytoca; identical to SEQ ID NO: 156041

SEQ ID NO: 201287 - DNA, 579 bp, Klebsiella oxytoca; identical to SEQ ID NO: 156040

SEQ ID NO: 201288 - DNA, 492 bp, Klebsiella oxytoca; identical to SEQ ID NO: 32290

SEQ ID NO: 201289 - DNA, 771 bp, Klebsiella oxytoca; identical to SEQ ID NO: 156037

SEQ ID NO: 201290 - DNA, 291 bp, Klebsiella oxytoca; identical to SEQ ID NO: 156035

SEQ ID NO: 201291 - DNA, 237 bp, Klebsiella oxytoca; identical to SEQ ID NO: 156034

SEQ ID NO: 201292 - DNA, 552 bp, Klebsiella oxytoca; identical to SEQ ID NO: 156033

SEQ ID NO: 201293 - DNA, 990 bp, Klebsiella oxytoca; identical to SEQ ID NO: 156031

SEQ ID NO: 201294 - DNA, 1071 bp, Klebsiella oxytoca
gtgagtgatttaatcgacgataactttattattcctgcactgagtagcatagcaggcatcaccacgccactatcaggacaaacgtacaggaacgctccagatatcgacatatcttgctatgacgtgataatcatttgccttagcggcggaaaagactccatagcctgccttctccacttaattgacatcggggtcgatctgtccagggtggaactctggcatcacgatgttgatggccgcgagggaagtactttaatggactggccatttatggccgactacaaccgcaaaatagcttcaacatttcagataccgttgatgttctcctggcttcagggaggaatggaaggtgagatgctgaaagagaatggctacagtcgcccgcaatgtatcgaaaccccagatggattaataatcgcggaacgtgatatccagcgaagcactcccgccacgcgacttcggttccctcagcaatcaccaagccttaaaacacgttggtgctcatcagcactaaaaattgatgttggtcggcgagcactcacaaatcagagacgctttgacggaaaaaaggtgctttttattacgggggaaaggagagcggaaagctctaatagattcaattacttacaactggagccacataccagcagttgcaaaaaaagacaagttgatgcctggaggccagtacttgaatggtctgaagaacaagtctgggagattttagcaaaacatcgtgttacagccccagtaccgtatcgtcttggatggggtcgcagttcatgcttaacgtgtatatacaacagtgctcgcatatgggcaaccatcaaacattatttccccgagcgtattcacgcaatggccaactatgaaaaccgctttggggtcactatcagtcgtaaacgaataaatgttctggatctaagccagaatatttctcctattaatatcacggatgaggaagcgctgctgcaagcggtaaatccggtctatacattgcccgtcattaacatgtcaaaagaatgggtgctacctggtggggcgtacaaccgggagaaatgcgggtcagactaa

SEQ ID NO: 201295 - DNA, 318 bp, Klebsiella oxytoca; identical to SEQ ID NO: 156028

SEQ ID NO: 201296 - DNA, 336 bp, Klebsiella oxytoca; identical to SEQ ID NO: 156027

SEQ ID NO: 201297 - DNA, 402 bp, Klebsiella oxytoca; identical to SEQ ID NO: 156025

SEQ ID NO: 201298 - DNA, 885 bp, Klebsiella oxytoca; identical to SEQ ID NO: 156024

SEQ ID NO: 201299 - DNA, 528 bp, Klebsiella oxytoca; identical to SEQ ID NO: 156023

SEQ ID NO: 201300 - DNA, 303 bp, Klebsiella oxytoca
atgaaatgtgcgtacctacgaaagtttctgatcattgctttcataaccggcattagcggatgccagagtctcggaatagggttaagcctggatgagcgctaccagaaggcttatcagaaagtactggctgaccctaatgacgataacattaagactttcatgaaactcagccaggaaaaaggcgaaagagacatgcaagaggcaaattcaaaagccgcagccgacactcgtgaaagcgataaggggtttactgagtattttaaatcatatggcaacgatggatttaagcgggccagacaataa

SEQ ID NO: 201301 - DNA, 453 bp, Klebsiella oxytoca; identical to SEQ ID NO: 156021

SEQ ID NO: 201302 - DNA, 531 bp, Klebsiella oxytoca; identical to SEQ ID NO: 156020

SEQ ID NO: 201303 - DNA, 153 bp, Klebsiella oxytoca; identical to SEQ ID NO: 156019

SEQ ID NO: 201304 - DNA, 558 bp, Klebsiella oxytoca; identical to SEQ ID NO: 156018

SEQ ID NO: 201305 - DNA, 198 bp, Klebsiella oxytoca; identical to SEQ ID NO: 156017

SEQ ID NO: 201306 - DNA, 2688 bp, Klebsiella oxytoca
atgaatacagaaaaaccgggcggcccgttttatcagctctccgtggatgaaaccctgaccagcaccaacagcactcccgatggcatcagcagcgctgaagcgacggcgcgcttacagcagtacggtgaaaatgcgctaccgcaaaaagcgggtaaaccggcatggctgcgttttctggcgcattttaatgatgtgctgatttacgtcttgctggcggcggcgctattgacggcggtgatgggccactgggtcgatactctggtgatcctcggcgtggcggtgatcaacgccctgattggtcatattcaggagagtaacgccgaaaaatcgctccagagcattcgcaatatgctctccagcgaagcggtggtggttcgtcaggggaatcatgaaaccattccgaccacggcgctggttcccggcgatatcgtggtgatccgcgccggcgaccgcattccagcagacctgcgggttatcgaagcgcataacctacgggtggaagaggcgattctgaccggtgaatcaacggtggtggagaaaagtaccgaagcgcttagcggcgaactgccgttgggtgaccggacgaacctgttgttctcaggcaccacggtaagctccggcggtggcaaaggcctggtggtggcaaccggtggcgataccgagctgggccacattaaccagatgatggcggatatcgagaaacaccgtactccgctgttggtgcagatggataagctcggcaaagccatctttatcatcattctggtgatgatggctgcgctattcgtctttagcctgctgttccgcgatatgccggtttctgaactgatgctgtcgctgattagcctggcggtggcgtcggtaccggaagggctgccggcgattatctcgattatcctctcgcttggcgtgcaaaccatggcccggcagaaggcgattatccgcaagctgccgacggtcgaaacgctaggggcgatgacggttatttgctcggataaaaccgggacgctgaccatgaacgagatgacggttaaggccgttatcaccgccgataaagtctatcgggtggaaggggacagctacgagccggtggggaatattcacccgatcgatgagccggacccgataaccgtcgcgccgggcacgctgctggagcgctatctgcgcaccatcgacctgtgtaacgacagccagctaatcaaagatgaaagcgggttgtggaaaatcactggcggccctacggaaggggcgctgaaggtgctggcggcgaaagtgacgctttcgccggcgagcaccgaactgcgcagtaagatcccctttgattcgcaatacaaatatatgtcaacgctgtaccgcatcggcaatgaggagacgattttaattaccggtgcgccagatgtgctgttccgcctgtgtcagcatcagcaaaccgaccatgggctggagccgctggaccagccgtattgggaagcgaaaattgaagagtacgcgcgggaagggctgcgcatggtggcggcagcgtggaaaccggcggctgacgggcaaaccgaactcacccatcaggatttgcagcatggcgtcattctgttagggatcgccgggatgatggacccgccgcgaccagaggccattaccgctatcggcgactgcctgcaggcggggatccgcgtgaagatgatcaccggggaccacccgcaaacggcgatgagtatcggcaagatgctggggatcggcaacgccgggaacgccattaccgggcgcgagctggaggtgatggacgatacccaactgagtgaagcggcgcagaaattcgatatttttgcccgtaccagtccggaagataagttccgtctggttcaggcgctgcaaagcaggaaagaggtggtcgggatgaccggtgatggggtgaacgacgccccggcgctgaagcaggccgatgttggtatcgcgatgggcatcaagggcaccgaagtgaccaaagaggccgctgatatggtgctgaccgatgataacttcgccaccatcgccagtgcagtcagggaagggcggcgggtttacgataacctgaagaaaacgatcttgttcattatgccaaccaacctggcgcaggggttgttaatcattatcgcgctgctggcggggaatttgattccgctgacgccggtgttgattttgtggatgaacatggcgacgtcggccacgctgtcgtttggtctggcgttcgaagccggtgaaaagaacatcatgcgccgtccgccgcgcgatcctaagctgcatgcgatggacggctttgccatctggcgggtaatttttgtcggttcgatgatcgccgtgagcgcctttgtgctggaggcctggctacagccgcgaggctactcacctgagtttatccgcaccgtactgttgcagacgctggtcaccgcacagtggttttatatgctcaactgccgggtggcggatggtttctcactgagcaaagggctgctggcgaaccggggtatctggattgtcagcggcgtgttgctggtgctgcaactgctgattatctacgcgccgtttatgcagatgctgttcggtaccgaagcgctgccgttccgctactgggtgatcacctttattatcggttttgtgatgttcctgattgtggaaattgagaagccgctgacgcgcaagtggcgcacggcctga

SEQ ID NO: 201307 - DNA, 432 bp, Klebsiella oxytoca; identical to SEQ ID NO: 144875

SEQ ID NO: 201308 - DNA, 1086 bp, Klebsiella oxytoca
gtgaaccgttatttttctctcattcccgttgttattttaataacaacggcttgcgatcagaaagcaccgcaagttaccccgctgccgcggatggtaaaagttgcggatgtcgtcgccattggtgattcacagcagcgcatttttcctgcccgtattgaatccggggattctaccgatctgtcgttcaaacgcggcggacagattgaatcccttgatgtgcgtcagggagccagtatctctcaggggcaagcgctcgcccggctcaacgcccgggaagcgcagcaacgcgtcaacgaacggcagaccgcagcaaccctcgctcagcggcagttcgaccgcttccagacgctggccggtcgccaggccatttcaaaagcggaaatggatatccagcgggccaaccgtgattccgccaacgctgcgctaaaaatcgcccgcgaagagctaagtcaaatgacgctcaccgcgccgtttagcggtattgccgccagcgtcccgatccgtaatcaccaggttgtcgccgccggacagccgatcgtcaccctgacgcgaaccgatctgctcgacgtggtgttcagcattccggagaatctttttacgactattgatatccgcaatgcgcagtatcgtccggtggtgaaaatcaactctatgccggaccgtcagttcaccgccgaatataaagaacataccggtagcagcgacagcaacactctgacctggcagatcattttaaccatgccgcgcccggccgattttccgtcagtgggcggcgtgagtgggaccgtgacggtcaatctggcaaacctgcccgccagcgcgggcgataaagccgtcgtggtgccggttgaagcggtatttaatccggataatcgccagcgcaatgagccccacgtctgggtagttaaaggcgaaggcgaacagctacagcttgaggacagaaaagttggcgtcggccaggtcacctctcagggagtggtcattaccgaagggcttagcgtcggcgagcgcgtcgtggcggcaggcgtcagtgaactgcatgcgcagcaaccggttcgaatctggacgcgtgaacgaggtttgtaa

SEQ ID NO: 201309 - DNA, 576 bp, Klebsiella oxytoca; identical to SEQ ID NO: 144879

SEQ ID NO: 201310 - DNA, 681 bp, Klebsiella oxytoca; identical to SEQ ID NO: 156015

SEQ ID NO: 201311 - DNA, 348 bp, Klebsiella oxytoca; identical to SEQ ID NO: 156014

SEQ ID NO: 201312 - DNA, 414 bp, Klebsiella oxytoca; identical to SEQ ID NO: 156013

SEQ ID NO: 201313 - DNA, 285 bp, Klebsiella oxytoca; identical to SEQ ID NO: 156012

SEQ ID NO: 201314 - DNA, 345 bp, Klebsiella oxytoca; identical to SEQ ID NO: 156011

SEQ ID NO: 201315 - DNA, 300 bp, Klebsiella oxytoca; identical to SEQ ID NO: 156010

SEQ ID NO: 201316 - DNA, 1269 bp, Klebsiella oxytoca; identical to SEQ ID NO: 156009

SEQ ID NO: 201317 - DNA, 822 bp, Klebsiella oxytoca; identical to SEQ ID NO: 156008

SEQ ID NO: 201318 - DNA, 231 bp, Klebsiella oxytoca; identical to SEQ ID NO: 156007

SEQ ID NO: 201319 - DNA, 984 bp, Klebsiella oxytoca; identical to SEQ ID NO: 156006

SEQ ID NO: 201320 - DNA, 879 bp, Klebsiella oxytoca
atgattacagctacagaactccaagagttatcacgccaggttgaaaatgctaacattgcccgagccctggcagttaaagagttggttaaagagacaagagatcgtcagttttcattgtgggcgctatttattggtctcttcagagagacaccggcgcgaaaaaagctgaacgaatgtgaattgcatcttaacctgctgctgccaaaatgcaggagcatctttcttcaatacgtagttatgtcctcgttggaagaaatttcgaaatcaccagattgtgagatttatcagcatctagtcaactgctggaaagaagctcagataaaatataacgagtcaggcagacgactcaaacttgcagaaaatgcccgtgaactattaaaaacagcaaaggatgaatgtaatagtgcttccacaactgaatttctggatatggttactaccagtaaagcaatatccatactttcagcaatagacacatcctctgcgagtagttcgttaaagagagctatgggtgcgcttaagcgattagcagatgaaatgcctgcccggcaatcacctattgattcaaatttaccagatgacacgcttgatctgtttgtcgatctgactataaatcctgttatcgatattctctcctggttaaatattgaaaagctggataatgccgaagtgcagtgcagcaaagccttaaagaaacttcagacgttattaggacaactgggtgctgagcatgatttgagaactaaggattatcaatctcaattagatacgcttaagagaattgaacaaccatacatcaaaaaggtgatgcggcatatacccgaaaatatgaagttcaaggagcctgagtatctccagactataggaatgaacccatga

SEQ ID NO: 201321 - DNA, 603 bp, Klebsiella oxytoca; identical to SEQ ID NO: 156004

SEQ ID NO: 201322 - DNA, 429 bp, Klebsiella oxytoca; identical to SEQ ID NO: 156003

SEQ ID NO: 201323 - DNA, 483 bp, Klebsiella oxytoca; identical to SEQ ID NO: 156002

SEQ ID NO: 201324 - DNA, 441 bp, Klebsiella oxytoca; identical to SEQ ID NO: 156001

SEQ ID NO: 201325 - DNA, 585 bp, Klebsiella oxytoca; identical to SEQ ID NO: 156000

SEQ ID NO: 201326 - DNA, 1710 bp, Klebsiella oxytoca
atgaacctaccgacagctgtattagcgaataacgatgaaaatgaatcagacgtcctcagcctttatgctaatcccgtagacagtcaaagtggcctcattgaacatgacggctttcaaaaactaaatgccatgcgcgatctgctggtggaatacaacacaacactgaagcacatgcaggccatgtatgatgcagtgatgcggaaccggcatgatgaagcatggcgcatgttctgtgattcttgtgacaattccatcaaatatacgctggctgtagaaaatttgttctgtatagaacgggcccgctgtgctctcgatgaaaagtactggcaaaagctgctcgatctgaccggcgtaaaaccatttatgcccaccgaaagatacgatgactggaacgaaggattgagggcatggcgaaaatcatcagaatcaaattttgagaagcttaagcctgtacccttcaacgaagaaagtatcttttctaccgcattcgcattgaatgaagagaaaaaagactacttcgcccagatggttcatggtgtgtttgaaaagctctccgctctgcataagactaaccgtgcccagggcttcagcaacaaactcatcatagccagctgcttaccaagtagagataaccgcagatcctatgactatctcaactattttaatgaccttcgtaaggttattggactgatgtatggacgaagcggtgctgaggatgtgaattcggctgcggtcaaagagtacatgatgagtaaccctggcgaatgggtaagtattgataacgatagtcttaaagtgaaggggtttattaacggcaatgtgcatatcctgattgaggaggaaacttgtgacaatctcaatctggtactatcccatttaatgccaggctgcattcctctcgatcgccgatacaccaccggccataactccgcaagaactgtaaaaaccaatgaatatcggtcgcagttgatatcattctctgctgttaactccttaatatcatatgccactgaccatttgaacgcgggcaaacacctgtcaccggggccgcacacttttatcctgcgggacaaccagtctgttagtgagaaaaaagaactggtgaacatatgggagtcattgggtgctgtcagaagatatagagaagtatatgactttgactttagccccgttgaagcattcaaacttctggcattacatggttctatacctgaccgctatacgcaccagttctatgcaacggtcggagaactccagaaacgagcaattgatgaatgtatggtggcttcaggtatgcgtttgctggaaccgaatatcggtcttggtgcgctactgaaagggttaccagagggggtggatgttactggttttgatatacaccccgcagctgttgcaattactggcctgcgctggaacgtcacccttaatgattttctattggtcaagcctgaaaataccggcttgtttgaaagaattctgatgaatcctccatttagtgactcacgctggattgcacattttcaacatgcgatgagattcctgaaaccgggaggacgcttgatagcaatactgccagggagcgcaaaggagcatcttttaacccgagaagctgggcccggttacgacatcaatattctgggttgctatgacaacgcctttgaaggaaccgcagaatccataaaacttttctccgttgatgcccatgaatag

SEQ ID NO: 201327 - DNA, 756 bp, Klebsiella oxytoca; identical to SEQ ID NO: 155998

SEQ ID NO: 201328 - DNA, 393 bp, Klebsiella oxytoca
atgagaaaaataatattaaatgcggttgtttgtttatttgcaattaatgcatcaagtttcgcaatatcagcggaaagctctccatctcgtgacgaactgaatgacgtgatgaaagttcatgcttccgagattgctgctgttatcgcatgtaaagactacctcgaaaatggcgaggaacgtttgactgaagcgaaatcaaaagctggccgtgtactgggtaagatggtaggcaatcaagccaagggtagcgagtatgctagtcggattctggtaactgttaacgaagctaagccagatgagcaactgaaggctgaattcgacaaggtcaaccttgaccactcagtccgcgttgcaaaatgcgctcagctagggaaggtgcgaacaagttcctga

SEQ ID NO: 201329 - DNA, 1899 bp, Klebsiella oxytoca
atgacgtggaaaaccacacaggggcaggttacccttttgcttgtcagtttttttgtatttttaattatcgtgacctataccgttatccggttatttgtggcacctgaactcattgaaacagaaaccaaaaatataagaaccatggtggaattacagagtgaggccataacagagcagatgaaccgtgttaaagcccagcagcgtgtggtgactgaactgattcctgcactgcaaagtgagcagattgaccgcctgttaccccaactggtgaatcagcacggggatctgaacgtatttggcggtggggtatggcccctgccgggacagcgggatccggaacgtgagcggttcagtaccttctatgcccgggatgccggtggggttctgcagctcaatacggtctggaaccagccggagtcggccagatactgggaacagccttggtacaaagacgggatgaacgcgccgaaagggaactgtgcatgggcaaaagcgtatcaggatgccgccactccccagccgcggacgaactgtgccatggccattcagaaaaacggaaaagcatggggcgttgccaccattgatgtgacgctgggtttctttaaccagctggcaaaagatatgggcaaggctattggaggaaccgtactcatcattgaagaggacggcaaagtcgtcggaaacggctcttcggttcagggaagtgccgcgctgggcaatctgcgcgatttgaacatccctgcggcagcccccctgagtaagcttatcaccccggggcagaaaacagagattcagggaacctatgatggcgaaggcggggaacataccctgtttgtggtgccgattagcggcagcccgtggctcctggcggtggatgtgtccagcgatctgcttgagcgccactctgattccattctgactcaccttacccttgtgcaggtcattacaggtatcctgatggttctggtcctgatgggcattgtgcgcaatattttcagaaacgtgaccctgctgaacaaaaacattgaggcgttgtccggcggtggtgctgacctgacgcagcggcttgctgaaagcaaaagccatgagttcaacagcattattacgaactttaataagttcatcgcttttctccaggatcttatgcaacaggttggccagagttccgcggcgattgcatccgcttcccgccagattgcaggaggcaacctggatctctcctcacgtacggaagaacagtcttcatccattgtcgaaaccgcagcatccatggaagaactcaccagtactgtccgtctgaatgcagataatgcactgcaggctaaccggctcgcaacacaggcctctgctgcggcgaaggagggtgctggcgtggtcagtgaggcggttatcaccatgagtaaaattaacgattcttcgtcgaagatcgttgaaattatcagcgtcattgacggtattgctttccagaccaacatccttgcccttaatgctgctgtggaagctgcacgcgccggtgaaaatggacggggatttgccgtcgtggccggtgaagtccgttcccttgcacagcgaagcgctcattcagccaaggaaatcaagaaactgattgaagagtccgtcagcaatattgaacagggaagtgagcttgtcagacaggcaggaaccacaatggacgggctgatggagaaggtcgaaaatgtcagcgtgctgatttccgaaatcagctcttccagtgatgaacaaagccggggtattgagcagatcaatgtggcgattaaccagcttgataatacgacccagcagaatgccgcactggtcgaagaagtctctgctgctgcgcagtctatggaggctcagacagagcagcttgaaaaagtggtcagcagtttcagactctga

SEQ ID NO: 201330 - DNA, 1230 bp, Klebsiella oxytoca
atgtattcatttatcgcacgccagcctatttttgacacaaaaatgcagaccgtcgcttatgagctgcttttcagggacggaatgaacaatgcctttcccgatgtttcaccagaatacgccacgtccagaatgatttctgaccagtttttatgcatccctgttccccgtatagccaacaatcacagttcttttattaatgtgccgcaccagatgatcattaacggactgggcgatacgctgccgaatgaaaaagtggtcatcgaaattctggaaaatgcagtcccggatgatgcgcttttctgtgccgtaaaggatatgcacgacaggggttaccagcttgcgctcgatgatttcacgatggatgatgaatgggaccgctttatgcagtatatttctgtcatcaaatttgatgtcagagacaatgactatgaagatatccggcaatatatccacagaaaaagtcagcttctgcagggcataaaattccttgctgaaaaagtggaaacaagggacgagtttgagctttacagccgggcgggtttcgcgcttttccagggatttttcttcagtcgcccggaaatcctcagaaataaatgcctttcccagaaccccctgccactctccaggctgatgatggaggtgaacagggaaaacccggactttgccgcggtcgaacgtctgcttaaaaccgatctgacgctgtcatataaaatcatgcgctacgtcagaaacatgctgtttaactcacatggcataattcaggcggacaatcttaccctgaaagaaatgctgatgtatctggggggcaaagaactccggcggtttgttgcggtggccgccctttcaaatatggggcgttccggcatcagtgaactttatcatctgagcatggttcgcggaaaattctgcgaattaattgctggaaaaataaataatgtttcattatcctataacgcatttatatgcggtctgttttcattgctggatgtcattcttgaactccccatggacgatttaattaaacagatttcaatcccgcaaaacgtaactgccgcgctttgtgaacataaaggtgaactttttgacatactgaccctgtcgttatgttatgagaaacttaactgggaggaaaccgcgaaaatatgtaataccctcaatatcagcgagttcactgttatagaaaccatgcaggccgcaacaaaatgggcggacgagctcgccgtctgttaa

SEQ ID NO: 201331 - DNA, 228 bp, Klebsiella oxytoca
atgaaaaatgtacttgttttctttaactctcagcccgctgaattagtaaaaaccctgagggaagtcaatatcatcaggcgtgtatacccgaacggagaagaggctcatctcaaaatcatgctttccggcatgcactcggttggacgaaagaaatgtgagattttcatagctgcagacagagatctgaggcataacgaaattataactgctgtgaatgctctgctgtga

SEQ ID NO: 201332 - DNA, 285 bp, Klebsiella oxytoca
atgtattatgattgtgatacaaaacttgttatctctggagtagtaatactgctggctgggatagttatcggcagaaggcgaggcttgctggctggtctgctctttagtattttatttatcataatttttctaatactgctggtggtagacttagtgttatatttaggacgccctccagttattttttgttatgtttttcttgtttttattatatgtattgctgggtctcttcctgctaagattaaattaaaaaataccagtcaggaactcaagtgcttattatga

SEQ ID NO: 201333 - DNA, 312 bp, Klebsiella oxytoca
atgccatttatctcacggaaatgggcgcatttatcgcgcggcgcatcaaacgacggtaaatccagtaccgtcgccgggctaaacggctggcagatcccggagctgaataaagcgaccctggcggcagttgccgagccggacgcagcgaagcgcctggatctgtataaaaacatgcaggaggcgctgcagcgcagttcgccttacgtgtttatcgatcagggtaaaacccagattgtggttcgcgataacgtgaaaggttatcagcagggtctcaatgccgatatggtctggtatgaccgggtaaccaaataa

SEQ ID NO: 201334 - DNA, 582 bp, Klebsiella oxytoca; identical to SEQ ID NO: 15551

SEQ ID NO: 201335 - DNA, 507 bp, Klebsiella oxytoca; identical to SEQ ID NO: 155988

SEQ ID NO: 201336 - DNA, 1191 bp, Klebsiella oxytoca; identical to SEQ ID NO: 155986

SEQ ID NO: 201337 - DNA, 189 bp, Klebsiella oxytoca; identical to SEQ ID NO: 155985

SEQ ID NO: 201338 - DNA, 549 bp, Klebsiella oxytoca
ttgtcatcggttaaagtcaaagcaactatcgtagaagataatactggcattaaaagtcagctccccatcttgatcaccgaacaaggtgaagttggttcagttaccgattacttgctaaagatggaagctgatggtgctagtaatgctttaatgaatggttttatacaagccacttctttgctcttggattacatggaagccaacaaaggattatttgaagatcctaaaatgctattccaaacctttgctaagcgtctttacacaggcaccatcggtgaagatggtttagatccctctggcttgtactgggtgccaagctcaactgataacgtcaataaacatattcatcgattaacggcatttactgattggctggctaacaagcatggcgcagagccaatgaaccctttgcgagatgccacacctcatgagcaacgccttaattacgctgcttggtatcgaaaaaaccaaaatgacttccttggacatattgaagataaaaccgttaacaaaaccatccgtaaagctcgcacaatgaaaggacgttga

SEQ ID NO: 201339 - DNA, 180 bp, Klebsiella oxytoca
atggaaagcatgatcaatcccggtgattcagtgacttgttacaacagtgagtcggtaagtgacctgctaacggctggaaatatttacacagtggagtcggtaaccggtgaaggaatgataaaaattgaaggaattacagatttattctgtgactggcgatttattaatccagagccctaa

SEQ ID NO: 201340 - DNA, 975 bp, Klebsiella oxytoca
atggctagaatcagacaaagtaatccatatgatgatgttgagaatgctattagacggaagcgtgatagagctatatattttaccttagctatatctctaatcttcgctattatatttctaatattatggttttgtattccatcagacatgccagtagatgagcaagtcaaacaggtttctgacgatatattcaacattctacgctccaatgagttagttcctgaaaatgcttttgatacgataggatcatttatttccatatatggaagagttggtgtgggtgtatgtatattgattgtaatactaggggcaattattaatgggaatggtttacaacttgagataatgacaagttgcatagtattgtttgtagggtttaatttatttattgctgcatttggtgatgagcctcataattataaatacaataccgacaaaataagtactgctatgaaaactggagacttggactctttgtatgaaatctatggagacagagggagtttactaagaaagtcagttgaaaaagcacttgcagatcctaaaccagctactgcaaaaaaactgggagatatcgatggcctgttactcagaggtgtaataattactgctgaaaaagtatctgatagcaattataaaaatcatcttggaaacttggttttgttaatgcctgaatataaagaggatagtgtcaaagacaaaaacacactgtttgattcacaactttataaagctattgattaccatatttatgacattggttacaagtctggtgcgcttgcttcaaatcctctttctgcttggaagtcgggaaatgatcttaaatccaattatattaaatatattataaaaagtactgctctaatattttttatacttgccgtaatttttgtggtgattatactgctgacggttagaaatggccgtaggcttacttatttgatagagtctaatattaaatatctgtcgaaataa

SEQ ID NO: 201341 - DNA, 1038 bp, Klebsiella oxytoca
atggaatcatcaataaaagatgcagtcagatctttccagattggtgatattgatgccgcgcataactttggacgattggaggacactactgatattaattatcttgataacctccttctcagcgtcagctcatcatctcagggcaagaagggagagactctgaatgagattgttgcactggctcgtgaagtcagtaatgcagtcgaaccaagttatcttcaaaagaaactgtcacggataccgtatgttgggcctttcataatgaaagccatcggtcttcattttagtgcaatgtcaagatttgatttagttaaaggacaaatcgatattttaacctcggatatcgaaagcatatcggaggggttgtttgaaatgaataaaaatattgatggaatgtatgaccaagctttaactagtgtaaaaaatacaggggttaacattgtagctgcctattacattctggagaagttacaaacagttcaggcttctattcgtaaggaactaaaaaatcagcctgataataccatgctgagcatggaagcaatgaatattgaacatcaaatcgccctcataacaaaacgtcgaaatgacatgatcacggaacaacaaaaggcatttgaagacctaaagatgatgaaaatgatgaagttcaataacctctcgatggtagaccagtttgaaactattattaaagtaacgataccatcttctaaacgcagccatcttattattgaccaggccgaaaggagtgataaaagctcattactgattcaggcaattggtgattctgtaaatcaacaagccagacgtcaagctttgttagtaaaagagagcagtattcgtgtagccaaaacagctaatcgtactgtatatgatgttgagacaattgattacatatcaaaccagatcaatgaggccggtcgagaaattaaaaaaatccacgaccgagccaagacgcaacatacccagcttgaagctcgcgcagcgcaatggaaggagaagcgttttatggtagcaaaagaactgtcttccaaataa

SEQ ID NO: 201342 - DNA, 1005 bp, Klebsiella oxytoca
ttggtatccgcattggcctgcgggatatccgaatcgctgtcagaatccgaatcgctgtcagagtccgagtcgctgtcagaatcggagtcgctgtcagagtccgaatcgctgtccgaatccgagtcactgtcggagtcagaatcgctgtcagagtccgaatcgctgtcggaatcggagtcactgtcggaatccgaatcgctgtcagagtctgagtcactgtcggagtcggaatcgctgtcggagtccgagtcgctgtcggaatccgagtcactgtcagaatccgaatcgctgtcagaatccgaatcactgtcagagtcagcatcgctgtccgaatcagaatcgctgtcggagtcgctgtctgaatccgagtcactgtcagagtcggagtcgctgtctgagtccgaatcgctgtcggaatccgaatcgctgtcagagtcggaatcgctgtcggagtccgagtcgctgtcagaatccgaatcactgtccgagtccgaatcgctgtccgagtccgaatcgctgtccgaatcagaatcgctgtcagaatccgagtcactgtcagaatccgaatcactgtcagaatccgagtcgctgtcagagtcagaatcactgtcgctgtcagaatccgaatcgctgtcagaatcggagtcgctgtcagaatccgagtcgctgtcagagtcggaatcactgtcgctgtcagaatccgaatcgctgtcggaatcagaatcactgtcggaatccgaatcgctgtccgaatcggagtcgctgtcggagtccgagtcgctgtcggagtccgagtcgctgtcagaatccgaatcgctgtctgaatccgagtcgctgtcggagtccgagtcgctgtcagagtccgaatcgctgtcggaatccgagtcgctgtcggagtccgcatcgctgtcggaatccgagtcgctgtcagaatccgaatcgctgtcagaatccgaatcgctgtcggaatccgagtcgctgtcggaatctagactggccccatga

SEQ ID NO: 201343 - DNA, 1338 bp, Klebsiella oxytoca
gtgcgcaacttctttatcggtcgctacgggaatggcgttcttgaccggtccactgaagataatttcctcatccgtgattgctgtctgacgggctggtttatgggggccgactccgtttgcaacggtttcgttgtcgcccgtgattgctttaccggcgacgcctatggcggggcgtggacgcaacgaaatgccgcagtcactattccgtatctccctccctatccggcggcagagattttcaaagtaggctgggtcgatgctatccggtatacgaaatatcacttttacggcaagccccggctgtttggtcctgcagatgaggcgattgatacgtggttcgatacgtatatctataaatccgccaactctgcgcgaacctccgcaggcggcaggctgacaaacaatactgccagcggctattcagcgcgttcgtttcccggcattacgggccgggcattcaccgttctcagtcgttacggccgtgcggtgaacggggtctgccttgacgatgtgaaagtgctggggacccaccgcgtcccgttctacaccgacgcaggcagttacaacgtgattcacacgtcatacgttgaaaagacctgtctcgttgataccacaacgacaactattgccggtaatcagttctataccgactatcaggacccgtggaacccatcgctgacaaaagcgcccgcgatggtttgtgagggtggtatcactgtcgacagaactgtcgtttcggctggcgtggctacacacccgttcagccagaaaccaacaacaatcaacggcccgctcatcatcaacccgttcagggatgacaccgaagactactctgccgtgcagattgcagagtggaacagcgccgaagggaaaacggtatatctctatgatttccgtcgtcagtacagcgtccagcgcccgatacggttttttgataacacacaggaagcattccagtactacaagggcgtctggacgccggttgtcaaatgcggctcagaagtcgtgacgctgaataccaccgtgggaacctatcgccgctcggggcggttagtgcatgcgacattcagaatcgaaaccacgtcgatgtcgttggcgacaggtggcgcggtagtgatatcagggctcccgttcacggttgccgcactgagtgacgggggattaacggtgtccccgataatttgcagtcgtgccggctcggcaatcatcattgcgcaaacgaacccgaccacaaaagagattctactgttaaccaatagctcaccggctgttttttcaataacaggcggaaccggcttaactatttacggctcagttcagtacgttctgacagaataa

SEQ ID NO: 201344 - DNA, 258 bp, Klebsiella oxytoca; identical to SEQ ID NO: 193953

SEQ ID NO: 201345 - DNA, 1239 bp, Klebsiella oxytoca
atgggggccgactccgtttgcaacggtttcgttgtcgcccgtgattgctttaccggcgacgcctatggcggggcgtggacgcaacgaaatgccgcagtcactattccgtatctccctccctatccggcggcagagattttcaaagtaggctgggtcgatgcgatccgttatacgaaatatcacttttacggtaagccacggctgtttggccccatagataaggcgattgatacgtggttcgatacgtatatctataaatccgccaactctgcgcgaacctccgcaggcggcaggctgacaaacaatactgccagcggctattcagcgcgttcgtttcccggcattgctggccgggcattcaccgttctcagtcgttacggtcgtgcggtgaacggggtctgccttgacgatgtgaaggtgctgggaacccaccgcgtcccgttttacaccgacgcaggcagttacaacgtgattcacacttcctacgttgaaaagacctgtctcgttgatacaacgacgacaactattgccggtaatcagttctataccgactatcaggacccgtggaatgcgacactgacaaaagcgcccgcgatggtttgtgagggtggtatcactgtcgacagaactgtcgtttcggctggcgtggctacacacccgttcagccagaaaccaccaaccctcaacggcccgctcatcatcaatccgttccgtgatgacacagaggactactcggccgcgcagattgcagagtggaacagcgccgaagggaaaacggtatacctctatgactggcgccgtcagtacagcgtccagcgcccgatacggttttttgataacacacaggaagcattccagtactacaagggtgtctggacgccggttgttaaatgtggttcggacgtcgtgacgctgaatatcaccgtgggaacctaccgccgctcggggagactggtacacgtgacgttcagaatcgaaaccacgtcaatggcgctgacgacaggtggcgcggtagtgatatcaggactgccgttcactgtcgcagcgttgagcgatggagggttgaccgtttctccggtcctttgcagtcgtgctgggtcatccacaatactggcgcaaacgaatccgaccacaaaagagattctactgttaaccaatagctcaccgactgttttttcaataacaggcggaaccggcttaactatttacggctcagttcagtacgttctgacagaataa

SEQ ID NO: 201346 - DNA, 258 bp, Klebsiella oxytoca; identical to SEQ ID NO: 193953

SEQ ID NO: 201347 - DNA, 291 bp, Klebsiella oxytoca
atgcatgacgctgtgactattgtggccaccattaccgcgcattcaggctcgcgtgagaaagtccttcaggcgctgaagacggtagagcgtgacgtccagggcgaaccgggctgcgagctgtatcaactgcatctgaaccgcgagaacgatcaccagttcgtgatgattgagcgctggcagtccgcgaagatgctggagcaacacgctcaggctgcccctttcggcgcgctggttcgcgcaattgaaggtattgcggatctacaggtcacaaccttgaccacctccgtctga

SEQ ID NO: 201348 - DNA, 183 bp, Klebsiella oxytoca
atgagtaattatgcgctagttaaaaatggcgtcgttgaaaatgttgttgtatgggatggcactggagacattttcgatgattatattactgtgaatattgacgacatatcggctggtatcgactggacatatgacggagaggcatttgcccctccgccagaaattactccgcagggggtgtag

SEQ ID NO: 201349 - DNA, 1380 bp, Klebsiella oxytoca
atgataagtttatcaccaccgactatttgcaacagtgccattagcagtctggataaactggatgagccaccggcactgatacaattgaatcgtcgggtaagagaattgatccctccggttgatctgacggagctgttgcttgaaatagatgcccgaaccggttttacccgcgaattcagccacgtcagtgaatcaggtgctcgggcgcaggatctccaggtcagtctgtgcgcaacactgctggcagaagcctgcaatatagggcatgaacccctgataaagcataatattcccgcgcttactcgccatcgtctgagctgggttaaacaaaattatctcagggcagaaacgctggtcaccgctaatgcacggctggttgattttcagtccacgctgccgctcgcggggtactggggaggtggtgaggttgcctccgcagatggtatgcgttttgtcacaccggttaaaacggttaattccggaccaaatcgtaaatactttggttcaggacgcggtatcacctggtacaacttcgtctccgatcaatactccggtttccatggcattgtagttcccgggacgcttcgtgattccatctttgtactggaagggcttctggagcagcagaccgggctgaatccggtagaaattatgacggacacggcaggatccagcgatatcatttttggcctgttctggttactgggctaccagttttcccctcgtctggccgatgcaggcggggcgatattctggcgggcagataaaacggcacattatggtgccctgaatgagctggcccggggatgtgttgaactgtcaaaaatagaatcccaatgggatgaaatgatgcgaatggcgggctcactgaagcttgggaccatccatgcatcagagcttattcgttcactgttgagaagtagccgaccatctggtctggctcaggcgattatggaagtgggccgggtcaacaagacgttgtatcttctcaactatatcgatgatgaggattaccggcgtcggatcctcactcagctcaaccggggagaaggacgccatgcagtggctcgagccatttgctacggacaacgtggtgagattagaaaacgctaccgtgaagggcaggaagatcaactcggtgctctgggtctggtgaccaatgcggttgtgctgtggaatacactttacatgcaggaggcgttgtcacatcttcgcaaatcgggggaaacacctgaagaggagcatctggcaagattatcgccgctgatacatggccatataaatatgctgggacattatacgttttcgttaccggaagatattctgaagggcgagttaagaccattaaatttgaatacaaacaatgaattaacctcttag

SEQ ID NO: 201350 - DNA, 909 bp, Klebsiella oxytoca
atgaaatatttcattgcaataccaacctataatggcgggaatttatgggagtcaacagtaaagaatattaaaaagtatgcaccggaaggtactctcgttaaaataatagattctggcagtaaggataataccgtacgtgaggctataaatgctggcttttcagttagtaaaattgagagcgctgattttaatcatggcggaacaaggaatctattcgttctagatgattcgtcagaatatgacattgttatttttttaacgcaagatgccgtacctcaaagaaattttatagaaaacattttatctgcatttaaagatgatagagtagcttgtgcttacggtcgccaattaccacatgatgatgcaaaccctcttgctctacatgcaagaactttcaattatcctcaaagagattatgtttgtgacaaagatagtatatctaggatggggctaaagacggtttttatgtccaattccttttcagcatatagattatcagttttcaaggagttaggtggatttccttccaatactatactatgcgaagatatgttttacactgctagagctattttggcaggctataaagtagcttatatctcggaagctattgttaagcattcacataattattcaccaagagaagagtttagtcgatattttgatattggtgtatttcataaaaatgaatcatggattagaaaaaatttcggaggtgcaggaggggagggtaaaaaattcattttttcagagttttactttttacttaaaaaagctccattatggataccactagcgtgtgtaaataatctaacaaaaatagtcggctacaaagttggccaaagatatcaacacttacctagacgattcattgtaaaaatgagtatgcataaaaaatactggaaataa

SEQ ID NO: 201351 - DNA, 228 bp, Klebsiella oxytoca
atggcgatcgtcaatccctttgagccgattaatttcatcaaaacgcaatatattggccccattgcctcgcaaccaaccggagcctttactcccacatacccaagcgcgactatcccacggctctgcaaaattttctgccaaattctcgtcgaaccaggttttttgttccacaataaaagtgtcaaagttctcgatattttttttcattgttcacaacctttggtgtga

SEQ ID NO: 201352 - DNA, 1530 bp, Klebsiella oxytoca
atgcctcaaaataataaaagcattaccaatcaaaagcttaattcaattaagattgaaaaattaaaatgtataaatgaattgaatgagattttttttcatccacatccactaactgctattcttggtccgaatggaagtggaaagtctacgatcctccatgcattagctagcatatatatgcccgaaacgggtttccccggtgaagataataagctaggtgatttttttccacgtagtcctcaggctgaatggaatggcagtaatttcaacatcaatataacataccgccgtgatggtgttttaattgaaaatgaaacaaaaaattatgcaaaagctaattatagaggctctaggtggattcaaatatatgctaggcgcccaatgcgtgaagtctattatttaggtatcgataaatgtgttcccatgattgaatctgagaggaataataatgtaaaatatgaaacaaataatgtaactaatgccttaattactacaatgcttcacaaagcatcttatattttgaataagcgatataccagttttaatcatcatcggaaacctaatggcactcaatttattggtgtggaaattgacggtcttgcgtactcatctcttagcatgagcgctggggagcaaaagatttttcttattcttgagacagtcttcaaagcagataagaatgcccttattttaattgacgagcttgatctattgttgcatgacgaagcattaaaaaaattgatctttgttttgtcagaacatgcaattgaaaaaaataagcagattatctttacgacgcatcgtgaattgataatagatatggccgataaagttaatatacgacatgtggtgtcattgaataatcgatcatattgctttgacgaaaccaagcctgatgctattaatagattgacaggggagcaagttaaacctatagaaatatatgtagaggatgatgtagcaagtgcgattgcaaggaaaatatgctcttcacttcaagctagtagatacgtaaaaatctatatgtttggtgcggcaattaatgcatttacattactttccagttcgctcattagaaatgaggatatatccaataaaatatatatattagatggtgacgagtataatacgccagctaaaaaagcagcggcgttagatagagtattaacaggtacagaagaaagaacacgacaattgaaggttgaaggagaaggaaaggttatacaattcaaccttcctgagaacctgaagcctgaagtctaccttcatcatttaataacaacgattcctgttgatggcctagagaatgatgcattagagattatcgaagttgcgaataacatccaatacgaaatggattctcatagttatattactaatgttatcaatagattaggtcttgaccgtgcctctgggttagccaaaactattgatcttgcgtcaaagcaccctgagtggaataattatgtccaaagtgtatcggactggctaaccccattggttcatcaattgagagagaatgttggctaa

SEQ ID NO: 201353 - DNA, 1659 bp, Klebsiella oxytoca
atgccagtaagtctgaattttcatctgacttcagttttaaaaccatccaaaaaaagaatacatgtaaaaagcgaaaattcttatggcgcaataattaaacaaattgaaaaagaaatagccaacttagatagatggcaaaaaaaagcagcgattgaatccccagaaaaaccacaaagaatacgtggtttggctggttgtggtaaaacgattattttggcgatgaaagccgcttacttgcacgcatataatccaacattgaggattgcagttacatttcaatcaagagctttgtaccaacaatttaatagattgattgataaattctatttccaacataccaatgacgatccagattataactttttgaaaattcgccatgcttggggaagtaataaagaaattggaatctattctgaaatatgcaatcaattaggtattgagccattaagtttctacgctgcacaacaaaaatttggatatgacaacgcattttcaggtgcatgtgaagaagctttaaaatattctgaaaaagtagatgttgaaccaatctatgattatgtacttattgatgaagcacaagatttcccatcagccttctttaaattagtctacaaattctcaagtgagaaaaaaagagtagtttgggcatatgatgagttgcagaatcttggcgattttaccatgctaccgccggaagaattatttggtgttactaaactaggaactccagaagtcacacttgtgaatgaaccaaataagcctcagcaagatataatgcttccaatatgttacaggaacccaccttggacactttctttagcattggcgctagggttaggtatttatcgtgagggtggtttagtcaaaatgttccatgacccatctttctggaaaaacattggttatgaagtggttggtggtcggttagaattatctaatcttgtaaacttgcaacggagtagtgacagaactccagattatttcaatagattattgacaccaaatgattccattaaatatcaatcatttgatgatcctcaagctcaagccgaatgggtagcgaaggatatattgactaatttgatggaaaatgagctagagcctaccgatattttagtagtgttcccaaacgcttatacgttaggcagtgcatcagcatatctcatgaatgaactaagaaaatatggtgttaattgtcatgttgctggaaaaaacacaagcagagatgtaatttttctagacgactcaatcgcgataactcatattcatcgtgctaagggtaacgaagctcctatggtatatgcaatgaactctaattattgtaattccggacttgaactaggaaaaaaaaggaatgcattatttaccgctatcacaaggactaagtcttggctgcgtataacaggtgttggcgagggtatgcgcgagttagttcaggaaattgataaagtatttgaaaaagattttcgtctagaatttaaatatccttctatcaaagagttagaaaagcttgatagtgcttatcaagataaaactgatagtgaaaaacaagaaatatacgaagggtttggacagctgaaaaagcttaaagctatgtttgaatccggtgaactttcgattgaagatgtgccgccagacttgagagactttttcgagtga

SEQ ID NO: 201354 - DNA, 675 bp, Klebsiella oxytoca
atggaaattaaagaacaacaattagttcaagcgataaacgatttaatttttcgctggcaaaaaaaagggttagtatatgactcaagaacacattctgcttttaaaaaagcaggtggtcttaacgaaataacttgggggaatgatgggtttgttttgaaagatgaacaattttcatcattttcggagtactgtagtttagttgaaaatagacaatactctatgttattaaatgatggttcattttttcagatatcgtatactttagaacgctcaaagattgttaagcataggctatgttggtatccatgcccaatagagctagatacaagtattcttgatgaaaatgatatatcagatattgttttagataaaatgcaatcagttgacttatcatcgctcaagtgtcgtagcccaatgaggtttgattacgcaccaatacaaacaaaaataggacattcttcagtccaccttcatttgagtgaggaaaactgtcggattcctgtaaaaacgccactttgtttaaggcaattcatgacatttatcgtcactcatttcttcgaagtgttatcccctgataaaagtctatatagtgatattgttacttgggatagtattgatacactaagtgacttagaaaaaaaatcacttcatataaatatttttaaaggcctctga

SEQ ID NO: 201355 - DNA, 201 bp, Klebsiella oxytoca
atgagtatcgttggagattatttctttgaattcccggcatcacgtggcgttcagggctggtggtcgttgtataaacccgctgttgcggtttttttctttctgttagcacgcttcggcaactctgtgccgccaccgttcgttgaggcactggtgatgggcaattttcctgagttatgtcagaaaagggacgcagacgcctga

SEQ ID NO: 201356 - DNA, 597 bp, Klebsiella oxytoca
atgactggcaaagagaccatccaaacgataattaacgacatcaaaaatgcccaagatgatggaattaaacaattggatgtaaataaccttttaaaatatcttgaaggtttcaaagatgatgaaggccttagccatgactttcagctggaaactttgaaggcaactcatcaaatcaacgttgaagtctttaaagcaaataccgttgtgcagattgaatccttcaaatcagtaataactgtgggtgcaaatgcagccagggcaattctcataataaacggtggtgccgccatcgccctactggcatttttaggtaatatttgggaaaaaacctcagaaccaaacgcagttgcaaacatcgccttagctttgctcattttttgcggtggcgtgctcgcctcaggtttttgttcaggatttacctatgtatctcaattttgcttcgggaaaaacccgctagaccataatacttcctggaatacatggggaaatgtaacaaacatcgccgccgtgctttgtggactagcatcactaattctgtttggttggggaacttataaagcattcgtgtcgatgggagctcagtttttcccaagttga

SEQ ID NO: 201357 - DNA, 315 bp, Klebsiella oxytoca; identical to SEQ ID NO: 151383

SEQ ID NO: 201358 - DNA, 1527 bp, Klebsiella oxytoca
atgaaggtaatagaattaaatagtatatcgatacaagatataatggcactagagattgatggtatgccaacattagtagtatatattcctttagatagcataggtatgactagcgattattctgacatatgtgaagattatcttgaggcgatttgggtagctgaatgcttgactgcagaagcggagcatgttcaggtgacccaagaatatattccagaaactcataaaacccgactttgtttaactatacacaaaccttttataaaaataaaatcagtgctctatgaagcttatttattatataatatcaatgctgatgataatgaaagcaatcaacagctacttgatgaaattagcggaaggattatcgattttgagaatgttatagatacatatcctacgaaaataccagaggttgtagatcgctattttgcaaatctggtcggtggtgtatatttccagatgcgttatgatgcaccggagatttatcaaagagaaattgcgaaacatccagaacgtcgtataggatattggagaagctcatttagtagtaagctaggagcttcttgctatgcatcatcagatggttgggtattgcctaatagtgttaatctcaacgacttcttcctaatatcatctcaaaaatataatgcggaatcaatgcgtcctgcaaaagtaatgacaataaataatacgtcatacattttatcagaggatatagctgcttattttcctatgagtcattactttaaatccagaatttgtagtagtcttgctttacttgaggaagaagatgtttggccaccagatacttttaactggttggatgcttcatttagctattcaccatatcatgaatttctttcttcagcgattcctgaaaattctcgtgctacacagtcccgtatagatgagtgtttgatagatcctgatggtacaattatcataattaatgatggaagttttcgacatttattatatgatactaagacattgacgttagacagaattagaaagttatataatgatgtcgttgaagagtcaaaccatctcgcgaataatataggtcttgctaataatataaattatcaatgggcttcgcttacagatgagcagtttgaacagctttgttatgacctgatatgtgttcatcctaaattcaattctgagactatcaggaagtatggtaaatcacgttcccgagacggaggaagagatatagaggtttatgatattccccgatctataggtgacaagcctcgaaaatggatttttcagtgtaagttaataaccagttcaaaatcgctttcttcaacaaaattaattgatgttggagatatgcttgatcactatggagctgaaggatttggagtaatgacatctgctccgatcgacgcaacgctttatgataaacttgacgcaatttgtggtaggcgtggtgtagagcagatgaacttttcaatctttgaacttgaacgtacccttagccgtcataataaactacaccagcggtattttggtgattaa

SEQ ID NO: 201359 - DNA, 1113 bp, Klebsiella oxytoca
atgtttaattcagagcgtttacgtatagcaagagaacgaagaggtctaacacaaagagccttagccgaagcagctgaattgaccagcagaacgatttcgaactatgagaaagcaggtatctttgatgctgtagcgagtgacagtatggataaaatttctgctgttcttggttatcctgttgagttttttctcgatagagatgttccttctctatcagctgaatcggtcagttttcgagccatgactaagctaagcgcacaaaaaagagattccgcgctcggtgcaggaaaacttgcccaagaattatcgatctggattgaagaacaattcaaattaccgaaacccaatgttcctgattgtagtttcgatggttattcggaacctgatcgtgccgcccgagccgtgagagaacattggggagtcggtgaattatcgatctctaacttaattcatcttctggaagctaatggtgtacgtgtgttctcactcgctgaaaactgcattgaagttgatgctttttcgttttgggtcgacgaaaaaccgtttgttcttcttaatacaatgaaaacaccggagcgtagccgctttgatgcagctcatgaattaggccatttagttcttcacaaacattcaagcaataatggcaggcaagccgaactagatgccgaccgctttgcatcagcttttttgatgcctgaacgtagtgttttggcgacagtgccaagaatgccatcgttggatctacttatctcaatgaaaaaaaattggaaagtatcactcgcagctttggtccgtcgtacattcgatataggtttatcaactgaatggcattatcgacagttatcaattgagttagcacgacgggggtatcgaaccagcgaaccacaaggcatggacgatcgtgagagatcacttgtattagaaaaagtgttttcaacgctgcattcacacgggataaaacgtagtgagatccttgagcagcttcggtttcctgctgatgaagtaagtgctcttacttttagcaatagattctttatgggcatcatcgatggggaaggtttagctggaaaagaaataagtaaacgtccttcacacttaagtgtagttaaataa

SEQ ID NO: 201360 - DNA, 720 bp, Klebsiella oxytoca
atgtactctcacaagctcgctaaagctgtcgtgctggatgaccctaatgatgttgaggcctatcttcagcctatgaatcttagtcaaagtgaccttacccatatactcgaacgaggtttatcaggccgttactcaacgactcaaaatcatcctgcaatttcacgtgggcagtatttttatggtgagggagttagcggcgctcgtgagatccttgcgccaaaagggtacaaacggctgtctattcgaaatgttgaattgaccgctaacgataatgttgcaatttacctttgccgtggctgcgatcaaactgggcttcttcatggataccccgaatctcgtttgaagaaaggtgactttacttgcgatctaatggggttgattcgcaataataccccaggacaaggcgatctgatgctcgacgataaccaacttaagttggacctcgctctacccgatggcgatgttgtccctcttctgcctaataaaatcggaatggacttatggtttttactctacgatttttatgaaattgatgactttcaacgtgttggtatccgtgcagaactttctcgacctatctcatacaacgataaaaatgtagttaatagcttttcaacgcgtttgatacttgatcttcacgaacctgcgccaattatccagagtaatgacgcaccaaaatttacgccggatattgacctcgacattttaaaagtaggctaa

SEQ ID NO: 201361 - DNA, 207 bp, Klebsiella oxytoca
atgaaaaatagaatcgatgtctgcgtcattatccctgcttacaacgccgctgaaaccattgtaaatctggttaataaaatcctcactgaaacccgcgtggctattgaacttatgattgtcgatgacggttctactgatgaaacagctaacgttctacgtcaaatccataatgaccgactcattctcatcaagcaggccaacgagtaa

SEQ ID NO: 201362 - DNA, 393 bp, Klebsiella oxytoca
atgacgatttatgccaaatcatttatcgcgcttgacggtaatcagcgcctcacgggcgcggtcactgcacagcttagcacttacgaccgctacacctgccacctctgcggcagcgcgctggtattccaccctgaatggggtactaaccgcccgtggttcgagcatacccgggaaaacctgaccgagaacggacgccaccattgtccgtatgtacgccctgagcctaaggaagtcttgcgggggcgcatgcttcgtcgctatgtgccggatgtcttaccgctggtgcgcaaggccgactggcactgttcggagtgtgacagcgattatcacggcgagcgctattgtctgacctgccgtaccggtgaccacagtaccgaacgttgcgcagaatga

SEQ ID NO: 201363 - DNA, 207 bp, Klebsiella oxytoca
atgaccacacctgccagccttcttaccgacaaatttgtcgatatggcgtttatcacaaaactcaccggcttaaccgacaaatggttctacaaactcatttcattgggtgaattccctaaacccattaagctgggcagaagctcccgctggcttgaaagcgaagtggaagcctggctgcagcaacgcattgctcagtcccggcagtaa

SEQ ID NO: 201364 - DNA, 588 bp, Klebsiella oxytoca
atgagctaccacgacactaccgatatcaatcttagctacgttcagcaccctacccttagccgaaagctacgacgacatcaagaccagttatttgagcgttattccaagctgctgatgctacgggtggacttctcttaccttcaggacagcgattcgcatggtgagggagatattcattcgacagtggcggatatcacgttactgattcaacgcagcggggatatcaacgggctggtgggttacgcatgggtgctggaacaaaccgaacagcatggttatcacatccacgccgcgttttacctcaacggtcaaaagcatcgccaggtctggactgtctttgaagcactcagggacacctggaattatgtgacatggggagaaggacacacacaccgctgtgagcctaaagagcattatcgcgtgcgaggagaatgggtgacctcttataacgatgccagaggccgcagaggtatgcagtatatcctcagctacctcagcaagcaggcacagaaaagcctgggggttatctgccagttgagtgaccttcctgcaccacggacagcaggcaggcggcgaaaagccagttaa

SEQ ID NO: 201365 - DNA, 1209 bp, Klebsiella oxytoca
atggcaggcctgaaggatgactttagagtgtttgacttacgccgggaagacctggcctatgagagtcctaaccaagggtggggggagatcagccatcaatatttctttgttgggtttgagcgcctggaggaggatgaaaggccagataaggatgaaaagtctaaagctagcttcaggatgttcgatatgctggacaaactttatctgaaccaggcgaccagcgatgggcaagagtttagaagaccgaagacgaagtttcgtgattctcagctaatccacagcgaacagttagagaaaaagtggaaagatgcgcttgtaaaagcgatctctgataaagagaaggcattatcttatctcagcgagaactatcggaaggttgtaagaaagcatcgtcaggttgaaatgttaactctgtgtttttatttacctattgataaagggaagaagatgcagaacatacggattaaaaaagatgactctcgtttcagactacaactcgctgaacttgaacgacgctttaccttgatgaggaaaaggataattgcggatccgctttataaagccgcctgtggttactcgcgagtaatactgataaatgccagatttgagcctttctatctagtgaatttctttttcaaaaagcatccagacagtcggatcgacagcttagtctcattagacatttacaggaaatgggtgcaatcgggtaagaaagaaaacaaatctagtgagcaggttgggtactattgctttaaggatgcatcccggccacatattccagaaggcattgggctatttattcgcaggccagaccgagtaatcgatgttggccaaatctcagacccgatctcgttggttttatcagaagaaaggaaactcgaaaacaaccgcaaagattatctggctttctttcgccttcaggctcaaatctacaatgttattccaggagctcgcaccctgacatgttctgacgattttacctacatcaacgcaaccgagaagaaacgcagaaaagccaaaaaagaagacctgaagaagaaatccaaaacagcattacctatcaatgaaatttcagctacgcccggaaatgatctccatgttaaagagggttcttacgaattgccttacctgttcgacgaatttaatgatgtcctgccttcaaacttagaagaacatttgtacggaattttaaaaaaggagaagccgtaa

SEQ ID NO: 201366 - DNA, 720 bp, Klebsiella oxytoca
atggcgacagataaaaatatgatggataaatcgccccgcgatattaaggacaaagttctggttcgccctgcgggtggatcagaagcctatgaggaatttaatagcgtacatcaatttatgcagacaaaaggaacggggaccaatgcagatgcccgccagtttaggctcgcagtgaagcggaagggtattgcaatatggcccgatgatgaccctcgcgttacaactccacatgcaagagatggcattcgttgggaggtacgtctgaaggtgctacgggctgaacacttttcttccctcagtgacgttctggatgagaccgtatcagccaaacgttttggcaatcgctactatggctcagcatcccggccagatcagatgaagtttagcaatactgttcgtcaaaactgtctaaataggtgtgttgttaccggcgtacgcaccaaatgtaggggagaagcagcccacctcattgagcactgcaaggctggttttgaccactggagcaatggtttgtggcttcgtgctgatatccaccgcctttttgatgctggcatgtgtgcggttgatcctgaaacgttacgtattcatttttctcctgaggtccttaaggaagataaagatctgagcgagcttgaagggaaacagttattggcaactaagaagccagtcaacacagactatctggtatcaagatgggaagtgttttgtcggaaattgtag

SEQ ID NO: 201367 - DNA, 786 bp, Klebsiella oxytoca
atgtgcgcatacagacccccaagcgtaaggaattttaagctattcataggtgaacttacagcagaagccgctgcagttcatatttcattattagagtccctaaaacttgaacatgaaaatgagaattattggagtgaaaaggctgaagaggcaagtataaaacttgaaggtataaaatctgaacgaataataaaaagtcagaatagactcgctattgtagcgctttatagtggatttgacttatttctggaagaaattgaatccgaatgcaaacactttggctttcagtggaaaaaaacagataaagcctctcctttagaaattttacagagcaactttactaaaacaccattaaataaaacatatttccggtatgaatctgactctgcagattattttaggctattacgcaattcaattgctcatccaagcgtggaatgcaaaaagaaagcaattgaatattataattctaagagaaactccctcaacttcgtgcaagaaaaatacacaatgatttcggctccaaatgaaccaaacaacttatcatttcatgatattaagttttggtgccaatttcttttagactttacagaacaaatggctgaacttcttgaacctacggagaagatgatttttgatagcattcctttcaatacctggagaaagtatgggaaagatcacgataagataaaaaaagttgctaaaaactatatacactcacaatactcttatgaccttgacaaatctaataaaatcatagaaagtttctacgactcactcgcttaa

SEQ ID NO: 201368 - DNA, 318 bp, Klebsiella oxytoca
atgagcccagttccaattcggatcaggaaccaaactattattctcgatcttaaaaaaactgaccatgagatgatggcttccctgtatcgcctcgtcatcatcgatgttggccagtacatcaaagtgcttgtagcctgcttgtccattctcgaacatttttatcttcgtgccgtttctgaacatccacaaagaatgattatcagtggcatcagtgacttgccagttatattcgtcaattttccaattaaggtattgtttgatatcagacttaggtttgagttttttgtcattactaaacaattatattgcagagagtga

SEQ ID NO: 201369 - DNA, 888 bp, Klebsiella oxytoca
atgaaacatccctcgggctacgcccttattcgtcgccatctccgccgttatccaccttcactgcgtcagcatcttctccgggagctcaaccggctggtcacctatgaacctgtgattggcattatggggaaaacgggtgtcgggaagagcagtttgtgcaatgcactgttccgcagtgaagtctgtgtcgtcaacgcggtggaagcctgtacccgccagccacagcgcgtacggctacgtttcggtaatcacttcctgacgatcattgatttacccggcgtgggtgaaagtgttactcgcgatggcgaataccgcgagctttatcgtgacctcatgccgcagcttgatatggtgctgtgggtgctcaaagctgatgaccgtgcttatgcggttgaagaacagttttatcaaggtgtttttgcgcagtactgcagaacgctgccgccggtgttgtgggtactcaaccaggtggacaaaaccgaaccagcggaacggtggaactggccgtccgctcagccctcggcattacaggcggaacgaattgcgcagaagcaacaggcggtagcccgtcagttggggattgcggagcaggacattcttcccatttcggtccgggggcgttaccgtctgtcccgactggtggaggccatgattacccggctcccgaagcaggcccgcagcccgctggttccccacctgtataatggatatcacaccatcagcgtaataagcaccgccagtagcagctttggcgatgctgtggtggagattatcgataagattattggccaggctccgttgccgcaggtggctcgaagtgcgctgcaggccgtcacgcacactgtcgcccgcgcggcacgctccctgtgggggtttttcttcggttag

SEQ ID NO: 201370 - DNA, 159 bp, Klebsiella oxytoca; identical to SEQ ID NO: 153649

SEQ ID NO: 201371 - DNA, 1134 bp, Klebsiella oxytoca
atgtcagactcaataatcaaaagctatggtgggatactccggtttggagcaggattcagcatcgttctgatgacgctcactgccattttcatctggttttatcttacgtggattggccgtctagatatatttcttcaagctgtcacttttaacgaactattctccttctctggaattatatttttaagtagcattatattgttctgtggcgtactgtttctaccttgcttgttaggatgcctcgttatacatagcaatcaaaataatacaaagtcaaagcaaaagaaaataattctagcacgtgtttatgctgggagctcttttctatgtataacttttgtcgctttaatatctttatttgacatagactcaggagaattcatcttcataaccttgatgttattgacaggcattgttagtacttttattgcattaattcttcagagaaaatacatacacactcacctgaagtcactaaacacaataacgaagataaaagctctactattagattattcaatgaaaccctttctattgggaatcaattgctggctagtagtcttcccaattacattattgagcaaattcttacacgtcgaaaatggaatggatgactaccagcaaacctcgttattccttgtatatggcacattagtaataataatcaatatattaccatgcatcttttttttacgacaagatttctctagtggatggtttaaacctctgagaaatactacaggtgttgtttgcgctttattactactgtcatcatccttcatgcacgtcattccgttactgattgtcaacttggcatttcggatgactgggatgacaatcatggaaccaattacacttgctgtcaaaacggatgaaattccttctgaaatgcttcatagcagaggatgggagtatcagctatcagaggatagaaaatttagcttagtatcaggagttatctttttttcatacggcggagtttatcttgtctgtcctaaagaaacgactcaaaaatttcgtgaaagcataatcttcgacatactgtctgatgaaatagaaaaaaaggccagagaagaaataaaaaaatcagcccagcaatgcattgcagtagataaaagtgctttaaacttttga

SEQ ID NO: 201372 - DNA, 1563 bp, Klebsiella oxytoca
  misc_feature (1461)..(1470): n is a, c, g, or t
atgcagacaaatcatgaagttaacatcatatcagcaatggaaagaagtatcgttaactcagcactttgggctgctgcaggagatgctttgggctggataaccgaactttctcatggagaaagcggggttaagcgtcgtataggtactactaaggtgtcccggacggttccctgggaaagagtaatcggtggtaaaggaggggctaaagcaaaactgcctgcaggtacgtattctgatgatacccaacttcgattagctgtatctcgttcgatacgagaaaatggtttttttgatgtagagagctttgcaaaaattgagcttaccgtttggcttagttattctcttggaggggggctcggcaccaaagcagcagcaagaaatttaaccaagagatcagtgagttggtttacaaacttttttgaaaataataagcaaaattatttttatagcggcggaaatggcgcagctatgaggatacaaccacatgtatggagttctttcaataaagaatacagagaaaatctctatctcaacattctaaaagattcgttagtaactcatggacatccgcatggattttgtggagcaatatttcatgcaatggttctttcagatactataaagaataaaagaatcccgtcaccagatgcttggatttcatatgcaatgcaattatccatcattccagacatcgttagagatgactcccaacttaacactttttggttgacctcttgggaacaaaaaaataattgttcgctgagggatgccatcgaaaaagtccaatcagaattgatttctgacatcgaaaaaatagatgggttagtaaaagtttcaggcaatgaatgttatcatgaaattctgtctcgcttagggtgtttaacaaataaattccgtggttctggattaaaaaccgcattagcatcaacagcactttcgtatatgtttaaaaacataggggttcaagatgctttaatttgtgccgctaatgagttagatagtgatacagacacaattgcgacgatgtgtggtgctatattaggagcaacagctgctcatactccagactgggatattcaagatcaaaactacatacaacatgaaaccttaagattgctaaatgttactgcacaggaaaataataaatctttcaattatccagacgttggtaattggaaccctccggtgaatcaagttgatactattggatattataataatgaacttgccattgcaggcttaggttatattacaccaataaataatgaagaatttcattctaatgatgcagtatggcaatggtattcattaccatttggacaaacgattttagccaaacgtcggaaaaatataactcagaatttaaccttcgagcaatttccgagggaattggaacaatctcatattccatatcgagatatagagtcacaagtaacggaaaaacaggataattcattatcnnnnnnnnnntgcatagattccactcaatccgtccaattggcagtaagctttactgccattattgcgaaagctaaaatagtaagacaacgtcggaagaactga

SEQ ID NO: 201373 - DNA, 465 bp, Klebsiella oxytoca
atgcagcgtcgagtgttttccgaggtggtcaggaagtgccaagatgttgggggacgagcaatgagcattcactcaagacaggccgttccggatgtgctagctaccttaaaagcgttcccctctcacggaattcctattttacattggttcactggaagtgttacggaattgagggatgcttcagcacagggatgctggttcagtattggtcctgctgctttcaactctgccgcagggaaagctcttgctactaagctccctaaagacaaggttgtgccagagagcgatgggccatttgctcaatttgacaatcgaactgtgatgccatgggatttcaatattacagttcgattgctgggtaaggcgtggtcaatgcctgaaaatgatgtaaagctacaattgttaagcaatactaaaacgttgcttggacagatcgggggcaatcgaattgctctcaacttctaa

SEQ ID NO: 201374 - DNA, 486 bp, Klebsiella oxytoca
atggagtttggaaatctgattaacctttcacaatcatctctgtgcaaagcattgaatatcgcttccggtaatatgtctaacatcttcaaaaaactcagacaaaaaggaatactcgtcgagcatcatggacatctctatatcaactctaacattttcgcaaaagggatgagccatcaactggatcagaaacgtaaagaacagctgagcaacgctcgcaatctttgcgcagaaatagaacagtatccagaaagttatccagctatgtcaaaaagtgaaagaagaaccctttccttagaaactgaaaccaaagaaatctatactgacgcatttgttttcagtaagaagaaaaagaataacgctgttcctaataccaacaatagcatacatattgataaaccacgaaaagtatataaaagaacaaaggaaaatgaggaagaaagaagaaacgctgttgacgcagactctcatatgcagaaagtatcctga

SEQ ID NO: 201375 - DNA, 744 bp, Klebsiella oxytoca
gtggctcctaagcaacttattgaagttgaagtaaaaatgctacgtaacctgttacctcagcctccctcttgtcatcctaattaccaatttagctttattgatctattcgctggaattggaggtattcgtagcggatttgaatctataggaggacagtgtgtatttaccagcgaatggaacgagcaagcggtcaggacatacaaagctaactggtattgcgaccctaaggagcatattttcaattccgatatccgcgaaattacattgagtgacaaggctgaagttcctgaacaagaagcttatgaaaatattgacaaaaatattcctcagcatgatgtgctgcttgcgggattcccttgtcagccatttagccttgcaggcgttagcaaaaaaaactctttaggaagagctcacggattcgaatgtgatactcaaggtacgctattcttcgatgttgctcgaataatagcggttaaaaaaccatcaatatttgtgcttgaaaacgttaaaaatctaaaaagtcatgacaaaggtaaaaccttcaaagtaattcaagaagcattagatgagttaggctacgatgtagccgatgtagaatgcacaggctctgcagatcctaaaataattgatggaaaacattttcttcctcagcatcgtgagcgtattgttctagttggctttcggagagatcttctgccatacgtgcttgagaggcttgctgagattcttccatcaactgtttga

SEQ ID NO: 201376 - DNA, 249 bp, Klebsiella oxytoca; identical to SEQ ID NO: 113369

SEQ ID NO: 201377 - DNA, 510 bp, Klebsiella oxytoca; identical to SEQ ID NO: 178030

SEQ ID NO: 201378 - DNA, 216 bp, Klebsiella oxytoca
gtgggcgaaggaccggggatcgcgaccggcgtgggcgtcgctctgtttgataaaaccggcagccagatcccgctcaatgcgccgccaggaagctggtcgccgctgcacaccggcccgaccaccctgcattttgtcgctaaatatcgagccaccgggaatcaggtgaccgggggagcggccaacgctcaggcatggttctccctgacctaccagtaa

SEQ ID NO: 201379 - DNA, 1377 bp, Klebsiella oxytoca
atgccagttctgggggttaataattatagcagccaggttgttcaaagaatcgatccgaccaagccaggtcaaaatatacaatcattattgcttgcattagaggcaatagtaccgggattatgtacgaagattgaaagtaattatcctgacttatatagtggttttaccattaatactaatgcaaaatattcttccaaaaaaagtgaagaaaatattcagatagaatctaccggatcaatagctgaaagtgattttgatccggaagaagatagagaacttgaaatagaaacgccgtttgatccttctaaaattgatataattgttaagcctatgacaattggcagtttagaagataggttagataataatgaattagatctgactccagattttcaacgtcaggctaatctatgggatattaaaagaaagtccaggttgattgaatcaatcttattacgtatcccattaccgtcattttactttagtgaagatgtggatggatcatattcagtagtggatggactccaaaggctttgtacaatctttcatttcaagaatgtttcacttcttaattccgttacagggtctaatctggcaccacttgaacttagaggcctacagtatcttaatgaattggaaggtaaatcatacttagaattggacagaaagtttcaaagaagagtagcggaacttgaaatcacagcgaatataatacgtgccaatactccctttgctgtcaagttcaatgtctttgcgaggcttaatcaaggaggattaccccttaatgctcaggaaatacgaaatgctatctttccaggtgaatggcgttcaagaataagaaatctttcggatagtgatatatttataaaagttaccgaaaacaaagttcaaaaacttcgccagcaagatatggaattggtattaagattcattgctatttggcaattgggtagtccttataccagaccagctaaccagacgcttgatgaatttttaaatatggtagttgaaagcgaattatcaaaatgggatggacaaagatggtatgacgccagcaatgccttttataaagctttagatgcggtttatgcaatccgtgggaaacatgcattccgtaaaagtgttggattacaatcaagaggtccaatcaatagaggtttatttgaagctgagatgattgtttttggttcattagatactttagaactagattttgccaaaaaaaatagagggttgcttgaagaatttttatcaaaagcactaactgaagatagtgattttattcgcgctttatcattcggcaccggttcatcggaatcctctaatataagaattagaaccttagcaaaaatatttaaagaggcaaagaatgcttaa

SEQ ID NO: 201380 - DNA, 567 bp, Klebsiella oxytoca
  misc_feature (487)..(496): n is a, c, g, or t
atgcttaattctcttgagttatataactttaaatcagctaaagagttgagtttaaaactcggttacttaacagttttaactggtttaaatggttctggtaaaagcactgtattacaagcagttaccttattaaaacaaagtttgaacaacgaatctttaaattatagtttatcccttcaagggcctatcataaaccttggaagaagcgaagatattcgatttgaaaattctgaaacagataatgttacttttgccgttaatacacctaatggtcgtattgtgttaaatattccgactattgaaggaagtgacactcttcccttgagttacgagggagatataaaagacttaattgctcaatttgcggatggttttcagttaatacaagcggatagaattactccggcaagccattacaatcaagccagctcttttgaaagggcttccggctggttgggatgtagaggggaatttactatcgattatnnnnnnnnnncgattatcttatccagcggggcgaaaataaagtatcgcaaaagagacatttttcagatgaatgcggattaa

SEQ ID NO: 201381 - DNA, 945 bp, Klebsiella oxytoca
atgactaatacagtgttatttatggatgatgcatctaaatttattggtgatttagataaagctgccgctgaaaaactcgctttatcgatgatttctttattaagaaaaataaagaaaaaaaacaataagatttctataaatttgaatgtcccaattggacaatatcccatttctgataactgggttttacagaatatactaggtggtaacggttatagagaagaatgggattttatacggacattaaatagtcgctcacccatttcctcagaaattgaggaactcattgtccaacaactggatgataaggattttagaacggctaatgaaaacaaaaaatccattgctttagcttatgcttcattacttgatagcgcaactattagttatgagcttgaatctgattggtctgagtcaatggtcaatgtcatatgcgatactcttgaggatgatggtgaaattagttcactgaattatagtgtaaaaaatatatctttgcctgatcatgtaattactcatgaagagtggttgaaatctttaggccttgttgacaatccctctgtagaagatttctggaatgagcgtaatgatcgtttcccgatgttacgttttctagaaagaacaaagaaagatttattagatttatatggagcaagcgtgccatatactcaagctataaatgcaattttatctctttcacaagattgtgaaaattgggatagtgataaggcttggccagatttttcaatgtatgcaactaatgaatctgaaacaaggcggaaattatgttggctgaaagatgatgctgatggtgagaataaatgctttggctggcatgttcgttttactggaagttttgcaggaagaattcatttttttgttgacccaaaaagccggaaaataattattgggtatattggcaagaaactttcaaagtcgatatga

SEQ ID NO: 201382 - DNA, 1122 bp, Klebsiella oxytoca
atggtccatcccaatgggtctaaatactggcgattgcaatatcgtttcgatgggaaacaaaagatgttggcacttggtgtttacccggaaatctcattgtccgaggctcggcagcgcagagatgaagcaaaacggcaagtggctaacttcattgatcccagtgagaagaaaaaagtagagaagcaggcgcgtaaagtcactgtagaaaatacgttcaaatctgttgcactggaatggcatgaatataagcgacccaattggtcaaaggggtatgccgaagatctgatggaggcatttgagaacgatatttttcctgatatcggcaaacgaccaatagcagagattgaaccgttagaggctctcaccacactacgcaaacttgaaaagcgtggcgtgcttgataaattgaggaaggttcgtcaagcctgcaaacaggtttgcacttatgccatcgttacgggtagagcaaaaaccaacccctttgccgaacttgctagtgccttgactacggcgaaatcaactcactatcctcatctactgtctgaccagttgccagatttcttgaaggctttagaggcttattcgggaagtccaataacacggcttgcgacgcgcattttgatgctaacgggggttcgtaccattgaacttcgtctggctgaatggaaagaatttgattttgacaagcgagtttgggaggtcccggtcgaaaggatgaagatgcggcgtcctcatttggtgcctttatctgatcaggttatagaggcgctgcgtgaactccagatgataactggcaggtataacctggttttcccgggacgtaacgacattgctaaaccaataagcgaagccagtattaatcaggtactaaaacggattggctatcatggaaaagctactgggcatgggttcaggcatacgatgagcacgattcttcatgaggaaggatttaacacggcgtggattgaacttcagcttgcgcatgtggataaaaataccattcgtgggacttataaccatgctcagcatttagagaacagaagagggatgctgcagtggtatgctgattatctagaatcgttagcaaacgactctgcgttacctctcagaaaagaggcgtag

SEQ ID NO: 201383 - DNA, 546 bp, Klebsiella oxytoca
atggagttatggatatttttagcggtgatttatgttatttattttttgtttttcaaaaagaaaaagcataagtctgcaggatcttcagtttccagaaccgtcaaagcatcatcaaaagcaacagaatggagcgctgataccaagaaaaaagagacggttgtgcaaaaagatgatagtgaagatgacaacctggcaacttttacactgagcagcgggcggggtgtcgaatttcgggtgacaaccaatcattaccggaatacctcaaagtcagcaggtgcattagctcgatgggttcttccgggtgagatgataactgtagctggtgtaacaatcaccggtggtcacatttatctggggcaacgtatgaagcccactggacaggagctaaacggctattatgacgatggaagtgaggcatcgttaattgatgacacatgtaagatacaacccacttcttatctttacgaagacagttcattaggatactggccaagtttttcctctctttccccagaagcgcgcggtgcgtatgaagtggtttactga

SEQ ID NO: 201384 - DNA, 573 bp, Klebsiella oxytoca
atgcaaaacgaattttactggataaacgaaccggccaaatggcatagcgagaacaatacgttatcggtcgtgaccgacgaccataccgatttctggcgccatacgtggtacggattcgagcgtttctcgggccacatctacgcgacagacgcggcaggtgatttcacgtttcagacaaacatccgcgctgatttcagcacgctctatgaccaggcggggatcatgctgatgtcggacgagcaacactggctcaaggccgggattgaatacaatgatggggcgccggccattggcagcgtactgacgttacaggcctccgactgggcaaccggtatcttcccgggtaacccccgggagttctggcttcgcctgacccgcaagggagacgcgttgcggttacagtactcagcagacgggctgtcgtggcctttgctgcgtttatgccattttccgtcggggccagtgaaagtcggtgtcatgtgctgcacgcctgaacgcagcggcttagccgtcgagtttagtgatttcagtctcgctccggccatggataaagcgctgcacgatctcagctga

SEQ ID NO: 201385 - DNA, 996 bp, Klebsiella oxytoca
atggcgtctttaaaagatgtggccaaactggccaatgtatcgctcatgacggtttcccgggttctcaatgacccgaaacgcgtaaagcctgaaaccctgtcccgggtgcaggaggcgatcctgcagttaaattacgtgcctgacctctcagcccggcaggttcgtcgtgtcggctcccggaacaaaaccatcggcgtgctggcgctggataccgtcaccacccctttttcggtagaaatcacgctgtctatcgaagaaaccgcacgggcgtatggctggaacagcttcgtggtgaatatgtttaccgatgataatcctgacgatattgtcgacctgctgctcgcccaccggcccggggggatcattttcaccaccatggggctgcgtgaagtgagcatcccgccccggctactggagcacccttgcgttctggccaactgcgagaacacgggagaaccggttgccagctatatacctgacgatgaacaaggccagtatacggccgtacaggccttgctggcggcgggatacagccgccctctctgcctgcatttacctgtcaaccatctggcgacgcgtcgccgccgtcgggggcttgatcgcgcctgccgtgaagccggtatcgatcctgatacgcttgagcactgctatatgcaatttggcgatgagcactaccgggatattccggagatgctgctggcgcatatcgttcaggggaaaccgcaatttgattcggtcatctgtggtaacgaccgtattgcctttatggtgtatcagacgctgttaacgcaggggatccgaatcccacaggatattgccgttcttggctacgataatcttgtcggcatcggaaatttgtttttacccccgctatccacggtccagctgccgcattatgagattgggcgcttaagtacactgcacattatcaatggcgacacccaccgggataaggtgctggtcgagagcccctggctcaggcgcgaatcctgttga

SEQ ID NO: 201386 - DNA, 1239 bp, Klebsiella oxytoca
atgaaaaaacggcctactcgaagttacatgctgctcagcgctctgctgttctttttctttgtgacctggtcctcatcaagttcactactctcaatctggcttcaccaggaagtggggctaaaggcatcggaaaccggcattattttttccgtgttatctgtctccgcgctcttcgcgcaggtctgttatggctttatccaggaccgacttggtctgcgcaaacatttgttatggtttatcaccgcgttgttgatcctctccggcccggcttatctgctttttagctacttgctgagcgttaatattctgctgggcagcgtattcgggggcttatttatcgggctgacgtttaatggcggtatcggtgttctggagtcctataccgagcgcgttgcgcgtcagagtacgtttgagtttgggcgggcacgcatgtgggggtctctgggctgggcggtcgccacgttttttgccgggttattgtttaatatcaaccctgaccttaacttcctggtggcgtcatgctcagggttaatcttcttctgtctgctggcccgcttaaaggtggccgcgccggcaagcatggagaaactcgaaattggcgctaaaaaagtttctctggaagacgccctgcgcctgctgactctgccgcgcttctgggcgctgatattcttcgtggtcggaacctgcatttacggcgtatacgatcagcaattcccggtctatttctcgtcacagttcccgacattacgagaagggaacgagatgtttggctatttaaactctttccaggtctttctcgaggccgcgggtatgttttgtgcgccgtggctggttaatcgcattggcgctaaaaatggcctgatattcgcaggtatggtgatggcgctgcgcatgattgcttccgggctggtggaaggccccttgcttatctccattaccaaactgcttcacgcggtcgaactgccaatattgttagtcgccatatttaaatacaacagcctgaatttcgacaaacgtctctcctccaccatttatctggtgggatttgcctgcaccagctccgttattggcaccgtcttgtccccgctggcaggctttagctatgagagatttggcttcgcccaatcctatctgatcatgggcatcatggtattcagcaccacgtttatttccattttccttttgcgctcaactaaatcctcatctgagccatcttttctgcagcaaaacgctgtgtaa

SEQ ID NO: 201387 - DNA, 1434 bp, Klebsiella oxytoca
atgacatccttattagaacaggctgaacaggtacttgaaaaagcacaatccgggattaatccgcgctggtatccgcgctatcacctcgcccctcgcgcaggctggatgaatgatcctaatggcctggtatggtttgacggctggtatcacgccttttatcaacaccatccctattccccgaaatggggtccgatgcactgggggcatgcccgaagcaaagatctggtgcattgggaacatctgcccgtcgcgctagcgccggaaggcccggcggataaagacggctgtttctccggctccgccgtggtggacggcgatacgctggcgctcatctacaccggacataaatttcacggcccgtcggacacagacgacaacctctaccaggtgcagtgtctggcgaccagtcgtgacggcattcattttgaacggcacggcagggtgattgatacaccgcccggactgcatcactttcgcgatccgaaggtgtggcgcgaaggtgagttctggtacatggttgtcggctcccgcgtggaaaataccggccaggtgcgcctgtaccgttccaccgatctccgcgaatggcatgacgaaggtattttcgccgaggctgatgaaggcaagggctttatgtgggaatgcccggatttcttcaccctgggagagaagcgtgtcctgatgttctcgccgcagggcatggcggcggaagggtatcactatcgcaacctgttccagagtggctatttacttggggactggcagccaggtcaaccgttcacccacagcggacaatttactgagctggaccacggccacgacttttatgccccgcagagtttcgtgaccccggatggccgacgcattgtcatcgggtggctggatatgtgggaatcaccgatgcctgaacagcaagatggctgggccggaatgctctcgcttccgcgcgaattaagccttgttgatggccgtgtgagaatgaaaccggctgccgaagtgaccgcgctgcgtggtagctattatcccacgcccgtccgctgcctgaacaatcagaacgtccttgtcgcggcagatgccgacgcggtcgaagttcagctggcatgggatttgagcgcatcgacggctgaacagtttggtatcgcgttgggcgacggactgagaatttacgtcgacgatcaggccggacgtctggtggtggagcgtcgctatccgcaatattcgctggaaggcacgcgcagtattccgctaccagcggacagcgttctgtcactgcgaatttttattgaccgctcatcggtggaagtttttgttaacgatggtgacgcttgcttaagcagtcgtatttatccgcagccgggcaagcgcgatatttcattgtttgcaaatcagggggtggcctcattatacgatgcgggatactggtctttagataaataa

SEQ ID NO: 201388 - DNA, 1266 bp, Klebsiella oxytoca
atggatgaaagcgtaatacctcaaaattgcattacctcgaaagataaaaacatatttgttccaggaaaacagacgctggcattaatggtgacattagcggcatttcctgccattgctgaagacgttacaggaaactatcaaagctattttcaggatgaatcagacaccaacggtacgagtgtatcatcagccaataacggtaatgaacaatcgtcccttcgtgcttcgtcttctccggttgctgcaggtcaaaaacctgaactcacgacctcgtcaaagcccgtgacgttatcggcgcaaacggagaataaaaaagcggaagtgaaaaagcgtcctaaaggggataaccccgaagacgtcagtctgttgcgtttaaggcaggaagatccgccggttcactggaacagtatcggtcgtaatatggaagtgggtggcctgcacggaaacattgggtctcagatagaaattgacgatgttcgctggagcaataataagaaaaacagcggcaagtttaaacttgccaccattcaggcttttttaaggcacgatgaattgcctaactggtatttcggtttctggaatgccagagaagacagttataaaggacagttcagtaatcaggactatcaaggcaccaataccatcaatgaattttttgtgggccatatttttgaaacctggcgagggaatatcggtacggaagttatggtcggctccgaaacggcaacgaaacgctggaaaaaccggttcaaagtctggcaggacctgcgactgtccagcaaatggagcctggccggatacgcgtatggcgaataccagcctcaggggaacgaaccggggaatggcgatctggaacagtacattttcgaaattgagccagccattcaataccgcgtgaatccggatctcggactctatttgcgaccctattattatcataaccgtcaggagcgtcagagctggggcgatattgtcgaagaagaatggaaagtcacggccggactctggcgaaactggtatccattattaacctccctgtatgttggatttggccaggacaaaatagataacgccagcaatgccagcgaagttttctatgacggtcggtataagtttatcggtggcacgctgagttatccggtatttggtgaagtgcgattatacggtgaattcaaagcacaatttacgaaagaaaccgggctttggacatcgaccggtcactcatggaacccgtttaccgtggttggcgtgaattataacttctga

SEQ ID NO: 201389 - DNA, 1494 bp, Klebsiella oxytoca
atgaaaaaattaatagttgcggcatctgtcgcgctgcttgcgctttcactcggcaataatcctgcctggtcgcagccttcgaaagaaacattacagaataaaagtatcacccatattaatggctttttcccgcgggttgacggttcatttgtgggcgaccctatgcccgtttttaacgatggcaaatttgatatttattatcttaatgatgtccgcggcggcagcgatttgggggtacatgcttttcatctcttgtcgagtgccaacttgtatgattatcagaaccattccgaagtgatcccttacgttaacgacgttgacgatcctgaactgttattgggaaccggttcgattattaaggtcggcgatacctggcatgcctggtacaccgcacacaatgaaaatgtgttcccggttgagtctattatgcacgcgaccagtaaggaccgccttcactgggtgaaacacccgcaggacaccattttacccggcggtaactatcggggtaatgatttccgggaccctcacgtcgtttgggttgaggaaaagaaagaatactggatgttaattactacccgcagtaacggtcgtggggttattgcccggtacagttcaacggatttaacgcactgggaagatcgcggcgtattttttgataacgacaccatcaccagcaatgccaacctcgaatgcccgacactggtttacttcaacggacgctggtatctcagctttagcgaccaatggccgttacgcctgacacaataccgggttgcggataatccggaggggccgtggcggaaactgggcaattatgtggtcgacggctcgggtttttacgcgggtaaactggtactcaaaaacgatcggctgtttgttttcggctggatcccgacgaaagccggtaaccgtgacagcggcaacattgactgggcagggaatctggttgctcatgagctcaccgcagatgatcagggccagctcaacagcatcctgccccaggagcttcagcaggtcatcagtgagaatcctggtccggtgaccaccttaacgagcactaaaacgcttaaaacggccacgtcgttcggccccttacagtcggcgctgtacccggccttgcctgaacgcggtgagttgagcgcaaccatcgatgttccttctgccggaatggtgatgagctttggtctgaccgacgacagagtcagtgatgcgatgctgaacgttgtattcaataagagcaaaggaaaagtctattttttcaacgcgccgctcgcgtcgattcatcaggctaacgcggaatcctgggtagatgttccgataggggaaaaaattgagttacgcgttctcattcaaaactcaattgctgtcttttatataaacaataaagcggcattcagtacccggatgtattccatgcaggagaagccgtggagtattagcctgcctcaaaacgaccattttcacgcgacgttgaaaataaaagaaatgatttaa

SEQ ID NO: 201390 - DNA, 1014 bp, Klebsiella oxytoca
atgaaaaactatcatgccctgtctgttatttttgctcttctgtttcccacgctggcgaatgcgagcatgagcatcatgaaggacccctcgggaaaggttgttgccgtggacccgtggtcctatctggatgaagaggttatgtggacctcagcccgctcctccaatcctgccggtggccgcgttcatggccaactgaagatgaaatatgccattgaagacaataactggcgtaacagccatttccacaacgggaatgattcactgacgtttgtacaaggcgtgatgcgacacgatgcgttacccggttggtatctggctttttctgagggcagaaccacccactataacgggacgtgggaggatcagtcttaccttagccaaaaccagtggactcagttgatcatcggccatgaatatttttataaacgtctgcgctatggctgggatgtcatggggggaagcgcttcaatcgaggaccgctggcaaggccgcgttaagttctttaccgatcttcgggtcacggacaatttctcattctttaactatttgtatcagcagatcgatcaccgccgcagcggtggatcgcaaaatgaccgcgacgtgcgttcatttcagattgagcctggcgtgcaatatattattaataacaccaccggcgtctggttccgccagcaatttgcctctgccattttagacagggcgcaatggggcgatattgacgaaaaaagctggaccacatctgtcggcgtctggcgcaactgggggaaattatccacaacgctcagcggcgggtatggccattataagaaatacaatgcgcagcctgaagatggcgaagtcttccagaatacccgcaaccgcttcctgaaggtatcggcgaattatccgttgacctatcgttttaccttgtccggagaagttactggctcgttgataaaacaggacggaagctgggtcacccacggtgaggctattaccaccgaatataagctgatgctggattataacttttaa

SEQ ID NO: 201391 - DNA, 951 bp, Klebsiella oxytoca
atgaatatctggactcttggcgatgcagtggtggatcttctaccgctttcagacatgcaatatcaggcctgcgcaggaggtgccccgttcaatgtggcaattggcgctgcgcgtctgggctgccagagtggttttattggccgggtcggtgaggatgactttggttattttctgaagaaaacgctgtctgacgcaggcgtttcaaccgaaagtctgcagttggataatcagcacagaaccagcacggtattggtctctctgggccgcgctggcgagcgtggatttacgtttttaaccaacccctccgcggatcaatttttaacgcccgatgcgctgcccggttttagcgacgatattctgcacttctgctctctggccctggtcgccgaaacgtgtcgtcatacgctcgtcaccgccatcagccatgtaaaacagcgtgggggattactgagtttcgacgtgaatttacgggagcaaatgtggcccgataagcatgaaatgctcgagacggtgcgtcatttcgccgcccaggccgacattcttaaactctcggaagaagaatggcactggatgacaggctctcacgatttttaccatgcgcttaatgctctcaatgctctgcccgcgcaacttaaagtcgtgacctacggtgagcaaggtgccatggtgctgtggcgcgacagcgttattcatttcgacggttataccgtcaacagtattgatacaaccggggctggcgacgcgtttgtcgcagggttgctggcctggattgcacatcgcgggatgccgcagaatgttgaacaactccaccagtccatggctcaggccagcgcctgcggtgccctcgcgacaacgcgcaaaggggcgctgaccgcgctacctgataccaacgcgctcaatacctttatcactcgattctcgctaccggattacgaggtgaaaaagggctaa

SEQ ID NO: 201392 - DNA, 1002 bp, Klebsiella oxytoca
atgaacgttcaaaccatcctcaccggcgaccgcccaaccggcccgctgcacctgggccatttcgtcggttcgctgcgccagcgcgtggcgctacagcagacgcataaccagtatgtattgattgccgacctgcaggggctgaccgacaacggcagcaacccacaaaaaatccgcgacaacatccctgaagtgctcgccgactacctcgccgccggcatcgacccgaacctgacgacactctgcctgcagtccgccctgcccgctctcgccgagctgacaatgttgtatatgaacatcgtcaccgtcgcccgcgtcgagcgtaacccgacggtgaaaaatgagattgcgcagaaaggctttgcccgctcgctgccggtcggttttatggcctaccccatcagccaggcggcggacatcactgcgttcaaagccgagtgcgtccccgtcggcgacgaccaattgccgatgattgagcagaccaatgagattgtgcacaagatgaacagcctgttgcctgccccggtgctgcgccactgcaaagcgatgctcagcgacaccggccgcctgcccggcatcgacggcagcgccaagatgtcgaaatcactgggcaacaccctgcacctttctgccagtgaagagacgattcaccgtgcggtcagcgccatgtacaccgatccgaaccacctgaaggtgagcgacccggggcagattgagggaaacgtggtgtttacctacctcgacgcgtttcatccggacaaagccaaagtggcagcgatgaaggcgcattatcaggcgggcggactgggtgatcgggcatgcaagaacgagcttgaggcgtgcctgcaggagctgattgcaccgatgcgagaacggagggcgatgtacatgcaggataaaggggagttgatggcgatgctgaagcgcggcacggaacgggcgcaggcggtgacgcaggagacgctgaaggaggtgaaggttgggctgggggtgccggtgttttga

SEQ ID NO: 201393 - DNA, 951 bp, Klebsiella oxytoca
atgctgcgttattacgagcaggtggggctgatccagagtctgcgaaaagatgactatacatatcgagtatatgacgaaaacgctgtaatccgtttacggcaaataataattttgcgtaagttgcgtgtatcggtgaaacaaattataagtatacttaataactccgatgcggtgcaggttgtagagatatttaggcgcaatataggacagctcgataatgagattacggcactatctaccgtaaaatcaatattgatgcgcttcgtagaagatattaataaaaaaaccgatgtaaatttaaagttgcttggtgatgaagccttgctttctattataagttcccttcctttttctgataataaaataaataaagccaaggagaagtcatcaatagtagctttgaacaaggtaggtcaaatgttggacaaaatgatggacaaagatgtgcgaattatttatttgccgccaatgactgttgccgcttattgtgcaagaggtgagggatgtgaggaaaaggcagggggggtaatcaatcagttcgtcatggaaaccggcttgactgaaatcaaaccggatttacgtcagttcggatttgactgctctgatggcaagacaggcgtaggagagccgtcacaggcctatgaggtatgggtttctattcccagtgatatggccgtacccgagccacttataaaaagaaattataacggcggaatgtacgcagcacatgtattgagatcctgggattttcaggattggcgtctcttgaaggagtgggtcaattcaagcgataaatatgataacgcatggggtgagcttcgatggacgccggatgaaacaggttcggggcagggcttggaagaacaattaaactattggggcaatgctaatcatggatttaaaatggaggacatgcagctagatttattatttccgattaagatagcgtga

SEQ ID NO: 201394 - DNA, 363 bp, Klebsiella oxytoca
atgcagtttttaactgaaccgactactaagtcggttggctcttgcatcgtcccgcagcactgcatctctaccggcatacagtgcagtactgctcacataacggatcaggacaacgaacggttttatcaactgtcgcatgatcagactgaatacagtgatgcggagtggattcactttaccggaacgggctacttgctccggctcagtgcctggcaatacccagtgctccggttgaaacgacttggtatgtcgaaagcgtgtcgtagattgatcctagcgctgtgccatcagtatgcgatcacctccatccatttcgatgcggctggagatgtcttgcctggagtagagcatttcgattggtga

SEQ ID NO: 201395 - DNA, 207 bp, Klebsiella oxytoca
atgcctgtacctgtggcacgcctgaatagcttatggcgggaactgggaaacatggccgtcagggaagaagaggggacgctggtcatcagcgagccttttattcacttccccgccggaacacctgttttcgatatctggagctggtttgaagccagtaatgaaggtttcgtggttgcccgtgaactgtacgggctaaatactcattag

SEQ ID NO: 201396 - DNA, 372 bp, Klebsiella oxytoca
atgccatcaactgacttacagctgtggggattacgtcgcaacgactcaccgtgctttggcgcaaggcttgtacaggagaagagtcgtctgcactttctggctgaccgtgccagttttaacggtcagtttaccgaagagcaggcgcggcgactcgaccaggcatttcccctgatgatgaaacaactggaactgatgctctccaccggtgagcttaatccgcgccacccgcactgtgtcaccctttatcacaatgggctgacctgtgaggccgatacgctggggagttgtggctacttgtatctctccgtttatcccactccccgtcagcataaaggaggccgggatgcctgtacctgtggcacgcctgaatag

SEQ ID NO: 201397 - DNA, 1620 bp, Klebsiella oxytoca
atgcggatatggctgatgcgcaaaaagcaaaacaccacaccatccactggcgaaccagacgtcgcggagggatggctgcatcctaaatccgcgcaaacactactggctgaaactacccgccaacagttgatccagtttattcggcagagcaccgcccttcccgcctcactgtttgaacgcttctggctgataccaatccaccgcttcgcagaactggcgcagttgtttccggcctcagaaaaccaccaccattcccacgcgggcagtctgctcaatcacagccttgaagctgcctgttatgccgcacggttgcggcagagttatctttttccgcctgatgcagcgccggaagatcaggccgctcagtccgaacgctggacaacggtcattatctacgccgcattgctgcacgatctgggcaaactcatcaccgacatcgaagtggaagatattagcggacaacgctggtttccatggcatggcccgctgacccagtcttatcggtttcgctatctgccgcaacgtgattatctgcgccatccggctgcggcagctcttctgctcacccagctactcccaccggaaagccttgactggctcgccgccgatgccgctgcattatccactctgctgcactgcctgaacggacagtatcagtatgccgggctggcgggtgaactggtgcagaaagccgaccgggcgtcggtggcatttaatctcggcggcgatccggtcaaggctatccatcgtccgcaaacctcactgccgcagcaaattatcactgccctgcgcgacctgctggcgcatgagtttcggctcaataacccgaacggcggatctgacggctggctgacggaagaggcgctgtggctggtcagcaagaacgctgccgatgctgtccgtggctggttgctgcgccaggggattgacgccgtaccgcagcataacgtgcggctgttcgatgagatgcaggcacaccagttgctcattccctgtgaggacaaagccatctggcgatgtcgaattgaggccagcggcggctggagcagtgaacttacgttgctccgcttttccccttcactgatttgggaagatccgcaacagcggcccgcaaccttcggtggaaccgttacgccgatagcggaagtccagaatgcgacagaaacagtgattgcaacggatatcactgtggaacaaccatccccccaacccgaacagaacgatactccactttcaggcgaagccttctggcagtggctggttcgtaatgttcaggctcaacatctggaagtcaatgaacctaacgcccggatccataccgtcgccgggtcggtgtttctggtgacgcccggtattttcaaactctggcttagcacctgcggtcagaatgtccctgaagaatactggcgggaggtacagaagaagttccagaacctgaatcttcaccgaaaacaaaaaaacggcctcaacatctggcactgcgccgttgtcggcccacgccgttgctcacgtctgaagggatatctgcttgacgatcccatgccgctttttggagatgacgttccctttaataaccctcatctcttgctcaatgaaggaagtcactcaaatgacctttga

SEQ ID NO: 201398 - DNA, 912 bp, Klebsiella oxytoca
atgaacagaagcaacgatctttaccagaaagtcaccgatgaaattatcgccgcgctggagaaaggtgtgatcccctgggttcgcccgtggcgggaaggggaaccggtagcgccgatgaatgccctgtccgggcggttttatcacggcatcaatattcctctgctctggaacagcgcagaacgacagggatacgaaagcgatcgctggctgaccttcacacaaattcgcaatgcgggcggtaacattcgcaaaggcgaaaaatctacactggccgtgttctatctgccccagcagcgcgaagtagtggacagcaatgggaacacggttcttgatgctgacggcaaccctaaattgacatcctacgccgtggtacgcgagttccggctgttcaacattcagcaatgtgaagaactaccggaggcgttttcacagcctgtcgtgatggtcgatgatcctatcgccgccgctgagcaagttgcccggcaaagcgcggtagtgatcactcaccgacgccagaatcgggcatattactcgccaggacgcgactgcatcatcatgccgcatcctgagcagttcacttcgcgtgaggattattacggcacgctgctgcatgaactgacgcacgctaccggacacgcttcacggctgaaccgggacggcatcactgccggaaagcataccttcggcgatccgatgtacagttttgaagagctggtcgccgaaatgggagcggctttcctgtgtgctcatgttggcatccagtcgaagctacagcatgacagttacatcgcatcgtggctgaaggtgttgcagcaggacaaaaaagcgattttccgcgccagtggattagcgcgtaatgcctgtgaatatctgcttgaacgggcgcagcagccattagcactgagcgcatga

SEQ ID NO: 201399 - DNA, 294 bp, Klebsiella oxytoca
atgccaacttcatcttgccctgaagcaaaatccttatcgctctctgtttcaactgaggcctgggaaaaggtagttagttttccacccgatccctcgcaggaagacgaccgtctcgaaaacctgattgtcgcgaccatgctgacattcaaaagcgcaggtccggaccgtaagagtatcaatttcggtctgtactgtttgccctctgacggcagcagcaatgtaccgctgatgacgccgctgcgcttaacgcttgaagataaccacctgttggttactgcccttcacaccagctga

SEQ ID NO: 201400 - DNA, 873 bp, Klebsiella oxytoca
atgatatctctcgaagcgctgcaatcggccatctccaacgtctctgtatggcgtcagggtgatgtatgcgctccgcataagccgttgttgctgttgtatgtgctgtcgcaatacaaagcaggccacccacgcctgtttaactacgctctggaaatccacgaaccgcttacccgcctgctaaaagagtttggccctaaacgacgcactgactatcccaatatgcccttttggcgactcagaactgacggcttctgggaaatcactaacgcagaaggctgtaaaccccgtaaaggcaacacccagccgacaaaaaaagaactgattgataaccaggtagcaggcggctttgatgaagcggcttaccagcagttactagctcaccctgaagtaatcgaccaactggcccagcaaatcctgatggatcgtttccccgagagtattcagcggatcctcgccaaccaactgggtctggattttatcgatcgttcgaagaaccgcgatccgcgtttcagggatatcgtgctccgggcttaccactcgcgatgtgctttctgcggttacgatctacggctggatggtgcgttggttggtattgaagctgctcatatccactggaaaacctatggcgggccgtgtgtggtaaacaacggtctggcgctctgttcgctgcaccatgatgcttttgatatgggcgcattcgggctggatgagaatctgactatccacatctccggcggcgtcagccgtagcccggtggtggataacctgttctggcaacggaacggccagcagttgcatcttcctcatgacacatcactgtggcccactgaacaatatgtcggctggcatcgtaagcagatcttcaaagcctga

SEQ ID NO: 201401 - DNA, 1824 bp, Klebsiella oxytoca
atgcttgataattctactttcgattacaaaccacatttaaaatctgcttatattgatccgattagaactgtgacagtcatcgatgatgaatacccaactattgatgatttaatttcaccaaccaaagacagtttttctcaagacaacatttctcgattaaaagatattattgatataagtcgaagtgaagaatataattggcttttagatgtctataatggaaaagaaaagaaaattcaagagggaaccgtatctaaccgtctttaccacagtgatctactaatcttggactatcatttagatggagaggattctggatattgtaaaaaatctatagatattattaaaaatctatctgaaaatcgtcattttaatattgttgcagtgcatactaaaggttatgatggacaaaagggttcagttaatgaggtactaatcgatattattacttccttacaggaaagaccctctattagtattttaaatgataaaatcaaatctagaatagatgatgccttagatgaatgggaaatcgaagatccaagcatcagggaagatctaattacttcagtttctacattagacttacttttcttgattaataaattcggatcaaatttaagttcaggatgtttcgactacgaagttcttgatgttttccataatatatttgatcaaaaaccagacaatataaatatatccaagatattgatttttaaatggatctcatcagaaaagttacatagatacgctgaccaatttaataataagacatcaaagttttttgattgggggacaaatgaaaaccacaattggataaaaacagaagacttatttattactgtccttggtaaaaaagacacaccaatcagtgacataccgaatcaacttttggaggctttgtcaaactctaaaccgcatccgcacaaacttattttatcaaaactcagaagtgaaattgaaagtaatggtagctatgctgcaagtaatataattaataaaaaattcttacaggcggcgtggctaaaggaattacttcaaaaagaggatgaatatgctatcaaaacagctgcatggcaagcagtaactaaattgtgggaagaattagcatacgaaataaaacagagtcttgatgagtttacaattaatcttgtcagcgacttaaagaaaatcgactcacctttaaactatttcatagagaaatctacacttgatgctgagcttgaacaaattaaacatgcaaattgtttcagttgttcaaaaaaaataactgctcatcatttggttacggggcatgttttggagttcaataataatcactggttgtgtctaacccctatgtgtgaccttgttcctggtcagaaaaacggaaatagtttactccctgttacgctcgtgaaaatgtatgatgcgaaagttgctttaaataatacacgtaaaaatatgcaaagcgagcttaaactacccaatttgccagaaatcaacgaagatgaatcaattagacaaatactaaattattccacacagaataatctattgttcgttcagtctgaacatgacgggaaaatacatattcttagtttcaccgttggactcgatggcaaggcaaatcctaaagcaatggattgctatgtggaaaatcaaggtattttctctgaagataaaataatagcactaaaatatgccaagcccactgaaaatgaaatgaacataatatccgtagaagcaaaaatagttgctgaattacgctacgaatatgctttgaatttattaggtagactcggtgtatcaaaatctcgagtcggattagattttatcaactaa

SEQ ID NO: 201402 - DNA, 396 bp, Klebsiella oxytoca
gtgcaaatgaaagtctggagtctgattttattgtcggtggtttttcttgtcggcttctctaaattttcagaagcaaatgagcagtctgacgggatgactattcaaaattataatttaattaaaaaagaagcactagatgaagggaaggaacagaatctcattcttaatacttctatgcaggcaatgtgggaagggattgtatttacgaatgcattagctcaaatgaaatcaggtaacccgcttatatgcactaagaatgaaattaacagtgggaaggatttatcaagggttgttgatggttacatcaaacagagccctgataaagtaaatccaaatgatagacttgctcttgttgcgattttagcattaaatgagttctatccttgtagtaattaa

SEQ ID NO: 201403 - DNA, 732 bp, Klebsiella oxytoca
atggtaagaagtaaatatagtttaagtctactgattttacccttgagctttgctatagcctgggggcgagcaacatacagctatatttcatacgactggatatacattcttccttcactggcgcttttttgtcttatagggtatttcctgttgtggtcacagcgattgaggagatttctgttaaagaatgagtctttggaaatgtatttaaagtattttgtggattgcaaaataaaactgtcggctttgattttgttgtctttcactctattggcagagttgtctcccttgatttactatcccatttattgtgcttttggcatgttcttttctatcttggcattcatgaagtataaaggcagagatgcgattgcaataaaaaatctgttgttaaatagtgagagtagcaagaaggatgaagtatgttttcagatactcagtgggggatatattaagaaaattgcgcatgctaattcagttaatgttgacggaaatgagttatgtaaagtgcaatcatttaattcctcatatgtaaaggatttgtatccagttgattgcagcgcaaacatgagaaaacatagtagtgccccggatatggttggaagggataatattatggatgatagttcttactctttggcgggagtaaacccgtcaacaggtctttacatgactggagggagtttggactcaggaggcaaccattttggtaatccagaaaaaatggattga

SEQ ID NO: 201404 - DNA, 843 bp, Klebsiella oxytoca
atggataattcagcaaaaaataaaggaatgccaatatttttggatgaaatcccaagaaacatttctgactcgttagatcttattgatgttgatgcttggtttccttcaaataatgcagcccaaaagctatggcgttgtttagagagtctaagggatttagatgaattagtcgttgatgctgcacaacagaaaaatgcaacgaagagaaaaaggaaattaaagatagctctaactcaccttcacgctttagttatgtctttagatgatctttgcaatgagatccacagtaataaagacacacgttctctaattgatgaaaaaactgttgctgaggtattagagatacaaaatttattttcttctctgcttcctcatgatcacaaggctgatatatccacagcaaggaataagctatctgcacatattgataaaaagatgaatccatttaaagcacaggaaattattgggttaattccttcaaatgaattcggcagatgtttacatatttgtttgcatttagtattagatttaacaaaacttaatatttatcattggtcatgcaaagcaccaagctatgattacgtgcgatttatgactaatgagccgttcctacttacaataaaagtagatggtgaaaaaatgttagaattggcagccttgcatattgctaacaattctcccaaaaatgatataccagagatagtacaaaaccttgtaacaaattcacaatggatgtttaagaaaggtcaaccaaggatttcaagtctaaaggaggaaaacactgataactggaatacatttaaaacgcattcacatttccataaaccaaacactttagaataa

SEQ ID NO: 201405 - DNA, 651 bp, Klebsiella oxytoca
atgaacaatataaatgtatttcttagcgtcgggaacgtagcaaatcgtgaacaagaagattttgttcaggctatcgagagtagacttagaagcgaaggacttaatccactcacacttgggcgtaatcatttcagttcagaagctcctttaaaagcgattactgaactgatggatacttgcgaagggacggtggttattgctcttgaacgattgtatttcgcatctggcatagaacgacgaggaggagaaaactcgatttctctatctgacacaagtatagccactccctggaatcagattgaagccgcactttcttacagtcgtgggctccctttgctggttattgtagcaaaagaggtaagaacagaaggattacttgaacctggttatgactggtttgtccagagagtcaagccagaagccgccgcactgcattctgatgagtttagtggtatccttgcaagctggaagggaaaactcagtgaacgtaaaaaacaaaaataccgaaatctggaattagaaaaaatgactattggagaaatcacttcaagtttaagaccagcacatctctggagtcttcttggtgcttttgctactacagctataggtgcttttgccttaggttcgaaactgttgggctggctttcttaa

SEQ ID NO: 201406 - DNA, 1731 bp, Klebsiella oxytoca
atgtcagataataatatattgaaagaatttttcaagtctctaaatgaacaggaaaagccatttactcagcttttaaaagatgatcggctaggtatgatattacgttcagctgtaaatgaactaaatttaatgcattataaaaatcatagtgaatacaacgcgacatttagtcaggaagaatattattatatatttaagctgggcgtttctcgattaattaaattagcccttgaagcacgaacctcgtttgaagcccctgctataatgtttctacaaagctctgaaataagcgctgagacacataatattgtaagaggcttaggaatggtcgaacatggcaggagaattgcgcagtcagtttattccggccacactaaaatagaaaaaataggggggaatgagtttaaaataaccataccatcaatacttattgatgaagaaagccatgaaaaacacatatctaatcattataaagatcaatacagagaaaatctcattagaatttataaatcaaaattcatggaagaattcaaagtagatgttgacaataagttgtttgatttagtttatccatatgacactcattttatagggtacgaatccgcacccattctagatgaattcttttttgggctcacctattcagagcttttcaatcaagatggatttgacacttttcactactccgtaaaatttggagggatagagtttcaaaaatataaattagctatcggatttataatgtcggtaattgaaaaacatttaagattttcagaaaaactcacaataaaacataccacaataaaattagagaatattctaacagtttcagcaaatacagacgaatttatagaaagcatgtgtgatgcaattaattactttggatcgtcgctaaaaggatatactcagcttgaattaaacgatgcacgtaaaatttttgaagtaatttcttatagcagaagaaacataaagttattagacaaccctggagcagagctaccgatgctgattcaaagctctgatgaaagtttcttcttctgtatagcagcaagatatagctcaccattacaatatcttcatgactccttaaggtttcattttagtaaggattatgataagcagcaacaatcacgagaacaagtattacaaagagcaataaaaggtgttttgaacgaaagcttcagtaatttacaataccaagaaaatataaagataaaagagaatggtaaaacattaactgatatagacttagttattgtcgaaaaaagcacagggatagtttttctttgtcaattaaaacatcaagaactttatggtgctgatctacatgcaaaacatgttcgaaccactagattaaaaaaacaagcgtcggattggcttacttcgatgaacaattggttgaacagcataaccgaaatagaactaagaaaatcgttgcaaatcacaaaacatgtaccaaaattaacaatatataaattattcataacaaaacattatgcctatccactcaaagagttatcagatgaagatacagcgtattgtaactgggtgcagtttatttatgccattcaacttatcgacgatgataaggggaaaagaaaagatagtatttcatctttaatcctcaaattaaaaactttaaatcaggaagctaacattgaatatcttcatgagcctacatcgaaatggatgataaaaaatttaactttcagtttagagcaagaaagatga

SEQ ID NO: 201407 - DNA, 1476 bp, Klebsiella oxytoca
gtgacgaccaacagctatctggaatactttctgacgctgctcggctgggtgatcaataacgggctgtggaatgcgatcagcgccaccgggttattcgccctgccgctgctgattaagatgctggcgctgtggctacaggccagaagtcagggggccgatgaaggcaacaaagccgcgctgtacctggtatggaccgagcacctgatgtacacctcgctgctggtgattatgttcacctgcgtgccaatgttgaatatcgacctcgataccatcaaatatgacaccacacgctcgaagcagtgcggcatgtcggtgccgcagcccgccgataccggctatcaaccgattataaactcgctgggcggtaaaaccgccgcagtcccagtctggtggtattttattcatgtgatcagcaaaggcatcaccagcgcaacggttgccacccttccctgccagcctgacctgcgtcagatccgctttgaggtgcagcacatccgaatcaaggatccggcactggctcaggagttacgtgattttgttgaagagtgttatgccccttcccgcgcccgtctgaaattccgcgccggagagctggacgatgacaccagtgacgatacagcctggctgggatcatcttattttctcaacacggctggttactacgataccgaccacgcgctttcaccacatagcgcttggccgtacagcgcatcacgcgatgccgggctggccgatacaggagccggtggctaccctacctgtaagcagtggtgggtggacgatacggttgggctgaaggcccggcttctgcaactcccggccccggatatctggacggcgtttaaaaagatcggccagtcccaggccgtttatgaagaggccgtgctgcgttcgctggtcagcgagcgcaatatgcaggtatcgcaggatggacgcgtttaccccggctacggcggtaatgtcgatggtacgctcaccaacgccgccacgcggttagcctccactgctgggaatatcataggtagtgcagtggccttcccggcgtttgacagcgtgcgtcaggctctgccaatggtacagccgttgctgcaaatggcgctggtgatttgtattccgctgataacgttgtgttcggcgtgggacgtgaaggcggtgatgacgctgacgtttgtgcagtttgcgctgtttttcctgacgttctggtgggagttggcccggtggctaagctggctgctgggcgtactctacagcagtgatactcacagtagctggaatctggccgggatccagaactcgcaggatgatgtgattatcaatctagtgatgggatcgatgtttctggtgctgccgacgttctggctgggggtaatgacatgggctggagtgagagttggtatggcggtgaatggggcgctggcgggcggggttaaggtggcgcaggacagtggggggaaggtatgggggaaaataacataa

SEQ ID NO: 201408 - DNA, 258 bp, Klebsiella oxytoca
atgaagcggctgatgctctccggcaccctgctcctagtctgtatggcagtgatgttttatctggctactgatagtacaccgcagattaaccgcagcgacctgctgctctggcgcttaacgctgtacggcgtgattagcgctgtgggttggcgtctgtatgaccgttttccaccttatcgccaggccatccgccgcattgcgctgtggtttatcgtactgattgtgctcaacgaaatcgtgccggaggtattccggtga

SEQ ID NO: 201409 - DNA, 1368 bp, Klebsiella oxytoca
atgcgctcagcctactgtcttctgttcgtcgcctttctcgcccctgctgccgacaaatatcaatacaagcaacagggggcaatcagcgactggatgtattaccgcatcgtcggcggtgccgccatctctccaccgccaacgcggcgcaacaccttcccgctgacggctggcgtaagctggaacagcgatatgatgtgcggcaatttcgatatcgataccacggtgcgcaatcagctcaacggcgtgacagacggtttccagcaactgatgggagaggttatcgaaagcgcaaccagcgcggtcgccagcctgcccgcgatggtgatccagcgcgccaatcgccagctctacgatctactgactaacggcgtgcttcagggacgactcgatttcgataaatcactgttaagctgccagaagatggcaggtaagatgaccgattatgcgctcggtccggcatggacgcagagcgcccaggcggagaactatcaggggattgccgccagcgagaaagacgccgttcgcgccgagcaacgcgccgctgaagaagcggcggagaaagggaaacgttgggtgggcggtgagcgtcgtggtggcaaaggccaaccgccaatcaagctggtacgcgatacaacggtcgcaggctacaacatccttaataatcgcagcgtgagcagcaccagttcggtatccagcaacaactgtcagggtgaactttgccaggtatggggcaaacccgacgacgcagcgcaatggctcacacgggtggtgggcgagcagaccattaacgtcgccccggataacgatcaatccggcgatacgagccagcaaagcggtgcacaatccggcgtcgggctgacgccgctgattcaggaagagcaggataagatccagccactgattatcgatatggtgaaccgcagccagccagttaacgatgacacactggcgcaagccagcggcggcgacttgcatctgacacgcggcgtcattgaagctctgcgcgacgatcctgatccagcggtacttatccagcgcctctccggcgaactggcgctctcccgcgtaatggagcaggcgctgatggcacgacgcacgctgctggccggaatgcgcgaacctaatgtttccggtgaaaaagaggcgcaaagcgcgctaacccagaccaccgcccagctcgaccaggaactgtcacagcttaagctggaattggatatgcgccaggcgctggcggataatgccgcactgaccatccttgaacgccagacaacgcgggcgaagaccaaaggtcaggctgtcggcgtagaagacgacaccgataaacgagtggacgatctcagcaaacccacgggcggggatacgcaatga

SEQ ID NO: 201410 - DNA, 708 bp, Klebsiella oxytoca
gtgaccggacaaaacccgtggaccgagatatcgccactaagctcgccgctgcccggtatcgctgaagcccgtggtgataccaatccgcgcaccgtaggccagcacagcaaagtccgcttcaaaaacgccgatgcgattggcttccctgccggtgatgcgctggcgaatttcttcgcccagtttggctacgtctgctctccgtcgtcacagccttttctcccctactttctcagcaccctggatgcgctcgcctggcgcagcggcgtaccggagatgttctacctggaggcgttaacgccaggactgcgcaaattcagcaaagacggtgatatgtggggcaatatctacccgcgagccggggcgctcagccagacgcatgactacaagaccggggcagtcatcgcccaacgcgctgccgatctggtaacgcgcaatggtcaaccgcatgtttatgttcctctgactgccacttcacacgatggttactggccgccggatccagttacggagggcgacagcagtaaccaccagtggcagatgctggtcccaaaaaaatccgcctcctgcaccatcttccctgatggatccgccaccgactcttacgccgataaactggcggaggatagcgcatatgcctggacgttgtggcgaccctataaatgctgcccgcgtcgtggtcagacctttctcggcatcagcggaggttaa

SEQ ID NO: 201411 - DNA, 228 bp, Klebsiella oxytoca
atgaatctccaccggacattactttgcttactgataatgatgccgtgcgcaggtaacgccatcactaccccggaaattgccgcctcagccctgtcgccgacgtgcgtaaaatatcaggtagtcggcgtctgctactggctgttctgcacgccgtttggctgctcgatacgcacgtcggtgaaggtacgtcatttccgaccggacctggtggtatcagctacagcgtga

SEQ ID NO: 201412 - DNA, 1296 bp, Klebsiella oxytoca
atgtcagatatcaatccacgcgatgccttaccccaggatcgggaagcgctctataaacttgtctggcgcgaacctgcggagcgcatagctgcgcagtatggcatcagtacaacgttactggcaaaacgatgtacagaaatgcggatacccaggccgcttgctggttactggaaagctctggcgaaaggggttgcacctgcggtgccagcattgcctgatttgaagaaggacaaggtagaaaaagcttcaagcaaagccagtttggccgttccgccatccacaaaagtaccatctaaagtagcagtgtcagcaccgcgaaagcgagcaaggacagcgggtagcggctatgcactgattgatgatctcaaaacctaccttcccgtctcttccgtcacaaaaggtggctactacaaaccgacaaaaaagaaactactcgatctcaacgtttcagaaacgggattcaactgtgctatcgattttctgagtcggttctttgctgcactgggaaagcaagggtattgggtacgattagctgaaggcaatgagggacttcattgtcagggcatcgatatcaaagaagctccaaaagaaggaggtttgcgctacgacagtttatggcgcccttgttcagccagcattatttgtattgaagatatgctgttcggctttagtttggctgaaatgacggaatatgttccggcaaaggaggttaatggtcgatacattcgcgatgaaacgatgatccgcaggatgaggggaaagtatgacaagccatttcgctacgtcattaggcatgccttacctacagggcgatttctgctacagctctactcgccgtattcgtcaacactctggcaggtacagtttcgccagacaaaacagtgtggacttgtaagccagatcccgaagatcatttctgcgatgcatgatgctattccgctgattaagaatcagctggaagaggcgagagtcaaagctgaagctcggagaatccagtgggaactggatgaaaagagatatcgggaaaaggagcggatcagaagggaaaaagaggcatataacgccagtctggctgaattgaaaggtattatgtcccagtgggcggaagacaagcatatagagcagttttttcgtgaggtggagctggatgtggcaatgttggatgggcaaaagaaggaactggtaatggagcgtttacaactggcccgtcaactcttatcagtgaatacggcagttgagcgattgctgaagtgggaaacaccgcaggaatggttggtgaaaagttatgcttgctaa

SEQ ID NO: 201413 - DNA, 1137 bp, Klebsiella oxytoca
atggatttattcataccccaagtggctgacgaacgtttacacccacttgttaaacagatcatagctgaacctgtatatcacccaacaataaagactatcaatagttggggaaaaggaattttagaacggagaggagagggagataaattcattaaagaattccagaccacatttaactcaagcttttgggagttataccttaataaagcatttatcgacttaggttttaacattgattatagttacgaatctccagacttccatcttattcattcatccggcgtgcatgtaaacgtcgaagcagtaacatcaaataatataaataatgaaagtgaagaatattattcacccaactcactccatgaagccgcacagattgaacttgatgagttcatggataactcatctatcaggcttattggaaagataagggataagaataatttatttatcgataacgggaagaaaaagcatccttattcaaaactaccacatgtaatgggaaatccgtttattctcgcaatagcaccttttgacaatctattatcatctggacaaaataatagagcaataaataggatcctttacggtattgatatactacatgatggaacagtaaaaagaataccttctataagaacaaaagctggcaatactatcgaacttgggatatttacaaatgacagttataaagaaatcagcgcgataattttctcgactgtcggcatgttcagcaaggctataatagaagccaaaatcccctgcaaggttagagcaactaagtatcgccaattcaccatacatgagtttaaaaaactttcagatatgggtatcgaaaagcttgggaaaaatttcaaggaattcgagaatcaagatatagttttaacatttagatatccatccgggaatcatatcgttggctgcgatatgtattttgttgactcaagccgttataaagaaacacacgttgatggattacacatatattacaacccatttgcatcgatcccattagaacgaaatatattcagttctgattttttgtcatacaataattatgacgttcataacaatcgtatgctcgcggaccataatgatggttcccttgtttcaagaaacacatatgttacattctga

SEQ ID NO: 201414 - DNA, 1578 bp, Klebsiella oxytoca
atgaaaaagcgcatacccaaaatgctactgtggtttccggctctgtccgccccggataacggcgaactgacccgacgcgtgcgcagcctgaacagcctgctgctgaatgcgggtatggtcccggtacaggagaatgacgaactcaccccgctcagttcgtggctgcgctggctgccgatgtgcttcgacccggcgcgggacaagcgccagctctacacccgcttcagctttgtacagcatctcgccaacctgctgccgctgtttggccgcgaaagcggcaccgggcatccgggcgtcagctactttaaccggggcggcgggatgctgtgctgggatccgcttaaccgcgaggaccgcccccagaatggtcatctgttgctgctcggcccgactggcgcaggcaaatccgccaccctgaacgcaaaaattgcacaactgatggctttgcatcgcccacgtctgtttatcgtcgaggcgggcaactcgttcggactgatggccgattacgctcgcgagcatggcctgacggtgaataaaatcagcctgaaacccggctccggcatcacgttgccgctgtttgccgatgcgtggaaactggcggagagcgacgtgcttttgccagaaccagatgacgacgaccccgaagataccgacaacgaacagcgcgatctgttgggcgaaatggagattacagcccggctgatgatcaccggtggcgggctaaaagaggacgcccgcctgacacgctccgatcgggcattaattcgagaagcgattctgcacgccgcccggctcaccgctcaagaaaaaagacagacgctgactcaggatatccgcgacgcgctattcacgctggcacaggatgcggcgctaccggaaacccgccgtaaccggctatgggagatgggcgaagcgatgaatatgttctgttccgggtttgagggcgaactgtttaaccgtgaaggagaagcgtggccggaagcggatattaccctggtggatctggcgatgtttgcccgcgaggggtacgaagcgcaactggcgattgcctatatttcgctgattaaccatatcaacaatcttggcgaacgcgatcagcatctggctcggcccatcgttaatatcaccgacgaagcgcatatcatcaccgtcaacccgctgctggcgcggtttctgaccaaggggtcgaagatgtggcgcaagctggggatctggctgtggctggcaacgcagaacctgagtgacttcccggatgatgcgaaaaagctgctcaatatgatcgagtggtgggagatactggtgatgccacctgaagaagtcgagcaggtcagccgcttcaaatccctgacgccggaacagcgtcagctcctgctcagcgccaccaaagcgccggggaaatataccgaaggcgtggtgctttcgccgcgcgtggaagcactgttccgcgtggtctcccctgccctgtggctggcgctggggatgacggagaaacacgaaaaggcagagcggatgcggattatgagggagtttgggtgtagcgagctggaggcggcgatgagagtggctaagaatttatag

SEQ ID NO: 201415 - DNA, 234 bp, Klebsiella oxytoca
atgacccccgaacaaatcagcgccttccaggctgccagtctggtaaagcacgatgccttcagcctgatgatgctcggcctgttcagcgccttcctgctgctgtgggtggtctgggtactaaatgatgcctaccggggcgtggtaaccgcgcgggtaagctggcgagcgctgggcagcatcggcgggcgaaccatcttactgctgctggtcagcttctggctggtactgagctag

SEQ ID NO: 201416 - DNA, 312 bp, Klebsiella oxytoca
atgcttaaagttcccctgctcattgtcagcctgttgataaccagttccgctctcgcagcccctcttaccgaacgcgaagagctaatcctgtccctcaaccagctaactcaaatcgaagcctcactccaccgtgcccagcaaagcgccaaaaccggtatcaacgagcgctattacttcaactatccgcgtatacacagcgatatcaccaccctgcgcagcggaattgaacattacctcaccccagctcgcgctcaaccgcgagatacggcgacgctgatcgggcaataccgtgaggagaaaaccgcgccatga

SEQ ID NO: 201417 - DNA, 792 bp, Klebsiella oxytoca
atgataaaaaagaaaaaaacaaaaaagagtggggtttgtcagctaacaggagattttggcccttttcagcgatcgcatatattaccaaaagccataacgaaattaagtgacaatggtgagcgatacagagaaacatctctcaatacaaggcctgtttggcgttctaatagttggtatgattataatttagtaactgctaaaggtgaaaaaatactcagtgaaatagacgatttggctatcagtgaacttagaaaacataaactaatatggagtggttttggtcctaaatggaaaagttctccgacaagttatcgcttggatgaaccagtaagaactgtaagtggtttgaatactaaattagtaaggctcttttttattagtttgttgtggcgagctgctgcttcgcagagagaagaaatgtctgatatatatcttcctcagcaagagctggatgttcttaaactaatgatagtaagaaaggaatcaggtgaacctggttttcttccaatgtatatcaatcaaatatctaacataggagttcatcataatcggaccccaatttatgaaaagcaagtaataggtgatattgaagtagatacattcagattctactttgaagggttgatttgtcatattgttcactcatatgatggtgatattataaaaggattagaacctgtatttatagatgcctcttctgagttgcttgttataactcataaattcgaagattccagagcattttctgatttgaaagaagtgatctctagttcgtttgatgaatgttcctaa

SEQ ID NO: 201418 - DNA, 462 bp, Klebsiella oxytoca
ttgctggcgcaccggtgtggtctggcgattgtcagcgatacgttgcagaaagggagcgtggcgctgattgcttcactcaacgggcaaagcgggttgttctggacggaagccgtcgctacggtaatccgctgcgcgatactatctgcgggtaatgttaccctcacctttctactgcggctggcgattctgttgcaggcgctgccgctatttgcgctgattatcgtcgtcgggcttattgacgggctggtaagacgcgacttacggcgattcggcgcaggccataagtccgggtttgtttatcaccatgcaaagcgtatgatttcatccagcctgatagcaacgggactggcgtggctggcggtgccgtttttttttaagccatcatatatgttagtaccaagtgcggtgatcaccgcactttcggtatcactggttttgggagcgtttaaaaaatatatctaa

SEQ ID NO: 201419 - DNA, 501 bp, Klebsiella oxytoca
ttgctggaactaacaaggctcctgtccatctgtaaagacattgataatgccgaattaacattcaatgataaagatcttcttatagattcattttctcatttctatctcaatcgattaaatggatttagaaactcccagcacttgcttgatgaagaagacttagtagaaccgcatctggtactttcaacaaaaaatgaatttattggtgatgaaaaaaatcaatactatgggctgaatttcaaattcataaaatcggaaagcaatattgaaattcaaatttctgacattatagctggtataattcgctctctatattcttttattgagcaggttgaattttccgaaattgatagctttattgaaaattccaccgaattgcaaaaggataatataaagaaactaagcatgttaatttctaaatctgtaaatgaatgtgaaggctttatttttagaacccaaccacaaatggatgaatcaaaaatgtataagctattatcataa

SEQ ID NO: 201420 - DNA, 438 bp, Klebsiella oxytoca
atgcataagataaattatagcgatgatatagatctatccaaaatttcccgccgtggtggtttttataaaagtaaaataccttcagaagcagtaagaagctattgtgtcagtgtccgtttgaatgctgaagaactgcaactcctgaatattaagcgaggctcttataaaaagggagagtggcttcgtatggcttcccttcaaaagttacctcctgttatacctgcgattaataccaaagcctggaaagctttaactgacatatcacaaaagctaaatagaattgcgatccatatcgatggtaagagcagagatagccagcttactcatacagagcttttcgctgtgaagcgacaacttgaagagcttcgtcacaacttgttaagaacagatttttggagtgtccctcgtgaagggtatgcggaagatcaagaggggtaa

SEQ ID NO: 201421 - DNA, 267 bp, Klebsiella oxytoca
atgaaaacatactcaatccttaccgttattcttgcagtatttcttctaaccgcatgtaacagcgaaccctcagaaaaagatatttatacagctttaagtaaatggacgggaagccatcttacatcagtgaaaaaagttgattgcacaaaagaatctgataaaagttataagtgtaatgtcgtaacggtaattgatggtaatctcaagcaagcagcatctattaaactcctaaaaacagatgacggctggcagtttgtaggtaattaa

SEQ ID NO: 201422 - DNA, 429 bp, Klebsiella oxytoca
atggacaaaaaaatcatcaatccagagtttactctggaagagcgacttatcattataattgataaatatatatcaaaacgataccagcccggagataaaagtttctcctatcatttatacttagtgttcgttggctatcatttaaagtatttctacccaaaacagctatacactcattctaatcgcaacatagacaacattatgacaatgtttagttctgtatacaaatgccttacaagtactttgttgcagcgattgaacaataaggaggctgttatcagagagctaaactctctcgtgaactatattgacaacaatcaagaaaaagcagaaggaatttatacggttgtaagaacacagtatgaagtgaaggttatcgagaaagagttaacccatgaagtagtcagagtaaaaaatgttagattataa

SEQ ID NO: 201423 - DNA, 1197 bp, Klebsiella oxytoca
atgaaggcaattgacttatttgcgggggctggagggtttagtttatccgcccacaatacaggcgctatagatgttgttgctgctgttgaattcgatagcgcggctgcaaacacctacagaaaaaatatgttagaaaggcttgagcataagaccgaacttttacaggaagatattttactcgtaggcccaaaaaagttaagaaaaaaaataaagctcaagaaaggcgagcttgatatgatacttggcgggcctccgtgccaaggtttttccagtcatcgaattaatgatgctggtgttgacgatcccagaaacaaattacttttaaggtatttcgattttgtttgtgaatttaaacccaaagcttttttggtagaaaatgtctccggtttgttatggaagagacatgaaacccatttgaaacgctttaaatttttggcttccaaaaatggttatacattaattcattgcgacgtattaaatgctcgtgactacggtgttccgcaaaatcgcaaacgagttttcattgcaggcgtcagaaatgacattttaaaaaaaagaaataacattgagtttccacctcaagctactcatttcaaccctaattcgaatgaagtaaaaaataactcaaaaaatatgtggagaaccgcatcctctgtttttgaaaagatggatgataacttaattcaaagatatatatcagaatactttcttaaacatacgtcttactcaattgatgaagcacaagagctacttgaaacactagaatatcaagacgcgccaataagcgaaaaagatccatgcaacatacatatgataccaactgagcgtatggaagagcgtttcaaagcaacaaaactcaatggcagtagaagcgatgcaggaaaagagttcgagctaaaatgtcattccaatggatacgcaggccacaaagatgtgtatggacgcataatgattcacctcccggctaatacaattacaactgggtgtaacaatccatctaaaggaagattcattcatccatgggaaaatcacggcattactttaaggcatgcggcaagattgcaaacatttcctgatgactacattttttggggtaatgcgacagagcaagcaagacagattggcaatgcagttccccctatgttaggtacaatattaataaatgcattactcaacataattacacccaatagataa

SEQ ID NO: 201424 - DNA, 633 bp, Klebsiella oxytoca
atgttttcgactatctctctaaataacttagatgctttattgtcaattataccttctctacctgctttatctcgtaggttggggttatgttctttcgttatatatacaccaccaaaacatgccctattactgaacatatataaaccagcattttttgaacgtcttttctcgatttcaaaaaagtcattatcttcacgtccgtatggcataacacgtaaatcatcacgaaaaaccattactccaccaaactgctcgcggatacggtcgaaggtcgcatgctgttcatctgataatgtactatttcttcttataatttcaaatgtgcctaatcttaaaaagaaaggaccaaagcgagtatcttttctggtcttatatgcagatttaggtttgactgtaatattatcaaaccattctccgaaggctttcactttcccggaaaataatccactttcatcaatacttccttcaactatatgttctagctggtcaaaatttgaaatatcaaagtttctaacttcatcgataataaatcgttgcagattaccattccatgcgacaacacttgtattgaaatcagtaatctgttcttcgccttctcttttaaatggattaacaaagctatttaatgtttga

SEQ ID NO: 201425 - DNA, 414 bp, Klebsiella oxytoca
  misc_feature (304)..(313): n is a, c, g, or t
atgtccaaacactctgattcacatgatgcggtaaacgcattccaagcctgtcttagcttcctaccctcttcttcaaccgaacgcatcctgaagcagttaaagcaatctatcgactacgagcctgtaattggaattatgggtaaaacaggtgcaggtaaaagcagcctttgcaacgcactattccaggagcaaacttgtctgactagcgagcttatggcgtgtacccgagaaccacaacgcttggtcctcactgtgggcgaacgcagcaaaaccctgtcgacaacctggcgcgcacgggccagcnnnnnnnnnntgagttcgatgctgagtatatggcgctctatcatcgtttgtttgttgaactggacttggttatttgggtattacgggctgatgatcgcgcccgggcaatag

SEQ ID NO: 201426 - DNA, 1284 bp, Klebsiella oxytoca
atggctggagcggtaaagcaatctgctaaaaaaactggaaagaaacgagttaactctttctttgcaggtatcggtgggtttgaacttgccttcgaagaggagggcttcgttccatcattttattgcgagaataacgagttttgtcgaggggtgcttgctcgtcactggcctaatattgaaaacgcggaagatataggtggtctaagttctgagtctataccggaggcagaagtatggactgctggattcccatgccaagatctttctatggcacgaactccccacggaaagcggagcgggctcaaggggtcacagtcaggcttgttctatacctttctagagcatttatctgttcataaacctactgttgtattattagaaaacgttgctggcttgcttagttcccataaaggagccgattttactgctctgattcaatctctaactgagttgggttatgctgtatcgtggcgtttattaaatgcacgctattttggaaccccacagtctaggcctcgtatttttatctgtgcatggtacggctcaattgataatgcagtgtattctttgtatgaaaatgatatttctacgaaacctaaaaatgaaagagaaggttttttaatcgaatcgaaatgtaaagattcgtctatttctgttccacaaatttctttctgtatatcagctacatctggtaggcatacagggctggattgggctcgtacctatgttacatatccagataaaactgtaccctcagatgattatgtagtcccaattcgcggtattgagactaatagatatcatgcaattggtaatgctgtatgtgtacctgttgttcgatggatagcaaaacgtataaaagctctacttgataaaaagagcttggatattaatgtttcatctagcatggaaaatattgctaaacaggtaatgtctccaaaagcgaaaactttagatttgcatgatggtttattagaacgtaaatggcagtctggtggggttgcttatgagaatatttatataacaagcgcggtatctcctagccctattaagccagtaagctcgaagcttattgatttaattgagaaagagaatgttccttctcggtattttattagcgaaaacgcgatgcaaggcattcttagacgagtagataagttagggcggaacctatttcctcctcttgataatacacttagaaaaataacaatcacagagcctgtaggtgatgaagatgtaccgttaactacagaaaatgaacttaaattggataaaattggctga

SEQ ID NO: 201427 - DNA, 153 bp, Klebsiella oxytoca
atggagacggagccaataaaaatctttatggtccgggtagcaaggcacaaaaagatgctgaagctgcaaacgaagcacgccgccttgcagcacaaaatcgtatgtcaaaaagcgctactggaattacagaaccagagatgcaggcagcattag

SEQ ID NO: 201428 - DNA, 288 bp, Klebsiella oxytoca
atggccgaacttaaccctccactgggcacgacgacgccggaaatattcatggacaacgttaaacgcgctgacgagctggttaacggtccggccggaacggttaacgaccgcggcggtgaaccgctcgatacctggcgccagatgatggcgaaaaacgatgaggtcaggcagaacctgatcccgctcagtaagcaatatgcgacgctggcagcggcgcaggcggacatcgctaatatggcactgttgcaaatagtcggtggtgataaacttatcatccccttttgctga

SEQ ID NO: 201429 - DNA, 195 bp, Klebsiella oxytoca
atggctgataaatcatctttggaacgtctgcaggaaatcaacgcagacaataagcgcttagtcactgtcaacgtcggagtactcaaagcagcccgaagcgaaattaacgcccatgtttcagtgaacgggaaaggcatcatgacggatatggtcctcaactccctgaatgcgattatcgaaggagccaaccaatga

SEQ ID NO: 201430 - DNA, 417 bp, Klebsiella oxytoca
atgactatcacactacaggcagtaaacgagctcattcagtcgctggagagtgcgggcgagctgtcgatcaaagagacaaaggttatgtcgctggcgaaagcgtttaagcagctggctgcggagaatgtggcgctgaagtcgtttggcgaaacgctattcgaaatgcacaacacaatgaatggagaaggtacaggcattcaagggcgtgcagaagtggtttgccagcaggtcgcactggaagcggcaatggaagagttcgatgctatcgaaacccccgtcaccgatcgcatcgtagccgggattaaggctgatggggtgaaggagtgggtttccagcagaggtggacgctggaatggaacgaccgaagaggcgcttaagttcgccaagcagctgcgcgagggggccgacaaatgctaa

SEQ ID NO: 201431 - DNA, 408 bp, Klebsiella oxytoca
atgatggaaaataaaacctttggctcgcgccttctggaaaggcgaaaacagttgaaactctctcagtccgctcttgctaagctggtcaaggtttcgcacgtcacgatctcccagtgggaaagggatgaaacccagccagctggcaagaggctgtttgctttgagtagtggtctgcaatgcaatccaacgtggttactttatggtgatgatgaccaggtcccaggtgagcctattccgcaccaggaaaaagagttatcggaggaacagcaagaaatgctcgggctttttgatgcccttcctgattctgatcgcgaaggatttcttaacgaattgcgagcgcgagtagagatgaacaaccaaagattcgaagaattactgaaagtcagaaagcgcgcctcgaaaaagtaa

SEQ ID NO: 201432 - DNA, 402 bp, Klebsiella oxytoca
atgagcatcatcaaaggccagcttatcagcagccagcgctacctggacaggtcgaaagtaacagacagagcactgcgctttaaacggttcatagtggctgtctaccccatcgttttacgtgacgttcagtacaccatcctgatggacggacatcataactacgcagcagcaatgctggcaggtgtagagccggatttccgccccatcactaagaaggtgatgaaagtcattggtggcatgacagaacgcgagcgtgaggcgctattcatcaacaatgttaccgacagtaattattactacgttgaaaccggtgaagtggttcaggaacttctgttgccggatacatcgtgcaagttccaggctcacgctggcaatcaatggatatttgggggtggagcatga

SEQ ID NO: 201433 - DNA, 291 bp, Klebsiella oxytoca
ttgcaacagtgccacgaaggctatacggtcgagcgcgcaattcacggccccgagcagcgctataacgatattgcgctctgggactggaatcgcctgcctgacgcttttgcgccggatgtcccttcccgatgctggcgagtgacgcgcacccacgaactgcaggaagcgatgaatagcagcgtcgcctcagacaggctgacgctggtggaggtgatgctgccaaaaatggatattcccgactttctgcgcacggtcactcaggcgctggaagagagaaacagccgggtttaa

SEQ ID NO: 201434 - DNA, 954 bp, Klebsiella oxytoca
atgacaagtatagcaattcttgaagcagttaacacctcttacgtgccgttcaacggtcagcaagtgataactgcatttgctgctggtgtgacttacgtggcaatgcgtcagattgtagagaatatcggaatggactggactggtcagtcggtaaagctgcgcaaaatgaaggacagattcaactgtagagatatctctatggttgccgccgacggcaagctgcgcaagcttttgtgccttccattgaaaaaactcaatggatggctgttcagtatcaacccagaaaaagtgcgtgctgatatccgcgacaaactgatcaagtaccaagaggaatgctttaccgttctgcatgactactggactaaaggtgaggtcaagaacccacgcaaaaagaccacggtcgatgaaagaacgccacttcgggatgccgttaacatgctggtaagcaaaaggcacatgatgtatccggaagcttacgcaatgatccatcagcgctttaatgttgacagtattgaagacctggatgcttcacaaattcctaccgccattgagtacgttcaccgcgtagcgctggagggggagttcttgggcaagcaggaaacactgccagcacctaagtttgacgtaaacattccgcttcaatggtggatcgataacaacccgttggttcgcagtggcaacctgtcatttggaaagtctctaacagccccgtcatttgacgtgacgatggagatgctttgtggcgacaactctacatctgcggcaattcggctgattaacgttctggaagaggccggctttgatgtttcggcgccgaaggctgaaattgtggcgatgcgcaaacatctgggtaatgtcgagtacggcatgaaggctatcgcagacgcttgccgccgggcggggaataaaaccatctcgttccgtggcggaaaggctgaatatgtgattagttaa

SEQ ID NO: 201435 - DNA, 351 bp, Klebsiella oxytoca
atgattaaaaagcccttgctattaacaattctgctaataacaacaaatctttcacatgcagagacgctcgaagaattttttaataaaaataaagagcttaacggtgacattgaaattaggttagctataaaagagaaagcctctcaacttgccttatcagaagcatatgatgagggggcaagtgatctctctggtaggagtggcaggctgatgcgggatgatggcggtagttatgctagatatgcggtgaaaactcttattgatgcttgcaataacattggcccttatcaaagcatgcttgacgatcaggcgtgcaaaaggctagaaggcaaggttagagacataaaataa

SEQ ID NO: 201436 - DNA, 1926 bp, Klebsiella oxytoca
atggcagcaacggtaattgacgccctcctggttacgctgggccttgatacttctcagttccgcaaaggccagcaggaagtcagtgacgacctgaaaaagcagcgcgaagatgccaaaaacaccgccaaagaaatggcagagcagggcaagaaagccgcttcgttcttcagcagcataaagacggagttgctggcgctgacaggcgttaccgtcactgccggcggcctgatgagccttgttaaaaataccacgtctagcctgatggacctttccattcagtcaaaggctcttggcatgacagccagagaacttgatggtttcggaaaagctgccgagtcagccggaagctcttttgagaggattacggccgccttgcagggttttcaggctgcaaagcaaggctctctatttggggataccagtagcccgatatttagcggcatgcggatgcttacggcgttaactggtgatacttttgacgtctattcaaaggatgctaagtcacttgcaaggtcttacctagagtcactcaggaaagtcaaagacccaaacattaggcgccagattggtgctatgggcgggttcgatgatgcgaccattcagcgaaaccaggagggaagatttcttccggacgttgaccgcttaacaaaaagctcggggataactgacgcctctgttgagggggcgaaagagtttacagaagcatgggtgcttctcaatcagaacctcgaaaccactaaaaaccaattttacacgttccttattccgtatgtgcgtgagtttaatggcgttcttcttcagttatcaaactggatgaaatcacatccagatgagatgagacaaaaagtcgagtccttctttggtgctattgagagcggagctaaggcggcagataacgcagcgagatctgttggtggttgggaaaacgcgatcaagctacttatcggcttaaaggttgctacatgggtgatggggattacaaaggcttttactggattgttcgcccttacacctcctgcgtggtttatcgctgccagtgctgtgggtgtgggggcttatcagaatatatccaatgctgccactaaagccgaccatactgattctctttgggagtcgataaaacagcgctgggatgcaggtggttggtataacaaccagcaaaatatgcaggcgctgtcaccagagcagagaaagaaagatcaggatgagcgctcattttgggaatcaactaaaaatcttctttcacaggcagtgaatgcattaatttctccagctggggcggcctccatgcagccaaatattgttggcggctaccagccaaacgttccgcttaacgcgcaagccgctcgtcttggcgctaaaggaaaggcttttcttcaggccatggctggcgagttcggtgtactggagggcaaatatgggcttccggccgggctgctgtcttcggtggcagccactgaatcaggtggcgatccgtttgcggagtcgaaggccggagccaaaggcttgttccagttcatgccaggcaccgcaaaggatatggggctgaaaggtcgtgatgttttcgacccccacaaatctgcagatgccgctggaagatatctgcgctttctgctggatgctaccggcggcgatcttgaaaaaacccttgcttcctataactggggtctcggaaacgtccagaagaaaggcatggataacctgccgtcggaaactcgcaattacgtacctaaagtcatggcgggaatgcgtcccggcgccggtatggccgtagaccgcgcgatgcccgggcaggctggcggtgtttataacttttatggcaccaaaatcactacccaggcccagaacgtgcaacagcttaccagcgacatcaaaaagcacggtgacaaccgcgtcatgctaatggctggctactcaggacaataa

SEQ ID NO: 201437 - DNA, 567 bp, Klebsiella oxytoca
atgacaactgatatcaccgaactggcgcagcgtatgaaggccgctgctgagaaagcgactcctggtaactggagggcatttcaatatcacgacggtcgctgtggggttggcggaggaaatcacgatgaaattatggtgtgtgaacacataagcaaaaagcgaccacatgatgcagtgttcatcgccctggctaaccccgccaacgccctcgcgctggtagaggcgctggagaaggcgcagaggatggaatcctactggaaaactcaatgccgtgggataacggaccactgcgaggagttgcaggcgcgcatcgccgagctggagtcccgcaccgtcaccattgagccatttcgctcgtttgtcaccgatgctgacctggcagcgctccaccgcttcgccgaatgctgtgatgaccctgaatctggtggtcacgatttagaaaaagagcaggtgcggcggcttgaggcaatcggagcattacagcgttcagggcgaattagctacatcacaggctttggtgatgtcctgatttcgattacctctggcatcaaggttgagggggagtga

SEQ ID NO: 201438 - DNA, 207 bp, Klebsiella oxytoca
atgctaaagccaaatcacgtttatatcgaggtctgtcataaccagagcggcggactttctctatgcgtcagtaatgacagcggcggctaccgcatatcaggctctaaggttggcggatgcgaaaccctgaagtgctttgaggtcaacgccagcgagcttatcgagcaaattcgagagcatgcgaacatagagagggccgacaaatga

SEQ ID NO: 201439 - DNA, 447 bp, Klebsiella oxytoca
atgactatcacattacaggcagtaaacgagctcattcagtcgctggagtcggcggacgagctgtcgatcaaagagacaaaggttatggcgctggcgaaagcgtatcagcagctggctgcggagaatgtggagctgaaaggtgcattaaccggaagggcttacatcaacttcatcaaggctaacggctggaatgtttctgcaagcacggtaaacggcaagttccttaactttgcggaccctgaagttgattttggctcgatggtctttgctcacgcgaaaaagcttgttgacgatatcaaaacccccgccaccgatcgcatcgtagccggctttaaggctgatggggtggaggaatgggtttccagtagaggcgggcgctggaatggcacgaccgaagaggcgcttaagttcgccaagcagctgcgcgagggggccgacaaatgctaa

SEQ ID NO: 201440 - DNA, 819 bp, Klebsiella oxytoca
gtgagtaatctcgcaaaagtaatacctttcagaccgtctgtatcggtcgtggagcgtcaggtggcagatatcgatgatggttatacccgcatcgctaacgagctgctggaagcgtttatggctgctgaattaacggctcgccagctgaaggtcgttctggcggtgatccgcaaaacttacggcttcgggaaaaaggttgaccgcattaccaacacccagatttctgcaatgaccggaattcaccacacgcatgtttgcaaggccaagaacgagatgattgcgatgaatatcatcataaccagcggtctttcgatcggggtgaataaggtagtttctgactggaatttcaacattagccaacatggcaaaacattagccaatacagctaatgaaacattagccagcttggctaacagccataagccaactcagctaaacacaaaagaaactattcaaaagaaagaaagaaaagaaccccctaaatcccccaagggggaatgtggcgggcaggaagaaaaaccagtctctcagaaaaaaccttctgtcgactatcaggcagtgatgtctgcatacaacactaccctgggagaccgtttaccacaggcggaatcgctgaacgataaacgacgccgcggtatcaaacgcctgatgtccgagcttaaagaaccaacggtagaagctgttgagaactatttctcagcgtttgcccgttctgcaaagccgttttatttcggcgataacgatactggctggcgtgccaactttgattatctgctgaggtcagaaacgctgattaaaaccagggagggatccctatga

SEQ ID NO: 201441 - DNA, 219 bp, Klebsiella oxytoca
atgagcgcagaaatcatcgatcaggccaacgaactcgaagagctgcagcgtgaagccgctatagcaaagtatcgcatcaaccataacgctgtttcggctactcactgctgtgattgtggggaagagatcaaaccaaaacggcgggaagcggtgccgggctgtcagcgctgcgctgattgccaagaggaagaggaattgcgcggtaagcaccggaggtga

SEQ ID NO: 201442 - DNA, 192 bp, Klebsiella oxytoca; identical to SEQ ID NO: 184818

SEQ ID NO: 201443 - DNA, 627 bp, Klebsiella oxytoca
atgcagaagggatgttgtagtcagcgaaacaggtgccgaaggcaggccgattttgccggtcaacgttttctcttgcgaatatgcccagccgctcgacacttccgcggcattgatagcgcgcacccttacgatgtatcggccggcataaattccgctgacatcaaacgaggcaacggaactccggggcacgtttatccagttgccttcattgcggcgccactgtgcttcataagcaatggcattctttactgccgtccagtgcacctgcagcgtttcaacgctaatcccctgattaaccacggaataagactcaacaacgatattagctggcgcgctttgcttccctggaggaataacgctgattggtcgactatcaataatcgcaccggaatcaatcctggcgtatttatccggatcgtgagcagctgcggaaattgtaaaggtgctatcgttattatctttaacacccacaacacgatattgctggaccctcagagagtcagactcaatggcccatacgcattccggttctggtctttcggcatattcagcggtgacggtgacgacgtgtccatcgacgctctcaatggttcggccttgcgtcccccccgatggcaggttcaataa

SEQ ID NO: 201444 - DNA, 954 bp, Klebsiella oxytoca
atgatgaagaaaaacagcacccccacaccccacgatgccacgttcaggcagttcctgacgcagccggatattgcccgggattttatgaagttgcatttgcccgctgagctgcaggccatctgcgacctcagcacgctgaaactggaatccggctcgttcgttgaggatgacctccgccagtatttcagcgacgtcctctacagcctgaaaaccaccggtggtgacggctacgttcacgtgctcattgagcaccagtcgtcgcctgacaggcacatggcgtttcgcctgatacgttacgcggtagccgccatgcagcgccatctggaagcgggccataagaagctgcccctggtgataccggtcctgttctataccggtaaacgcagcccgtatccgtattccacccgctggctggatgagtttgacgacccggcgctggcaggcacactctacagcggcgctttcccgctggttgatgtgaccgttattccggatgatgacatcgccggccaccgcagtatggccgctctgaccttactgcagaaacatattcaccagcgcgacctcgctgaactggttgaccggctggcgcccattttgctggccggctatctgtcttcatcccaggtcatatcgctggtacactatatactccaggcaggcgagacagctgacgccgaagcctttgtacgcgaactggcacagcgtgtgccgcaacacggagacgcactcatgaccatcgcacaacagcttgagcagaagggtatccagaaggggattgagcagggcatccagctcggtgaacaacggggtattgaaaagggccgttcagaaggtgagcgtcaggccactctgaaaattgcccgcaccatgctgcataacggcattgaccgcaataccgttatgaaaatgaccggcctgacggaagacgacctggcgcagatccgccactaa

SEQ ID NO: 201445 - DNA, 513 bp, Klebsiella oxytoca
atgaagttctctaacgtaataatacttgcagttatattaggtggtgggtacagctatctttttcccaaaaatgcagcgcctactcctaacgaagtgttgattacacagttcgataagcatgatgttgtgaagagaagcgaatggaggaaaggcaacgttattgatggagttcagatctattctgtccgcaaagattacgcagtattccagagtatctggagcttaggaagggatgaggctggcgtgatggttttaactgaagggaaggaaccaaaaattgaggcagccttcgctttaagtcagtgcaatcaactggccagcgcggtaatagacaccaaaaccgacgatacttctgatgccgtattttctgtttttcaaaaagcgctaagcgctgaaaaagataataaaggagtattgcgtgctactggagaagttggcgggaaatcatatgatgtatctgctcgcgttatcgactcggtgttaacatttagttgtggaataaaatcaacataa

SEQ ID NO: 201446 - DNA, 447 bp, Klebsiella oxytoca
gtgctcgcggaaccccgccagctggttctcgtcggcgggcagcgtgtgaataagcaagcggtgagctggcggggtggcctttgctttggccacatcggccggcagcatgagataaccggggcgatgctgggtcagcatttcactcagtacccggtctatttcatggcaggcatttcccgctgcgagcaccgcctgagagcaggtaatatgttcactcatacgcgaaaagtggctgaaatcaccgtcgccaagcgtatggtgcagcagctcgccgcgctgctgtgcgccggtacagggagcgccgacgatatgcaggaccggtacatgctcagcgtagctcccggcaacgccgttgagcgcgctcagttcaccgacgccataggtggtcaacagcgcgcccgcgcccttaatgcgcgcatagccatcggcggcataggcggcgtttag

SEQ ID NO: 201447 - DNA, 1893 bp, Klebsiella oxytoca
gtgcagactacagccgatgccacggcttctgccgttgattctctgacgacgaaagtcagccagcaggacaataacatcagtagcattgggaaccggactactgcactggaaaatggtttgtctgtgacgaacgccagtgttaacaaaaaggcggatgccaacacggttcagacattgcagaatacggtgacgcagcagggaaaagacttatccagtcaggggaacgccatcacttccctgaataacatagtaagcagcgttaaagatgatatttcgaaaaaagccgatactgccgcagtgtttgcactgaccaaccgcgtgactgagacagagcagagtatccgcagtaatagtgatgcggtgacttccctgagcagctctttgagccagcaggcgcgacgtggggcaaatgttctgcctgatggcacctgggagagctacccggttggttacaatgtggcgaataaccgcgtgttggtgacatccgatgaggcttacagcggcgcgaagtgtatccgcctcattcgggcgaatgactacaatgcaaccgccagcgacaacaatgattgccatattttcgccggcctgcaggtccgtgatggagcaacatattacgttgagtttcgtgtgaagccggatccgaaaggaacagctatggccgataacgtgcagttgtcggtgggtttttcgctgcaggacatgagcggcagttggtcctggcctgcactgacgaaagcgaagaaagaccttgtcgctgaaggctggacgaaggtctccgggtatttgaccaataaccggaccagtattaaacaagcgatggtacgtctctcggtaccgaatgtgtcaacggtgaaagcgggtaacgcctttctgatagacgatttgtttatcaccgaggtgactgatgcgaaagcagctcttgatgctgccgatgcgaatgcgcaggctatcatgaacctgaaaacaaccgtgacgcagaatggcgaggatattacctctcaaggtagcagcatcacgaagctgacgaatgacctggctatcactaatggcaatgtgaataaaaaggctgatgcaatagctctgcagacgctacagaatacagtcacgcagcaggggaaagaggccgcttcacaggggacagcgctgacgagtctggaaaatagcctgaacggcctgtcggtgggcggagtcaaccttattcggcattctgatacgctcgatggatggagcagcagatctccttcagaaacctaccagggggcgagtgtagcctggacccgtctggtgaagggaaccgggggttatgtccagctggatgagcaaactctggatgtgacggggaaaaccgagttcatctatagtttttatgcgaaaggggcttatgcagcacaagaaatgacagcatatttttataacccgtcaaatacttcccggattgaaacaaaccagggatacaaaagctcagccggggatggtgccgcacagtttacccttaccacctcatggcagcgttactgggttcgttgggttattccggccacagcgggcacaaagcgtttgatcccggcccgtttgcagcatgcaccatccgcggataaagaggtctggctctgccgtccaaaactggaaacaggcaacgttgtgactgactggacgcccaataatgacgatattgctgcagagatccaggctaatgctggagcagtccagaacctgtccacgcgagtgacaactgcggaggggaaaattacttcttcgggcacagcgataactcggctacagaacgatcttgcgctcacacaagctgatgtatcgaaaaaagccgatactaccgccttgcaaacggtacagaactccgtcacacagcaggatgttacgagggaaatcatttga

SEQ ID NO: 201448 - DNA, 1587 bp, Klebsiella oxytoca
atggtaagaaactatcaacagttagatcgtcgtcttactcgaatgggaataacagcaggtaaaacccgtgaggaaatcgctggtatcttcgatattgcacaagatgtagcaattaaattcggggtagataccagtgagattcaaggagcgtttgaagaaataaatgctcgttcaggtgatttagatctagctctaaagaacaccgagaacataggtatggcgctgtctgcatcaggggccgaaggtcaaactctcggtggtcttatagcagagtataaaaaacttcagatagaagataaaaagcagacactccttgctttggatggaatgaatcgattaggaaaggaaggcgcatttgaactaaaagatgctgcggaaaagcttccagcatcgttatccatgtatgcagcagtgggtggaaaaggtgtcaaaggtgcaatggatgtgatgacagttgctgaatcagcgatggacgtcacagcgaataaggacaaagcagctacagcggtagagaactttattcgagaccttcaaaacccaaaagttgttaaaacattacaaagaaatggtattaacgttttcgacagcaacggtgcaatgcgtccacttcctgttttgctccaggaaacagcggctcgatcttccaaaggagggataaagaagcagcgaggtcgtcttactgaagccgggtttaaccaggatagtatggatttgattgctggcgcttccggggaagctggttcgcagaagctgaagacttatatgaatgtagtcgctgatggtcaaagtataattgaagatgcggcttatgcttcaaaggactttatgtctgccactcaacgcctttctaccgcatgggaaaagtttactaaccgagaacttgcaggtcctgttcaggaactggctgatgctcttaattcggtggataaagagaccgtcaataattggcttgaagttggtaaacaaatcacgatcgctgtcggtggcctcattgcagcccgcaaagcctttcagctcggcaaaggcgctctcgatctcttcggcgttggtaaatccaaaggtatccccaaaggcgtttcagatgtgttcggctcaggtgtgatgccggtctatgtggtcaatatgggctccggtggtatgggtggcggtcctgatgttggtggccccggtggtagaaaacctccagggcgcggcgtccccggtcgagcatactctgcgatgggctcagcctggatggttggtcctctggctgcaaccattccatttcttgatgagaaaccaaaccttaccgatgatgacaaagccagcatggtcaaatgggctcaggaccgagccaaagaaccatctgtatggtcccgtgttatggactggctccagcccccagctggttatcaggatccatcgccgtgggcgtcgatgcagccgcaaaaccagcctggctatccgttcctgcagcaacctgagctgaagggcagcatcgaggtttctgttaaagatgatcgggtacaggtgaccagcgttaaggtcaatgctcccggcgtcactatgagtgcgggtaccggattacgcagtacggagcaagactaa

SEQ ID NO: 201449 - DNA, 261 bp, Klebsiella oxytoca
gtggacgttctcagcctcggccagacggactttctcctcgccgcgctggcgcatccctttgatacgctgctggcgctggtgatattcggcagtcaccgggaatgcctgttgtttattaccatcccagacagcttcacaaataaaggaaccatccaggcgacgaataaccacacgggttgcatcgtgaatatcgtaattaaccagcaccttattgccgtgctcgttattcagctcagcggagtaatacaggttattgaataa

SEQ ID NO: 201450 - DNA, 204 bp, Klebsiella oxytoca
atggtttttaatgccgtggcgcagggcatcggcaacggctatcacactttcagacagcgccagactccagccgacaatataacggcagctaccatccaggataaacgtcacctccggcgagaacgggttgccgtggtcagggtgggcgactttcatcttcatgccgtggccgtcaccaatccagacgtaattaaccggaagtga

SEQ ID NO: 201451 - DNA, 435 bp, Klebsiella oxytoca; identical to SEQ ID NO: 180801

SEQ ID NO: 201452 - DNA, 228 bp, Klebsiella oxytoca
atgaaagttaattttcacaaacatcctgccgtcgatttttctctgagactgacgctgacgagaattatcatttctccggcgctgtacttttcatgggatgccgtcaaaggaacatcaggcagcgattatatcctgagcgttatctttattctctgcatgggcggtgtcgggcttatgaattatctgtttttttcggcgctgaccagacttttacagaagggaaaataa

SEQ ID NO: 201453 - DNA, 261 bp, Klebsiella oxytoca
atggcgcgtctggctcaggttgttggtgttgagtcacaacctgtcagcccctttggtccgtctgttatggggctgctggaggaagcgaccgaacagatggggctggcagaaaccctctatcgcgacaccaaaaccagcaaccgctatgctgctgcccgcgcccgtatggcagtcagtctgctgatgcaggcggctcagaagatgatccgcgaacagcagtatgccgaacgtatgcgggcggaggataaagctcatgattaa

SEQ ID NO: 201454 - DNA, 261 bp, Klebsiella oxytoca
gtggacgttctcagcctcggccagacggactttctcctcgccacgctggcgcatccctttgatgcgttgctgacgttggtgatattcagcagtgaccgggaatgcctgctgtttattaccatcccagacagcctcacaaataaaggaaccatccagacgacgaattacaacctttgttgcgtcgtgaatatcgtaattaaccagcactttattaccgtgctcgttattcagctcagcggagtaatacaggttattgaataa

SEQ ID NO: 201455 - DNA, 1758 bp, Klebsiella oxytoca
atgacctttacactacgtccctaccaaaaagaagcggtcgacgccacgctcgcctggtttcgccgccaccatgaacccgccgcgattgtcctgccgaccggcgcaggtaaaagcctggtcatcgccgaactggcgcgcctggcgcgcggtcgggtactggtgctggcgcacgttaaagagctggtggcacagaaccacgccaagtattgcgcgctcggtctggaggcggatattttcgccgcgggccttaagcgcaaagagagccacggtaaagtggtctttggcagcgtgcagtcggtcgcccgcaaccttgaccagtttcagggcgagttttcgctgctgatcgtcgacgagtgccaccgcatcagcgacgatgatgacagccagtaccagcagatcatcagtcaccttcagcaggtcaatccgcatctgcgtctgctggggctgaccgccacgccttttcgcctcggcaagggatggatttaccaattccactaccacggcatggtgcgcggcgatgaaaaagcgctgtttcgcgactgcatctacgagctgccgctgcgctatatgattaagaacggctatttgacgccgccggagcggctggatatgccggtggttcagtatgacttcagccgtctccaggcgcaaagcaatggcttgttcagcgagtccgacctgaaccatgagctgaaaaaacagcagcgcgtcacgccgcatatcgttagccaaatcgtcgagttcgcccacacgcgcaaaggagtgatgattttcgccgccaccgttgaacacgcccgcgaagtgaccgggttacttccgcagggcgaagcggctttaatcaccggtgaaacgccgggtccagagcgcgatcgcatcattgaagcgtttaaagcccagcagtatcgctatctggtcaacgtcgcggtgctgaccaccggatttgatgcgccgcatgtcgatctgatcgccatcctgcgcccgaccgagtcggtgagtctttaccaacagatcgtcggccgcggcctgcgcctggcgccgggtaaaaccaactgcctgatccttgattacgccgggaatccgcacgatctctatgccccggaagtggggacgccgaaaggaaaaagcgacaacgtgccggtccaggtgttttgcccggcatgcggtttcgccaatactttctgggggaaaaccaccgccgacggcacgctgattgaacactttggccgccgctgccagggctggtttgaagatgacgaaggccatcgcgagcagtgtgattttcgctttcgcttcaaaaactgcccgcagtgtaacgcggaaaacgatatcgccgcccgccgctgccgcgagtgcgataccattctggtcgaccccgatgacatgctgaaagccgcgctgaagctaaaagacgcgctggtgctgcgctgtagcggaatggatctgcagcacggcgcggatgataaaggcaactggctgaaaatcacttattacgacgaagatggcgcggaggtcagcgagcgcttccgcctgcatacccccgcccagcgcaccgcctttgagcagctctttatccgcccacacacccgaacgccgggcgtgccgctgcgctggataacgcccgccgatatcctcgcccagcaggcgctgctgcgccatccggactttgtcgtggcgcgcatgaaggggcaatactggcaggtgcgggagaaagtatttgattatcagggccgattccgccgggccaatgaactgcgttaa

SEQ ID NO: 201456 - DNA, 228 bp, Klebsiella oxytoca
atgcacgatgacgcaccgcgcgttcgccatatccgcgaaacgctattatcggacaactggtacacgctcaagaaatatacctttgaactactgcgccgtgacgggcgctggcaggagcagagccgggaagcttacgaccgcggcaacggcgcggtgatcctgctctacaatcgtgaaaagcaaacggtaggtgctggttcgccagtttcgctttccggtgtggattaa

SEQ ID NO: 201457 - DNA, 150 bp, Klebsiella oxytoca
atgtgttataagaaaaaaggccatatcccgtgtgggatatggccttctggaggggaatataatgaaaacctggtgatacttaaattttacattgtgaaaaaaaatggggaatacaagaatatctgtcttaatataagcatattacggtaa

SEQ ID NO: 201458 - DNA, 630 bp, Klebsiella oxytoca
atgaatattaatactaacaactacggtctactgaaccagaattatgttgcacgtattcaggacactatcacaaaagccctgaatgaatatccccgagtaatggtgttgagggtagatctccgtttacctgacattgagacgggttcatataaaacggattccgggctggtaacacgtttcgttgtttccctgaaggcacagattgaagcagacttactgaaaaagcgtaatgccggtaaacgggttcacgcctgtcgggttcgtcatatctgggcaagagaatttaacgagtgcgggaaaaaacattaccacgtggcgctacttttcaatcgcgaagcatatgcctatccagggagttataccggcacaggcggagaacatacccacaatctggctatgatgattatggaagcctggataagagccctggggctgaataccgttgttaatcatcaacaacattatcccctggtagagtttccggctaatggctactaccacctgagtaaaaaccacaacgaccttacaacccagttatcagatgttactgatcgggttaactatctggccaaggacttcagcaaatattactcagatggtcagcgtaactttggctgcagtcagtactga

SEQ ID NO: 201459 - DNA, 210 bp, Klebsiella oxytoca
atgacagattcaaaaactcaaagcctgctcagtgataaaatgatcgacatggcgttcattacagaattcacagggttaagtgataaatggttctataaattaatacaggatgggttatttccaaaacccattaaactggggcgtagctctcgctggctaaaaagtgaagttgaagaatgggtcagccaacgtataacagagtcaaggtga

SEQ ID NO: 201460 - DNA, 1593 bp, Klebsiella oxytoca
atgaatttatcccccgaactgcataatgccagcctggcaaaccgccaggatctgcaatatagccccgagaaaaaggcattattgccttatccggtcacgtcctttccccaggttctcctgaatgtcattcaggagttacataaaaatactcaaattccggttgcactaattggcaatgttgtactggcaaccacatcattagcctgccagtcactgattgaagttatacagccccacaccaatatgcctgaaccctgttcactttacctgatgaccatcgcagaatcaggagaggggaaaacaacgattaataagcaggtcatgaaaccctgttatacattcgcagcagaactcattcagcaatacgagcagcaggtcgtcgactataaacacaagttaaaagtctggaaaattcgtcagcaggcacttgaaagtaatttaagacaggctattaaaaaaggatatccgggtgaaaatgaagagcatgaagtcagtgaacatgcccagaatgaaccacaacgcccgtcacgacccaattttatttatgaagatacgtcgttgaaagctctcgttgaaggcctcagtgaacaccctgaagccgggtttatttctgatgaggctattaccttttttaaaagttacctgaaaaataaccctggattattgaataaagcctgggatggtgagatgtttgatttccgtcgggctgaccgagaaatttatcagataacaccacttttgacattttcattaatgtctcagccagggatctttaatgattacataaaaaaacatgagatatcggcacgtgccagtggatttctgtcgcgttttctttttgcatgggttgagagctcaattggctcacggcagaatactcatgagaaaatggatgctgactctcatttagatattttccataagcgtgttgaagaaatcctggaactaaataaactacaactaaatgttccaggtatccggaaaaaacaactaactctgacagataatgctctaaccttttggagaaataatcgtacggaaacagaaagaaaaatatcaccaggcaatgaatgggaacacatcagggatatcgcttcaaaatcaagtgctaatataataagaattgcagccttgttgtcttttttttgcgatgaaaaaatagagacgattgattcgaactcaattagttgtgctactgacattatggactggtaccttaatcaggccagtaatattttttaccctatgtcagaacgctgccagtttgagcaggatgttcgtgaattacatacatggataatgagaaggattgttaaaaatgagggttttgctattctgaaaaatcaacttgaaaaatatggtccccatcgactgaggcgcacagagaaactaactcctgtgttaaatcagttgatttctcagggcgttttttcagttattcaggctccatccggcagtgctttatacgttaccattgttcaacccaatgggtgggttaaccctctgagagaattttcactctattcgccatgtacggtaattcagtcacgtgaaaatacacaggggagactgtttcacgtctcattaaagtaa

SEQ ID NO: 201461 - DNA, 855 bp, Klebsiella oxytoca
atgaagtatgtctttattgaaaaataccaggctgagttcagcgtcaaagccatgtgtcgtgtgcttcggattgcccgcagtggctggtatgcctggcgtcggcgtcgctatcagataagcccacgtcggcagttccggcttatctgtgatgagtctgtccgtaaggcattcgctgaggcaaaacagcgctatggtgcgccacgtcttgcagcagagcttcatgtgtacaatgtcaaaaccattgcatccagcctgcgacgacaggggttgcgggcgaaagccagccggaagttcagcccggtgagctaccatgaacatggcctgccggtatcagaaaacctgctgaagcaggactttgacgccagcggtccgaatcagaaatgggcaggtgacatcacgtatcttcgcacggacgagggctggctgtatctggcagtggtcatcgctctgtggtcgcgagcggttatcggctggtcaatgtcaccgcgaatgacggcacagcttgcctgtgatgccctggagatggcattgtggcggcgtaaacgcccgcagaaggtaatcgttcacacagacagaggcggacagtactgctcagcggattatcaggccttgctgaagcggtataatctgcgcgggagcctgagtgcaaaaggctgttgttacgacaatgcctgtgcggaaagctttttccattcgctgaaagtggaatgtatccacggtgagcattttatcagccgtgaaataatgcggacgacggtatttaattatatcgagtgcgattataatcggtggcgacggcacagtgactgtggcggtctcagcccggaacaatttgaaaaccagaacctcgcttag

SEQ ID NO: 201462 - DNA, 300 bp, Klebsiella oxytoca
atgacaaaatctgcatcgaccacgaagaagccccgtaagcagcattcgcctgaatttcgtcaggaagccctgaaactcgcagagcgcatcggcgtggctgccgctgcccgccaactcagcttgtatgaatcacaactctatgcctggcgcagtaaacagcaacaacagatgacgtcatcagaacgcgaaagtgaactcgccgttgaaaatgcccgcctgaaacgtcaactggctgaacaggcagaggaactggccattctccaaaaggccgcgacatacttcgcgaagcgcctgaaatga

SEQ ID NO: 201463 - DNA, 2184 bp, Klebsiella oxytoca
atgaataatatcccctcttggattagggccttctttggcgaaagcaatttgctcagccttgataaactgctaagcgactcccccggtgcttacgcgcccgagcagaaaaatgcgctgttgcctcttgtggagagcgcgctggacggtgaatggcccattattctgccttggtgcgaccgccaacactgggttttcttcgcgatggcagaagatgagcgcaccctgcaggaactcaccaaagttatcaatgcccggcttggttcagccgacgttgagcccgaccgccgaatttacttgagcccgacttctggcccgacttttacggcagaaaccgcactgctcgaacatagcccagcagggtttattcgtattgagttgctggaaggtaaacgtgaggataagcaggcaaaaacgagggtttttgctgccctgaaagagttgattgacctgttccgactgcgtccatctctcgttcgcacccgcaagcgcccgtttggtcgtatccttagcgatttcatgctggcaacaaatcaaaaagaggtggatgccagcaatgactttctgcaagaactgcgtgataacggtctgctctccaaacgcaatctgctgctgcttgagcttcagcaggccgggaaatggcaaaattgggatgccctgctaaaccaccaagacttgccagatctgatcagagggcgcattccctcgtcgctgaccagaatgctgcttgccgcttatcagcaccgctatcttggccatgataccctgagctactcgcaggagacgccatcggctttgcgcccagctttccttgccctccaaccgctttttacgcaggttccactgctaggaagcgaggaaggggaaattaacacatggagaagttgggcgattggcgtggcgctggtgggtgaacaaagcctgctcagcatgatacctgacacgctaaaatcaggatggcttcaggaattacagcactgggcagaactcaagagcaccgtgtacgatactccggcctcttctcctgtctcgttgtcgctgccgccaacaacacttgaatctctggccagttatctacaaacgtcgttgacagccaccgccgaaacgctggggagctatgctgagatgctcagcaagatagatccacaactgcttgatcaagctcagaaaactcctcttctaaaaacgctgattgagagcatcaaccggcttactgctacgagcatcaccggctgggacaactggttctcgcgcctgcgcgaacccgatgccgatagaaacgctctgatgcaaattgtcgcgctggagagtgagcactggccagccacctccttccaagaatcggcttttgttcacctgctggcgcaggattttccgccgcatgccttttcaacactacgcaacgccatgcccgcctttatcgagtggctggggaaaaaccaactgcaattgcagagtacaacatggctgaaatggatggatgttctggcgatggaacaaagcgtcagtccggcggacatcaaactggcgaccctagcaaccgaatatttcctgcaaggtcctctcaccctagctgaataccagaattttgttgctacattgcaactcattattgagcgctgcagttcaattaaaaatctgacctcgcttgaagagatgatcgaactgtttctggatgcaccggagcacgataacgccacacgaaacgcgctatggatggatattcagacttttgctgttggtgtatggccgcgcctcgatcactcaaaccgagctatcatgcgtagtctggccatcaacgtattgggcaatggtgctgattcagcgtttcctccggaaccggcacgaagcgataatagcgagcctgagacactaccggatctctcgggtaaacgcgtcgccatttataccctgacagaaggagttgcccgccgggccagggggatgattgaagtgttgtttcaggggatcagagtagatgtgaatcatgaccataacgcaacggataagctggtcaatttagcaaaacaggctgattactttatttttgccgccgcgagcgcaaaacatcaggcactgtatgcgataacgcctcatcgtcgcgatctcatttatcctgaaggtaaaggtgctggttcgattctcaatgcctttgttgcacgtcttcaacaaacccatgagtattga

SEQ ID NO: 201464 - DNA, 531 bp, Klebsiella oxytoca
atggaagagcaacgacaaatatttctccatggacctctcggacagcgacaactgagggaagtactgagtgcgcagttcagtgggcttatcctgtaccctgaactcatctggctgatctcgccatggatgagcgattttgacgtcattgataatcgcggggggcaatggagttttcttgatccgtcttggggtgccagaatggtcagtttccaggagcttctggcgacggcggtgaataacagctgtccactcaggatagtcactcgcccggacacgcttaacaaagtgttcgttgagcggctgcaggcaagactttcgccggatcatgatatgcaatgctcctattatgagaacctacatgccaagggcatgttaacaaagcacttctttctgaaaggctcgatgaactacacctggagcggtgcgaaccttaacgatgagcatttgctattctccagcaacaaaaccctcatttctgacgcgctgattgaattcggtgggcaatataccttcggtgacagtgatgaataa

SEQ ID NO: 201465 - DNA, 4431 bp, Klebsiella oxytoca
atgactgctgaggatataagtcgtctgcatgcggcgctggacgtactcgaagggcgcgaagctgagttgctggtctggggagacacggaaggctcctttacggatgtggatattctgtccctgtttgcccaccattttcctgatgataatggcaaagtgctgatgcaggatcttcaagacgccgcgatgttatttagcatccccaatactcagggaatgaggctatatcgcactcgtatggcggaatctgttcatctctttcgccatcagcgccagtggtttcgcggccagcagttgaatcgcacgcggtcgctggtggctgactatcgctttatccgccgtccgcgcagttacccggcaaggatatatccggctgaagaggtgctgaatcaatggtacgacgttgagtggatgaacgacattaaacgtcaggccctactaacgcttatcggtgatttctccatagccggttttcagtctaaggctacggcgcgcatcctgcgggcatgggattttcacagcagtcacccacatgccaaagaagcaaccgccaccatcgtatgtgccggcaccggcagcggtaaaaccctggcgttttatctgcctgctctaacatcacttatcaacgatctgcaacgcgaccgctcggcgcgggttcgctcacttgccctgtatccgcgtaaagagttacttaaagatcagtttatggagacttggggaaaatgccgcgaagtggacacccaggcacagaaactttccgggcgaaaaatccgcattggctccttctttggcgatacgccgtacagcatccagtacgttgataaagacaaagatcttcattttgatctgctacgctgcagcactccaaaatgccaaggcgaaatgcgctggaaagcggaagatatccgtcagggcaaagagatcttgcgttgtacgcactgcacgcacagcgtgggtgaagatgaagtggtgctcacccgcgtctcattgatgaataacccaccggatattttgtttaccaccactgaaatgctcaaccagcatctaggcaacaacaaggccagccatctgttcggcgtcggcatgaatgtaattgcaccgccggtggttttgctcgatgaggtccatacctattcaggcaacagcggcgcgcaaactgcctatctacttcgtcgctggatgcaactggcgcgctgccgcccgcattttgtgggcctctcggcaacgttgagcgatgctgagcggttcttcgcagacttggtaggagccaacaaaaaacatgtcatgctcattgagcccgctttccaggagatggtagacgaaggggctgaatatctgttggcactgcgaggcgatcccgtttcgcaaacggcgctgctctcaaccaccatccaaaccagtatgctagcacgccggattatggatacccgcaaagccacgtcacacggcacctggggtcgcaaaaccttcgtatttaccgacgatcttgatatcaataaccgcctctaccaccagctctgcgatgccgaagggtggcgtacgcgcggacaacaacttctgcctaacgaaactccgctggcagctcagcgtaacgaaaacaatggtgcttccgacgcattgacccttgccggtcaaaattggcgaatggtgatcgatattgggcatcctcttgatggtcacgatcgtgccatcgtggcgcggacatccagccaggacgctggagtcaatcctaaagccgacattgtcgtggcaaccgcctcgctggaagtcggctttaacgatccttcagtcggggtagtgattcagcataaagcaccgcgcaatgtcgcctcttatctgcaacgcaaaggccgtgccgggcgctcaagaaccatgcgcccctggatggtggtcgtgctgtcagaattcggccgcgatcgtgtggtgtaccaacgttatgaggaactggtgacaccggaaatcaagggccagtcactccctctaggcaatatccatatccagaaaatgcaggcagcgatggcaactctggactggctaagcatgaagatccccggcagtaacatctggtcattgctgaacaatccgcccaaaagcaaagagcagcaagggcatctggagcgcatgctcactttgatttccgccgtgctggaaaagaatgtctctcagcaggaactcgaacaatacttattctacgcgctcaaaataaccgagctgcaacttcagcgcgttatgtggtctccgccacgctctatcatgatggagttgctcccgaccttgaagcgccaattgaccacccggtggtcgctgatgggtactcccggcgcagacagatcgacggggcgttcaccactgccttcgtttattccagcagccctcttcagcgagttgaacttgcctgaactgagcatccagcttgaacgccgctttacgaaatatgaaaatctgccatttattcagggtctgaaggagtttgcaccgggtcgcatctccaagcgctacgccatttattccgatctggaagccgattggctggtgccaaacaattttgtgccgcaactgaaccaggtttcagacatcgatttcgagatcaacgaggcatttggtgatacctggcagccggagtgtctgttaacccttgcggatgcatcgcagctaaaagtcattcgtcctctgcaaattattacccgagctcttgatttcaaacagaatctgactgagaagagtaattctcagctaacgtggcacactcacttttccacagatgcccatgccgaagcgatggcgatccccgctgggccatggagcacagtgttgcggtccgccacgttttatacacatcaacatatgaccccccttgagctgacgcgttatgccaccgccgccagcgcttcgctgcgtagtaaaagtaaacagcaggcctgggtgaattttagatgggtcgaaaacggtcacccggtcgcagttggtgcccgccagtgggtggatggcatgaagctgagttttacgctgccttccgcactgcatcagcaggtcatgaatgatacaaagttagccgggtctctcagaacgctctatttccgccactgtattagcagtgaagctcgttttgaatatgacagtttcaccgctgactggatcttcgagtgctatatggcggcgctgaccaaagaagttgtcagcagtacagccctcactgatgcaattcacgctctgcgcacgccggagggcagagagtcgctggcgacaattgccgattcgctgttccaggccgaaaatatttttgaaaacaacgacgatggagagggctccgcggagcgccaagagctacagcagcaattgaggagtctgttcaacgagccggaactgcttgcaatgcttgatacgcatagcgccgtgttgactgacgacctcagccaaaatgcctctttttgccagtggctccagacgttgttgatcagcaccttctctggtgccgtaaaacagaccagccatatgttgctgcctgaggtggacgacagaggactgctcgttgacgccgttcttgatggggagcaactcaatatctggctcaccgaatcagagcctgggggctgcgggattatcacccgcctcgaagaagcgttccacggcgatccggtcgccctgctgaatctgtttattcgtagctttgccgccagcgactacgagcagatcgatgacgatctcttcgaactgctctcgcgactcccttcaaacaccacattgcagcagacgctgaacgatttacgcttggcggggagtcatcatgatcgccggattgcgaatggaaacctacgcactgagctaaaaaaacaaggatttgcgctttctcacagctttatgtctgtgctgcatacccgcatccttcgccctggcagccagctttctcacgatcggcgcttgctggactatctgcgcgaatggcgggcgctggaggccaaagctggttatgagattaacctgaatatttttgcccatactcaggcaattcaggaacttcccggagcgaacgtcacaaaaattttcgaccgtttttgccagattcagggcatgctgtggcagcgtggcaatactatccgccagtcgatactcagctactacaacccctttgataacgggccaaaactcacggaaaggctgctgctcagcaccttgttctggcaacctgcgacgcaggttgatgtgacagacagcgactggctttcgcagatccacacggcgatctctcgcgaagggtttgctgaattactgatcccccgggaagcccgccaacaggtggtacaggccgtatccgcgttacaactggtacctgtcgattatttcggcctgcacctctacccgagaattggggccgtcgactatcgaggcggcaacatcgtgttgcgagtcgaactggctgaagctctgcagtaa

SEQ ID NO: 201466 - DNA, 828 bp, Klebsiella oxytoca
atgagtacgttacgccaacagcttgcagagatgcagaagcaactggacttaagcgtccaggcgagtaaagccacgcaaattattgaaaaatgcggcatcgttatctcaaaaaccgacaccgtcgcagggcattatagccgccttaaataccaatacccggccctgcaaagtctgccgtctgaattgagggtcaattggagagaagatcagcgaaatgaaatcaaaaatgcagctaacagcgtcaataacctgctgtcgcagtggagccgctggctgaataatcagacccaggtcgcagccgctgccaatacgcaagcctctgatgaaccgttggatgaaacgcttacaatgcaggaacccacggcctatgacattattcagaatgactcccttaccaactgcgtgagccaggcactcagcctgcaccgcacgatgagcgaccagctgaaaaacgcatgggaagagtggcagcagatcctgtatcagcagattcaggtagacagcaaaaccctcgatgctcagcagaaactcgagaaactgaaagagattgctgacgaatacctaagcctgcgcgacaagtttgacaccttgatccagcctttgccggagaacggagagagcgtgacaaagatccggacaatggcggagcgactgaacaccctgcgcggcatgatgaaaactgactggccagaagcggtgcagaacttccttgaccgcatcaatggcccgcagcgaaacaaaccaacgctgagcgcattgacgacagaagtgtttgagtggctgcgagatgaagacatgttggaagactttgtgattacaaggaaatag

SEQ ID NO: 201467 - DNA, 3141 bp, Klebsiella oxytoca
atgagcatcatgaattactggccgtcacttgagcatatcgagcagtgcatccgtaacgaagccgaagagttgcaggatgatgtgctgctagcggtacatgagccgatggtgcttacccgtcgtgacgtcaacaacaatcaggctgtcctcagagatgaagacctgtttacgcaactgctcaccaccgagcgagctatcccgctcatcggccgttcagggatgggaaaatcgcatctggtacgctggctggactgtcgtctcaaaagccatctgcatgcaaaaggcgaactggcaaaatgggaaattgttcgtatcccgaaaaacgccagcctgcgccaggttctgctgctgatcctgaaaaatctgcacggcgatttttttgatgatgtgcgcaaaagcgtcgacgatgtggctgaacaacactccgctaaagatctcgctgatctgatgctgaccatgatgtctcatcaattggaaagcatgtataacgaggcgatgaaactcggccaggaatatgaatcgcaagggaaagagattccaacagagatcggcaatcgccttgatgcgattaacgaggaagttagcaatggtattggtaaactcattaccgatccaaaattcaaagaagacatacttcagccagggcattgcatctacagacgagccagtcgcatgagcgatgggcttaaagacggtgatgaggatcacgataactacgaacttgtacctgacgatctctttttccagaaaaatatcgatgatctgtcgtcacctgcccgagagtatattcgccattcccgcatcgatgaagaggggaatgagagagcccgtatccaggcggtcagcgttctgaatgaagcgatgcatgcggcgttaaaatcgctgttttccaaactctttaccttcaacggcggcaacttccaggagttgttccagcaaattcgcagtgagttgctcgcacaagatcgccgcctggtgatcctggtggaagatatggcagccatttcggccattgaagacgtgcttatcgacagcctaatccaggagggtatgcgcgatggggtaaaaacgctctgcccggtgcactcagtcattgcagtcaccgataactatccgggctataagcgccgccaagaaacgctgatgacacgcgcaggttatgagtggagcattgaaagcaccgatagagacaacaatgaagagcggattgtgtctctgtgtggtcgttatctgaatgcggcacgccatggcgcatcagccctgaagcagtcgcgggcagaaggtttggccgactggcctccaatatggaatgatgacggagcgccagaatggttggcggactttgggacgacagacaaacagcaggttccgctgttcccgtttaaccgcaacgctatccgggcgctggcaaataaaaactgccgcgacagcagcggccaactggcttttaacccacgaattgtgatcaaccgtatcctgctggatattttacgtgattgtcgcgttgaggcagagcatggggcatttccaccgccaaactttgccggaataatcacggatcctgaaatccagcataaaatcaaccagctaactaccagcaggacgagcagtgcagcctctctggctgcattgtggggatacggcagtcactcttgggaggagatttgccagcaattaccatcaggtgtcgccgaggcctttggtttgagcgagttagccaagtgtctgaacggcaaattgcctggaggaggcggaataacaccaccaccagtgctaccacctattatccccccaaagcctcccgtgaaagaaccgggactgccttttgttaaacaccttaaagcctgggtcaacgaccaggcgattttacctcaggatgttgcccgagaccttcgcgcaggacttaacaattgctatgaactctacgcccaagtggaattttccagtatggcagagcgaccatcactgattgagcgtattcctttgattagcctgccactggcggcttcagatccctcgaacgctattgtgaaattctatgacgtcaaagacctcaacgatccgctacgcagggtagagatctacaacgtgtcgctggcgattttgcgtatccagcattacaccaacataagcgtaggatttagctaccctgaagcaatggaagactacgcccactatgaaaactttgtcagttggtgggtgccgcaggccacggagattgcaatcaaccatgcccgggtgcggaaactgaagcctgcactgcgtaatcattaccagaaagcactattactgggcctgttgactggtaaagaaaatccagcggaactcattgatgcgctttgcctgacgcagaaaggcgtcggtcgaaccgaggggaaaactcgcggtcgcactgcagactctaacccatctgacctctgtttctatggactcgaagccaaccagaaaccgcattccagcataaaagtggctgaagcccggcaggcagcgcttcaaggttgggacgacgcacgcgacgggtggctttctcaggttgccgtccctgaattaagttccgggctcacctcaacccgcgcactcgaagccgaagtcgtcacctccgcgttgaaagagatacagaaagaaccgctgggagcggatgtgcagcgcgcggcagagacagcccgcaaagagatcgcctcaacgatcgaaaattcccaactctttgaaaatataaaaaatcaggatgatttcattaccctcctcgatgagtggcagacgtttatcgaagcggttcgcacccaatattaccctccggaatccgaacagatcagaaactcatcctggttgctgggtgaaattgaagcattaagagtggatgcagaggccagcctgaacacgctgctcacgcttaattccctcgtcaaacagaaagatgccttcatgttgtggcatgacatttcccatctggatggtgattacgtcagccgtatcggccaccttcttgcgcagtggcagaacattcaatcaaaaatcagttttacgctacagcaggtaaacagtaagggtgacgcgccgaaactcgaaagtgcccgcaggcaggttgaagagagactgaaaaatctggcagctgatatcagtgcctctggggtgaatgaatga

SEQ ID NO: 201468 - DNA, 873 bp, Klebsiella oxytoca
atgtcaatcatcaataacgcaaacccaggaagcagcctggtgctgctccccttgtttgatcgcattgtacaaaatgcccaggcaccgctttccccggaagcggttgtggcccgctatcggcccaataacctgcccgctaacgataacgcctggggaaaaatcagagagaacctcgccttttggtgtcgactgggactctggccgatggaagaagagaggatcctgccgcagcccaatgaaactcgtccgctctatcagcgcgtgctgcaatgcactattgatgcctgcaaagaaaaaggtatcgctgaaggtaaggaatgtgagccattgtggcgagtgctgacctgtttgatgaatcttcagcagcactcattaggcggcaaggaaccgttggctccgaatatcatcactgaaaaactgcaaagatggcttccgaccgaaaccattaactccaataccgaaaagctggtcagggaatatggacgctatctgggctttctggaactggccccggaccagaactactacaccgatccaacccgggcaattcagtgctttttgccgcagatttttggcgagcaaaaaagtctctccattaaaaccttcatggccaatatggctgaagtgatgccgatgatggacggtggtgagtttcgggtaaaagtgcaggagatcatgagcgaacggaactggtctgcaccggaaggtaagaatatcagcaccagtacttcacttgcgctacgtcgtctggaaatcgaccagaaaattcagctgatcgttgggagtgatgacgccgcctcattatcgctgcaattgcccaatggtgaaatccgtccagttagccaggtcaatctcagggaggccgcacaatga

SEQ ID NO: 201469 - DNA, 2481 bp, Klebsiella oxytoca
atgacggaacaatggtcacgtctgcagtttgcgctaaccacctattttaccgatgacgttaccttcaaagagggaattgaaaatcccttcttcctgcggttaatgaacatcatcatcgaccctactgcgggcctgaatgatattttttccggctatgctgatgcccttcgcaccgcacaggtgagcggcatcgaagatccctggctgccttctccgccgactctgacggagaccccagacccactttgggggctggaaaaatccgtcgtgggacagacgctgtcactctctgctgaagcggacctgacgggcacccagaccacttaccagcgccgaacccgacgtaacttattgcagccggaaatggatccggcgctcaagaacctgctggtcgacacgccccatacgcactaccgtggtttcggacagcaggcggcaatccgcacgctgctcacctccgacgtcaacagcactctggtggtgaatctccccaccagctgcggtaaaagtcttatcacgcaaatccaggccatcagtgcgccgttcggttcgttaacgctggtgattgtcccaacggtcgccctcgccatagaacaagcggattttatgcgggacatgctgcgtcaggctgagcaggatcacggaggaacctatgcctgggttggcggtcaggatcacacaacgcgccagacgctgaaagagcggttgagaaacggctcacagcgcgtgctgttttgttcgccggaggcggcaaaatcgtcgctggttccggtactgtttgacttggcgaaaaataacctaataggtgccgtcgttatcgacgaagcccatcttatagaccagtggggcgctgaattccgccctgattttcagctgattgcgccgctgattcgttcattaaaagcccagcccggatgccgttttcgcaccctgctgctctccgctacctggagccagaacacccgtgatgtgattgttgagcagttccgctcaggtgagagcgagctgatcgaaattacggcgaacttcctgcgccccgagcccgaatacttcgtgcatgctgagcccacccctagtgcgcatcagcagcgcgtggagcagttgctgatgacgctgcctcggccgctcatcctctattgcaccacgaaggaagaagcggaaaactggcatcaccgactccagcaacagcattacaagcgtgttggcctgttccatggagacacggaaaccctggcccgcaaaaagctgatttcacaatgggcaagcgaccagctggacatcatgattgccacctcggcgtttggcgtaggaatgaataagagcaacgtccgtacggtcattcatgccgccattccggaaaatatcgatcgctattatcaggagtgtggacgtgccgggcgcgatggcaaagcctgtcaggcgcatctggtctggcacagtgcgcaaatggagacggcagaaagcctatcggttgaaaaacttatcagtgtcgaaaaaggctaccagcgttggatggccatgtttgatcaataccagcccagcgatatcgccagttacagcgtctcactggatactaaacccgatcatatcgactatcagggcgatcgaaatcaagcctggaaccgcagaaccttactgttgatgcagcgcaccgggctgattgaactggtgttcgcagcccctgaactgccagaaaacctgcgaaaagacgaagaagaaaacgctcaggcggttcacgattggtttgcccggtactacaacaaagtgcatatacgtcactgcaacgactcgcaccactctaaagagtactggaatacctttgttgataaggcccgccaggaagaactggataagcgccgcgcggcatttaccctgttgaaaacctggatcctcgaccctcgcccttccttgtgccagatactaagaaaattttatatttatcagaaccatgcgccagaaataacctgcggcggatgcccggggtgtcgggctcagggtaaaggcgcgttctccccgacagtcggggccgatgtggaaattttacgagcgacgccgaagaaacgagcgcgcttcgctggtgccgtcaggaaagtgtattacagcgatgaactggaaatgagaactctgctgtcagaactccgcgtaccgcttcgtcaactgatcggctctggcgattacgagaccatccgggcagataaggccgatttcaggcatcttgaacgcgccctggattccgtctctcgcttctggtgcgtgcaaaaacttgccgcccccacttccgacagcgcggaaattgtgattgtgtctaacactgccactgcgctaccggacctaccggcctcgcgatatgaacgcatcatcatcgccccgcagcacctggccgatccgcagcatccttacagaaaatggtgggaaagcgcaggcaacgcgcaacccctggacacttttatcaggcaactacagcatgtcaatcatcaataa

SEQ ID NO: 201470 - DNA, 3114 bp, Klebsiella oxytoca
atgatgagcatattatctattgggtcgctggttatttctgagcattttgaaggcatcggaaaagtcgtcagcattgatactgatgcaaacaatgcaatagttgctttttttgagtcgcctgcacacccctatacacgtcaggttacaattagccttgagaacttgacaccgacgattccccatgaagaagttgtcgtctactgtcttgaaccacaaagtcaacgttggacgcgcgctcgattcggtggatcgcgacctaatggtgattttttggtcatttttcgcgaagatgacgcaacgacgctgcctatcgataagatcttcatactgaacaaagcacccgataaacctattaatcctgcacattttctggcttaccaggccaatgacgctcccttcttctttcctcgccgacactccttcatcaagacctatatccagcaacgcgcttcctgcaggggtctagcatccatttccagcagcgctgtcgaactggaaccgcatcaactggccgttgtacggcgagtattacaagataaaacgccgaaatatattctggcggatgaagtgggtcttgggaaaaccattgaagcaggtatggttatccgtgaacatgccctggaagaagcggggcatgtcagtatgcttatcgccgtgccaagccaactcgtcagtcagtggcgggaagaattaggtgaacgttttcagctaaaccagttgctcgttggtgtctcggcaatgctctccttgttaaagcaagatggcgctgcacaagggattgttatctgtagttattctgaggcttgcctcctgctaagcagaggattctcaccatccctgatgaccattgatgaagtccatcaaattgccgactggccgtggtctacggacgaagaccagcgtgatgatttcaaactgatatcacaaacatgtcagaaagcacattacacattgcttctcaccggtacgccactgcatggccatgagcgcaacttcctgtcgatgctgcactgcatcaacccggaagcattccagattgatgaaaaccacctgcatgcattcaccgaactagtgaaaaatcgtgagagccttggcggtattttctcttctctagttccatctgtgtctaatattagtcttcgccgtaaccttgaagaggttctggtgcaattccccgacgaccatcagttggcaacgctatgccaaggactgtttccactgatcgggagattttctcagccaacacctgaacgtgaagcgggtattaaagcgatacgactacatcttggcgagcattaccgcatccaccaccgtctgctgagaaatcgccgtcaggttgcactgagtcaggatgaaagcaaaaacctgaatttggatcttctcttccctggtctgaatggcgtgaaggaatctcactggcaaaccgaaggactaaccctggatgagttgctggaagagtatcgcgctatggccgtactaccgcaaaaccagcattggtcgttaaaagaagcgaactacatcgcctggattgacgatctcttttccagtccgatttgtgttctgcaacgggcaaaagccattctcacagagtcaacgggactgcccaaggatgagcaagccttactggaacacatcgtctcgacggctaaaaatgagcaacaagctatcgataatatgctggccgcatcgcttaatgattggctaaatcaatttccagatggcaaagcgattgtcttctgcgatcgccctgaactggcacagcacctgtcagtaaagatgagtattctgctggaccacacgatagaacgctatcagccaagccaaccactgcagttcactcaggcgcaaaaccccgttcgggtgctattgtgcgatagaagcggtgaggatggactgaatctccacggaggacgtcgcctggccgttcactatggtttgccgcgctcctgcagtcggattgagcaacgtctcggccgtctcaaccgctacagcgccaacctgcgtggtatcaaaccagttcaaagcctgatactaaaaaaccatgtgaccgatagcttacgcaatcagtgggccgacattctggtgaacagcattggcgtgtttaacaacaccatcgccagcctgcagtttgtgctggatgactatatcggtgatgcctggaatagactgttcctcgaaggcccacaagtgctggaaaaccttgctgcagaattccccggtgaaaatggcgtcttggtcagagagactaacaaaatcaacatgcaggaaaaattgctggcgatggatgaagaagtctcgcaagcggcacttttcgctcaacagttgagtaatgacgatctcattgcagcagaacagtgtaaagcactgacgtcatggatctctcaaggattgcgtttccgttcatcaggaaatgctgaagaagggatgcgctttagttttgaactagctgaacgcagttctgggacgctggtagatttcaaaacattcctgacaacctgcatgctcagcttcgacaaagagggaggcaatccgccttctacccatctgatgagtgcagaacgtatccctgccattgacgggacaacggtttatcctttgcgttacggccaacctttcgtcgatgcgatctggcagttacttaatcaggatgcacgaggcagttcggtggcgatgctacgtatgattaacgcagaactgaatgaacctcgctatttcttccagatgagttggctcattactggctgcgatcctctaagcccttacgccactcttcgtcaatgcgatgaactggagccgccacgcattgttgaggagtgggtagctgcagacggttctcaggtgacaaatccacaactgcttggaatgctgaacagcgagtacagcaagaccccttctgccacaaaaagttatgtggacctcaatctgcgagccactagatggcaagaaattgaagagctgatttccgctgatgcgtggaaagaacaggttgagcaggtatatgataaagcactgcaaaaacagcgtgatttgtctcaagccaacgcttatatccagctgatgtcggtaaaagcgatcattctttgcagtagcaatattttatctggagtcgcctga

SEQ ID NO: 201471 - DNA, 192 bp, Klebsiella oxytoca
atgaaaaagacccgttataccgaagaacagattgcgtttgcgctgaaacaggccgaaaccggcacccgcgtcggggaagtctgcagaaagatgggcatctctgaggccaccttttacaactggaaaaagaaatttgccggcctggaggtgacggaactgcgacgtctgcggcaactggaggatgaaaattag

SEQ ID NO: 201472 - DNA, 717 bp, Klebsiella oxytoca
atggcaagactgagaacgcggatgagtaaaattaaagaactgctgcgcctgaaatttgactgtcacctgcccaacaggagcatctcggcctgtctgaatatcgggtgcagcaccgtctcggatgtggtcacccgcttcagggggagccagctagcgtggcccctgccggaagagatgacggaatcacaactcgaagcgttgctctataccggacgcgccagcgacagccataaacggatgccggacttcccgctgtgccatcaggaactgaagcgtaaggggatgaccaaaatcctgctctggcaggaatatcaacaggaagccgacgaaaatgcctacggatacagccagttctgtaacctctatggtgaatggctaaagctacagaagcgcagtatgcgtcagcatcatgtagccggtgagaaactgttcctcgacttctgcggaccaacgctcccggttatcaatccggacacgggggaggtccggcaggcgcatatcttcgtcgccacgctcggtgcctcaaactacacctatgttgaagcctgtgaaaaccagcggcaggaaagctggctgatggcccacgtcagggcgttcgagttcttcggcggagttcctcagcttctcatcccggataacctgaaagcggcagtcacccgacaccacagtcatctcggtggcgtcagcccggagggtttcgaaaaggcctcaccgtga

SEQ ID NO: 201473 - DNA, 813 bp, Klebsiella oxytoca
atgtctcgtagcttatatccaactaccttatttcactttactgaaaaattagatactttatttgaaatacttgattcaagtaattttaaaatctcttttgctagagagtttatacaagggcccagtacgaacagaaacttcggcataccaatggtttcattttgtgatatcaggcttacacaactcacacagcatacagatagctatggtcattatggtataggtttatccaaggtttgggcaaataataatggcttgaatcctgttatttatatgagtaagtcatcaggcgtttttgataattataactcagaacttagggagttaaggctagagcggaataagttctcaaagcaactagaggaattgaaaacatcagggacaaaagttcaacttaaaaaagcaactctcactcttaattcgatggatatgaaatataaaaaaatcatagatcctttgcgttatatgaaaaattatcaggccactttaaaaagacgtaatgggactgagttgcctaactatatttttgcggatgaaagggaatggcgattcgttcctggtatagaaaaatcaaaaggtaaaccactaatcgcagggtggaaaaatatatcaaccattgaaggtaagatggaatataacgagtactatgataacgacaggctacattttacagaaaaagatataatgtatgtgattgttaaacatgagagtgatgtagaaaaaatgatagaatatttatctttaaaatatggttctaaaaggagattgattccgagaatattatcaacagagttaatcgctaatgatatgtga

SEQ ID NO: 201474 - DNA, 189 bp, Klebsiella oxytoca
atgttttgcaccgccgtggggcagtgggatgtgactcctgcccccgcattttgtcggacgacggctggcgtcttacccgacctggggggcaggtcagaatcgacaaatgatgccaattttacgccgtttcccggcggcacgatcccccatctttttaaccgcccgcaggcggtaattttggcgtcatga

SEQ ID NO: 201475 - DNA, 873 bp, Klebsiella oxytoca
atgatgcatattatttttgatgatgtatatagaagttgtgttataggtagatataaaagagattttacacaaaaagaaaatcatcagggtggatacttaagaggatgtcacaaaatatataaagtgtatgcgctttatggattattatatcaatataaagaatgcgataattttcctgattatgattctgttgagttattaagattatataatgaaagattatcaaaaaaaggaactcaacctagaaaatattataatgagttgattaaacgaagtcctgatagaaaatgtctgctttgtcatgttggtgaggcgagtacactagatcactttttacctaaagatatctttccttccttatcaatatcgtacaataatcttatacctgcatgtgattattgtaatcgcactaaatcaaaatattattcattaacaaaagaacaacaattgattcatcccttgttcgatcttttttataatcacaactggttaaaggccacatattctgagagggataatgttatttattttgatataaactatgcaccttatacaattgaatatgcaagagcattatttcatgttaaaaaatttggtttattagaaacttacagtgcaaagtccattagcttggttaaagaaatagtcggtatagcaattgaccatgatttgtctttaagtgatgtgatagaaattaaacgtcggatgcttatcaggcgaagtacttctgctgcaaaatcaaaatatactattgatttatggaaatggttgacccttgaagcgctagaggcatccatagtatttatgaataatggaaaggatatatttggaagtatttccatatttgaaatgtcatctgctacatatgagtaa

SEQ ID NO: 201476 - DNA, 1479 bp, Klebsiella oxytoca; identical to SEQ ID NO: 104949

SEQ ID NO: 201477 - DNA, 300 bp, Klebsiella oxytoca; identical to SEQ ID NO: 104948

SEQ ID NO: 201478 - DNA, 855 bp, Klebsiella oxytoca
atgaagtatgtctttatcgaaaagcatcaggctgagttcagcatcaaagccatgtgtcgggtgctgcgcgtggcccgcagtggctggtacgcctggtgttcccggcgtcatcagatagacacgcgacagcagttccgtctggcctgtgatgccgcggttctcagggcattcactgatgcaaaacaacggtatggtgcgccacgacttgcggatgagctcccagcctacaacatcaaaacgatagcagccagcctgcgtcgtcaggggcttcgggcaaaggcagcccgcaagttcagtccggtcagctatcgggagcacgggctgccggtgtcggagaacctgctgaagcaggtcttttttgccagcggtccgaaccagaagtgggcgggtgacatcacctacttacgtacagatgaaggctggctttacctggcggttgtcattgacctgtggtcgcgagcggtaatcggctggtcaatggcaccgcgaatgacggcgcaactgacctgcgatgcgttgcagatggcactgtggcggcgcaagcatcctgaaaatgtcattgttcacaccgaccgtggaggccagtactgttcaacggattatcaggcactgctgaaacggcataatctgcgcgggagcatgagcgccagaggttgctgctatgacaatgcgtgtgtggaaagctttttccactcgctgaaagtggaatgtatccacggcgaacgctttatcagccgggaaatgatgagaacaacggtatttaattatatcgagtgtgattacaatcgctggcgtcgtcacagtgcctgtggcggactcagcccggaacaatttgaaaacaggaatctcgcttag

SEQ ID NO: 201479 - DNA, 171 bp, Klebsiella oxytoca
atgatatggctttttgaagtcaatagctcagcaaccaaaccatttgggattatgcgccgttatgctgactgtataacatggttgtggttttatgctgagatgctgggcaaaaataccgacaacttattggggaattttttagtaattattaacatcatcaatgatgattag

SEQ ID NO: 201480 - DNA, 2223 bp, Klebsiella oxytoca
atggaacttagactgaaaaacgtaacaagctatagtaaagaaattttcacgacgatagaccttagccaaaagataaatattatttatggacaaaatggtactggaaaatcaacaatatcaaactatttctatgatatgtccgatgaatctttcaaaaattgcgagtgcactttactagagtattaccgaccatttgtatataatacaaaattcatagaggaaaatttttacaatagtaatgagcaaaaaggagttttcacactaagtaaagagaacaccgacattcaaagagaaataaatgagaaggagaatattaaaaaaaaccttactgatgaatataaggaaaagaaaagacaacgtgacaaattagttgaaaatgaaaaaaatgcagaattagcatgtattgaatccgtatggaaaaaaacagaaaaactcagaacatcatctttgaaaatgttgatgaaaggttctttaggtagtaaaaaatctttttatgataaattaaatacaatacatccgctacccaatatagatttgagggaattagagattgaatatgatagtttactcacacataataatcaagaaattgtagagcttacactaccattaatagaatttctattacctcatgagcatgatttattagcaacccctataattgacaccagtaacagttatctttccgaaaatattaaacaactacaaaacttggattgggttaaaaaagggaaagaattataccttaataataaaacctgtccattctgccaggagcaaacaatagatgaaaaatttattgcagctgtagaatcgatctttgatacgaactatcggcaaaaaatagaacaaatcaccgccattcgagaaaaactgagcactctcatatctcaacagttaactttacttcataatgagatcaacacatgctctattgtgccccatgatgaaaaggaacaattaagcacactcatcaaattagtaagaaatgatgcggataaaaaccttttgttaataaataataaaataaaaaacccatccattatcgtaaatattaagactgatgatgaattaaataatgaaattttcaataaaatcaacaattacaatataaaaataaaagagataaaccaaaaagtcaaagattttaataaaaccgaaaaaattattaaagggacattatgggcaggaataaatgattattgcgttggagacttggagaattatcgaaagcacaaatctgctttgcgcctagaaattgaaaaagttgacaaggaattagaaactattactaaaaaagggaaggaagtatcgaaaagaataactgaattgcgtgagggagtttcaaatattgatacaacaatagattctataaataaaagactaaaaagccttggaattgatagctttaacatagtaaaacattcaaataatgatgaaaaatatgtcattgcaagaaccgacaatccatcgatgactagtgtttaccgttctttaagtgaaggtgaaaaaacgctcataacatttctttatttcattgagtattgtagaggtaagacagacaaatctgacagtgacagtagagaaccatttgtcataattgatgatccaatatcaagcctctcacaaaattatatatatgacattgcatcaatgattcactttgacatattcgaagaacctttaataaaaaaatcccttatactcactcacaacttatatttctttcacgagttggtaaaactggccccacaaagtgacagagcatttaataaattctataaacttggaagaatcagtaagaacatacacagtttatatacggaatttgatagaagtgatttacaaaatgaatatcaatctctttggcaaatattaaaagatgggcaacaaggaaaaataaataagatagtaatcccaaatataatgagaaatattcttgaatattatttttctttcgtgcataagactgatgcacttcagaaagagttgttaaaattagctaatgaagctgagaacgaaagttttagagcattttatcgttttataagcagaggatcacattcagactctataaatatatcggatatggcaaatatttcacctgaaaagtacatggagcaattcaaaataatcttcgataaaacaggtgacaagaaacattattccaagatgatgaaggaagatgaagaaagtcaggaagaaggggttgttaccgcttag

SEQ ID NO: 201481 - DNA, 435 bp, Klebsiella oxytoca
atggatagcaaagttgaaatgcaaccagttattgcaagaaaactgcgtgacaaagacattggtcattacgttgacatggcaaatgtggctgacgcaggcgcctatatcactatttttactaaatgcggagtaattacaggaaaaataatttcaggtaaaaaatattacgaaagcatcgaaaaaagctacagcacctatcagcagggtacatacggtgctattacttatcaatattttcagaatgccaagaaaaactacacggaggaggccgattgggttgaggatgaaggcgcatcatatcctctcaattttatgcacctcgaagatgtatcgataatggttggtacaggtgaatggcgtgggtttagcaatggtttgcttaggattaaaatagaagaaatagacggctacatgttaggtaaagcccaaggctaa

SEQ ID NO: 201482 - DNA, 1287 bp, Klebsiella oxytoca
atgagtctagtaatgaatcaaagcctaggtaaaatgcaaagattttttttctgtataattgtgttttttgttgtttttgatggcgttaggagcaatcttgtcatttctaactttgtcgcgccgttacgtgagttggctttgctcatgtttatcatgctcagcctgccgatgctttcgcattgcaagaaaaaggactttagactagccattcccttcatggccatatcagcattggcgatcgtaaacatccctataaccctttttcacagtatctcatcctatcatttaggtaacattcttgtattcggtaacccctacacagctgtttataagcatataattttctcaatcttatttcttgcaatgatatgttttgcgagaaataagattgattatatgaggaagggccttaagcttttcataaacctttccgcgatatatgcgttaattaccgtccccatatatatttatggcgcaccgttatttgttgaaaagtttagagactggggtcgcatggggattggatatccaacaatggatggtcaggtaatatgcatggcaatattctgcttggtttttcttgtcccacaaagaagcaagctaattttcaatataaaaatggctgccttacttcttgggctggtttgtcagaatacaggcactgcgatggtgacgatgctactaatagcattagttgctatagtgaaaaagccagggaaaacgcttagttacttttctgtaattttgccgatgataattattgttgctataaagcagtattattcagaccctgagttttttactcaaatgctttatgttacaacaaacaagataaaccttttaattgatccaagtgcaaactatggccaagtaaatacgctggaaatgagggaagatcaatacaggatgcttaacatcatcattgataaaaatccattgttatggattttaggcgttggcggtgaggcttatgttgaaaatgagtttaagttgactctagcatcctacggtattttctcattcatttcctttgtcttttcattcttctggatttcgactcttatttttatatctaaaaacaaaaacaagttactattgatttctttgatggttgtttgggcatttacatcttacacccttgccagcattttcctttttgctacatcttgtggtttctgtatcgtctttgcatatacatatgtgactggtcttgagggttatgaagatgatatggaatatattgatgacagaaggtttaagataaaattcaggctacgtagatattga

SEQ ID NO: 201483 - DNA, 1380 bp, Klebsiella oxytoca
atggtgcttatgaggaattataccaggcgagagattgttactgggctggcttctggtgtcgccttagctctagcggcaccaagggtggttctggcaggcggtggggacgcagggagttttgtggttgctgaagattcagatgtgcccgttgatggtaagggtgccaccgtattcataagccaccccattgtattaaggtcagggcattatgcgaacattaaatttgcaccggccaaaggatatgaaggtcctggtccaatcttcatggcaagagatggtaaagtgatccatgaaaacatatcagtttgtggatttaaaggccctggatgcaaggtgttgagctcaagtaagattggcaatagctttatagcgatcggaaattgcacttatagcgacaacggctcactaaaaaggactgttctttctgagcgtgccaatatgcgattttctccatcaataaaggttgatgatgcatctctgtttaatgcaggagattttgtgtggataggcgacgggaaatatcgggttcgagaggttgatgataaccatattttctttgtaatggatggtgcgccaaacttaataagtccaaaggtgttcagcggagcatacgacagatgcaacgccggacagtttgtgacgcttaatgaagatgataacaatggcattagaattggtgatggtggctatggatgggacattgacacatcaaaagcaacaataaactgcagtaataacgggcgttcaggtttttaccactcatgcaagaaatataacggaaagcagattattgaaaacatcaccgctgtttcaaatggctatattaatattgggttaggattcatgaataagggatgggtaaggaattgtatagctaaaaattcaagcaataattgtatagatatatttgaaagcaaaaatagtgttgatgtctataacaatatcgtttcagggtctggtgttgatggcatctttattggtggtaacggacaaactgcaagggtttatgataaccatgtttctcagtgccgtagggttggcattctaataaatgccagaacaaaaccaattgaaaatgtatacataaaaaacaacaaggtaactggttctggggcaaactcaattactctaaccgcagttgaaagcggtcttgtgacactaaacacttttgatggaagcatttatagagaggctgttttccttgaaagaagaaatgggctttcactttccggaactctcaatataagtgacaatactatcttgaatgccaaaacaggagatgttggtagtaattaccacggttattcaaaagcaggacaagctagggttatgataaaatcaacaagaaagttaagcgtgaatggtatagatggatactaa

SEQ ID NO: 201484 - DNA, 1008 bp, Klebsiella oxytoca
atgagagagcagtgggtagactatgcaaaaggcataggaataattttagttgtagttggccatgtgaacagagggcttgacagttctggtatttttatttctgacaaattctttagattgtttgacagcattatatattcattccacatgccgcttttctttttcttatctggattattcttcataaggtcaatagacagatcaggaaaggttgtttttgtcaaaaagaaattagaaacaattgcatatccttatgcgttatggtcagtcatgcagggattaattgccgttgtcctctcaagatttactaactcaaaaactgatatcacatccgtcttctcttttccattcgagcctattgcgcagttttggtttctttatgctctttttatgatattcatggttacatgtattatttatcaaagagcgtatttctcatcatatctgccagctttgatgatgattgctcttacgctgtacatctatagcaacaatataggtgataaccttcacgcagactttataacaaagaatataatatttttcttggctggctctcttttgagcacaattaatataagtagcaataatttaaaacacacactgataacgctgttattctcttttgtgttgtttattgctatgcaatacaaattccatttcatagatggaatgcgttatgatgatataggaatttcaactttcacgcttgccgcgatatcaatatttttcattttttctttgtccatcgcactcagcaagataggttttgaactactaagaaaggcaggagagtatagcatgataatattccttgcccatatcctggcaggaagtggtacaaggatagtgctgagcaaatttatgggtattgaaaactggtacttgcatatggttataggtactgcggcaggcgttttatttcccattgcgctctataaactatctaaaaagcttcacttcgatttcttgttttcatttccaaaagcaggttctaaaaaagggtga

SEQ ID NO: 201485 - DNA, 213 bp, Klebsiella oxytoca
atggctatagccgcaaattacactgctcacttctattgtgactgtgagaaatgcactgaactcaagtggggttcacccgacttcggcgagtatgtcggtgagtcatggacagaatgcgctgctgccgcccgtaaagacggctggcgaatcagcaaagaccgtcagcgctgctatgcgccaggccacaaaatttcacggggagccaacaaatga

SEQ ID NO: 201486 - DNA, 1845 bp, Klebsiella oxytoca
gtgactcgacttgaaaaagaactttcccctgtcgcattgaacggttgtctctgcggtttgggacaggctcatatcgaaacaacgctgagtgcctggataccccaggcgcgggtgattggcgtggaaccaacattgattaccctggccgtcatgttcgttgtggcggggcaaaatacatcaataattccctttcccgagcgcctgcaaaaagccatgggtgagttacgggtacattcggccacagatccgcgacaagtgttactgtccgcactttccccggacacaataaacgcattagtcgtacgcgctgatacgccacgcttatgtacctttatgggtactttggtcggcatggatattcctgacagtatcagggcggcgctaagcaatttaaggcctgattgtgatgcgatcaacctcagcaacgccgcagagttactgggcgctgcgcgacttatcgatccacaaattgccatattctggggagcggatgatgttcgtgaacggttattggcacgcctcacagctgaaattccgtggacggataaaattgaggttgaagcgcccaccggaggtcgtttgctgcgtagtcgcatttttcacgtcgcaccttctgtccagagcaatgtgcatgaagaagtcgtgcaactttgtgagctattgcttggactagatcctactgcagcagtagtcgccgttgatgccattgctgccgataaccttccgtcaggtctgtcggaatacgctgttgctaccaaacgcatacatcgagaaaacctacccaccaaggctctgccagaatggaataagcgctggattgccgcagcggcaaaactggttggaacagaaagttactccgcttacctgcagcgtgcgtacgctttgctggaacagcttatgccagtattggagcgtattgtagactgtgtactacggggcaaggtaccaccaccaaaaattcttgatcgtttcggtgaggtttttgagggggcttgtaacctgacttcaccacaggaaggtctttcaactggcgaggcgccggagcagcatgttaaaccgttacaaaatttactacattcctgctcggctgatttggtcaggcgctttaaccaattaccagaaggttatggtgcattcgtcatatggacaggggatctgctaaaaaatgtctgggaagcacgcagcgaaccgtggtcaatcgtggggatggaccctgagccattattgatgcggttggaaaatatccttgcctctttgcggttgttagccgccgaggctggtagcgaatcttcccatccaacaaagatgtggatagcgaaaacccgcaatgctcagcttggaaatgcactgcgtctggctaaagttgaagctgaacagcagttgaaaacgcgttccggcaggtacttacgccaaaccgaagccagactgcaggcatccggcatcgaattaacgctttatactcgtccggattggaagtccctcctgccttggccaaatgtagaacttcttgcagtggtcgacctggaaacgcctgctgattggctgatctggttcaatgagcatgcagcgcagattcgtgctgacgttggtgaaagtcgccagatgtggattatcccacgcatcgctggatttgcgatttcaaaattaacagtcggcggtatttccagtttcttttcctcgccacatcgtgttgatgattggcttgatacgctatccattcctcagctagacgatgccttggtgaagtggtttactgaatttggccacctgaacagaggtgatatgctcacctcagaacaacacaggtgtcataatgaaaaaaagaaatttcagcgcagagtttaa

SEQ ID NO: 201487 - DNA, 1506 bp, Klebsiella oxytoca
ttggcaacatcacgtgcaggctctcatgctggtcggggttttcgatatcaagatgctgctggcgtctggctggccattcgctgctgggctaacgaactcccctatggggctgtgattcccgaagggaaagatgattacgaactaagtagtactataggcactgctctcgtgcaggtgaagtcacggcgtgaccatcttggaccatttcccgtggcggttgcagtcgggtttatacgagcgctctgggcgcgcgttgaaaatgccgccttccatacaaatctaattcttgttcttgagcatcctgttgccgaggggccagtggttgatcatttgttggctaagcatccagctctggtcagcacacttcaggatgacccgcagtgggcagtccttgccgcacgtactcaaatctggattgcaccaaatccttttgaggctgcagtggcaagtattcattgcaccatgccctgctcggatttggcggctcagattcattatggtgagttgttgaaacagattgccgcgctggcggacaaaaatggtctggtgagggatggtcgctttgaagggctgggtatatctgatgtggaaaccactcttcgtcgaatagaaccagcgctggacatggcgggaatggaatcagctttacgcgacggttactgtgatgttgtcgattttctgacaccattcaatgacccgtccttctaccagggtgtgaacacacggcctggccatctggctgcaggtcttgttgccgagcgtccgaatgcacgtcatgaggtactctccgcattagaatctgctggtgcggctttaattgttggtctgtcaggagctggtaagtctgctttgatgtgggaaaccgcgcgggcgagtcgacatactactcgatggtttgagatgagaagaggtgatgcggctgatgttcatcttctcattcagtttacccgtgcattaagggcttctcctgacgcgcctgtcgggtttgtgttcgatgacgttggtggacgttttagtcagctttggaatgcgctgcttaatgaagttaccgttggcagtggcatactactgttgggttcaatcagggaggaagacactcttatgttggcctcgcgttcccgggctcgcgaagtacgtccgctcatggaagaggctgtagcagaaaagatttggcgccaattagtggaacaaggtcagacaaatttggcgggatggcgcgagccatgggctaaaagtggcggacttcttctggaatatacgcatattttgacccgtggggaacgactgaagtctatcctcgctgaacagatagatcacggctccgcgagtccagggatgaagaactggcggttctcagtgttactgcccttgccggggcggcaggcgcggcggttgatgtcagccgattgccgaaggttcttggcattgaacaaggcgcacttacgcgagcgttacgtcgactcattgatgaacatctggtttccacaccagtggatggtcagctaa

SEQ ID NO: 201488 - DNA, 6051 bp, Klebsiella oxytoca
atgactttaaatgaaaagcccgatccatcaatgaagattgtaaaatcaaaaaccttgcccccagcagagggcgagcggcgggcaatacgtggctatatgggccaatatgaaagagccggcgcagccatttatgctgaattagagcgtgggcaattggagtggataggcgtggcggaccgcagtgcgggtatcgctgatgatttagtacttggatttaatggccttatcgttgggcaccagttcaaaacgtcccgtttcccaggtacatttacagtacagacactcttagtaggggctgatggtctgcttaagccattagtttgcgcctggcaaaatctttgtagtgctaacccaacgtctcacgtagaaattcgtttagttgtcaacgactatccatcagtaaacgacgcccccggaatggaagctccagctcacagcgctgccttccttgatgagtttgaacattttcccaaacgcacgcttgaggaatggcgctacagtaactggggcggtttagtcgaaatattgtttcaacattcttgcctaggtgacgatgatttcgagagattttttcatgcgttgcgcataattcatggctctgcagcagattttatacaatttcataaactcagtgcagaacaagcgagactggcgtctgatatagcaaaaatattacctcagttggtctccgataaacgagatagggaccgatggtcctgtgaagaactattaaatgaactagggtggaaagatccgaccaaaacacgccacgtacatcgctttcccatcggtgctcacgtccaacgcaaccgcgatacggaactaaaacttctccagacgatacgccacacaatccaggggtatgtggcattgattgggcctccaggttcggggaaatcgaccttgctacagacaaccctggctaccgaatataacactcgggtcgtgcgctatctggctttcataccgggagctgcgcaaggtgtagggcgcggggaagctgatgatttcttcgaagacatttctgcccagttacgcagcagcgggctgcctgggcttcgccttcgagacagcagccaatttgaaaggcgcgaacaattcggtgaactgctcaaacaagctggcgagcgttatcaacgtgatacagtaagaaccatcattattgttgatgggctggatcatatcccccgcgaagaactaccagcccattcgctgttaggcgaattgccgctgcctgcagccatccctttgggcgtgacatttatacttggtacccagcgactggaactcaggcatctcaaacccgcagtacaggaacaggctgggcatccggatcgtctcgtaacaatgcatccacttgagagagtggcggtcgccaggatggcagacgttttgggtcttgattcaaccatttcgcgtgtaaaactttatgaacttagccgcggtcatccgctggcggccaattatctcattaaggcactgttatcggcagatgaacaggacacatcatgcatcctcgccggagggatggaatttaatggcgatattgaatcagtttacgcatccgcctggagagaaatcgcaaacgaccctgatgttatgcatgttctgggtttcattgcccgtatcgaagctccgatgccgctgaaattgctggcaacaatcgtagatgctcaggcgatagagcgtaccttaaagaccgtccggcatttactcaaggaaacctcaaaggggtggactgtattccataacagcttccgtctatttgtgctctccaaaccaaagataacactgggcagtatagatgaaacctattcacaacatatttatcgtgaattagctgaactatctcgtcatgcaccagagcattcattacagtcctggctaacactgcgctatctcgcccggtcaggagagcgtgatgaacttctggcgctcgcaacgccagcatattttcgacaccagtttgcacatggacgttcctgttcagagattgatgcggacatccacttggctctgattgctgcgcgttccacgtatgatggtgtaattgccacacggttgctactttgccgtgatgagatatccagacgaactcaagcactggagcatgccaatgaacttccgcgcgcgatgttaaaagttggcgatattgatgcggcgatctctttcgtccaggactttcccaatgcgggctatgaagttgttgacctgcttttggaacagggtgattttgaccgcgcgaaagaactgtttgagcaccttgaaccattgtctcaattgcatacccccagattcgagcactatggggattcgcataatctacaagaattcaaaaaatgggcaaaacgagtttttcacttccgcgacgctgagcaaattaagcaggcaatagactatttgaccgttgaggggttaaaacacgccacaagtttatcaacagatgaaaatattacctctattcgcgaacagttaaagtggacagtagtcgaggcaattgttaattggcaagcagacgttaatattcaggatacctgcaatcagtatggcattcatgagcaagagataccggttttgatgactcaggctggatttactgctaaagacagaggaaatagtaccttagcattggaattatttaagactgtcatggagttgcctgattttaatgatgtttctaatggcgggcgaagatcgattgcattattttatgccacctcgggttgcaccgatctggcttcaatattattcgaaaacctttttgcacctgcaatttcaatgggagacaatgaattagaatcaacaaaagcactgacgcttgcagccatggaacatgcgcaactttgcgttttgctcggaaaatccctgcccgacgtagtcacctccacacacgctatcttacggccgctgcagacacatgcttcagaaacgggacgcttgttggggctgtccataataaatgcatcatgcattccttctggaaatattcaaatggtctgtcgcatggtgatgagatatgtaatgcaactcaacagccattctggaaacgatacctatcaggctcaattggcattgacagctacatcaccactgatttgtacattaattaaaatttctgcgctgtgtggtaaggtcgaatataattcagtactaaatgaaattgataatgtaatgcctgctttaatattaaaaggcaatacactactccggcgtgaaatagcattggcaatgtatcaggctgacggtgaccgtgaaagggcggccgccagacttgagcctatggtaaacgagttggtagaaaatacacctagcgaacaactcgagaccctgtcagttctggcaaacagctttgctgcaattggcgatgttgatcgggcactaaacttgcttgcttcgatacatgaccactgtttaggctacgctctggcagcgcgtaaggaccctttatactctgtttggaaagacatattgattttggccaatgtggcagacccagaacaccgtgctcaacgaataggtcagttgatacaacaggttgatggtatgaaggaaaccgagggggcatctgccgcgtatcgtttgacagaagtgttgatcaatgaagcaatgcgtataaatgcgcacagtggttatatcgtggcacagaaactcagcaactgggggctgattccatggccaaaccgggtaaatgaactgattattggtatgctagatcgccgtcctgaaatggtgtttctctgtacaccaatttggtgcggactatgccttccattctacattgaaccctattatcgtgaccctactcatataggcaattatattgacgttgctgcaaatgcagcggggccttcatcaattgccaaactggtatcaattctattaccggcaatccaagttcatagtcgagcccacgagcgcctcacgctaataaatcgcctgagcaaagcggcattaagacacggttatactgataatcaacttgataatgccattactcgatggacttcagaggcccccgaagcccgccgctcctacacgccacaaaagtacgacgaggcttcaacccttgacgaacttcaacaggcatttgaatcaaatgaatcagatcctgagtatcatgcgccttatcgtttttgtgagcttgcagagtccgccgcattagacaaggtggtgcaaatgtatgagcgctggcattgcctgcagtcggatgcacgttgtcgttttttggttgcagagcggctagttaatgcgggggacacgacgttagccagaaaattagttgatgattacgataccagtagtgatcgggagatgtcatggagccaatggttaggaggaaatcgattccgtctcttccacgcgcgtaagctactcgatggagcagcaattcatcatgaagcatatgaagacttcatcagttcaattgtggctgggaaagagagcaccatgtcattgctaacagatatggcagacattcttcctgtgatctgtgagtcgccagactggcccgccgtctggtctatcctggcagagcagatgtctttcactcgcgaacaccgtattggtgaacttttcgaatttggaaatgaaaatatgaccgacgaagagttacttgcggaattgctccatttttcattacgattgcctatcaccgaagctcgacgacattcagagaaaactgcactaattctggcggtacattcaacaggagggcaaatcgtatttgagaacaccataacacgactcctgaccggcacccttgatgaaccattccaggcattgcaaattttgcttttgctaaaacagaaccactttgctgctaaatttggtgatttagtctctggccttacgaatcatcgtgatgtagctgttgctgaagctgcgtgcttgttagcacaatattggcagctacctgtatcgattgattttcatccgttgccgttgacctatcgattggcactcgacggagaccctgatcatgaaaatgctctgttagaccctgtgagtggggcaatgcgtattgaagtcgacttaggatggacacaaatgcttcgtcccgttgcacggagacttgcagagttggctgattgtgaggaaatgaacatacgccagcgtgccgcaacgtttattcagcaatggggagggctggcagcctttggtcctggagcaacaaaaaaaatcgaatctcagttacgcacactctcaatgcaaatcacctatcttaagccccatgcttacattggcatactggcacttcgtcatgtcgctggagagctgagcttggcaggcttgctctcgccaagggataaaccatcgctactggaacaaatggatgcagtacttccgccaactcctcgccctgaaatgcaaatccggccaactggcattaggcgaccgcttaaagtcaaggatgccccgtggagtgaagctgaagaaatgtggacaaatttggttgacgaggatgttaaaccctggatagatcgtgccgacgaattcgtaatagccgaggtttcacaattcaaaatgcatgatacccggcgtgctgaatatcaggtctatcgtattagcgcacctcaaattcatatttctgttgccaaattcatggcatggtatcaaagtttgcccgctgtcgtttggctgggtaagatgatcccactcgacgaagacctcgcaccgacaatagtcagacgtgtagtaagctccatcgggacaatgtcttcgccgggatatgccattacattatgtcctaatatccagatgcttctgggatggcatgaatccagcgagatgcctaatatttataccgacaaggactcaacaatcgtagcaagattagtgaactggcgagacgctgggccagtggatattgatgatgattatatatggggggaaggttgctatctgacgctttccaaagcaggcctgatacaaatcaagactctgttcggcgaattcaccgtgcgtaatttcgcaagcagggctgttcggcaattgcgacaaggcgaagcgcaaatgataaagacagctcagaatcagttcccgataccgtag

SEQ ID NO: 201489 - DNA, 558 bp, Klebsiella oxytoca
atgaatagtcaagtatccaaccctgagtcgtacatattttctgcaataatccacattggcaaggataacttcaccagtaacgatgtagcaaaaattcttgtcgagcgattctcactccctaaaacttatctaaaggcaaaagcttttgcttataaccaaattcaatatttggttaaaaaaggattattaaataaagtaagaaaatcagacgtgtatcaatatttatattcagccacgccgggatttaatattgcaatggaaaatgtgaaattaattgaggcaaccccaaaagcctcccatcaactttcaagtgctactagccatgaacacagtaatgtaaatattcaaataagatctcttattgaaaaatacagcagtgaattggaaaaagtgacaggagcaaaagaaatttatgacgaattgataattgccgtaccgagcagggaaaatgaattccggaaactttctcacgagcaagagaaaaaacatattaagataaatgaaaaaataaaaacattgattgggattgctaataataatattacgataaggcagtga

SEQ ID NO: 201490 - DNA, 2367 bp, Klebsiella oxytoca; identical to SEQ ID NO: 104936

SEQ ID NO: 201491 - DNA, 1551 bp, Klebsiella oxytoca; identical to SEQ ID NO: 104937

SEQ ID NO: 201492 - DNA, 1455 bp, Klebsiella oxytoca
atgtttgtcggttactttgttcatatccacacaatatatgaggttaagtgccgcgtgttcatactcacacaactcaatatcaaccaacggcagcgtttatgggcactgatggatactcacacgcgccagccgcttttatatccgttaatatatcttatagaccaacttgctttgcgttcatcagccacgcaatccgcctcacttcaagctctcaagtttttctatgaattctggcaccagaaacatggcgtgactttttgcttcagtttctattcctcgaaccacaatccattgattgccattgatgaacttacagcctttttccattatctggaaaatacgcatttatatgttccagcgttaaccataaggtctactacgcagaccacgcctcaacgtcgtacaaatattaggcatatacattcggttattcgttttatcagatatttgattaacacgtatatctcgccgagatatctagacggctcgcctaaagagctcacacgacttgccacgcagttaacgggacggttatcgatacataaagcagaattccgtactcttacccattctcgtcagatgagcaatggcacgacccataagcgctttcgaagtctgactgctgaaatggtcatggctttttaccaaatcattacacccggttcaatttcaaagaaaaacccacttaatcccttccccgttggtgaaatccagctacgtaattttctgatttgcagattgcttttaaactacggattgcgtgtcagtgaattactacttttggagtgtcattcgatcaaaccaaatctccgaggggatcagttcagcctgattgtgaccacagtagatgacgacgtttcggatgagcgaaaaagattgccttcattaaaaaatgtctatgcaaatcgggtgttggcattagataaactggactttcattttctaaatatatatatccataaaattcgccctcaagcctcccatagttttctgttcacttccacccaaaaactacatccgccactgtcataccatgcagtttatgatatctttacgcggattgatgacattatgagtgtgcagtatcccgaatataaaacagatgaatattatgatgccattgaaagcatctcgcctcatataacccggcatacttgggcttatttgacacttcaacgcatttatcgtgaaaaacttcaaaaaactaaggccgactcacgccaagctgtcatggatttttctatcgttggattgatggatgaagccaaggatgaattacggttgcttggtggctggagtcacaatagccatatgcctgatgtttatgccaaaagatttctatcacagcaggctaacacggccaatcttcgccgaatcgctatggataacgaggccctgagagcaaccctttctaatgtatgcgacgaatggagtgcatatgagtcgaatcaataa

SEQ ID NO: 201493 - DNA, 744 bp, Klebsiella oxytoca; identical to SEQ ID NO: 134321

SEQ ID NO: 201494 - DNA, 1530 bp, Klebsiella oxytoca; identical to SEQ ID NO: 134320

SEQ ID NO: 201495 - DNA, 264 bp, Klebsiella oxytoca
gtgctgcgctttcgccagcagctggcgcggacgctggcgacggtggtgaatcttatcgatcccggcgtgattgttctcggcggcggtctgtctaacgtggcgctgctggtgaacgacctggaggcggatgtcgccccgctggtgtttaccgaccatttcaccacccccatcgtgcctgcccgacatggtgacagtagcggcatgcgcggcgccgcctggctggccgtccgaagcggagtcgaaaatgaaacgttcacagattaa

SEQ ID NO: 201496 - DNA, 474 bp, Klebsiella oxytoca
atggctgaactgattttaacccctacctttcctgtgaatgagctgcgcatcatccgccgcgccatgcgcctgctggagaaataccagcgcaatcccggtgaacaatttcttgatgccagctttactaaaatctggctgcaactacgtcttgcccggcaagaacgggaaatatttattgcattatatctcgataaccagaaccgcctgctggaacacgaaacgcttttcctcggcacgattaacaataccgaagtacatcctcgcgaggttgtgaaatcagcactgcgccataacgcggcagcggtgatccttgcccataaccatccgtcaggggttacagatgccagcaaagcagatcgcactataactgaccggatcgtaaatgccctggatctggtggaagtacgggtattggatcatttcattattggcgatggcgatacgttgtcttttgctgagcggggttggttgtaa

SEQ ID NO: 201497 - DNA, 969 bp, Klebsiella oxytoca
atgagtgagattagaagtgacgactggagaaaaagtgaacaggcgaagataaagttgaatgatgaacggtttcttaagttttataggaactatgttattttaaaatttcctcaagtggcatatagttctaaggttttgcaaaatggtgatcttggattttcagaaaaagttttaaatacatatcttgaacagtatattcccgtacttgaaaatcgtcttgattttattcatcaaatggaagtggctcttgacaaagtaattataccggagaactgtttttcttggtttaagaataataaaagagcaacgttctggttgtgggggatgttgtggtatgacggtgcatgtaatcatgaaatttatcgacttttgaaccaacctcaaaatgcttttttctataaacgtgctgaattgagtagttcgcctgaaaatcatgaggctagatttgctcttattataaacttgattgattatatttgttttacttatgaaaataaatatgctttgatttgttttcttgaaggttgtttaaagaaatggcgagatggcattaattctcaaaagaaaataaaatggcttattcctgaaaatgaagacgtttgtaagtgggcatatagctatctaaaaaaatactgtggtgatacatctaattttccatctattccgtctccactaggagtggaagagatgtatcatgctttttatgcgatgattgatctatggttggtacagcctgaaaaaatagatgctttcacactgaaaataaataaagcattttatcaaaaaacgttcagaaaaaaacaagcagaaaagaaagggcgtagcgttcttagtgaaaaacacgaagaaagactattatttttggtgagctattataaatcagaacgagcagcggttttagaaatgctgatagacgatagaattcgtggcattgaaacaaaattatctaagcaagggaaaagtatttag

SEQ ID NO: 201498 - DNA, 648 bp, Klebsiella oxytoca
atgaacaacatcatcgaaagctacggcccactgaatccagtgtatgagagacgaatccatgagaccattgatatagcccaaaaagattactcacggctactggctatacgctttgatctgagattccctgacgcagatttacgggattgtttaacctactacagccctgaccacagggtatggccccggttcatccgatcgcttgaggcccagataaaagcagatatcagaagaagaaaaaaacagggtaaacggacctacccctgcaaagtcaggttcatcagagcacgtgaatttgatggttcaggtgtcaagccacatcagcacgtatgcctgctgcttaaccgggatatgtacgtaggacctggtttctacgggtctaaacaacctgaatggctgaattgggaacagacaaggggattgtcccgcatgatcttcaatgcctgggtaagagcattaaagctcgaagataagaaataccatcagttggtctactttcctgaaaagtgtagctatcccgtgatcaaatcacgtccttcttatcaggaggactacgatgcaatgattcagcgagtcctgtatctggcaaaaacacgcaccaaacacaatgaagatggctggcgtaactttagctgttctcgtgggtaa

SEQ ID NO: 201499 - DNA, 216 bp, Klebsiella oxytoca
atggatgctcagaataaggctacccgcctgcttgacgataaaatggttaatatggctttcattaccagctttaccggactaacggataagtggttttacaagttgataagcgaaggaaaattccctgagccaattaaattaggtcgtagttctcgctggttacaaagcgaagttgaaaaatgggttcaggaacggattgaccagtcacgaggttaa

SEQ ID NO: 201500 - DNA, 462 bp, Klebsiella oxytoca
atgcataaatccatattgcaggatgtaaagctctacatggccttcgacagtgaagaccattacatcatggcgaacaaagctgccggtagcgaccaatggttctgtactgactgccgttgccctttgaagctgtgtaacgatacaactggagaagaagtctggtttgaacatgctcccgatgatgagacaacgaaagcacaggcgacgggatgcggacatctgttagctgcaatcagaaagcgggtcttcatgatgcgcttacgcacgatgattaacgaactggatacgctggtagcaacgagatactggttctgtgtgtggtgccagtctcactatcaaggggaaaaacactgtaaaacctgcaacacgggaatatacagtatcagccggggagactgggtttggaattacagtcagaacaaaaatatactacatatcgatgccagcgacaccgttaactaa

SEQ ID NO: 201501 - DNA, 1887 bp, Klebsiella oxytoca
atgcttaggataagaaaaatacttttacgtggaactggtgttcaggatgcctatgtggagtttgatggtggtgctaacattctggcgggggaatcggataccggtaagagctaccttattagttgcttagactatattcttggtgctgaaaagcttaaaaagcggctcaaagaggcaactgcttatacacatctttttgttgagtttgaaaatcctaaaaaagaggtattaacgctaacgcgtgcgctagaagggggtaaagtagtggtccattgcttcccgatccacggtatttatggaaaaggggagacgatagctcctgtacgtaaaggcaagagtcaaggacctgatgtgacctcaatactttttcctttcgcgggaattaaagaggctaagttgcgcaagaatgctcgtggcgaaacgcaacgtctttccatccgcacgcttgcacccctatttttagtcgatgaagtatccgtcatcgatgaatactcgccaataatcggtcgtgcaggttatgacgataccgctcgaaaacggatgttctcatacattctcactggcatagatgatgatggaataatagccggggaaaaaactgaaattgtaaaagcacgactacaggcaaaacttgaggttgtgcaagagatgatacagccgctcgaagagcgctttggtgctagagcgaaaagttttcaatctgatccagaatatgacgatgatcttgataatttgatagcgagattgaccgaagaggtagaaaaagcaacggccgatatttctcgtttacatgaggaaatgcaggtagcaacggcgcttacgttaaaaactgaatctcagttgttaggcgtggctgaaattcaatcgagatatagcctgctggaagagcgataccactctgacttaagaaggttagactttcttacggagggctctcactactttgattctcttcaagaagttccttgttccctctgcgggcaaaatataactcatcatcattttcacagtgaaagaacccaaacactgatgaacaacgatgaaatacgtcgttctgcaaccgcggaagctgcaaaaattcatgcgtatctagcagatctccaaaatgcaattgataatcttgaccaaaaaaagggagagctagagcaagagaaaaatacttctcagactgtacttacaattctacaggaagaactcacgcgtaacttgacacctctacttactagaaccgcaaaatatctagagaaaatgctggagtatcgagccgaaagagacgctgagcatagtgatttccagagatggggcgatttgcataagctccaaaaagatctccaaaaatcacttaccgaaaatagccaatcgaaacaggaatggggagggctgtcttcccaatcattggctaacctttgcagggaaatagaaataattttgaccgagtggaaatggagttctaagccccaagtttcttttgatgagaaagaatatgacatcattgttgatggtcaacctcggcagtcacatggcaagggggtccgtgcaattctctattcggcttttatcattggactattaaagtactgtgttaacaatgggcggccacatcctgggctcgtggtaatcgattcgccactgaccagttacaagaagaaaggggcagctaagatttcggggtcagacgaaccaatctccgctggtgttgaagccggattctggcattcactaacacaattgccggagaccctgcaagtaattgttattgaaaataaagagccgccagcctcaactatcacaaaagttcattacgagtggtttgcaggtgaatatgccgggtccgaagaacgggctgcactgattcctgttattagtaaaaatttaacaatctcataa

SEQ ID NO: 201502 - DNA, 516 bp, Klebsiella oxytoca
atgattgaaatatcaggaatagagagtcactttgaagaaaggcctttcaattctcccttggagtatgggtttcgtgtgcttttcatattatacgcggctagtgatatcgctatggatttacaacgaatcgtttcctatgactatctccttgtgcataccagcgacgtacaaggtgggcctaagagtcttcatccggcagttcctcatcggggagcggagctccttgtgaagcgtagttcaattcaagcagggcttaatttgatgctctcgagggaattgctcgaagttgtcttttcccctgaaggaattttatatcaagcttctgagttaacaggaaagtttatacagcttttggtgtcaccttatgcaagtgagctcacagaacgcgctttatgggtgacaaaacagtttcgtcacttctcgaatgatgagcttgcttcattcatggcacagaatgtgggccgatggggatctgaatttgagcgattgaccgccatagacttattggatttgtaa

SEQ ID NO: 201503 - DNA, 1128 bp, Klebsiella oxytoca
atggtagaggacataaaacagagatccgactctacgcttagcggattatcagcaccgaccccttggccgggagctaatgctcggttgcttgggttaggtgttgggttaccaattgccccccttgttcgtttggcgcaattcagtgcggccgaatttgaacgtttcacgctcgaatgggccttaggctatcttgccaagcaacaatatataaatgaagtgcagcagcgtggcggggctggggataagggacgggacatagtagtatggcttgacccagcaaatgtttcacctcggcgatggcatctatatcaatgcaaacattatgataccaatcttggccttccaaaggctggaggcgaaatcgcaaaagtcattttttatactttttctggtgactacactgtacctgaagaatattactttgttacacataagggtgtcacatcaccatttcaagaccttcttgatgctccagagatgcttaaacatgcaattctctctgggtggatgacttatgctaaagcaatcacctcaaaacacgacatccagctgacaagcgaactacgaagctacatcgaagcattcgatttcagtatattccgtgcaaagcaaccgcatgatttactcgaagagcatagcaaaacctcatttcatctcacagtatttggcgcgcctctaatagagcgcgatcctcccgaagcccctccatcagcagtagaccctattgaaactgtatatattcagaagctttacgccgttattagcaatgatatagcaaaacccgttctgatcttcactgattttgaaagcagtattaaccatgtaaagcttttcgaacgttctcgaattactttttattgtgcagaaggattgaaggagcttgctagagatcagatggctaatcaaactttttttaataccttgctaggtgagtttgatgatgggttgtattacacatactcagatcatgaagggacacctttggttcgtctgaaaaacactgtaaaggcttcgcaaactttacaacttggtgcacatccgcttgctgttcatgtaacgagtaaagaccgtgaaggcatttgccatcaattggtcaacaataaggtgattgactggtgcaatccatga

SEQ ID NO: 201504 - DNA, 2268 bp, Klebsiella oxytoca
atgtacaacttgcataaacttggatggaatagctttcagcaactttgtcttactatcgctcgggaagtactgggtcagacagtacaatctttcttggattcaaatgacgcagggcaagatggcgctttttctggtgattggacaacggtcgatgggcaaaaccttagcggaagatttgtaattcagtgcaagtttacaaacagggtaaatcatcatcttaccacatctgaaatgaaaaaagaaatatctaagattagaaaactggtgaacgaagggttttgtgatgtatatatcttgatgactaatgctggtatttcagggaaacaaaaaaatacgattagctcgctgataaaaggaaccggagtcaaagatgtattgatatttggttctacttggatcgaggatcaaattaaagagaatacgaagcttaggatgcttgtacctcgcttatacggccttggtgatctaagtcaaattctggatgaacgggcatatgcacaagcaagagctgtacttgattcattacacgaagacttggctaaagttgtaataaccggtgcttaccgcaatgcagttaaggctttagacgagcatggttttgttttactcattggagaacctgccgcaggaaaaacgaccattgcttcaatgctggcaatggctgctgccgataaatggggctcatcagtctttaaactgtccgatcctgcgaaagttgcagaaaggtggaacccgaatgaatctgctcaatttttttgggttgacgatgcattcggagtaacgcagtacgaatcatcattagtttatggctggaatcattcgatagttcagattagggcaatgctacagcgtggcgtaaaaatagtcatgacatctcgagactacatctataatcgtgctcgcaatgatctaaaggagagtgcttttcctctgctcagtgaaagccaagtagtgattgatgttcaggaattgtctaatcttgaaaggcagcaaatcctttataatcatctgaaacttggtctgcaacccagagcgttccgtaccagaattaaacggtatttagacgatattgcggctcatccacgttttattcctgagacagcacgccgtatcgcaaatccattttttactaaagatatatatttcagtaaatcttattttgaacaatttgttgataagcgcgagcagttcctgcttgaggtaattgctggattggatgtgaacagtaaagcagcacttggtatgatctatatgagaaaagatcatcttgaaagtcctgttacacttcagggatatgaagaacaggcgttagagaggcttggtagttcactaggggagtgtatttcggcactaaatgctcttaatggcagtcttgtgacgttagtgaatgttgatgacatgcttgtctggcgctttaagcatccaactatcggcgatgcttatgcgatgtcgttagcttctaatcctgatttacttgggatttttttaagtggtagctcggttgaaaatatgatggggcaagttacatgtggcaatgttggtttagaaaaagcagttattgtgccgaaagcgcttttccctgtgatgattgctcgtttatctgaattctctactagtgataaatataaagtacattggatgtctgtctgggaggcgaggagggccctttatttatttttatcctatcgttgctcgaaagagtttcttgaaaaatatcttgagtctacgcctgaaatattatcacgtatatgtaaaccaggcttacgtttggatgttgttcctgaggttactcttgttgaaaccttgcataaacacaaacttctgccagaggaataccgtaaaattttcgttgaaatagtgagtcgttacgctatagacggagaagatgtttatgcattaagcaataagcggattcggtgtatctttacagaagaagaatatgaagagcttataaaatcggtacgaaatgaactaataccaaaattatctataatcagagaggagacacaggctaattatattcaaactgaaacgccagatgactatatgcaggatactgttgaaatgcttgatatattaaaagatcaatttagcgatgactcaatagcaattgatattattgaacatgagataaaaatagtagatcagtggatctttgaggcagattatcctgagcctgagattaagctccgcgaattaaatatcaccggcccaactgatgaaaagcatagtgtgcgaagtatttttgatgatattgattccgattaa

SEQ ID NO: 201505 - DNA, 792 bp, Klebsiella oxytoca
atgatagatgagagcgcgaaagcgatagccgagaagcttgctgttccggtttatgaagatgctttgagcccttttgctaaagaattatcaaagggattggtctctattgccagaatggtaaattctggcgttttcctagtagaagacagtgttcatgctgtgacaagcgtcttgcggatgacagctgaaaatctggcattattaccacccgaacaagtttcattcgatcggccaagggttgctcttcaggctctaaatgaggccaaatttgcaataaatgaagatgaaatacagcgccttttttcaaatctaatatcggcaagcctagacaagaaaacttcgagaattgctcatccggcgtacatcgaaataatcaagcagctccagccggatgaagctaggatccttcggtttatgtttaataacgaaaagcatagaaaaggtcatgcaccaacgattgatatagtgcaacaagattcggagggtagtaacttgggaatcacatcaatcacatcggaagtaaacctaatttgtgaagacgctgattgcgataaccccgaaaactcattaatgtatttctccaacttaaaacggttgggcctgctaacttcatcatcaggaacttcttttccaaaggaagagcatgaaagaattttctcatcagagaaagtaaaaaaaatatgcagtgtaaactcacatctagacagagtttcttataaaagcgggcaatatagttttacaggctttggccaaagctttgtcgattcgtgtgtcggcagacatagcatttaa

SEQ ID NO: 201506 - DNA, 417 bp, Klebsiella oxytoca
atgaagagtttcattttgctgataatttctacatttttttcaatgacgtcttttgcagaaagtaaactttgtgaagagaatacaacgttcttttttgctaacaataaagcacatacaaagtctgttgaactttgctatggacaaaaaggggttaaatatatctttggtccagaaggtgaaccagaaatagcattagaggtacccagagataaaatcatttacgaatatgagaatggctgtgaaagcattaccattcctaatggaaaaacggattactatatataccagtgcgggagtgcacctcaaactgatcctacactgcaagttaaccgaaatggtagtcctattgccacaattgaattagatggcaaagatgggaaatacttaaatgccattgctgacgcaggttttgagtaa

SEQ ID NO: 201507 - DNA, 375 bp, Klebsiella oxytoca
atgaaaattacatcacacatttgtaaattagttttagtatccattttgtctgtgtttagcttgcaaagctcagcctctgagtcaccaataaaagtagatgttggtggtgataaaatgaaggtcggccctaattatttacctatttggagctacaatatcactagtattgaaaatgaggtcgttattacttcaatagttgttaatcgtggcaattgcctgccttcgattgcaggtcgtggaaataacatgaataaacgacttggatatggtgaaacatttacatttaccatcccaacaaataaaaattatactcagtgtaaaccacttgagttgataataggaactcctaatggttcattgaaatatacgtggtaa

SEQ ID NO: 201508 - DNA, 171 bp, Klebsiella oxytoca
atgcaagtaatactttttatattgttctttttaatagctatcccattagcgtttaaatttccgaagatcgttaaagcaatctttaagggtatttttagtttcattatttattttgtaaaaaatgctcccgatgcaataaacaaagcaaataatcaaaaagggaaagattaa

SEQ ID NO: 201509 - DNA, 138 bp, Klebsiella oxytoca
atgtctgaacgttttgaagatagcccagagtatgacgactggattcaggaaacaggcggaagagatgaagactattcggattactataataaatgggagcgcagaaaacttatagaatcattgcgtaagaaaaattaa

SEQ ID NO: 201510 - DNA, 249 bp, Klebsiella oxytoca
gtggagcggctggcgcactcagtggtgcagggacgggggcagcgattggttcagttgtgcctgtggtggggacagcgacaggggctgttattggtgctctattgggaaggtttgtcgctggagcaacggctggagctgttacgggttcagctatggatggggtgctgtttgacaggtacttatgtagggactgtgagcatacattcgattgattgtattgacgtttattgtcctctcctccctcagtaa

SEQ ID NO: 201511 - DNA, 1086 bp, Klebsiella oxytoca
atggcacaacatcctgatttcaaaaaagtaatcaggcatgagatgattgagcttcgaagaagaatgctgggtattagccaaaaggctctttctgatagagtcggcatgtctcaagggacgctttctaaaatagagcagggtctcaaaactgttactgacgaaaaagccgataagttgtcagttgctttatcatgcccggttagttttttttgcatgcctgagcgcatttacggcggcccaataagtgccgcgccgatgtatagaaaaaaagcatctgtgggcataaaagttttggaccgcttaatagcggaaataaatgtcagaattgctcacatcagaaagctattacagtttgttgaatttgaaccagagtttgaaatgccaagctacgatcccgatgattacaatggggatgctggcgaaatagccaggaacgttagaaaagcttggtacatgcctgctggaccagtaaaaaacctgattgaagtgcttgagagggctggatgcctaattattgattgcgatatggatgatacggggctgtctggggtgagctacaatttaccagggctacctcctgtaatttttatcaataaaaatcaacctcttgataggtatcgttttacgctagcgcatgagcttgggcacctggtgatgcataagtcacccaaccagaatatggaaagcgaagcggatacattcgctgcggaatttttgatgcctgcgcgcgatgtgtctccataccttcgagacatgagtgtagaaaaggctgcaacattgaagccatattggagggtatcaatggcatcaattattttcagagctaagacgctgggatttttaaatcaaggtcagaacgagtacatatggcgccaaatgtcctcacgaggatataggcttaatgaaccggtccaactatcagccaacgacgagaaaccaacattactcgctgaaattttcaaccatgtcaaacaggaacttgattatgatgaagatgagttggcccaggtcttttctttgaattacgaagaaatagagcgcctttacccaatgaacaagaaaagcggcctaagattggtgaaataa

SEQ ID NO: 201512 - DNA, 615 bp, Klebsiella oxytoca
atgtctctaatctccaaagaagaagcgatgcttgagcttgaaccatacttccctctcttgcgtaaagccgtttacgcagcgtgggattcatggattgctgggccagtggcacccagaatgcaacataagcgtgtacgtgctaatttggtttggaatgattactttttcgaaatgatgaaggagctgtccactggcgagcatacgggcataagatttgctaaaatcccctacaaccagggttttgcgattaatgaccgttttttccttaaatttaagaaagcagactcaaactttctttcgtctaaccttcaaactcaatcagcgatgaaataccatgatcctgaaattgatatgtttggcggtgaggtcaggctggagcttttgtatgtgctcgaccgcgatggtatcaatattgataaaattgcaattgttcaaaggaaagataaattcgttgcatgggcgattgatattaacgctgaaaacatcattgagatgcctcgtgtaattgagcctaacgtggtcaacaaaccagcagaaacagttgccaagaaagttattaaatctcgcaaaagtgcgaaagataaagtggtaggaaaagatggcacaacatcctga

SEQ ID NO: 201513 - DNA, 468 bp, Klebsiella oxytoca
atgcaggcaacacgtaaagagttcatcattgcgctggacgaaggcaccaccaatgccaaagccgtcgtactcgatagccgcggccaggtcgtggtgaaattctctcagccgctggcgatccagacgccgcgtgaaggctgggtcgagcagtcgggagaagtcctggttgacgcttcgctggcggttatcgcgcaagcggtagcgcacgttggcgcagaaaacgtcgcggcattagccatcagtaaccagcgcgagaccgcgatcggctggtatcgccagagcggtaagccaatcaacgccgcgatcacctggcagtgcagccgcagcgccgcgttttgcgatgaactgcgccacagcgataaagagcagcaaatcaaggccgtgaccggcctgccgattgcacctctgttttcggcctcgaaaatgcgctggctgctggaatcccttcctgaggggcgcgctggctga

SEQ ID NO: 201514 - DNA, 831 bp, Klebsiella oxytoca
atgaatccctatagctatgatgtccaggcccttgagcgtaaagcccgcgccgtacgtcgccatatcgtcagattgaacgccaacagccctgcgggcgggcacaccggcgccgacctgtcgcaggttgaactgctcaccgcgctctatttccgtattctgaacgtcgcgccggagcgtcttgctgacgaccagcgcgatatctacatccagtcgaaaggccatgcggtgggctgctactactgcgtgctggccgaggcgggcttctttccggttgagtggctggaaacctatcagcatgcgaactcccatcttccgggtcacccggtgcgccagaaaacgccggggattgagcttaacaccggcgcgctgggccacggtttgcctgttgcggtggggctggcgctggctgcgaaaaaaagcaacagctcccgccgcatttttttaattaccggcgatggcgagctggcggaaggcagcaactgggaagcggcgctggccgcggcgcactacggccttgataatctgatcattattaatgacaagaataatctccagctggcgggtccgacgcgcgaaatcatgaataccgatccgctggccgacaaatggaaggccttcgggatgacggtcaccgaatgccagggcaacgacatggcatcggtagtggcgaccctggaagggctgaagcaggaaggtaaaccgaacgtcgttatcgccaacaccacgaaaggtgccggtatttcatttatccaggggcgcccggagtggcaccaccgggtaccgaaaggcgaagaaattgcactggcactggaggaactgaaagatgagtaa

SEQ ID NO: 201515 - DNA, 3825 bp, Klebsiella oxytoca
atgatattttttgaacttgaaccttctgatatttcaaatctcaatgatgctgatctaagagaattggtcgctaggttgtgtgaagcggaattgattcgtcaagaacttcagacatcttgtgttctgtgggggggagctcaggaagctgctgacggtggtctcgatgtccgagttgtcgatgctatccctttactaaagccgggctttgtaagtcgtgaaaatactggctttcaagtaaagaaaaacagtatgagtaaggcggcttgcaaaaatgaaatgcttgatagaggaacgctaaaaactgttatagcggatctcgcagaaaaaaaaggcgcttatataatcgttagtggcaaagatgattgttctgacaaaatgctatcagaacgccttctgggaatgaaatctgcgctcgtaggtttaccagatagcgaagagcttctccttgacttttatggtagggatcggattagcgcatggttgagacaatttcccgaggttgccttgtgggtccgctcaagactaggcaagccattatccggatggcgaccgtttgggagatgggcttccaccccagtcgataaagatgatgagtttttgcttgacgaacacccttgcgtcatcgatatgaattcacatcacaaagagccttcaacgatttcggatggaatcaggcttgtgcgtgaaagattacaaagatctggctcggcggtaagaataactggtctatcaggagttggaaaaacacgctttgctcaggctctttttgaaagtgatgtatgcgataactcgctaccgagagcgaatgtaatatatgcggatcttggtgatgaattaactccaacagcatctgagcttgtctcatacttggtagctaatgatttttcaagctatttagtattggataactgcccaccagatgttcatagaaaactgcaaaatcagatttcgtcaaatcaagcaaaattgagtcttctcactatcgaatatgatatttcggatgatcgcccagaagaaacagaagtaatacacatcgaaccatcaagcgaacagaccgtctctaaaattatccaaaagagatttccatctctagggcgcgttaattccgataaagttgcagagttttccggagggaatgcacgtgttgcgatcgcattggcgagtcgagtgggtccagatgagaccttgacaaatttttctgatgaggacttgttccagaggctcttcaatcaaagaaaaggtacaaccgaaagcttgcttgaaagcgcagagatcctatccttagtttattcgttcaatatttccccgaaagagtacaatgatgaattgagcgctctttctagaattggcggatttgaacgtgacaggttgaatcgcaatcatgcagagctattgcgaaggcagctatcgcaaaagcggggaaactggcgagcagtgcttccgcatgcaatagctaaccgtctcgcacggcgagcccttcagaatatcgatcctgataaaattaatgctgagttgttaaaggctgataattttcgtttatttaaatcatgtgctcatcgactaggatatctgcatgattttgaacctgctagatatctcgcccatacgtggatgaagattgatgggccatttcataacattgcacggtgcgatgctgagctgcttacggcactaacttacatcgcaccagtgtttccagaagtagtgttaatcgctatagagaatgcctcagaagctcgagatttctgctcacgagataatcaaaatttttctacgctcgttagattgcttagaaaaatagcatatgatgatcagtacttcgaccgttctgccgggctaattcttcgctttgcggaaacagaacaatctggcgagaataacaatagtatcgctagtcaattggcgagccttttttcattatacctctctgggacacaggctacaccagcgcgaagactttgttttgtgaatagaatgctaaattccggcaactttagacagcttgagattgcgcaggatattcttcggtctgcatttcaggtttctcactggagctcgtctggaggatttgattttggcgctcgtagcagggactttgggtgggaaccgacaacgaataaagagacattagactggtacgtaggttatattgagctgttagtgccgtttttagattcggataatgcccccctttgcaattgggcaaaggcgatactagcaaaccactttttaggattatggagctatgcaggctgctttgacattctcgaaaacatagtgcggaaatatggtgctggcggtaaatggccagatatgtggacggccattaagcggacaatccattataacgggaagaaacacgcacccgaattattaaaaaggattgaagcactcgagcatttagccgcaccggctgatccctatttcgaaatcgaggcatatgctctgactaacatatgggatcacgtagaagttagaggtgggagttacacagaaaattctgaaaaaattcatcagaagatagaagaactaggtgagcttgcgtcatctgaacctgattaccttgaaagattggcaccaaggttatgggaaaaacatattgatgcgctttggtcattcggcaaagggttggccaaaggttcatcaaaccaaggtttaacctttgatacgcttgtccgtctgatgcaaaagcaagagctagaagtagtacaacctatcctcttttgtggttttattgctggcgttcatgccggtgatcctggcttgtctcggaagctccaagagtctgtattagatgtaccggagcttaaacagtattttgttaatattttgtctgcaacgccgatagccccttggggttcaaaaaagctaattgagctggcgaaggctggtgaactggaagcatggaggtttcaacagataagttacggtcgagttcatgaatccatttctgatgatgatttatcagaattgcttgccgctcttaatgatttggccgatgggatattttcaactattgaaattttgagcatgcgattctttactgaaaagggtagcaactacagtcctagcgatgacctacgatctgttggaaggcaggccattttgaaactgttatcaatgcatagggatgagattggcaggcgacagctccatagaatggaccgtgttattgcagagtgtttatcagagccagcagcggagaatgaagttcgcgatattattaacttgctttgcaatggcgtagagacgtatcgcttatatagctttgaattagagactatcatagcctatctagtgaaaaattatccagaatttgtattagatagagtgttgatagatagtgagaatagcgaacaacttatttatttgcttttcaaagatagggtcaatcgtagtagctcgccattaaacttagcgccgatagagcgcgtgctgaattggtgtaatggaaatcaagataggattcatgaagtagcaggtgccgtttcggcatacacatccttagataaggaatcacagccactagacaatccaaagaaagtaattctcagtcaccacattacatcacttttagataccgcagagaacaaagtcgcgatagttgaaactattttctcaaggtcttttcctagtgggtggtcaggatcacttgccgatattctagaagttcgttcggaggcattcgcagtcctattaaatcatgtctctcctgaggtgcgagagatggctaagaccaagctttctcttcttaatagatctattagagagaatagagagcgtgaggccgaggagtacaaccggcgggaacaaagatttgagtga

SEQ ID NO: 201516 - DNA, 612 bp, Klebsiella oxytoca
atggcctggcggctgtgcagttgcgtgtttgactactgcaccaccacccggcatccgttcgtcctgcgccttgaggtgcatcacagcggcctgaccagtgaagccccgaccggagaggaaggtcaggcatggcggtatctgatgcaggagaaagcccgtctggaagccctgctgccggaggggtggcagaaggatttcaccaccttctttaccctcgacgggcagaccctgatgtcgctgatggccttctgtgctgcctgttccgtcgacggtgttcagacccgtgaatgtggacataccggccgcagtgacctcgatggcgtggaggcggcgctgggatttcatctgcgcgactggtggcagccgacagcggataacttcctcgggttgctcagcaaggcccagattgtggcggcgctgaaggaggccgggctgaccggagccgcctcggatgccgaaaaaatgaagaagggtgatgctgccagccatgcggaacagtggctctccggctcccgctgggtaccgggctggatgcagtccccggatgccgcaaagccggacgatgcacatgctgcccctgacactgacgaaccgacttcacacgcagcctga

SEQ ID NO: 201517 - DNA, 573 bp, Klebsiella oxytoca
atggcagccataacctcccgccggccgtcgccactgcagcggcggatcctgatagtgctggccgccctcgatgcgaaacgtccggggccggtggccacgcgggatattgagcgggtgctggagcagggcggggacgccccggtgtacgggccgaacctgcgtgcctcctgccggcggatggaagccgcgggctggctgcgcaccctgcgcgccccgaacctgcagctggccgtcgagatgacggatgccggccacgggattgcagaaccgctctacctggaagaacgcgatgctgaaattgcacggcaacgccggacagaagtccggagtctgccattacgccagacggctgccggtgacgcggtggagctgcagctcggtgatgaccattataccctccgggaagcggcttacgtgatccgtctgaacgggaccacctgtctgcagctgactgatgccggtggcattcgcgggataaaagagggtgatcccctgcaggtggccgactggtatcagagctgttttgatgcaggcctgcccgtcgccatccaggtgaatgagagccgggactga

SEQ ID NO: 201518 - DNA, 495 bp, Klebsiella oxytoca
atgaaagtcactgagcccagactgaatacgctgatcgataacctgaacacgctgatttgtgaggacagcctgctgacgcgtcaggaacgtgaaacgcttgtgctggccgtcgccgccatcggcgccatgaaagggcgcgtcagcatgaaaaaagacgaagtgccggcccgcggcagacgtgaaaatcaggagaaaaaagaccgccagcctgatccgcggttcccgcgagccggtcaccaatggcagaaagaagaaaagaacctactgcatgatgcgctcgaaccggtcccggatgaggagatcggcacgcatcttttctggctttccgagaaactgggcagaacgcctttcagtgttgctatccagatagcagccatcagggagctgcaggccgggtgggaggagcagttcagggaaatttctgataaaattcgtttgtccagcctcagtatcagtgactatctgaaagagaacgcctcaggcttgaacacctaa

SEQ ID NO: 201519 - DNA, 354 bp, Klebsiella oxytoca
atgaaagcagcggtatgggcagtggtttattcagcgatatgtattctggtcttttcgggatgggtggcctgctttgcgcagcatgctcccttcaacgggcatgagcatgatttgactttaaaatatctgcttaatttattttctgtgtatgttttgatggaacccttctaccagttctttcaggtgactgaatattttaaagcaattctggttctggaagataaaagcggccagtcgataagtttttataatgagatccctgttatgtggatatatagtctgtccgcagttctaacgtctgtggtttatctcatatacgcaaaatggtttgttcgtaaaagagtacaaagataa

SEQ ID NO: 201520 - DNA, 900 bp, Klebsiella oxytoca
atgatggatgatgaaataagcagctcaccgcccctgtggcgtaaaatcctccacggcatcctggatgacttgctaaattcgctgggatatccggccacattgcgccgtcgcctaaacaacgggattttgccagtgagtcacccgcaactgcggaacacgttctggctgcgttccgtggtttgttggcaaacctggctcgaatacgaaaaacactgtattcgctacctgcgtctcggccacgacggtgattatgattacctccagcgccatattcctcagctggatggtctgataaacagtgagacctcagaaagtttttgttgtgatattacggccgttgggggactgagtgcgtcgagtgattgtgaccaggaactctccagcctggatgcgtttgcgcagcagtattgccaggaattggcaataccactgaccagagatcggttaaaccgtaatctcagccaccacggcttacggttgtcagaaatggtattcaaccagtttacctgggtgcctgcccggctatactggaacaatgtcgacggcgcccaccattttgcagcagcccgtttcctggcaacacagttgagtcagccggtttctctgacaggccagttgaacacctatagtataaatccgcaaaaaatacggcagctgacggcgcagtgggatttgttcctggtaccggagggaattgtctatggcgaatttaaagacgcgctattgcgactgaaatgcccgtttggcgtatccaatcctcctcactgggaaaatggagacgagcagcatttccgggttatctggctggagcggcaccaaacggctccggcgcgcgtatcacgcctgctggcgcaggcaggatttccgtcactcagtcagcagctgagtgagctgaaatag

SEQ ID NO: 201521 - DNA, 1098 bp, Klebsiella oxytoca
atggcattaccattcattattctgggcgtcgcggcagcggcaacggcgtttggcggtaaaaaagcttatgatggctaccagaaaaaatcggaagctgatgatgtattagatcgcgcgcagcgtagctttgataagcataaagagagctttgatctggcaaatgaaacaacgtcgaaaaaactggccgaactgggtgaaaaagagctggaaatcggtaaagatttcaatgagtttaaaacgattgccgacgatctgctggcgcgtatggcgaaagatgggcataaagatcttcggctgaaggtaccacagcataacatcaataaaattcagaacttggcgatttccgccacggaatacctgacgacggtcgtcggtgccggggtttctggtgctgccgctggttttgccgtgtacagcggcgtgatggcgtttgccgcagcttctaccggtacgccgatcgccgccctgtctggtgcggcggcgtataacgccacaatggcggcgattggtggtggttccctggccgcaggtggttgggggatggcgggcggcgcgatggtgcttggcggtgcagtggtggctccgctgattgctattgcgggctgggcttacgatagccatgccgaaaaggcgcttaacaatgcttatcaaagctcccgtgaagtgaccgcggcggtggaaaaaatgaatgcggctgaagcgcagctgacgaaggtgcagcagtatgtaaatagcatttatgaatcaatcacccgtatgcatagcgtctttattcagcactactttgagccgctgaaagctatgcatgccgtcattgttgaacgtcatgagaagaatatcactaccgagattaatgagtcggaagagatcatggcgattatcgaccatggttatgaattagccgccataatgaccgacgtgatcaccacgccgttgttcaagccggtgacgcaggaaaacggtgaagccgttatcgaagatggcgtgatccaactgcagaccgacagcaacggtatgaacctgctgaacaaagagattctggacgaaaaactggcggcttctgattctgagtttgacgcattttcttctcgtatttaa

SEQ ID NO: 201522 - DNA, 1572 bp, Klebsiella oxytoca
atgaacacagccaggtttgactggggtgaagagttacatcagacggtagtcaagagtctgactacctcttttgggttggattttctcttgctggaggataaacacggcggcgatgtgaacaccattcataacgctcgcgagggagtgtatgcctccgatgccgagcgtcaacggtacgagcaacgcgaagggtatgattctcatcattaccatagccacgaaaactacattgccaccaaccgggcgggaaaaaaggcgcacgaggtcggtacgttgaccgatacctacactggtgagaaatttgcggctaatgataaaaagaatctcgaccatattattgccgcccatgaaattcacaacgatccagggcgtatccttgccgaatgcgatggtgccgacctggctaatgattcatcaaatctgaccttcacgaatgagtcgctgaataaggcgaagaaggcgaaaacgatggatgccttcgtgcaaacgctacaagaacagcatgctgtgaccacgcaggaaattgcccgtttgcgcagccaaccaacgctttccgagcaagagcaaaaacaactgaataagctggaaaataaagcagccgccgattttgaacggatgaaagaggctgacaaaaaggcgcggggaaaatacaacagtacgatcaatcaggaatattataccagcagcaagtttgcgaagaatgtcgccactgccacaatgaacaatgcatttcgcatgggaacgcggcagatgttggggctggttctggcagagacctggtttgagttccgcgagcgcattcccgtgatgttcgagaagcatcgtcgttcattcgatgccggagacttcctgcaagatgcggcggaggcattacgcgcagtctggcagcgagtgcagggtaaattcagcactttcctggcgtcctttaaagacggtgccatcggtggcgtgctctccagcattacgacgacgctcttcaatatcttctttacgactaagaagatgatggtgcgcctgattcgtgagatgtggaacaatttggtacaggcctttaaagttatggtctttaaccctgaggggttaacgccggggcagctggctaaagcagtgagcaagctggtggctgcgggtgtggccgtggctgcgggtgtggtggttaatgaagctttagccaagatgctcgtctttccttttggtccggaactggcggctttctgcggcgcgctggcgactggtcttctgacgctggtgatgaactacttccttgaacacagcgcattgatgaaaaaggtctggacgtttctggatacgtttaaagataagcatcagaaagcactagagtattatcagcaggtgaatgctgaactcgatcgttatctactggagctttcggcgttagagtttgctattgatacgtctgcgttatcgcgtttctcgctgcatcttaacgcggtgaatagtgaaattgagcgcggtttgttgctgcgtgcagaggttgagcgccgtaatattgcgctaccgtttgaagcagggaatacccgctctgtgcgtagctggttaagtaagctatga

SEQ ID NO: 201523 - DNA, 273 bp, Klebsiella oxytoca
atgacgctaacgcccgcgtttccctgtaaccagtgcggcgcttgttgtcgccacgtcaatcgcgccagtgaaacgcaatttctcgatcgtggtgacggcatttgtcgtcactatcagatggagacaaagctgtgcgcgatttataaaacacgtccgcttatttgccaggtagaaaaacagtatcagcttaactaccagcagcaatatagctggcaggaattcattactcttaatcgtgaagcttgtttaattctagaaaaacttgagcagtag

SEQ ID NO: 201524 - DNA, 1263 bp, Klebsiella oxytoca
atgaatagtattgaggttttttacgaaggctggggagagcactggctctggggtaccttagtcagtacgactgtgttgacggggcgaccagttattgtttttgaatatagtcctgccgcccgtgagaaaggactggaactggcacgttatacgctgccgctttctggtcctagtctccggagagattttccacagcaccaactggggctccctggacctgtctatgattcactacctgacgggtggggaatgttacttatggacagactgttccgtaaacgcggactcagcagcgcaagaattggtcctcttgaacgtctcgcgtacatcggcagtaatgctatgggcgcgatgtcatatatgccggcatcaccggacgtcttatctgtccaggactatatcccgattagtcagttagcagcagaggtccaggaagttctgaagggggaagggggggagtttctcaaccgacttctgcttatggggggatcaccacagggagcgaggccaaaagcccttctttaccgggactccgggaccggtgagtttacaacggtacctgctctgggacttgaaccatggctaataaaatttccggcaaggcaggaacatcctgaagtttgcgccgtagaaatgatatacgcccagtgtctgagagaatgcgggattgatactcctgagacggaatattttgagttaccaggtgagcaggctgcgtttgcaaccagaagatttgacagagagcggggaatgaaagtccctatgcaaagtcttgctgcttttactggtgcaaactatcaggttccgggttcaatggactatgccagttttcttcgggcgacacagctctgtacaaatgatgtccgtgaaaaaggacgcgcattcgaacgagtggtatttaacgtcatctttaataacagagacgatcatccaaaaaactttgcctatctgatgtcagcaaacgggaactggtcgctggcgccagcctttgacattacattctgtgacggtccaggcggataccatcagatggatgtcatgggcgaagcgcttactatagagcgtgagcatctgatgaatctcgggatacgggaagctgaactggaggaaagccgggtgaatgagattatcgaccggatagccagtgtggctacgacattttcgaagaaatgtcatgagctccttccaggaaaggttaccagggatacccttagttatatccagactcgcatcgatgagaatattagcggtatcaaatcctga

SEQ ID NO: 201525 - DNA, 321 bp, Klebsiella oxytoca
atgctggatttatcgtttagaaagcctgacgaaatggtttctctcttgtgcgatcgactgcgcaaagaacgaatcaatcaacagatgacccagtcagaactggccaaaagggctggcattggggtgaatacgttgtcaaatctggaatcggggaaaaatactgggtttgagaatattatccgtgtagccatggtcctggggcggactgatgaactgcaaggactattcaaacccagacttgaaagcctcgaagatctacgccgttatgagtccaccttaacccgaaaacgtatcagaagtaagggaggccataatgaatag

SEQ ID NO: 201526 - DNA, 861 bp, Klebsiella oxytoca
atggataaggtttcctgctctagctatgtgcaagtacataatccttatccggtgtttaccgtaccttgtaagaagggaacgcaaacacctaaacgtacactgccatttaacaagaaactgatgtccaaagttgagggttttacggatacatttatcttcacagtgctcgtggctgatacaagagctaacggttacaggaaacggcggccgccagcactcagatgccgcgctataaacgcactacttcagggattgtgcttccattatgatccccttgctaatcgggtaaatgtcaccatgacgacactggcctctgaatgtggacttgctactgaatcggaacagggaaatttatcaatttgtcgggcgacacgtgctttacgctacctggcagaggagcttgggctgataacttatcgtacggagtatgatccagatgcaggttgttatctgccaacggatattactttcctgccacgcttatttgaggttcttgatgtttcgcctgaatcgattgattccgtccgcagaagtcgggctgaatatcttaatttgcagagatctgcagaaggtcggagcagactaagccttaacgagttagttactttggcctggggggtgttccgcgcccgtttcaaagcgtacagactgatgcgtaaagcttatggagagaaacgatgcagagccagaaaagaagctcaactgaccttccgggagatatccgaacgtgtgaggaaggagcttacgctggagattgcaaaaggactgtttgtctctgatttatcccggatacgcgatgagattaagagaagagtaaaagagaggatgattctttcgcgcagtctatgtacacggatatag

SEQ ID NO: 201527 - DNA, 537 bp, Klebsiella oxytoca
atgaaacgaataacactgtcgggtcttctggtggtctgtttatttttttctggcggatcgatagctcagccaaccgtgcaggccggcttttctcctgaaggttcagcgctgcaactgattctgaacacgattgataccgcaaaagaaagcatccgtctaatgggttacagctttacgtcaccggaagtgacccgggcactgataacggcaaagcagcggggcgtcgatgtcaaagtggttgtcgactggaaagcgaacagcgaaaaaggcagtgccggcgcagcggcgatgaatctgctggtcaacgccggcattcctgtgcgaacggtcagtaagttcaggatcatgcatgacaaggtgattatcactgacgagaggaatgtggaaacaggatcgttcaactacacccgtgcagcggcgcgcagtaactcagaaaacgcgctggttatccgggattacccggtgctggctgagatctacctgcagcactggcagtccagatgggagacggggactaactgggttcatgcatactga

SEQ ID NO: 201528 - DNA, 240 bp, Klebsiella oxytoca
atgaagggtgtcatcgaatcaaaatctgtaaatatacaattcaaagaaaatactattaatgaaattaatgcaactctgaaagatatcgatgatattgcgactgcaaagggattaaccggtacacagggggttattatcatgcccgttaagggagcatccgcggataataccacggtatatgccggaatgactgaggcagaaaatactcaacaagcaataaataaggcgcagggaaaataa

SEQ ID NO: 201529 - DNA, 294 bp, Klebsiella oxytoca
atggtggttgagttctttgattaccagtgtatctggtgcagccggctggcgcccgagctggaaaaggtcatgaaagcgaacaaaaacgtacgctactactttatggaatggccggtgttcagcagtcgctgtccggaatctctgctggcggcaaaaaccggactgcaggtctggaaagaaaaaggggaggatgtatacctcaaatatcacaatggcatttatggcacaggaatgaatgaagggtgtcatcgaatcaaaatctgtaaatatacaattcaaagaaaatactattaa

SEQ ID NO: 201530 - DNA, 300 bp, Klebsiella oxytoca
atgaaacttaaagctgccttaatagcctcgggtgtttctgtgatattaattcatagctctctgttatatgctaacgaaataacacctgtatttactcctgagcaggaaagccggattggcgaaattgccgcagattatatgcgtgcacatccggatattcttatcccgatgagtgagacgttacagcaggagcagcaggaaaaacaaacccggggattaaaatcagccgtactggcacaacaggcccggatagtggcagataaacgtattagctgcagacagcgctgtcatggtggttga

SEQ ID NO: 201531 - DNA, 585 bp, Klebsiella oxytoca
atgacggaagataaacgtccaaccctcagcctgaaacgaaagccggcggaacagacggccggccaggctgccgatacgccccgcatcgtcaggcgtaagcaagtggtgaatgtcaccacgccgccggcatggaaagtgaagaaagggaagctggccagaaaagcggaacagggaaaaccggtcaaatcagttccgacagaacctgaaaacccagggaaacccgcccggacgattcgttacctgcgtctgccggagctgcaggtggccgttgacaccctgaagacctggtggcctgctctctttgatggtaacacgccgcgccttctggctacggggatccgggaagcgatctttgctgatatgatcgctcggggtataccgttgtcccataaacaggtgattaaatgcctgaaacgaattacccgttctgaaatgtatctctcatcgatgaccgcgggtgcggagcgcgttgatttaactgggcaaccggtgagccaggtgaccgatgatgaagagcagtatgcgctccagcggatggaaaaacagcaccggcagcaggccagacttcagaatgaaatcatttaa

SEQ ID NO: 201532 - DNA, 723 bp, Klebsiella oxytoca
atgacaacatatgaaacgcgtcttaacgccatcggccgctggctgcaggggctgctgacctggacgccaggacagacggatatcatcaagaccatcgcgcttgttctgatggtaatcgatcacaccggcctgctgctggccgggaataatgaggtgatgcgtctgctggggagaggctgttttccgctgtttggtctggtctggggaatgaatctggccaggtatcacgacattcgccagtcgcagctgaaccagctctggtgctgggccctgatagcgcagggatcgtttatcctggtgggatacccctggtatatggggaatatcctctttacttttgccgttaccggacaagcgatgcgttggttcagtctgcgtacccgtaacgacattctgctggcgatcgctattgtggtggcctggttgccactgtctacagacagttacggtctggccggggtattcatgctgatcaacagctaccggctgtgtcgtgctacagagcccgtggaaagaaccggctatgctttactctgggcagtcatggttctgctgatgaacctccatgatgccgggcagtccgtggcgggactggcaattgcaatactggtcgtgggtgtctgctcggataccgggaagcatgttaaacgattctggccgacgcatttttttgtcctgttttacaccgttcacctggcgctactcggcatactcgccgggtga

SEQ ID NO: 201533 - DNA, 516 bp, Klebsiella oxytoca
atgataactaataaaatcatcatggaagaagttgatgaactgaggaatatactttcacaagggaaggttgaaattccgtctttttggtcatgtctgtggcctggattggttatagttgcatggcatatactttgtgcaatgatcagcgtgaaccataactaccttgcagcaaaatatattttttgggctataatttttcctggggggatggggctgattcttcttcttggcgtctctagtgctcgctctttatttttatcagtgccaaaatcctttagggtacgttcagatatatatctatttttcaccaagaaaattattgtgtatgcatctgcatatatgctatcgattattttccttgcctttttaaatcgttttgtatatgactcgccatttccttatgcatttatggtcattttaacgacagttttttttggttttgtcatgaatctggattttggaaggtatcaactctcgttactcacatctgcgataaactctttcaaggctaattga

SEQ ID NO: 201534 - DNA, 2895 bp, Klebsiella oxytoca
atgcagccacttgaaatctataccatcgccgggggcgactggctgcgggggaatctcaatgccattgcggcctttatggggactggtacctggtcgtcgatcgagaaaatgtgcatcgccttctcggtgctgattgtcgcaaccagctgggtaaaaaaacacaacattatggacctcctcggctgggtattctccctgaccctggtctcgatgctggttgttatccgcacaccggttcagattattgactacagcaatgtggctcaggtctacaaaatcgataacgttcccattggcctggccattccggcgtcgctgaccacgcgcgtcggcaatggccaggtgcagggctatgagatgctcttctccctgcctgacagcatgacatacagtaaaaccgggatgctgtttggcgggaacctggtggcgaaaagcaccgattttctgtcacaaaacccggaaatcaccaccctgttctccgactatgtccagaactgcgttatgggagacatctttctcaatggcaagtacacccttgaggaactgatgaactcgtccgacccgtacacgctgatattttcaaaacccagcccgctacgtcaggtgccgaataacgactataaatttctggaaaagcccgaaatcggcacctcttttatcagctgccaggtggcagcgacgcaactgaaacagcgcctggcactggatacacagactggcgggaaaacctggagctattatgtgcgccagctgtttggcggcaaaccgaatccggacctgctgttcagccagatgataggcgacagttacagttacttctacaactcagggcagagtgccgggcagattatccgccagaacgtcaccatgaatgcgctgcgtaacggcatccagagttacgcagcccgcagtggtgatacggccagcctggtcaacatcgccaacaccacgtcgctggaaaaacaacgcctggcacaggccacgacggggcatcaggcattacgttccctgcccatgatgcagacgatcatcatgggcattatgatcgggatgttcccgatcatgattatggccgcgatgtttaacatgatgaccctgcaggtcctgaaaggatatgtgtttaccctgatatggctgcagtcctggccgctgctttatgccatcctgaacagtgctatggcctactatgcgaaacaaaatggcgtgcccgtggtgctgtcagaactctctcagatccagctgaagaactcggatatcgcgaccacggcggggtatatctcgatgatgatcccgccactcagttgggcgatggtgaaaagtatgggggccgggttttccagtgcctacagtcatttttcctcctctggcctcagctctacgtcccaggcatcatccagtgttgtggacggcaattactccttcgcaaacatgcagatggaaaatgtcagtggctacagctggggtaccaacagctcgacaagcttcggacaaatgtcgcggcagttggggaacgggggaatgagtacccagacccgggacggttcaatggtctgggacagtggcggggcaatgtcaaaactgccagtggatatcaatgtcggtcggcagatagccagtgcacagcagcagatggcccgggaatctgacatccaggcagagagctctctgcagggttataacagcagcgtgaccagcgcctggaacagcctgaagcagtttggcacaaatatgggaaccagcacgtcaaccaccaccggggctgataatacggaatcgtcacaggattcaatggccagaagcaaaatgtggaacgctgttgtttctaatgcaaaagccaacaatatcagtaatgatgagtcattccagcagttgatggatgactcctctaaacgaactcaatcttttgatatacatgcatctggtaaatggaattccggggaccaattgtttggcaagctgggtaagttgggcacgggattgtctgctgaagttggtggtaaaggaagcgctggctgggcccacagctcaggtgatactgataatgtcagttcctctggacgcgaatcacatgacagtcggcatgacacgagcagtcaggcggcgaaagacttcaaggaggcatccgattactttaccagccgtaaaacgacgacatcaggaaatattaccgataacaatgccagctcgcgtgttgaccagtttgctgcatcactttccagtgcgaaaaacagttatgaccagtatacgaacagccggactcgtagccatgaatacagtgaaatggcatctcgcacagagagcatgagcggccagatgagtgaaaacctgactcagcagtttgctaactttgtccaacaacgttcaccgcagaatgcagaggccattctgaccaacacaagttcgccagaagtcgctgcgcaacgtgaagtcctggcgcgtgaattcgtcaaagcgcaggttgaaccaaaggttgatggtgcttaccaacaggggcgagaggccattggtcagaacatgtctggtgtatcaggcggtggcgatcgtggtacggtaatggcggattatgggcataattctggcaatattgagacgatgacccaggacgcggggattaataataacgtgaaagaggctgtgggttcgttgatagacagtaacaagcaggcccatcagcaaaatcagagcgaaattcagggccaggggggcgaggtcaaaaaacagtattctgatcttgaaaaacaccataatacggaaggaaataaattcgaaaatgaatataatgaaagaaaaagtaaggttagttctttaccaggagctgactctccacgcgagttagaggaaaaagcagttaatattcaaaaggattaccttgatgggaaaggggggagacaatga

SEQ ID NO: 201535 - DNA, 360 bp, Klebsiella oxytoca
atggataatgaagttgaaaaaaaactattgattatcagggatatcatccgcgaaacccttttggggaacgcaatcatcctgcttgcggtatacatcctgtcaaaatcattaccgcctcaaaacattccggattatgggattatcattctgacatccatcacaatgacaggtgctataacatggctattctggataacaacaatttacattaaaaaaataatcaaaaagcgcacatggattattatctttcttttctggtgcattattatacaactatcttgtcactataaaataaatgaactaatcaactcccgtggatgcttcaacaatcaagcagtaactttaaaaataaccatgtaa

SEQ ID NO: 201536 - DNA, 441 bp, Klebsiella oxytoca
atgatttattttcgggtagggtgtgcggctttgcttttcatcaccactccagcactggcttcagaaataatgggcgttcctgagggggggcgggttttctggtttgttatttttcctgtgacgagtctgatttttcctgttctgtttggtgcattattctcccggaattatttgtttaaagaataccttatcattgcaatgtcagttctgattacacaacttctttttattgcatgcctttattcatttgactattttaaaatcattatggtatccgggctggttcagtcgatagtacctttaatgatatatgccgtgatatctgttaaggatgaaacaaaaatcgccagaacttcaaggtacaaggtttgtatcggaggcgcgtccatagttgtggctgtgattacatggttatttttaaagttactgcttgattgttga

SEQ ID NO: 201537 - DNA, 327 bp, Klebsiella oxytoca
atggaagagaaaaaatcgtacgggctggtgattgtatttgtcggcctgtttgtcgcttttctgatcagcatcatgtcttacagcctgtggcgggataaacagattaatgcgtttatggtcaccaaccgcgcctggggcattcagtgtgacaggatttctcaggctgcgtgggttgttaaagagggtgagcgtgtggccttagaaatgaacgctcttccgctgtactgcagcggttaccgctttgaagtccgcaatgacgcaggaaaaacattgcgtcttctcgataaatacagcgtttatcagcacctgtcacgccagcctaattaa

SEQ ID NO: 201538 - DNA, 177 bp, Klebsiella oxytoca
atgaagctggtgaccacatttaaagaatggcgcaaagttgcaggaatggtttttgtgcttgttctattgattatttgcatagctacgttattaacgagtgacgatgctttcgtgtctgtccgatatcttttctttattattttgctcacgattatagccagacgatttttgcgttaa

SEQ ID NO: 201539 - DNA, 237 bp, Klebsiella oxytoca
atgaaagttaactttcataaaaaacctgtcgtcgattttgtggtgaggttactgctgacgataattattatatctcctgtactgtatttttcatgggatgccgtaaaggggacgtctggtggtgattatattgaaagtgttgtttttattctcgtggtcggttttttctggtgtattaattacctcttttttactgcctttggggaagtaatccagaaaatgaaggtggataaatga

SEQ ID NO: 201540 - DNA, 1983 bp, Klebsiella oxytoca
atgagatcgcttcccgtcattgcaaccgttctgggggcctttatcgggtttgcaggaccagccggtgcagacagcaatacggattacaaaaccggctcagactttgcaaaacaggtccagggaggtgggcttgatgccctgaaaaacttcaacggggctgacacgctgccgggatataccagcaaacctgagcagtcgaagtattacggcggcgtttccgccagtggggacagtaacctgaaaagcgattctgcagcggcatggagcagcagtgaagtggggaatagcatcacagagtcgtttactaaccgcccacctgacagtatctcagtcgatgcgccgtttattcaggcggcaaaagaaaccgagtccagagccgattccatcgtggggaataccggtcaggcctgtacggcatcggtcgttaatcgcagcgagttcacaaaccatacatgtgagcgggatttgcaggtcgagaacttctgcacacgggaagcgaccctgaaagacaatgccacgacgcaaaaggtcagtcgcacgtatcaacaaaccgttccgatgaattatgcccggagcagtaaccgctgggaggggaggctgacgatcccgtcgtcaggccgtcttttaagcgtcgcggtagatggtgagcctctcccggttccctggatttatcaatgtgacagtgagggaaaggtaaaagatagctgcaagattgctgtcagtgaaaacatcactctctttgaaaaaacatttcctgttgatgtgatggcctggcccaatacggtaacgacgtgctccggtggtaagaacacacactgtactgaccattactatgatggtaccgggaaaatacaccagtcattcagcatggaccggaatgttgtgggcgggcagacctttccggtaatgaaaacgtccaaaaccctcccgtcagtgagtattaagcccatccaggtcacggtcactctggtcatggaagagacggaaacgatctttgctccggaggttgtgtgggttgagagctgcccgttcagtaaggatgagggcacgaagatcggatcagagtgtatcagcccgggagggacgaaaacccttaatctcggcgggaaagagtacaccttcactgaagcctgctggaaatacaaagatacctggctgactcagccagcggataacggctcctgtgaaagcctgatgaataacaccgcctgtacgctgtcatcacgtcagtgcgcattcagcgcggaagacggtacctgtctgcatgagtatgccacgttctcatgtgaaacccggaccagtggcaagcagatgatttgtggcggagatgtcttctgtcttgatggtgaatgcgataaagcggtcagcggtacgaataacggctttggacaggctgtttccgagctcgcagcgctggccgccgcagggaaagatgttgcggagctgaacggcgtggatgtcagggcattcaccggtaaagcaaaatactgcaaaaaatttgcggccggattcagcaactgctgcaaggacagcggatggggacaggatgtgggtctggcacgttgcagcagtgaagagaaggcgctggctaaagcgaaaacgaacaagctgacggtgagtattggcgagttttgctcgaagaaggtgctgggtatctgcctcgaaaagaaacgtagttactgccagtttgactcaaaactggcacaaattgttcagcagcaggggcgaaatggccagcttcgtatcggctttggcggtgccagcagcccgaactgtcgtggaattacgatagaagagatgcaaaaaattaactttaaccagctggacttcacaaatttcatggaggatctaataaataaccaaaatatcccggaaaattcagaactgacggaaaagaccaaagcacgcattaaagaacttcttacgcagtcttcagtaacattgtcccgtattgaaaataataaggatggcttaaatgaataa

SEQ ID NO: 201541 - DNA, 333 bp, Klebsiella oxytoca
atgtttaattataagctttttagttctctgtctttagtggcagttgtattgatggttttaatgttagttttaaaattaacacaacccagtaaagaagacttaattaaggacggaaagtattggtcgactgactgtaatctgaaggagattgatgttcctggcggtgtttttacaagtaatataaaccgactggattgttcaggggtcattgttaatgtggtgacagataagtacaaccgcgctttatccgcgtataacaaatccaaacgtattgaaataaaaaccagtgagcctttgaacgatgcggtagagacattaaaaggaggcagataa

SEQ ID NO: 201542 - DNA, 225 bp, Klebsiella oxytoca
atgaaatcaaagagaaataatccctttcccgacggaaagggtaatacggttccggccggagagtctggtgcaagaaaatcggcattttcatcagaactgatttttgcccgatcggatgtcactcagcttaagcgggtttacggtgcgatgattccgggtgaacgagataaattagtccatacgattaaggcaaacaccacattcaggatgatcctgaaaaaataa

SEQ ID NO: 201543 - DNA, 384 bp, Klebsiella oxytoca
atggttaagcttctcctgagtttcacattgtcagtactgcgctggattaactggctgattcactatgcgatggtttatccgctggccatgatggcggcgctggttgttctggtgttctgcacgaaaaacatcctctggatctggctgctgatggcggttgtctttacgggtggtgcagtggttttccgtcgtacccctgccagcagaacgggtatcacgtgggtaagggatgccaggggtaatgtcttccccggctgcagatccggcaaaggcgcgatatccccgctactggccggatatcagaaacgcggtgaggccatcattgtttatgacccttccaccaggtttagcgaggaagataaaaatgaaatcaaagagaaataa

SEQ ID NO: 201544 - DNA, 735 bp, Klebsiella oxytoca
atgaaagcaattaaacccttatttatctcctgcagcctgtgttttacggtccctgcgatatctgccacgctgagcgtgacactggcccccactgttgtaccactggcaaatggcgggcaggcaaatattgccgtgagcaataccgatccgaatctgtttactgtaccgggtgaccgtattactgccattaacagcctggatggagggctgaccaatcaggaacagactgacagcggaggtgccattctggccaccgtcagtaaaaaaccattcacgtttatcgtggaaaccgaacggggcctgaacttctccattcgtgccgtacctcgcacgggggtgggccggacaatccagctggtgactgagcttgtcggtacccccggcccggcaaaggcctgggaagagtcaaacccgtatgagtctgtgctggtcaccctgaatcgcgccgtgcgccaggacaacattcctgatgactatcagtctgtgccggtcacgtcagagtcgttacaggtacctgcgggtttgcgggcaacagccgaaagcgcatggacaggtcatcacctgaaagtggtccgctacagcctggagaatatgacgctttccccacgcatggttcgtgaaagtgacttctggcagtccggtacacgcgccatcatgctcagttccccggcaggtcaactgacaggtggtggacgtatgcaggtctgggtcacgactgctgaagggagtcactga

SEQ ID NO: 201545 - DNA, 198 bp, Klebsiella oxytoca
atgtcatttaaacattccgatggggggaacagaacgcttgtttccgtttatcttgatgatgacattcatgcaactttagtcagtgccaagaatcgtagtggaagaaccaaatcgactgaggcagctatgcgccttaaagatcatttaaaacgtttcccaaactatctctttacggagaagcaagaggaggtcaaataa

SEQ ID NO: 201546 - DNA, 696 bp, Klebsiella oxytoca
atgtgtgcgatggatcgtagtagcgataacgccttaagtcaatcggtgagagatgccctttttcacataaaagcgctgtatcattcttctcctgtctcagtttgcgtaagaaatcaacaacgcgacatactttactcaaacatctctttcaagcatctttatgattttttcaaagcagagggcgatggaaatagtttttctggttcatttattgaattggaactaatgctataccagttagaacttgactgcatggcgttaggtcgggggtgtgtattaagtaagatattttcttgtggttcatctaatttccaggttcggatggagtgtattaatactcaagatgatgagatttatattttttggcaggttaacttattaattgttgcaccattatcaagtaggaagtttaaaagtgtagacgcagatgctctttgtgatcttgataaagtcatggtagagataactgatttgaatattgtcccattatcattttatgttcttgggtttagttatagtgatatatcaaggtacttagatatcccagagagaacggtaaagaaaagaatagagcgttcaaaggcgaaagtggcagttatatatccttcgtttagtgagtttgttgccgattgttacaggacaaggaaagtatatttttttaccgaaaatgtttatgaatttgtcatgttaaaataa

SEQ ID NO: 201547 - DNA, 2145 bp, Klebsiella oxytoca
atgtacatatcagaattggttctggtaaattataggaatttcaaacgcagcagatttgtttttgataaagatattaatactataattggtgagaatggcactgggaaaagtaatttatttagggctataagactgttgcttgacgatgaaatgctatttagagcctataagttaggagtcagcgattttagccatgatttagaagactggagggggcactggataataattaatattaaattcagggatatatcgcacgatgaatctgttcaatccattttccttcatgaaggtgggggggtagaagttgattctgaaaatgatgttactgaggcttcgtataaccttatatttagacccggaatatcaaagaggttggaattggcaaggttacctgttggtgacaaggctgcattaattgacgttagaaataatatttcaatagatgactatgagactgtatttaccggaagaagttttgccgatttttacaatgaagattcgtatttaaagattgtaggcgattttgataaagttgtatttccgagtaaaattgatagcaaaaatataggttggatcataaacaagcaaatgtctttatcaaaggacatttcttttacttttataaaggcattaagagatgttatacaggattttaatggtaataaaaggaatccacttttagagctgttagagattaaaagtgaaactttaaacaatgaagactatgaaaaaataattgagaatgttatttctttaaataaggatattgaaagtcttcctgatgtaattgatgtttctaaaggaattcattcaacaattagagagacggtaggtgaggctttctcacctactaaattgacgattaagtcacaacttccagatgaacctgaggaactacttaagtcattaacattgaatattagtgaaggctctaaaaattttgatggtactatcagtgatatgagtcttgggggagctaaccttttatatttgaccctaaaaattttgaagtataagtatcttgtaaataaagggaaagttgcgaatttcatcttaattgaagaaccggaggctcatttacatacacatatacaaaaagctctatttaaaaaattaaattttgaaaatacgcaaattttatattctacacactcaacgcaaatatctgaagcctctaaggtaagtaaggttaacataatatcaaaagcagaaggtaaagattatgtagatgtgtgccagccatcaacaggattaacagtcgaagaaatccataaacttgaaagatatttggatgctaaaagaagtaatcttttatttgcaaagaaagttattttagttgaaggagatgcggaagagataatgattcctgcattattctctaaattctttgggttaactttggatgagttaggcgttactattgtaaatgttggaagtacgggttttaaaaatgtcgccaatatatttcataataaaagacttagaaggcgctgtgcaatcataactgaccttgacagttcaatttatagtgaaataagtaaaaaagacagtaaggtaataaaaacaaaaaaaagaaaagcattaggctctgataaaataggaaaggaaaggaaggcattactagacatattctgtcaacataatgaatatgttaagccattttatgctgaacatacttttgaagttgattttctgaattattacggtaatgaagaatacgtcattgatgttcttaatgatatatacactcataaaagcaaaattaaaagcattgaagcagaccttagaactgagaatgtggaggtttatggagacaaggttttgtccgttgctaaatatgctggtaaaggatggttagcactggctcttgctgaaaaaatagatcataatgttctgattccggaatatatactagacgcgttgtccttctctatcggaaaatttaataagtcaacattacttgttgttctgctttatcgtaaacagttttatcttgattcttcaaaatcagaagaattggaatgcattgatcaaataattaacttgctgactcagagcaagagagcaattaaaaggcagttaataaaagatttgtattcaaaggcttttgggaaacatgataatcttttaaggatgatctaa

SEQ ID NO: 201548 - DNA, 1764 bp, Klebsiella oxytoca
atggatagacttttccttagagagtttttaaatgaaaaacagatagatgctgttctatttgataaagatgctgttgtgatggcttgtccagggggaggcaagacaagaactttggtttataaaatagctcataagctttcgtccaaaacagatgatcgctttgttgttgcaattacttatactaacaatgctgctgatgaaataaagaaaagaattgtcgaaatgggtatttcactagacagattatggattggcacaattcattctttttgcttgaggtggattcttaaaccttattcaggattctgcgaagatataaggtttgggtataggattattgacccgcatgatgctgatgaattgaagcaaaggttttgcgataaacattcctgtagtattttcaaaactaattttgggtggaatgaaagaggtttgaaagttaagggggttaacaataggaaggcagtagaagagtattatagtcatcttaaatcgaacgatttaatagattttgatcaggttatatatttttcttatttgcttttggttcaatataaatcgattgctttaaacctttcgagaatattcaatctcatccttgtggatgaatatcaagacacccaaatcctacaatatgaattgcttttttctttggcaaagtcaaggggaaatacctgtcgcttattttttgtaggagatcccaatcaggcgatatttaattctatgggaggagttgcattaagttttgaaaattttcgcgctagatctgggattgattttaatttactttatttgaatgacaattatcggtcaagccaatctattgttgactttttttcgttatttagaacaatttctgggcagccatttaaagcagttggtgaatttagaggttatgattcaaaagtgacttttaataaaggttgcagtattgacaagttagatgattatgtaaaggaattagtttactccgccataagtgatgggatatcacaatccgatatttgtattattgctccatggtggtttcatttatctgaaataacacggcgcttaatggcattaatgcctgacattgctttcaatggccctggtgtcacacctatctcattaaacagggaaagtctttggtataagtttgcaagaattgctttaactccgtcctcgcctaaaaattatttgacaaggatttattatgctagtgagttgctaacacagttgaatgaagctggttttattttgaaaaatgaatcaaccgaggttaagaattttttaaggtattgtaactcattgaatgtgcgagaaatagatgggctagactatctgaaagctttttttaatgagagttcagcgtattttgattttgatattatgcaaaacgaagagtttagcgaatcatacaatgcattttttgcttctgcacaaaaaagaaaggagaaactggagattgaaggtttgggagtactgacaaaaactgaacactataaaaaaatgtttgataaaaaatcaggtgtgacagttactacagtgcattcagccaaggggctagaatttgattgtgtcattgcttttggattgttgcaggggattatcccacgatttgatgaagatgagcagcagtctaagaggctgttgtacgtattgtgttcaagagccaagaaaaaattacacttaatatcagaagtcgaacggcggcataaaagcggtccttatcttgcaaatgaggtgctctgtaaaaccaaatttgattatactaatgaatga

SEQ ID NO: 201549 - DNA, 318 bp, Klebsiella oxytoca
atgagtctgctttcaacacaagcattctctggtcatgagttttataaattacaatccaaagtaaccaaatcgcttactgagggaaagtataagactcctgccatatttaaaaccgttcctggatcgagattcagaactgaggaacagaaaaatgtaacgagctttatccatttattcaggaaaagatcccacacctgttcagtgaatctcttttatatttcaggatttgcacgtaacttattcgacagtgagtcggtgcgttaccgccttgctcccggggatgcaattgcattcgataaagacgtattaatcagataa

SEQ ID NO: 201550 - DNA, 414 bp, Klebsiella oxytoca
atgaatcacacaccgagcgattcacagttggaagaaatgattaaatcggctgttaattcatccggcccgttaccgcctgacgaaaaattctcacaactggtttcagcgctgcgagagctacaggaacgccgcaaggccgagaaggatagcgagccggtggcgtatgccgttagcaatgatttctggaatcaggggaaccacaaacagcacatcgatggtaaacaatgcgacctgtttttccccggtgatgtttaccatggagagaagtttgaaccagatgattacgactacgtgtttccgctctatcgccacgctcagcagccggtaacaggagagccagaccaccagctctgcaaaaagtgtaatgacgggcttcgtggaggatgctccgcttgttcgtttagtggcagataa

SEQ ID NO: 201551 - DNA, 288 bp, Klebsiella oxytoca
atgagcaatgctatcgatgcacatctcaccgatgaagtgatcaactccgcattcgggaacactaacttcggacgcgacgactttcgcaccatcctggcggaaaccgttctgaaacgcgcagccggttatcactctggctggacggcgacgaccatctgcatgcgccttggcctgctgagcgaaaagaaccagagcgctacaaaactcggcctgacgtttgcctttcaccactactaccgccagagcgtccgcgatgcgctgatgccaaaacaggagcgtgcagcatga

SEQ ID NO: 201552 - DNA, 483 bp, Klebsiella oxytoca
atgcttagcggtaaagaattgggccgagccatcgagcaggccatagacaagaaactttcagcgggttctgccaagagtaaggcggaaattgcacgtcatttcaaaatcaaacctccatcaatccacgattggatcaataagggctcaatatctaaggaaaaactacccgaactttggaattacttttctgatgttgtcggccctgaacactggggattaccaggatatccgattactgggtatagccgagaagcaacatcaaccgaggtcactttcaaagaaggctctattgacgaactatacaaacacgcttctgaagaaaaaaaagctattgttgattttatccttctcgaaaaaggacaggagtttcccgcatgggctgatgccgatgcgagagcgtacatagactcacttgaactgaaggtaaggagatggttagagcaaaaggataatgggaaaaaacagacgaaagccagagcttag

SEQ ID NO: 201553 - DNA, 579 bp, Klebsiella oxytoca
atgattaatccttctgaagttggcaaatccggcgaaatggttcgcctacggactctggaaagcgtctggatacaaggaaagctgcgtatgtggggccgctggtcatatatcggtggcggtagcggcggcaatatgtttaaccagttgctggcatccgggaaaatcaccaagaccgcaatcaacgatgcgctgcgccgcatgaaaaagtcaggcatcactaaacctgaacttgcggcattccttggtgaaatactcgctggtaaaaacaaaagcaatttgtctttctgcactgacgaagaggcgttaatcattaattctgtgctgtgcaaagtactcgttcagggtgggcataaaaatttatattcgttaattgaagatcgctacattaagcgcctgagtaaaaaagcgatggccagggatctcaatgccaaacatcctgactggtgtttacgcacgtgtgagacgagaattgatgtatggctgaatcttgcagaatcgatactatacaggccaatgtgtgatgcattcggcacaaatggcgacagattttacttgcaggattgcgcggaaagtgcttaa

SEQ ID NO: 201554 - DNA, 396 bp, Klebsiella oxytoca
atgtccgatcctgtttctggcactacggtagcggctggcggtcttatgggggccagtatgttcggcctggcaactggcatcgattacggtgttgtgtttggcgcattcgctggtgcagttttctatgtcgctacggcggtgaatatcagccgccttaagctggtgggatacttcatcacatcatttatcttcggtgttatcggtgcgcctcttcttggctcttacttctccaaatggacggggtacagcgacaggccacttgatgcgctgggagctgtaatcgtagccgcaatagctattaagctgctgacgttcgttaatagccaggatttgggtagcctatttggaattctctctcgtttacgcggtggaggggccagtaatggtaacaagtga

SEQ ID NO: 201555 - DNA, 282 bp, Klebsiella oxytoca
atggtaacaagtgatccaagcgcgatggtgaacgccattatctgtggtgtgatcgtcattgttctgatgttctatcagcgaggcgggtcaagacaccgccctttcatatcgctgatggcttatttaacagtgctggtatatgccagcatccctttccgttacctgtttggcctgtatcaagaatcacactggttcgtggtgctggtgaacgtcatgatttgtgctgcggtcctatgggcaagggggaacgtagccaggctggttgatgcactgaggcactga

SEQ ID NO: 201556 - DNA, 141 bp, Klebsiella oxytoca
atgaatcatctcaccatagagagcatccgctaccgctggatgaagcttcgcctttgccgtcatcgcggcactgtattagttgactaccgcatcctcaaaaactttatacgcacctgtcagatccggggagagacagcatga

SEQ ID NO: 201557 - DNA, 1755 bp, Klebsiella oxytoca
atggcggtggaaaaactgattgtcgaccatatcgatacctggaccacggcgcggcaaacccgctccacggccgggcgcggcagttcgggcaagatcgatctgtatgggattaagaagctgcgcgaactgattctggagctggcggtgcgcggcaagctggtgccgcaggatccgaacgacgaaccggcgtctgagctgctaaaacgcattgcggcggaaaaagcagagctggtgaagcaggggaaaattaaaaagcccaagccgctgccggagattagtgaggaagagaaaccgtttgagctgccggcggggtgggggtggacgaggttaggatttatttcaaactatggtttttgtgataaagcagaacctgaggacgtaacacctgaaacatggatccttgaattagaggatatagagaaagtcacatcaaagcttctcaataaggtaacttttgcagaaagaccatttaaaagctctaagaatcgattttcacaaggtgatgtactttatggaaaattacgtccgtacctggataaagtgatcgttgctaatgaaccgggtgtatgtactactgaaattatcccaataacaagctatggtaatatttccccagagttcttacgtttattgctgaaagcaccaaatttcattacttacgcaaatagctctacacatggaatgaacttgccaaggcttggtacagaaaaagctcagcatgccgtcatcgagttagctcctatccaggagcaactgcgaattgtttcacgtgttgataaactcatggccctctgcgaccaactggaacagcactccctgaccagcctggacgcccatcagcagctggttgaaaccctgctgaccacgctaactgacagccagaacgccgatgaactggccgaaaactgggcgcgtatcagcgaacatttcgacacgctatttaccaccgaagccagcattgacgccttaaaacagaccattctgcaactggcggtgatgggcaaactggtgccgcaggatccgaacgacgaaccagcctctgaactgctcaaacgtattgcgcaggaaaaagcacaactggtaaaagacgggaaaattaaaaaacaaaaaccgttgccgccgattagtgatgaggaaaaaccgtttgaactgccggagggttgggaatgggttaaattgggaaatatactccatgatataaaatatggaacttctcaaaaatgtgattataatatttcaggttatcctgttctaagaattcctaatattgtaaaaggcattatcgatcttgccgatataaagtatggcgcattaaccgattctgaactgaaagatcttacactgaatgaaaatgatcttttatttataaggtctaatggcagcactaatatagtcggccaaagtacattagttcaacaagatctaaaagatcatgcttatgccggctatataattagagtgcgactacataacaaatatattaatgctacatacataaacatgataatgaaatcaaatttaatacgcgagcaaattgaaggtcctattagaacaactacaggtgtcaaaaacattaattcaaatgaacttatgggacttcttgtacctcttccaccaaaaaatgaacaagggataatcattaaaaaaattagtgagatagatacgactatatctaatttgaaagttaacatccaatctgcccaacaaacccagctccacctggccgacgctctcaccgacgccgccatcaattaa

SEQ ID NO: 201558 - DNA, 741 bp, Klebsiella oxytoca
gtgaccaccaaccctacaccgacgaactggttacctttggttgtcttatgctgcgcacagtttctggcttccgccgataacgtgacgttaagtatcgccacgcaggcgctaatgaacgatctgcacgccacgcttgggcaggtcagtacagcaaataccatgtatccgttggttgcgggcacgtttatggtggcaggcggaatgctggggtgtatctggggttggcggatgctgtttcgcatcggctgcctgatttttatcctcgccgaagcctgcgcctttttttcgccatcgatcgcgctcttcacctggggcgcgcgtctgaccgccgggataggcggtagcctgatgatccccgccgtttttggcctgatctctgccctgtatcagcagcgacgacgggttgccgcctttggcgcgctgggcgcctccagcggcatttcattcgcctgtggtccaattgtatgcggatatttgctggaccacgtcggctggcgcatcgcgtttgcctcgcttggcctgctggcgctgcttatcctgctctgctccgtcatcatcccggcatcagaaaacaaacgcgccgctatcgccttcgataccccgggctttctgttaggcaccctggggctgttcctgacgattttcggtattctgcgcatcccggtctgggggctggttatgcccttcgacccggcagtgagcgttctcggcctgagccccgcccctttcgttattctctga

SEQ ID NO: 201559 - DNA, 1344 bp, Klebsiella oxytoca
atgccaaacccgaacaacgaaaaaataattgataacgccgccaatgattccgatgggatctacatcgacgaaaaaaacgaacatgagcgactggcacaccagtttgcggaatacctgattaaccagggattcatctatctgtcccggaaaaatggcgcagacctgtacagcacgttgacaggtaaattccatccgttccacgcggagactaacctctatcagcagtggctgcgaaaacagtcagagcacatacgtagtggtcacaatcccctgttacacgatattctccgccagcggattaaatatgcatcggcgcgcgagtttatccccggaggcgcacgccctctggtatacgaggcggacggtgtacccgtgctgaatacctggaagccatacgaaccacagacaaccgccgcagccggtattgatttgtcactctggacagaatatctggagcgccttttcccggacgctgacgagcggcacaccgttgtgcaatggctggcgcatatgttccagtacccggaggttaaaccctcatggcacctcatgctgacgagtgcgaccggcacagggaagggattcctgttcgatctggttctctcacctctgctatgcgggcaggcatcgttactcagttcgtatgacagactgactggtcagttcagcactgtgatcgccaataatttgctggtgtttctggacgattgccgcagtagctcaaaatcgctgcatacccggttgaaatccctgctgacagagcgccgccagcagatcgaggagaagcaggagcaggcccggatggtctcaacctatacccggtttatcctcgccagcaacgagcgacgcccgatccgcttttcaccgaacgagcgcgagcgccgttggttcgtcgtccggttcatggagcatcgccataacccagaggagaccggcgaatttatcggtcgattagcacaatggttaacgcaggatggcagcctcgatgccatttactggtggttgatggcctgtgacctgaccggattcaacccgcatctttgccgtgcgactgagacactggcggagatgcaggaacaatcgcgatccatgctggatatcgagttatccgactggctggagtcaaaccgggtattcaaaatggaaacggtacgccagcggtttgatgcaccggcagacctgattaagcaccggcttgaggaacttggattccggcaatcgcggatctataccaatggtgctggtgttgaccgttcccgctactggttcccggcagactggaagcccaaacaggcggcgcagtggctggaggatgcagcagacggtacgacagagcaattctga

SEQ ID NO: 201560 - DNA, 153 bp, Klebsiella oxytoca
atgacagctaccaaaaccaaaagcgggccaccagtgcccgcacatatcgacccggacgcactggagcgagctattgccgccgctcgcaaaatcaaagatgccaacccggaacgctacaaatcgctgcccgtccagccggaggttaaacaatga

SEQ ID NO: 201561 - DNA, 1662 bp, Klebsiella oxytoca
atgcgtaaatcagtcatggtttctctgatacttcacgttctggcggctgtcgccgcgtttctgtggctgctatggggattcattccggcaggcacgttgtttaagggtgtgatgacggtgtgcattgtcgcactggccttctggcaggtctggagaaagcgttgccctgatcagacgatggcggagggtgaaatgtccacctgtgaactgccgctgtttgatgccgggggacctgttgttctcgtttgtggggatgagctggacgcgttgttccaggggcaaacactgcgcaaaaccgcgcagggctggtggctgagggtgaatgacgtcaacaggctaagcgacattgttcgcgatattcacgaacagcagccgcatcagagcggacagctcgccgttatgtattcctgccagcccgacagacatcaggatgaagccgtactgcgcgcgtccctgaaagcgtggcgtcagcaaatgaagctgctgggtcagataattggattcatgccgccgatggttctgagcggtgaattttccggtcctgcaacgccgtggcttgttgtttgtggcgataagctggcggtatatccggctgataaaacgccgcaggcggtggatgactggcaacaggacgctcaacatcttacgttgatgcctgtcctacgggaggcctttgctgttatgcgcgccattctggcggatgaactgacgaaggaagatcggctccttccggcggttcacccgtttgcgttggtgattcgaagcggtgtggcttctgccgatcatgcttcgctgtggtcatatcgcctttttcgcctgacccatctgatttttccgcaggcagagggggcggcggaagtaacggagcattttcctgatgcggtattaccgatgctcgcgccttactgcgctccagtacagggggggcaacgctctcgtcgtctcgttttatggattctggcgtgcgctctggcagctctggctttttccgctgtgaataacgcggcgctgattcgccaggtctcaacggatctccagcgctggtatgccattcccgagaatcatgatgagcccagggatcagtccctcctggcgctgaaacaggatgctcttctgctggagcgctggcagcggcagggcgaaccactccggtacgcgctcggctattaccccggcctgcgtttatggctggcgcttcagaaggctattgatatgtatgcgccaccgccggcacctgcgctaaagccacaaccgaaaatcatccgcctcgacagcatgtcgctgttcgacactggcaggtcggcgctgaagcccggctcgacaaagctgctggtgaactcgctggtgggcattaaagcgaagcccggctggctgattgtggtggcgggccataccgacagcaccggcgacgataaatccaaccagatactttcgctcaggcgtgccgaatcggtgcgcgactggatgcgcgacaccggcgacgtgccggagagctgttttgcggtgcagggctacggcgagagccgacccgttgcccccaacgacacggtcgaaggccgggcgctgaaccgccgtgtcgaaatcagtctggtgccgcaggcgaatgcctgccagtcaccgggcatgacccccgcgccatcgcaggatgatggcgctttttaa

SEQ ID NO: 201562 - DNA, 1926 bp, Klebsiella oxytoca
gtgactcggattccgacagcgactcggactccgacagtgactcggattctgacagtgactcggattctgatagtgattccgactctgacagtgactcggattcagacagcgactcggattcagacagcgattcggattcagacagcgattcggattcagacagcgattcggattcagacagcgattcggattcagacagcgattcggattcagacagcgattcggattcagacagcgattctgactctgacagcgactcggattcagacagcgattctgactctgacagcgactcggattctgacagcgactccgactctgacagcgattcggattccgacagtgactccgattccgacagcgattccgattcagacagcgattcggattctgacagtgattcagattccgacagcgattcggattcggacagcgactcggactccgacagtgattccgactctgacagcgactctgactccgacagcgattcggattcggacagcgactcggactcggacagtgactcggatagtgacagcgactcggattccgacagtgattccgattccgacagcgatgctgactctgacagcgactccgattcagacagcgattcggactctgacagcgactccgactcagacagtgattcggattcagacagcgactcggattcggacagcgactccgactctgacagcgattccgattccgacagtgattcggattctgacagcgattccgattccgacagcgatgctgactctgacagtgactccgattcagacagcgactccgactccgacagtgactccgattccgacagcgactctgactccgacagtgattccgattccgacagcgattcggattccgacagcgattcggattccgacagcgattcggattcagacagcgactcggactccgacagcgactctgactcggacagcgactctgactcggacagcgactctgactccgacagtgattcggattccgacagcgattcggattccgacagcgattccgacgctgacagtgattcggattcagacagcgattctgattctgacagtgactccgactcggacagcgatgctgactctgacagcgactcggattcggacagcgattcggactcggatagcgattcagactctgacagcgattctgattcagacagcgattctgactctgacagtgactcggattcagacagcgattcggattccgacagcgatgccgattcagacagcgactccgactccgacagtgactccgattccgacagcgactcggactcggacagtgactcggattcagatagtgactccgactccgactcggattcagacagcgattcggactctgacagcgactctgacagcgattcggattctgacagtgactccgattccgacagcgattctgattctgacagtgactccgattctgacagcgactcggattctgacagcgactcggattctgacagtgactcggattctgacagtgactcggattctgacagtgactcggattctgatagtgattccgactctgacagcgactctgactccgacagtgattcggattcggacagcgactcggactctgacagcgactcggattcagacagcgactcggattccgacagtgattccgactccgacagcgattcggactctgacagcgattcggattcagacagcgattctgactctgacagcgactctgactccgacagcgattcggactctgacagcgattccgactccgatagtgattccgattctgacagcgactccgactcggacagcgattcggactctgacagtgattcggattcagacagcgatgccgactctgatagcgactcggatatcccgcaggccaatgcggatactaataccgcgctga

SEQ ID NO: 201563 - DNA, 204 bp, Klebsiella oxytoca
atgccgggaatgaaacgctgcgatcgcacagaagctgtactaaacctgtcacccttccagcgagacgggcaaaaaggccgcgcgcctgcggcgccgggaagaccgggccgcgctgacgcgccgcccgcatttcctttccgcgcttttccttttcgcttcctgctgtctttcctcttcctctccatctatctcttcctgatgtga

SEQ ID NO: 201564 - DNA, 489 bp, Klebsiella oxytoca
atgaaaagaccttcacagtggaaatcaggcatggctattagcatacttgtggttgaagacaatgaattcaaaagaaaaaggatcgtggaggttatatacgcagaattcaaagaggtagtggtgactgagtgttattcttttacttcagcgtggaagatgatctcaagaactcagtatgatctcgttttgttagacatgagtttaccgactttcgataaatcttcctctgaatctggaggtgatttcagagtctttggtggaaaggaaatagctaggaaaatgaaaaagagaaattgtcactcaaagtttttattcattacgcaatataaaaattttagtgatactataaactcttattcttatgaatcattaagggatgaattactaaaacaatataaagacaaatgcttaggttttattttatatagcaattcaaaaagtgagtggcgtgaagagttacttttatcaataaaagagattgtaaagtga

SEQ ID NO: 201565 - DNA, 216 bp, Klebsiella oxytoca
atggagtggtatagtggcgcccctgatcttttggactgccgttacgcacagcgttgtcgtttcgccgtttatgcctcatgcgacgcatgtgatggcgtcgttccgcacgggttcttgccatggttcttcctcatattgagcgcggtcatcaaccgcgtggatatgaagaaagtcattttggcgttcaatggggcctcgctcaggatgcctcgttaa

SEQ ID NO: 201566 - DNA, 219 bp, Klebsiella oxytoca
atgatgaaagtatatcgagataaagatagcaaggtgattaacataggagaatgggattacatggaagaagaagtggtggaggaaatattagacgaagaatctggagagatatcattagttaataaaatcatcaggcataatccactaccagagggagccacatttacagaggaagatgtcataacgctaagcgatggcggcattggtgttgctgagtga

SEQ ID NO: 201567 - DNA, 2934 bp, Klebsiella oxytoca
atggcagctgagaagaacgccggtagcatcgtctatgaaatcagcgccgacgttgagccgctgctgcagggcgggaaacaggccattgatgctctggataaactggatgctgcagcccagcagtccggtaaaggaatggataacctcgacgagagcgcctcacaaaccggatccgcttttactgaactggctggttatgccaactctatggataaccaactgcgcaagctgaacaccaatgtgagcggcattgcccgcgctatggaagaggcccgcagcggtaccggcggcgcgagcagtgaattcagtcgagcagaatccatcatcgaggcgctggggaaccagttagccgtactggacgaagcgcaggagaatggcgcgcgcagtgccgctgttctggctgctcagctccgagctggatcgaaagctacagatgaagaaaagcagaagatcggcgagctgactggccgtctgtatgacatgaagactggcgctgagggtggagcaaaagggactggtagctggaagaacagcatgcagcaggcaggttaccaggttcaggacttcatcgtacaggtccagggcgggcagtctgcgctggtggccttcgcccagcagggttcgcaactcgccggcgcattcgggcctggtggcgcagtcgttggtgccataatcgctcttggttcggtgctggctggcgtactgattacttcgctgaatggcggtaagaacgccatggatgcactgaaagacgcagccgaagcgatggacaaggtcatcaacgtctctatcaatggcgtggccgcactctctgacaaatatgcgtacctggcgaaaaccaacgctgaagtcgccactcttatgcgcaaccaggcgctgcttgagtacaacgaggcgatcaacaaaatcccgaaagctatcagtgatgcttcaagctctctattgtctttcggtgacaaagcattgtcggcgttttccggcggctatgcatcggtagacggttttaacgatcgtttggccaccctggaaatcaccactgataattatgcggaggcggttaagcaggcatacggcgcaggccaggcgttccaggcgacggcaaatagcataggcaatacagttggtgctgttgcggataagttcggcatcaccgagcagaaagccttcgagcttagcaaacaactttcagatatagctaaaaacccatcacccgaagctttgcagcgcctggctacagagttgcagaatacgcagagctcgactgaaaagggacaaactgcgctcacggcgtttgttggtaagctggtagagctatctcgtgaggctgtcattgctaaaggaaacgtcgcagcccttaagcaagaaaccgacaacctaaccagtgggcagaagaacctgatcaaacagtcagagcgcaaccttgctttgtcaaagttgcagggagaggctcgtgcgcgactgcaagcgcaatacgctgcagaagatgctggatttgctaaggaagatccgcacaccagaaagatggaagatgacgcggccgctacgtacaaaaatacgcaagcgcagaaaactcttcagtcagcgcagaagaaaggggcatcccaggcagagtcgatcgcacagaaactggcaaacctaaaacagcaagcagaacttgccgccggttcaacaaatgagctgagcagagaacaggccatactcaacgctgagcaatcacttgggaaaggtgccactcaggcacaaattgcagaggcgagacagtatgccgcggctaagtgggataccgccaacgccattaaagctcaggccgcagcagagaaactcctgccggaggcgcgggaaaatgccagttacaggcaggatgttgaagcgctgaatactgctctgtcagccaagaaaattagccaggagcagtacaacgagacctctgaaaggctcgaagcgactcaccaggccaatcttgccaaaattcgcgcgcagcaggtggtcacaccgcagcaggatgctgctggcggagtcgatcctgttcagcagctggcaaacgagaacgcccgtaaacttgcactcattcaggcttatgagcaggaaggtctgattactcaccagaacgcgctagcacttcgtgcagcagccgacacgcagtacgagcagcagcgtatcgccgctcagtgggaaatataccgcaatcaaagtttgggcaatgaggcgttagcagcctcttttgacgcactggctggcaatgcctcgaacgcccttacagggatgataaccggcagtatgagcgctcaggaagctatgcagtcattatccagtacggtgctgaatagcctgatcaactcattcgtacagatgggtgttgagtgggcaaaaaacgcgatcatgggcgcagccacacagcaggcagctatcgctgcaaccacatctgcacaagtggcagggattggtgtacaaactgcagccagcactacagcagcagcagcaacaactgccgcttggactccagcggccatgatgtcatccattgcatcactaggtggcgcagttgctatcggggtcggagcaatggcaggaattttggcattgtctgggaaacgcaagaatggcgggcctgtatctgctggctcaatgtaccaggtgggtgaaggaggaaagccagagatataccaggccagcaccggtaagcagtacatgatccctggagataacgggaaggtcatcagcaataaggatatgcagtcaggaggagggatcagcgtacaggtgaacgttatcaaccagtctaccggtgccaccgttcagagtgctgacggttatatgcaggacggtaacgctgtcgtagagctgttgcttactgatatcgaacgcggcggccctgtatcctcccagatacagcagacctacggactgaatcgcaaagcacaaggtgcctactaa

SEQ ID NO: 201568 - DNA, 351 bp, Klebsiella oxytoca
atgtcttcggtagcaaactggagctataccgcgacggcgaccatctggcgaaagctggaaggcaatgatgaatacggcgatccgctgggctatgccgagcctgagcaaatcttctgtgattatgagggcgggcttagcaagaagttagccagcctgggcgccgaaatcgtcgtgaagaatacggtctggacggagttttcgctggcggccgcgggtgattatctgctgattggcgtatcgaccgaaactgacccggttgtggccggtgccgacgaggtgcggcaggttatccgctacgccgataccttcgagcgcctggcggatgattacgccatcctgacgggagtgtag

SEQ ID NO: 201569 - DNA, 1389 bp, Klebsiella oxytoca
atgaaacgcaaccgcgttaacgtgctgaccgtcgtcaactccgcttcaaacatcactactgaaaccatcgacggcaagccacatatcgtggttcgcggcatcacgcctgtcgttgacgatatcgtgatgaaccggaagttgtacccggcagcagaaatcgaaaaggcctacaacacgctcgagcgcaacccgatgccgcttggccacccgaaagtggacggcaagcacgtgtcggcgcgggatgtccgggcggtgaacgagtaccacgtcggggcctggctgcaaaacgtcagccacaaagacgggaaggtgacgggcgacatgtacgttaaccgcaagtacgccgaatccagcgataagggcaagcgcctgattaaccgtctggatgagatgctgtccggtaccaactcagaccccatccatatctccaccggcctgttgtattccggcattgccgcaaacggcgagtcgaaggggaagaagtacaacgagatcgccacaaacatgatgtttgaccatgtggcggtgttgcttgatgagcccggcgccggtacgccggaggagggcgtgggtatcttcgttaactcagaaggtgatgagcagcagatcgaagttgcccgcctggctgacggaatcgactgcacccgcgatggcctgatcaacaaaaccaaattcttctttaccaatgcttccaacttttccttcgacgacatccagcgcgcaatcagtgaaaagctgcgagagggtcgatctgatgacaactggctttggccagagtcggtatggcctgacaccttcgtataccgggatgattcccgttatttcaaacagaagtacatcatcgacgatgacggcaaggcccaattcgtcggcgaacctgtagaagtcgtgcgcaaacaacctgagtacgagattaaaaccaacggagagaacgatccgatgaaagaactgattatcaatgcgctgaaagccgctggtaagccgactgatggcaaatccgatgccgaactcatggacgcttacaaccagatggccgccgagaaggcaaagccaaaagaggaaacgcctgaagaaaaggccgctcgcgagaaagccgagaaggaagagcgagatcgcgccaacaatcaggcggaagcaccagcatggttcaagccattcgctgacgatctcgctgcggttaaatcgggcttggcggtgaactctgacaaagagaagggcgaaaagcgcgcagctgtgaagctggcgatgaacatgagcgatgaagaagtcgcagatctggacggtaaggcgctcgacgcgatgtatgccaagtgccagacctctttcggcctgaacggtgcattccgccaggctaccaacacccaatcagtcagcgaaatgccggagtaa

SEQ ID NO: 201570 - DNA, 768 bp, Klebsiella oxytoca
atgagcaatatcgatgagctgaaattgcttcaaaagcaatctttagcagccgcgagactcagcggagaaaaacactaccgtggttatgttccgtgtaagcatgggcatgtttctgacaggctggtatcaacccagcaatgctgcaagtgcctcgagttaagaaagcgtggcatgcgtaaggtagatggggttcctcagtcaaaatcatcaagagttaagaagaatacagccatcaacctggggaagacacactatttcacaggcgtggcatgcaagcgcgggcatattgccccacggctcgtgtcgacgaggcagtgtactgaatgcctatccctcagggatcgcaatgatgccccgcgtataataagtgaagcagcgaaaaacaggctgaatgcagccaggcgtagccgagttgggagagccaagaacagggcctactacggcaatgtgttaaagcacgacccttgctataagctccgccgcaaggcctatgacgaaatcaataatgcgctcgcctggaatagcggaaaggtgaaaatggcggttgggtacacttctgacgaactgcgcgagcgcatacagtctcaattccaacctggcatgacatggggcaacaggggcaagtgggagattgaccaccgtaagcccatatcagcctttatcgctgaaggggtgagcgatctgatggtcattaatgcactggataatctccagcccctctggaaagaggaaaacgccatcaagggtagtaaatacatgccatcttaa

SEQ ID NO: 201571 - DNA, 897 bp, Klebsiella oxytoca
atgttcaacgatatcgaagataggtatctgaacatcaagcgcaggcttagggctctgcttgatctgcggctgaccgggcagcagcgtgaggcgaacgcacagcagtcctggatgatgtgcaacaacgatggcgcagagccttcgctgtatcaggtaaatgccggtaagttcatctatgacatgaccgccgctgagctggccgacctgctgcaggtggttcagtcgattctggatgatgatcttctcgatggcggcagccagaacctgtgggcgatggattacgtcattgcggagtatgaccgaggcacgctaaatgccttcaccaacctgtcggtgcagtcgcaggtgtacgccagccagacgacgctacagcagcttttaagcagtcccggtcaccttaaccagatagcagcagccaggcttacaactttcagtgactggaaagtcatcagcgataccgcccgcggcgacctgaccaacatcataaccgatgcggtagcgcgcggggtgaatccttgcgagacggccagcgtaatcagtaagcgcctcgatgtgtcgatgtcgaaggctaagaccatcgctcagaccgagcaggtcggcgcactgcggcaggcgcaatggaacgagacggactgggctgctgaccgtttaggtctgaatactggcctgctatggctatcggcactcaagccaacgacgagggagtggcatcgggctaggcacggtaaagtttttacgacggaagaggtcagggacttttatgcagaaaacggtaacagatataactgttattgtgctcaggttccggccctacttgatgacgatggcaagctctttaacgaagggctgtcggataagctcgcagccgagcgcaaagcgtggaagccgggagagtaa

SEQ ID NO: 201572 - DNA, 1452 bp, Klebsiella oxytoca
gtgagtgaattaagtaccggggaacagttcctcgttaatgcccttgctgatgctatcgggcggcagcgcatgctgtacgcgggccagccgggaaacaccaaacgcacgaagttatgggatgagttcggctatccgaacagtctcgaattcgaccgatactaccgggcctatgagcgcaacgctgtggcgtttgccgccgtacataagcttcttgattcgtgctgggttgataacccgacgatcatcgacggcgacgacggcaaggagtcaaccgagacaacggactgggagaaatcagcaactaagttgctgaagaaacactggccgaaaatcaaggatgcggatcgccgtaacctagttggccggtactctgctttgctcattcagtttcgtgatggcagggaatggagtgaaccggtagacaggtctgtggtggcacgtttgaaggacaaggccattgttaagctgatcccagcgtgggagtcgcagatcaagccgggaaacttcgataccgacacactatcagaaacatacggccagccagtttcgtacaacttcaacgagcagccagttggtgatgatggtacgtacggtccggtgcgaggcgtcaccgtacaccccgagcgaatcatcattctctgcgaaggctcggaagacgaaaatatgctgtctggcgtgcctttcctgcgcgcgggctacaacaaattgctcgaccttgaaaaagtctcgggcggcagcgcagaagggttcctgaagaatgccagtcgccagctcgggattgcgttcgacaaagaaaccagcattgcaaatctgacaaaggcagcgacagatgctggctacaaagaccttggtgaagcgcttaacgacaaggtcaccaagatgaaccgtggtactgatgctgccctggtaatgcaggccggcacgccgtcggttctctccgttgcggcagcagatccgtctcctacctggacagtggcagccaacgagtttgcatcttcgattcaatgtccgttcaccatcctgtttggacagcagacggggcgccttgcctccgatgaggataaaacagactgggctaagcgctgtaacggccgccgctggggattccagtcgacgattgtacagagcgtgcttgagcgcttctggacagttggtgtcattgaaccgccttcatccggagaggtcacgctggcatggtctgatctgctcgcgccgagcgaaaaagagaagattgccaacatgcaggcaatggccgtcgtggcgaaagatacccagcaggcatacggcacaccggcagtggatgaaaacgaaatccgcgcagtcggtgagttggagcctcgcaaggtcgtgccgccacctaaccctgatgtaaagcaaaccgataaggatccgctgacagatgatgatgacagcgcaaaccagaatcgggacgccaatcgtaccgcgcaataa

SEQ ID NO: 201573 - DNA, 594 bp, Klebsiella oxytoca
atgaataatgactccggatttggctcttttgtagatacgatttcttctcataaggacgtcatggccgatatcgctgatgccggattagaggccgctgaggaaatcccactttttggctgggcagttaaggcatggaatataaaaaatacatttcaagaaaagaaacttgcacgcaacataagggaattcctaagatgttcctctgtagacgacgcgaaaaatttcatctcaaagtttagctctgaagaggaaaaagaggagctttgcgatagcctaattcaagtgctaattgattctgaaaagcccttaaaggcaacgctgacatcaaagatagttaacgccatcaacgaagatcgccttactgtgtctgaggctcatcagttacttttgataattttaaatgcctccattccagcgctagaggccattgataaattttatcaaaataatccgagtggcagcataagcaccatgaatgaggatgcaagaacatatggcgcattgttgatgtcgattggagtgatccatgtccatggcaatatgacccgagttaccaatcttggcagaaagttatacgaatgcgccttcgtgtaa

SEQ ID NO: 201574 - DNA, 471 bp, Klebsiella oxytoca
gtgattggctcactggtaaagcgttacaggttgcagctactggtgatagcgttaatcggcgtgctgacattcttcgtgaaccgctaccgcgataacgccattgcctacaaagaccagcgcgataaagccactgaacaactcagcatggcgaaagacaccattaccgacatgcagaaccggcagcgtgacgttgcagcgctggatgccaaatacaccggagaactggctgatgctaaagccactatcgatcagcttgagcgcgatgttgcttctggcaagcgtcggttgcaactcaacgcaaaatgtccctcgaacggagcggccgcaaccggcggcttgggcgatgcttccggcccccgacttactgactccgctgaacgggattatttcaccctcagagagcgaatcgtcaccatcaccgggcaagtgaattatttacaggactacatccgcacgcagtgtctgaggtaa

SEQ ID NO: 201575 - DNA, 690 bp, Klebsiella oxytoca
atgaacagtcagcaactggaatacgtacgtcagcagctcattgtggcgaccgcagatctgagcggggcgacgaaagggcagttggtagctttcgccgagaacgcgcaattcaccgcgacggcgcgcagccggggccggaagaaaatcaccgatccggtcaccggccgcaaagttaacccggacggccctgcgatgagcggcagccagtcacgcgctaagggatcatccatcgcgctggttgggccggtggagtacgggaccgcgtcatggcggcgcgcgcttctgtctctggaagaccaccaaaaagcatggctgctgtggaactacagcgagaatatccgcttcgagtaccaggtgatgataactcaatgggcttgggcagagttccaggagcagcttggcacgaagaaagtggccagcaagacgatggagcgcctgaagaaacttatctggctggcggctcaggacgttaaagcggagctggcagggcgtgagacgtacgaataccaagcgctggcggaactggcgggcgttgcgaaatcaacctggacagaaacgtatctgcctcactggctggcaatgcgcaacagctttaagcggctcgatagcgcggcgcttatctccgtaacgcgatcacgttcacaacaaaaggcgacaaatttagatgtaagtcttgcaaaaccgaactga

SEQ ID NO: 201576 - DNA, 225 bp, Klebsiella oxytoca
atgagcaaaatacagtacccaatgactaccgctgctgtctttgatgacgtggtgtatccgatccatcttgatggcgctcaccagatagagcgcgaggtatccggcgcaatcaattggttttgtcgctggaacaatgaggaaaaagctgtagtgaaagcgcgcgtccttttcagttgctgtggcctttacctgacgtacgaacagctaatggcggaggcagcatga

SEQ ID NO: 201577 - DNA, 648 bp, Klebsiella oxytoca
atgcgtaaaccatcccgccgcaagtgcaaagtatgcggtgaatacttcgtgccgaaattccacgacatccggatccgctggtgctgcccggaacacggcgcaatcctcgcaatggaagaacgcgagaaggagaaggtgaaagccgccgctaagcgcattaaggagcagaaagaggcagagaaggccgggcgcaaacgccgcaaggccaagcgcgagtcactcaaatctaaatctcagtgggataaagaggctcaatcggctttcaatcgctacatcaggatccgcgatgaaggtaagccatgtgtcagctgcggcaatccacttattggcaaaagcaattacctaactggaagcgccattgacgccagccattaccgttcgcgtggtgcggcctcacatctgaaattcaacacattcaacgtacatagtgcctgcacacgctgtaatcgccagttgagcggcaatgctgtcgagtatcgcatccgtcttatagaccgcattggcctggaacgagttgagcgtcttgagtctaacaacgagccgcgccggttcgatatcccatatctgaagcgcatcaaatccatattcacccgcaaagcccggtcgctggagaagcgccgcgcacgtcaacaggagcacgcagcatga

SEQ ID NO: 201578 - DNA, 249 bp, Klebsiella oxytoca
atgtccgactggaacattgcagcaaagccgcaggaagatcgcgacaaggttaacgttgacctggcggcctccggcgtggcctacaaagagcgcatgaacatgcctgttatcgctgaggttgtgatgcgtgagcagcccgaacatttgcgggattacttccttgagcgcctgaagttttaccgagagaagtcgataactttaccgaaaggtagcgatccggtttacctgaaacaggaggaagggaagtga

SEQ ID NO: 201579 - DNA, 849 bp, Klebsiella oxytoca
atgaacagcaaatttaccagagaagaattgctcaacatcatcaataccgaccatgtgcaatgcggtgaggcttcggcgctggcccgcatggcgctggcatcgctcgaagcggagccggttttcgaagtggaggtgtcaggcagtcactggttaaacgctgggccggtagacgatagcgatttttctggaatgccggacggagttaatcagctttacgccgccccgccagcgcctgtatctgggatggatgaagcacaatcacgcgagctattcgaaaaaaactgcatggcgaatattgaacgcaacaagtggcatcctgacctgtacgcacacctgccggccagggagcaatgggctgcgtgggaagcctgccgcgccgctatgcttcagggtgtcgatggaaaaccagagttaacggtctggtacggcgcaatgccggaaagtaacggcaaaacaaactggacggctattcttcatcgcaaaggtcagaaaccgtgggaaggaatcacaatcgaccgctcagagtatcctgaccgcgtgcggtatgaagctgaccgcgtgcgtcatctgattggtgagttggcagatgagcctgacatccttgcgtatgacgctgatgcacacagtggatatgtgaagcctggcaactctccggtgattccggataattgggtggcttgcagtgagcggatgccggaaggcatgcagaccgtcatcacctccaacggtttcgatatcgggcagggttggtgggatggagaaggctggaattcattcgactcacatgacgttgttcccggtgatgtaactcactggatgctactgccatcagcaccgcagcaggagtag

SEQ ID NO: 201580 - DNA, 666 bp, Klebsiella oxytoca
atgaaagaacgcggaatgatttttaacggggagatggtgcgggccattctcgacggcaggaagacacagacccggcgcccagtgaaattccctgtgcatgataaaaaccttgggtgcgagttggctggcaatgaactggccggggatctgtcggcagggaactatctgaatagcgcatttggcaagccagacgatcgaatttgggtgcacgagacgtggggagtcgtcagccacgaactggatgaggatggtcgaatccgaccatggacgccagaccgaccggctacagccattaacgaaatgccgtttggcaatggctattactctggccacgccatttatgcagctgatggtgattttacctggggtgatgacgatggttatgaagatggtcgttcgtgctggaagccatcaatccacatgccgcgctgggccagccgcattctgctggaaatcaccgacgtgcgcgttgagcggttgcagtccattacccttggggatatctgcaaagaggttggatgcggtctttatgattttcgacctgccacttatggtttccaggtatgggaggagttgtggaaatccatctatggcgccgaaaactggcaagccaacccctgggtttgggttatcgagttcaagcgcgttgaaggcggtgcagcatga

SEQ ID NO: 201581 - DNA, 414 bp, Klebsiella oxytoca
atgaccacatgctctgagcgatttttaagctacgatgatatttgtaaacgtcctgcttttgatcaaaattatgagatcagccctgataattttcataaactcattggtaaatattattttaaggaaaggcatatttgtcaggtacgtacaaataaaggtatttgtcgtcagaaacacaataatggttggttgggtgtttctctggaaggtgttgaagcactaattggttgtgattgtgcggtaaactatttttcagcccatgatgacttcatccgggaaaagaatcgtgttaatgatgaacttgaccggaaagaagcgcttgagaaaaggtcattattactcgaaaaaagctggaaacggcgaattatattgttgaccttgaaaaaacagtcaaagaggttgaaggtaaactaa

SEQ ID NO: 201582 - DNA, 477 bp, Klebsiella oxytoca
atgaacgtgagcaagtttgctagattatttaccattcttatacaagtatctgcagcatatatcttgtttatgatgatttatcattccctcagcaaaaacacacttgatttttcatgttcttccaatctactacatcgtgatttatctactggtctcagtatgaatacaaatgaacacttcatgttcaggccggatgggaaagggatgataactttagatggtgaaatttatagcaaggaccactcatataaattatcaagaacaattcaatttaattatgaacatttcgggaagcatatctataaattaagtgggaaaacggtaaacgtcaataataaagattcgcttcctgaaaatatgtttgaggataattattactcttccagtgaagtgtacatatcccacattaaaaatataaaaaatgctttcttaattggaagccgtatattgcctgtatcagtgtgtataacaaattaa

SEQ ID NO: 201583 - DNA, 1338 bp, Klebsiella oxytoca
atgaagatgcccttacatgacgatataaatgtcgatgtgttgcgtttagataaagcctggacgtggttgtgtgattcacgtaaagcgccacatgcgaatgctgatatccgagatttactgtaccgctggtcagcataccgggagatgtgcctcaatcaggtgcggtcaggtacttatcgcttaacccagacagtccgttggctttatcagcaagcgcggttttggacaaaaacaagacaggccaattctacatcggattactgcacatggtggaaaatatggactgccgcgcttattctcggcctttcatgttatgggaccagggtccaggcaaaggttgtagccactatccccatctccggtaccgtgactacgggcacgcagagtaaccccgggtatgccgtaaacggtcaagtaaactgcactgttggagcggtgtctacatcgaaatcttcgctcagcggttcatcattatcaccgaataatatcggtttagaattttccacgtcctcagatggtcaggctacgggcattgagcttgatgacgacgtgatcctcatgctatcaggtaccatgtcagggaagtctttgctcgggatctcaccaaataccaccctaatgaattacactactacttggaactcgttgggtattcctagccctaccaacggtggaatgcttagcccttggtgctacagtataatgacaagtgaatattcaatcagagagtctcaacagaccacaatcacggggtctgccatcgtgtacgctggaccgagaagtacagcaacttcagtcaccgttcccagtctttggttaggacgtcgcattgccactagcgactttccgggggcattagggcccgtacagatatcgaatagtatggtcgtacctataattagaaccgaatgcaccatatcgccgcaggatacaattataaatttcggtaccgtgctacaaagtgacagtgataataaagttctcggttattttcaatcagccttgaatatcaattgtcccacgatagtgagtaataacggtacggaaacaatgacaatttcctttagcggagcgcagggccgttataccgatacgcttgcccttgtgggtaccgaggggcaaggccagcttgcggaggttcgcggcaacatggggacaggaacagggatgtgcgataataatcctgaccggatccagtttcaggggcaaaaatatagtatcggtaacatcggcactgggttaacgcaagttcccctgacctggtcgctctgcagtaatgctaccggactgacaggcgtcggtgctgctcaggccacagtgaccctcaactggccttaa

SEQ ID NO: 201584 - DNA, 2592 bp, Klebsiella oxytoca
atgaaattttttcatcaccagcggggtcttcccctgggctttcgtcaccactcgctggcatggtgtttgctcttgagtatcagtccggcttgggcgggtgactattttgatcccggttttctcggcgggggcgacaacgcccatgttgacctgtctgccttctcggaggcgggcggggtggtagccggtgaatataccgtctgggtgttcatcaaccagcgcaatgccgggcaatatccgctgaatttccagaaaaataatcagggacagattgcgccggtcctgactccggcacaattggagaccttcggggtgaatgtcaaacacttgcctgtgctgaaggacctgtcagcctcggccccgattgacaacctcggcgaggtaataccgcaggccacgacccgcctggatttggcacacctacgtctggatatcagcgtgccccaggtggccatgcaaccagagaggcgcggggcggttgacccaagccagtgggaggacggaatttcggcactgatggccaattataatctcagtgccggacgcaccactaattcgagccaaaaccagaccacgcacaataacaacctgtttgccactgtgcgagctggggccaatgcgggaccgtggcggttgcgcagtaccatgacccatacgcggtttgaatacagcggtggagaaaatcggtcccagcccacacaaaacaatacccgtttttccaacacctatcttgctcgcgatatccgggggttacgctccaccctgttggtgggggaaagcaataccggcagtgatatttttgacggtgtccccttccgtggggtgacgctcagttccaatgagcagatgttgccaagccagttgcgcggctatgccccggccatcactggggtagccaacagcaatgcacgggtcaccgtgcgtcagaacggcaatgtggtgtatgagacttacgtggccccggggccgttttacatcaatgacatccagcaggccggcctgtccggggattatgatgtcaaggtgacggaagcggacgggacggagcggcagtttatcgtgccttactcttccctgccggtgatgttacgccccggtggctggaagtatgagctgaccgtagggcggtatgacggcaacctgaccaacgactcccgccgggcagattttttgctggggaccgcagtttacggtttgcccaaagacattaccctgtatggcgggatccttgcggccaaagattaccaggccctcaatttcgggaacgggatatcgttgggggatattggggcgttgtctgcggatatgacccattcgtcggcaaaatttgatgatgagtccaccaaggttgggcagtcctaccgtttgcgttattccaaaagcctgctctccaccgggacgtccattgatttgaccgccctgcgttactccacgcgggattactacagtttcaatgaattcaacagtcagggccaccaactgcaggacggggtcaacccctggatactacagcgtcaccgcagcagtttccagacgcagctcagccagcagatgggcgactggggtgcgctgaacttccgggctagtcgtgatgactactggggtggtgagaggaggttaaccgggctgtcattcggttataacaacagcctgaagggcgttaattacggggtcaactacaacattgacaggattaaagacacgaatggcgactggccggaaaatcgccagatagcattcaatgtcagcattccgttcagtattttcggctattcacgggacctgcaatcgatgtatgccacgagcagcatcactcatgacaattcaggccgcacccaaaatcagaccgggctcagtggtagcacactggacggtaaactgtcttacagcgcctcgcagaactggggcaatcaggggcagagcagtaacagcaatgtgaatgcgggttatcagggcagcaaaggtagcgtcagcggtggttacagttacagcggagatatgcagacgatgaatatgaacgccagtggtggggttctggtccattcggaagggataactctttcccgttctatggggggatctgtggcattaatcagtgccccgggggcggcgggggtcagcctgaatggcagcgcggcggtcacggaccggtgggggtatgcggtggtgccgtacctgacggattacgcccgaaacagtgtgggtcttgaccctagcaccttacctgaaggggtcgatattaaccagacgaacctcaatgtgtacccgaccagaggggctgtcgtaaaagcccgttttgcaacacgggtgggttatcaggtgttgatgaccctgaaacacggaagtggagtggtgccttttggagcaatagcgacactggaaaattctgacaccgatggagagagtggcagcatcgtgggtgatggcggtcaggtgtacctgacgggattaccgaaaagcggcacgctatgggtgaaatggggtgagacgtctgaacgtcagtgccgggttaattttggtgtgtccagcctgagtacgtcgccggagaaaccggtacgccaagtcgcatacacctgtcagggcgcgatctga

SEQ ID NO: 201585 - DNA, 786 bp, Klebsiella oxytoca
atgaatttgccccttcttctgctgcgtcatccacgcgtgatgggcctgctgttcctgttaggcaccgccctgttcggcacgcaggcttacggcgcgaatgtcagtgataaaaacggtatcaccctgcagtcgacacgtgtggtgtatcccggtcaggcaaaaaacggcatcacgtttacggtcaccaacaatactgcgcaaccgtacctgctgcaatcacgggttattccctgggtagcggaatcaaccgacacgcgcccggcgcaagatacacccctggagactcacgaggtgccgtttattgtgttaccgcctttgcaacggtttgagccggcggaagccttgactctgcgcatccggttaacccgccatgcgcttccgaccgaccgggagtctgtgtttgtgctgagcctgaaagcgatacccagtcagtcctcatcgacggaggcggcacaactggtcctggcgatgcaaaataatctgaagctattttatcgccccgaggggttaccggagtacagcacagagcaattctccgggaagttacgttttctgcgtcagggggcacagttgaaggttatcaaccccaccccctattacgtgaccttccgctcgttgtcagtggggacgcaatcggtagatgccgcggccctgtctcactgggtaccgccgttcggtgaacaggtgtattccctgcccgtgaacgcccggggagatgtcacctggcaactgattgatgagatgggcagcgtgacccccacccaacatcgctcattgacaaattaa

SEQ ID NO: 201586 - DNA, 801 bp, Klebsiella oxytoca
atgaatcgacattatcgactcaatgggcagaggttaacgcgcgtgatcatgcgggtggccgggatggcgctgttcgtactgctgggcagtacagccctggctgcggacgggggactgcaactcaatcagacccgtgtcatctttgacgccaacggcaaaaacgcaaaagccacgataaaaaaccagagcgaccgcgtgtacctggtcaaggcgggggtactggcgacgccagactcgactgcaacgaaaaagaacgaagtcgtcccacccgtcccctttatggtgacaccgccgctgtttcgtctggagccgaacagtcagagctcggtgctggttgtgcgagacggcacggcggaattacccacagaccgcgaatccgttttttatctgagtctgctggccattcccgccaccgcaaaattgacggaggagaacaacgccggggtctctgcccaggtgtccgtgggggtacagacgattatcaagctgttttatcgccctgcggggttgtcaatgccgattcagaccgcggcggaaaaactcaccttccgtcaggtgggacaggatctgcaggtcagtaatccgacaccgtatttcgtgacgctggcccgactcacgctgaacggcaaggtgatggatgtgcggaacacagcgacgggtgccatgatagccccgttctccgcacagaattacccgacaaccgttccggttcaacaggtgagctggaccgccatcaatgattacggtggtgaaagtgccgaatatcacgcggccgtgcccctggtgagggcgttgttatga

SEQ ID NO: 201587 - DNA, 579 bp, Klebsiella oxytoca
atgcatccaatatctagagtccgtccccgtgtgttatccgtcatcctgtgtgcgggtttactgttggggctgaccacgacagctcaggccgggtcgaccggggcaaccgtcaactttgcggccacgctggtcggcggaacctgccaaattgccgtagacagaaccaccatcccgtttgaccccgtcccgtcgtcggtgattatcggtgctggtgttgacgggattgacccacagttgctgaccctgacatttaccgactgctcggggtgggggttaacccctaaaattcaggtcagtggcaccacccttatggctggcatcccgttgtttcgcaacgccaatgcggccagcgattactcgcaaggttatggggtgaaactggtgcgacagggccagaccgccgcgctagccagcctggataaggtgacagtcggaaccgcggatacccagctcagtacgttgaacagtcaatcgctcacgtttgaagcccgtttatcttgcggcagttgtaccccaggaccggggctgaacgggggcaatctgaatgccaccgtgacgtttcagtttctttatgagtaa

SEQ ID NO: 201588 - DNA, 549 bp, Klebsiella oxytoca
atggctcagtccgctagccggttgctcggcatggtgatggccagtgctttggttttaccgacagtgtgggcggccgattcggcggtcgtcaatttttctgcccaaatcagtgatggtacctgtgacattcagttatcccagagcgccttgcaattcggtttttacaaagccattgattttcaatcgagtgcggcggtggcgatgttacccctgacggcaacggtgacctgttccggcgcgacaacccccaagctgtccgttacagggaccacaccgtataccagcagcgccattttccgtgatgctgattcagtgtccaccggggcgggatttatggtgcgtcgtgataccggaggcatcggtttgagcaatttttataatgaatccagcgcgataagcaatgctgccagcgttccccttgccgcgatcagcgcggcagaagccccacataatgaacccttcctgctgggattggttcgtgccgggaatgaatccgtcacgccaggggccatcaaggccactttgatgttcaccgtgtcttttgactga

SEQ ID NO: 201589 - DNA, 687 bp, Klebsiella oxytoca
atggggatcacctcagcaattgcggggatttctattgacagctcacgcattatctttcaaagcagtgatgatgctcgggggcgtagtgtcgggattacgagttccgtttcatcggctattccttatctggtcaaggcgaagatcacccaggatatagagggtaagaatgttcaggtcccctttgtaacgaccccttcattatttcgcctcgaaccaggcagcactaatcaggtattagttgtaaaaaaaccagtatcggatgaattaccccaagacagggaatcactcttctatttccgcagcattgctatgcccgcaggtgaaaaacaggtggctacacactcaccggtggtggggggaacacttcaggtatccactgccacagtagtgaagcttttttaccggcccgacggattatccctcccccagcaacaggccatgagccagttgcagttctccgcctcggggcaaggggtgaaggtggcgaatcccacgccgtactacatcacgcttgcgagcctcaaggtggccggggtgccggtcccactcagtgctgcagccaataacacgctgattgccccatttgacagccgtatctatacccgagtcccgcacaagggaaatgtggaatggaaagcccttaatgattacggcggcacggaggtgtttcatggctcagtccgctag

SEQ ID NO: 201590 - DNA, 516 bp, Klebsiella oxytoca
atgtctataaaaaatgtaatctcagtaaccctttttgcagctatcacaggcgcgagcatgatggccaatgcagccccgtctgcaaacgtgacattaacaggaattatcacgaatacaacatgtgatgtaactgtgaataacgcgcaagcaaccttgaatgtaggggtttacaaatccggagattttacagcaaacactcagcaagggtctgtaccgctgccggttgaattaaccaattgcgcggatgaatccggtgcactgatcatccaagggaccaccgccagcaccaacccaagtaaacaactgttcaccgcggcaacgggagacactgttggcttcatgatcaaaaccagcgacaacgcctcgcaggtggcagccgatgaggatgttgcacgggatgtgacttcagcaggctctaatagctatacctttaacgtcggcatgggctcaacaactctcaccccagcagcgggtgcttatagcgcacctattactgtggcttacatcgtaaactaa

SEQ ID NO: 201591 - DNA, 702 bp, Klebsiella oxytoca
atgcaaaaacttgacatacagaacacgtctccactcgacctgatcagttttttacggctggagcctttagttgatacaaataaaaatcgtatcgttgcttttgaagtgctgagtgtactcagagtaggagtagaacctgaacattggtttagcgtgttaaacacaagggatattattaaggtgatgaaatttcagcttgaacaaatctcgatgctactcgtgaaagagaaatgcttttataacctgactatcgcggctttactggagctgaatgaaaaagatattcatttcattaccggttttagaaacgtgtcgattgaaatcagcgatacatacaacatgaagtttctcaatatcgatgattatgatgattttttaagaaacattgatttattaaggcgtggtgggatcaacatctggctggatgatgttacgcgcgatgaactgatttatcttgatttctatcgcaaccatattgatggtgtcaagatagacaaaagcgaactgcgagaaccctggctgcgaaaagaaatttcaattatacagaactttcttggggatattgacattattatcgagggtatcgagacagagagcgatcttgctgtggctaaagagactggggtcaaaatggcacagggatatttatggagtgtggatgatttatactggatgccgaaatttagacctggtgggatatga

SEQ ID NO: 201592 - DNA, 924 bp, Klebsiella oxytoca
atgagtaataagttctatattatcgggaatgccatcaggttttccccttcaacggaatcactccatctgacagaaaatccggatatttccgttgtactgaccccggcctgtaaccgacttttgatttatctaatttctaaccaaggcgtggtgttatcccgggatgccatcttttcaacattgtgggtacagtacggaagtacaccatcgaacagcagcctgaatacctacatatcatttatccgaaaagcttttgttaatcttggcatggaaagtgaggtgatcacaacaattccgaagactggatttctctttaatccggatcttaacgttgaagaaattgaaatcgcccctagtgatgaaatcaacgaaatttccactaaagaggtgagtcaccacataaataatgcagtcctgtctggaaatgaaagcaacataactctggatgaaacaaaacaggatgtcaggagagtgaaggaggtggttccagacaataatccgaatgaagatgtcactcacaaccagggaaagaagaaaataacagtcatcaattttgtgctggcatccgttgcactgattattgcggcagtgtctgtggcctgttttctggggttacctgagagagtacctcctgtgatacccgttaatatcgggaaaatggatgcctgtgatattctttttttgcctgttcatgccggagactccgcgatgttatccgaagataatatgcgttttatcatcagacaatccggattcacctgtaaacctggaggggttttctacctttatactgacaaaagagtcacgaccggccagtacgggaaaatctttgtctcttattgtgagttgcgggataaatctgttaaaaactgtaccgattttatcggtgataacctgaaattccctgtaacaggaacgcactga

SEQ ID NO: 201593 - DNA, 906 bp, Klebsiella oxytoca
gtgcgcctgccgtacctcgcccgtatccgggttgataaccgggatcgtcggcccgcagaagtcgaggaacagcttttcaccggcgacatgatgctgacgcatactgcgtttttgctgcttcagccactcaccatagaggttacagaactggctgtacccgtaggcgttttcaccagcttcttgttgatactcctgtcagagcaggattttggtcatccctttacgcttcagtgcctgatggcacagcgggaagtcgggcatccgtttatgaccctgctggccgatgatgagttgctgaacagagaaaacggtcgtgttgcgcggctgagaaaaagcgccaacctgaagtaccaggcagccccggaggggctacattacccggtctcatggggtctgcgggccgagcagatgcgggaactgctgaactgtcactacatcacccacaagaaaagcctgttgatcaccggtccgacagggtgtggaaaaagctggatagccaatgcgctgggtgagcaggcatgccgacagaaacacagcgtgcagtactggcgtacgggacggctactggagatgctggcgcagggtcgcgttgacggcaactggctgaagcacctgaaacagctgcaaaaaacgcaagtgctcatcctggacgatctgggtctggagccactgagcaacgcgcaatgtaacgacctgctggagataatcgaagaccgctacggacaaagcagtactatcgtggtgagccagttcccagtagacaagtggcacagtctgatggagaacctgacaacggcagatgcgatcctggacaggctggtgcataacgcgcacaggctggtactgcagggtgagtcaatgaggaaaaataaaccggaagtggaaagcgacgaaaaaacaggttaa

SEQ ID NO: 201594 - DNA, 963 bp, Klebsiella oxytoca
ttgtgcctcctagagcctaaaatcgacaaacactttccccaaaatggtccaggtcaattgcgcaacgatgatctagccgtcttcctgtgtgtggttgatcaccacagcttttccgccgcagcacgtgccctgcaaattacgcccaagaccgtcagtaagcagatcgccagactggagggcgcgctcgagaccaccttgtttgagcgaaatactcgcaatctgcgtattacggacgaggggcgtgccattgccgagcgcgcgcgcattgcactgtcgattctcgatgaggtgaaagaactggccagaggcagcagccaggagttgaccggaaacatacgtttgaccgctccagccccgtttggtcgaaaatttgtggcaccggcaataactgacttttgccgattgcaccccagggtcgggttcgacctgcgtctgtctgatcaggttcaggatctctacagcggtgatctggatctggctatacgcatgggtgaactagtcgattcacgactaattgcccgcagggtggcggataaccggcgaatcctggtggcttcgccggcatttattggagcgcacggaaatcccacgcggccggaagatttggagcaccacaattgtctggtgttcgcctatccaggtctgttgcagaacacgtggccgctacgaaagggacggcgcgagaaatcggtgctgatcggcagtaggctatgcagcgataatggcgacgttttacatgaatggtgcctcgccggactaggaatctctatgcgagaaacctgggatatccatgaagagctgaacagcggccaactgattcgcgtgctgcctgactgggagggggtggcctcgaaaatcagccttgtgcgggcacgtagagaacccgtaccgcacagattgaccatattcagcgagttcctactcgatcgatggcagcgtgccccctgggatgaatcattataa

SEQ ID NO: 201595 - DNA, 702 bp, Klebsiella oxytoca
atggcgcagcgcatactttttgttttgaccagtcataacaggaagggggcggcagatgacgcagaagccactcccagcggcttctatttatccgaggtgactcacccgtacagagttctcactgaggcagggttcagcgtcgattttgtcagccccaggggtggcaagactcatgctgatgggctaaacctggacgatcccgtgaatgccgaattctggagcgacgatatgcttcgcgcggctaccgaaaacaccctcgcgccgtcacagatcgatcctgacgtctatgccgcgatcttttatgtaggtgatcacgcgacgatgtgggatttccctgacaatgctgagctggcctccatcgcggctcgaatttatgaggggggaggggtggtctccgcggtttgccatggtccggccgggctggtgaatatcaagctctccgatggtcgttatctcgtcacggacaaggatgtctcgacctttaccaacgatgaggagcgtgctgtcgacctatacgacaccgtgccgtttctgctggctgatattctgcaggatcgaggagccagacatctgccggcagcaaactttgaggcgcaggttgtggtgagcgagcggttggtgaccggccagaaccccgcttcagccaaaggtgtagccgaagcgatgctacctctgttagcaagttctgaagggcgggcgtaa

SEQ ID NO: 201596 - DNA, 1188 bp, Klebsiella oxytoca
atgccttttgtcatctacgtattcgcactctgcgccttcgcactgggtttcaccgagttcgtgactatcggcttggtatccaacatttcggcggatctgcataccagcgtcagtcaggttggaacggcggtgacggcctatgcgctgggggcggtgatcggagcgccagggctgacggcgctcacaatgcgctggccgcgcaagcggctgctattagtggcaatggggttgttcacacttggcaatgcggtggtgagccagtcggatacattgacgccgatgctgattgctcgattcgcgtccggactcggccatggcgtttttcttgccgtagcttcaagcgttgccacgcaacttgtcggtcgtaatcgcgccggcgctgccgtcgccgttgtattcggcggattaacccttgctctggctctgggcgtacccttgggaacatatttcggcagtctcctgaactggcaggtgatcttcatggcggtggccgccagtggtgcgatcggtttcatgggattgcttgtcctgatgccgactgctcaaaatgacgtatcggcacaggctaatgccatggacggtctgaaggctatgttaaatccacacctgttggcgggggccggaatcactgttctggcctatgcaggttcttttgcactttacacctacatttcaccaatcctcctgcaggtcacacaggtcaatgaaagcaccagcagcctgctcatgctcggctacggggtcatggcggccattggtaacgtctgggggggacgactgacggatcgtaatggcgcggatcatgctgtgatggtggtattggtagggctggcggtggtactgctcgctatatggggagctgcatcgtcgatcgtactgatggcgatcatgatcggcttactgggcgctctgacctacgcggctgtccctgcgcttcaggcgcgggtgataggtatgtctcatgattatgccccacaggcgccagcggttgcggcaggtctgaacatcgccgggtttaacggtggtatagctctgggctcgattttggggggcgttgccctggatattaccggccttgtaagcactgcatgggtgggtgctggtgtcgttgttttgggtatattctggatgttgatgcagatctcgtcttccagacgtagaaacgttcagggggcttcctccgactga

SEQ ID NO: 201597 - DNA, 1134 bp, Klebsiella oxytoca
atgaataacgtaaacaggaaaaatggcctgctgctggcagggagcatcattgcattcatcctgatgggggccgggcagtcattgatggggccttcactgccagagtttcgtaccgcatttaaactctcggtggcctctgccagtatggcggtgacagcgcaatgggtcggggcgctgattggcgtcgtggcgttgtttttagccggtaaacgcgactggacacgcgtggcgttcggcctgttaatcatcggcgctggcttgatggcgctgcaactgagctggattttaacgcttatcggctcactgacattcggtgccggttacggcgccagcctggcgctggttaactcacgtctgatgcagtcgtttgaaaaagcaggaccgtcgctggtcagcctggtgaatgcgctgtttggcggcggggcgattgttgcgccgttagtttttgtcgcgctggcgcgcaaccccgagctttgctttggcatcctggccgcaggactggtgcttccctttctgctctctttcttctttccccggacacatagcgaacaaaccatctcgcaagaaactcaccgggggaaaatttccttccccacgctgtttatcggggcttccggaacggcgatagaagcctgtctgattggcctcgggccggtgatcttattgggaggagggtattccgataacgcggcggcgggtgccttatcactgttttttgtctttttcctttccggacggattacattaagtctggtcggtcagcggcttcctgcggcgccgatgctgatagccgggtttaccggaggggcgctgctgctggtctgtgccggttttaacgttgcccctaccctcacttacccgctagcggggttcttcattggcagtctcttccccaacttttttgtctttagctcttatcggatgggaaaagatgccagaaccggctcgattattgtgatggctgcgctggccggcggggttaccggtccgttgatcgttggacaactggtgacggcaatgccaccgctgatgcccttctggttgctggccgcctacagcgggttgattgcactgtgcgggctgtatgttttacgcgagtctgcgctatcaggagcatcatcggtttcagaatga

SEQ ID NO: 201598 - DNA, 1662 bp, Klebsiella oxytoca
atgttcagcacagaaggaaattccccaaatgcgcagagaaaggaaatgtgggaaaagttgcgcaccacgcttgcgccagaagttttgattattggcggcggggtaaatggtatcggtctgttaagagatttggcgctgaacaatgtgtcagcgacgctgatagacagcggagatttttgctcgggcgccagtagcgcttccagtcgcatggcgcatggcggtttacgttatctcgaaggccgtgagtttgatctggttcgtgaatcagcgcgtgaacgcaatatgttattgcatgacgccgctcacctggtgaaaccgctggaagtcgtcgtgccggtcaggcactggataaaagggctaccacggacggcattacgtttctttggcttatccggcaaatcggggccgctgagttttgtcgccctgaaaagcggcttgctggcttatgagcgctttggcgcgatacgtcgggcactcccgcatcataatgtcgccatcagacggtcgcagtttcctgccggtctgcctcgtccggtgcgttctgtcatcagttactacgacggtcagattgttggcccggaagcgctgatgtttgagatgttgagcagcgcaatacagcaggaaaacgtcgcggccatcaaccatatcagctggcgctatagcgcgcccggcaaggttgaaattaccaacacgcagtgcaacgacagcgtcgtgctgacgccaaaaattattgttaacgcagccggttccgccattgataaggttaatcaacagctgggcctggagacgcactacgtccgtggcgtgaaaggcgcgcacctggtattacgccatccggcgttgcagcagcgtatggcaggacgttcgttttatttcgatgacgggcacggtcgcatggtggtgtcattaccggtggaggaggtcattttaatcgggacaaccgaagtggaaactgaggaccccggcgatcgtcaggtttcatcccgtgaggtcgattatctgctcaatgccctgaatagcctgtttgacgatattcgcgttcagccggaacatattgtggcggtcaccagcggcatccgtcctttacaggccagcgaaggtagcgccacgcaggcggcgcgtgaccatgctctgcaacaaaaccgggcaggcgaaacgtcggtgctttcgctggtcggcgggaaatggacaaccttccgcgcgtttgccgaattggcggccaacaccgtgctgcaacagttaaagcgcccccgccagacgaccacgctgggactgcgttatccgggcgccggagaactgaatctgactgaactggctgacagctgcgggctgccgttagctcgcgtccggcaactttatacacgctatggcactctggctaaagaggtggccgacttctgcggtttgcagacagaccggccgctgacggaaagctattcacaacgcgaaataatctggttaacgcaacggcgcatggcgctatcgctggaagatatgatcctgcgccgtaccaatatcgtgatgaccgggcaactgacgaaaaccacgctggcagacattgcacgcgtgatggcgcagacgctgggttacgacgaaacctgggctgagacgcagacgacaaactgcgcggccgatccccgtattatctggaatggaagataa

SEQ ID NO: 201599 - DNA, 1485 bp, Klebsiella oxytoca
atgccaaccccctacacccccctggttctggcgattgacgctggcggtacggcagtaaaagttgcgctgttcgacgcgacaggccgtatcgttcgtcatcgcaatgctgaagtcactacgctgcactacccggatggccgggtggaacgcgatggtaatgcgttctggcaagccacacgatcgaccatccgtgaaatccttcaggacgatatcgcccaacgcgttgtcgccgttgggtgtaccggttttggcaacgggatttttttagttgatgaagccggtcagccaacccgtcctggtattgtctctgttgatcatcgcgcccagcccattgtcgaccagctgagtgcccgacatcaggctcaggctctcagtcatgaaaatgggcaccgcccgtggggaggacaaacgctatttcaactggtcggcctggcgcaaaacgaaccggaggtgatggcgaaaacccgctgggggttggcctgcaaagactttattcgcttctgcctgacgcaggaagccgtgaccgatccgtcggatgccagcggcggcggactaatgaacctggaaagacaagattactccaccgaagcgctagcgatgctggggcagccgggcctgagggataaactgccgccggtggcgaacagctcatcgccggcaggacgcatcagcgccagggcggcgcaggaaaccggcttgccagagggcattccggtggcgggcagcatgatggatgttgcggcctgcgcgctcggcgcaggcgtggtctctgacgaacatatggttttcatcgccggcacctgggcgattaacgcgctggaagtcacccgaccgattcaggatcgctacccgctgttgaatatgctgtatcgcgatggcgcggcccgtctggtggcggaaggcagtccctcttcagccgccaaccttggctggtatctgaaaaatgccatgggcgatcacctgagcgttgaagaggcgctgacgctggctgaaagttgtgccattgacagccagcgctgctacttcatgccctatatccacggccctaaacctaatcagggcagttttgtgcggcttagcgcatcggataatcacgcctcaatgattcgcgctatctgcgaaggggtcgcctttgagcatcgtcgtcatgcggaaaccttgatggaatatagcgagagaagctggcctgaaaccattcgccttaccggcggcgcagcacgttcaccattctgggcgcagatcttttcggatgccaccaactgtccgattgaggtggtagacgcgccggaaatcggtgcgctgggtgcagctatctgcgcagcggttgcaggtgggctatatagcagcctggaggaagcggcaggagagatgagccgtatttcccgctatcacgcgccggttgccgacaatgtcgcgatacttgacgagcggtaccatgagtttttgcgcctcgatcggggaatacaggcattactcgacgtttaa

SEQ ID NO: 201600 - DNA, 1014 bp, Klebsiella oxytoca
ttgagcgcattatttgatatggcgcagacgcgctttgcagcaaaaatctcgcggatacgcgagggacgttatcgcgttggcgattttatcctcgccgacgcaaaagatgtggatgtggctggcggcgttcccgcgatggggccacgccgggcggcggacggtcaacccgccggtcaccgcacgcgagcgcaatttcatcaacagattcgcgcattaattgagcagaacgttttagacattatgctgacgtccatctccactctggagatgctgattgagcagcatgcctttgacggtagccagatagcgcccgcttttcgcggcaacgaagccactgacgcctgggtaggtattcgcggcggacgctatcgcgattttgcgccgctgccttatcgcggcgcctcgctggagtttgcccgcgcgccgctgagtctctactccctgacctatgttaatgatgcgcagcatgatgtggcctcgctggaggcctatgccaggtttcgggccgacacgcgaacccacggcattacacactttctcgaagtgtttaatccgggtatcgacaccggcctcacggcggaggcgatcccggcatttatcaacgactgcattattcgcacgctggcatcactcacccgcgccgagcgtccggccttcctcaaagtggcctataacgggcctgacgcgctggaggaactggtcactcacgatcccggcatggtggtaggggtgcttggcggcgggcaagggacgcatcgtgatacctttgagcttcttgcgcagactgaacgccacggcggtcgccttgccctgtttggccgcaaaattaacgcagcagaacatcagccgacgatagtgcagtggatgcggcgcgttgtcgaccaggaggtcagcccgctggaggcggttcgcggctatcatggcgatcttcaacggcagggcctgcgggcggatcgttcacttgaaacagatagccagataacagaagatgtcctccggtcagacgcaaaataa

SEQ ID NO: 201601 - DNA, 858 bp, Klebsiella oxytoca
atgaagctttcccgccccacggtcattaactatttacgcctggcgaaagcccgtgaaattgtttctgtccgtctgagcggcgatcactttcgccttaacgatctggccgatcgcctgactcagcatttcaatctggatgaagtcaatgtgatccctggggaggggctctctgatgagagccgtcttcaggaggtctgtgaagctgccgcccatattctgttgaattttgtccagcctggcgatcagcttggcgtgagttggggatcaacgttgagccttatctccgacagcgtcccgttctggtcggtggaaaatctcactatacgtcagcttatcggcgctatgtcaaatccgctgctgccaacggcggaacgctgttcgattgagatagcccatcgcctgaatgcgcaatgcatcaacctgaatgtcccggcggtatgcagttcttcggagcttgcggctatgcttagggcggagccgattattgctgatcaactctcccagttaaaaaactgcaataaagccattttcaccgtcagccccgcaacccgcgacggccatgtcactcaattcaatattgtcaccgaacaggaggccgaacgctatattaccaacggtgccgccggtattattgctggtcgctttatcaatgcggaaggcgagccaatgaccggggatgttgatgcgcgtttgatgggaattgaattaacgcatttacgccagatgagcggattgctggtggtatccggacaagaaaagctctcggcggttatcgccacattaaaaggcgggtttgcaaatcatctggtgctggattcactgttggcagaggctatcctggcacaacaaaatgcataa

SEQ ID NO: 201602 - DNA, 402 bp, Klebsiella oxytoca
gtgacgctcaatacttctcaggtcagttattacatgactcagcgtaaaaaaggtgtaacccagcatatctcggccatgaaggccggtatctctgtccgctccggtcgccggatcgaaaaagatcagtggtcaaaagccggggctcgtcactggcggacgcgtatgctgaaagagagacctgcgctgatgccaactaccctgctggaaatgctgcaggataaatatcccggccagtaccctaacagccttcgcaggacaatgcagcgacgggtccgcgaatggaagttgcagtacggtgctgagcaggaggtcatgttccgccatcggcatcagcccaggctgcgtggcctgtcggactttaccgaactgaaagggagcgagtggcggtccgtgtctccttaa

SEQ ID NO: 201603 - DNA, 630 bp, Klebsiella oxytoca
atggggcgaattgactatcacctggaaaaatatcagttttcatgctctgacgaggcactccgcttgacccgggagtgggctgatgtgctggaagaatgtcacgggctaaaggccggggcggaggaacggctgcgtattgccctgttgaacgtcgactatgtcaccagctttgagctgcctttccgcttactgttgctccgtacaacacagctgatctccggtctgcgcgatcagctacagcttaaccagaaagatgcgattttcaacgggaagcgttttggctgcgtctggagcctgaagacagacctcggcacaataccggacgaatttcattatcgcctggtgacccgcatacggcgtgtgagcccggatggcgtttcagcagcctccttccagcagatcgcaaaagaggtgaaaacaccccgtgagcgtatcaggctggcgctggatgcggggttacaggtgacggcgctggatgcacttttttggttcggatgccagcgtatagcggcggatgtactgcgacttcgaagggccgggatggtgattgcgacctcagaaactgtcgtcttcgacacgctgacggggacagcccggcgggttccggtttaccgccgcgacggcgtgtaa

SEQ ID NO: 201604 - DNA, 627 bp, Klebsiella oxytoca
atgaaaaagacgcacaataccttaccccctgaacagacggtctctgacctggcacatctcgcctggtgcgcactgatggcgttgcgccttgcgcagcaggaggggcaggcactgtcaccgctgaccatccataccttcctggttcgctggctggctgacgtgcaaaaacaacgccgctttccccggtcagtggcgacagatattgacaacctgcttcgcctcgggcgacagaaaggtcccgaagccggattgttgagacgactggaatatctctggcagtcctgcactgagccgatgacgcagcagtcggatttgtttcggctgacgcatgcgattgagcacctgaaatcacagggctgggtcaatgccgtggtaactgatgaagaatgggttcccgacaccctgtttgccgaatatgcgaatacctctgcattgctggtcaggaaatccgaactgcagcgccattttacggaagagggtaagcagtccgcgccagtggattttatcgtggccggagaggtgcgtgttgtttgcgatgcgtttgatgtgagggagctgcgttacgcgcttggtgagcaacgcgcgggcgggtgtttgttatcgttgttgccagtagccgatgcctga

SEQ ID NO: 201605 - DNA, 264 bp, Klebsiella oxytoca
atggtgctgatgatgaatcttgatacgctggcgcccatgacacaacctgttgaaagatctctgcaggtgttcactggcattatccgtgacgcctggcgaagggtaacggacgggaagcatgaaggcgtggtggatatcacgccgcttgtcattaaccgttccgcgcaggggactttcgcattgcgattcggtcagctacaggcgagggttcagggcatgaccttgcccgtcatgacagcgagaactggcgtgatcagcacatga

SEQ ID NO: 201606 - DNA, 255 bp, Klebsiella oxytoca
atgaatagccctcactccggcgcggaagccggtaatgcggtggatgcagcacaaacccgcgcggttctgcaacaggccgttgaccactacccccgactggtagcgttcagctttacgctggtgttgccgtatcacgaaaccctggccgattatcgctcgctgattttacgctttcactctgcggtctggcagcgaacggaggaatactcacaggcgcgccagcaggaacgtaagaattcaccgccgacgttgtaa

SEQ ID NO: 201607 - DNA, 156 bp, Klebsiella oxytoca
atggtttttcgcatcagatataccgtgcaacccgcccccgttactttattcgtacccctcatactaggggtgttagccagccagacccggcatgattactgcccccagtcgtccatgatccggggggtgatgtcaccgggtctggtggggcgctga

SEQ ID NO: 201608 - DNA, 420 bp, Klebsiella oxytoca
atgcgcatgctgaaatgctatctggcgaatgaccgtgaaggtcactttgcgacagccggggaggccatgcgtgcgccgggacagatatggagctgcgcatcctgtggctgtcggctggtgttacatgccggtatgcacgaagacccgtggtttgagcatgaccagcagaccgtagcccggcatgtgctgatggcctgcgcccatcttgaccctgaggtgaaagccgaagcccggcacaacaaactgcgcagtattatcggcgggctggatgcgtctgtgatgtcgcttgcctggtactgcgtgtggtgtggcgggcattatcagggcgtgaagtcctgtccacgttgcctgaccggtatctacagcatcgaagaggccaactggcagatgaattacggctgtaacacacttcccggataa

SEQ ID NO: 201609 - DNA, 243 bp, Klebsiella oxytoca
atgaccacaccgaatacgaacaatgccggcaccaccactgccacgctgctttgcgcagacgacccgcttatagacatgacctttatcaccacctgcaccggtatgaccgacaagtggttctacaaacttatccaggaggggcaattccctaaacccatcaagctcggtcgcagcagtcgctggcgcaagagcgaagtcgaaacctggatgcagcagcgcattgcggattcccgtggtgcctga

SEQ ID NO: 201610 - DNA, 1869 bp, Klebsiella oxytoca
atgaacaggtcaaatgacctgttcattaaaaagggaaaagacatgcgtctgaagagtgtggcagtaaagaatttccgctgttatgcagatgaagtaagcgttgagctcgatgacctgacaacctttgtcggacgcaacgacattgggaaatcgacgatcctggaagcgctggagatcttcttcaataacagcgtggtatccattgagaaaggagatgcctgtattcacagtggtcaggagaatgttgagatcacctgtgagtttaccgaactgcccccttccctgacgctggactccggcgctgaaacgacactggcagaagagtttttattaagcagcaccggctcacttcaaattcgcaagatctacaactgcagtaacaaaaaacccaccgctgaggttttcgtgattgcaaaccatccggctgcagtgggttttcagaatctcctcgagcttaaggaaaaagagctccaggccagggtgaaagatctcgggctcgatgttcccctcaaagggaaccccggaatgcgaaaggccatatgggcagcatcagccgatttacagttaactgaaacgctgctggccgtcggaaaagccaaagaagacacaaagcgtatctgggagcagatcgagagctggttgccgatgtttgcactgttccagagcgacagaagcagccgggattccgacgatgaagtgcaaagtccgatgaaggccgccatcacggctgctctggccgaagtccaggacgacatcgccaggatccagttaagggtccagcaaaaggcagaggagattgcccgaaatacccatgaggcgctgaaaactattgaacccggtctggcgagagaactcacccctgaatttacgcctcccacgccggcaaaatggcaagggctgttctccgtcgggctcaatactgatggggggatcccgctgaataaacgcgggagcggcgtccgtcgtctggtgctggtcagcttttttaaagccgaagcagaacggcggcttaagtccagcaatcgccgcagtatcatctacgccattgaagaacccgaaacctcccaacatcctaactatcagcgcatattgattgagtcgtttaaatctctatcgctggaagctggttgccaggtcatactgacgacgcatagccccggctttgcctcagagctacccgttgacagcattcgctttgtttcccgggataccgctatcgggcgacccaccatccaggccggtgctgacgttttcggcatcgtcacggatacgctgggggtcacaccggataaccgggtcagactgttgttctgtgtagagggtccaacggatgttgtcgccttcaaagcgctcagtaaagcactgcatgctgaagataataccctccccgaccttgataacgacgagcgagtggcatttatcgtcctggggggtggaacgctcaagcactgggtgaatgagaattaccttcgcgcgctgaaccgaagagagatacacatttacgatcgtgacgttcctgcctatgctgaagcggtgaatgccgtcaacgcccggggtaacggctgttgggcggcacagacgctgaaacatgaagtcgaaagctatcttcatcctgatgccattcacgacgcctttggcgtgacaatcgccgtaaccgatcatcctgtcgggggtaaggcaacccctaaagtgtttgcggaagcgtattcactggctcagcattttgatggcgtgatgaaagataacgccgccaaggcccgactggcggagcgggcttttccgttgatgactgcggccctgatccatgagcgcgatccggagggtgaagtcgtcggctggatgcgtagaatacgggacatgcttcagtga

SEQ ID NO: 201611 - DNA, 405 bp, Klebsiella oxytoca
atgaaagcagacgtacagtacgagtttcatcattttggtatcccgctgcaggacggggatacttcaggcaagttcagtgccagcgcgggaatgtatacctccgataatccaggtaagtttcgggtgcagtggcatcggtttaccacagactcaccgctgcatccgttgctgaaaaccgtgccacatgtggcgtttaaggtcaacagtctggctgaagctattgcgggcgagacggttatcctggggccttatgaacctatcgatgattaccgggtggccgttattgatgacagtggcgtgccgattgagctgattgaaaccactctcagcgatgaggaactgtgggctcgtgcagcctccgggcaggggagtttgtaccggaagccagaagaagcgtcagagtga

SEQ ID NO: 201612 - DNA, 969 bp, Klebsiella oxytoca
atggttatttacgatcgcaaccacaaacaaacaccgataaagacccgcgacatccgaatctgcggtttttatcttgactggttaggcataaataaaaacatcagaacagaaggcgttaatcgtcaggatgcaggcagctgccatcaggcagtgaatcacctcctcaatcagtactatcctgataaagaacagcaagacagactcctggaagaaatgtataccgcctgcgacgagaatatcttaccggctaaccgctttgactggcttgaatgcgacgaacgggccgcattctggatgtggggttatctctgtgaagcgagtgactatcagcttggtatttctcgttcaagagatgctcctttcggtcagaactggtatcagttccttcagctaaataaatcgccgacaagtcatcaggaacgaatgcaacttatcttcaatttctttgactggataattattcctgccccaccggtgaatcacctcaagagccaggtaatggacaggctcaaagaccagtggaaaaatatttacagtaaacccgtcccgttaaaatggttgcctgatgaagaagaggcggtgctgtgggcatggaacagccttaaatcgctacaggaagaaaagaacacgcccaatggtgggttctcattcagtctgtcatcaccgggattgagcacctggtttacgccactgagtcattctgaacgctgccttgctctgcgtggtgcaattgatttatgggatgatacaccggataccagacggctatttctgctgaatctgaataaagcctggaaccagcaaaaactgcggcagtcacgtaccgataaaaaagcccttaacacctatctgaagaatgaaaccaaaatgcgactggatttactggccgcccatcacgatattcgcatcagtgatatgctcgaaaaattgattaacgcccactacctgaaaaccttttccggggaataa

SEQ ID NO: 201613 - DNA, 297 bp, Klebsiella oxytoca
atgcattgtccgaattgcggttcgcacaacatacagctgcgtcatgtgggtaaaaagacgggtggggtgattggcgcaacagccgggggactggccggtattgaaggggcctccgccggtgcgctgataggttcagtcattccggttgtcggtacgatagccggaggcctcattggttttctgtcgggggcctgcgctggcgcagtagcgggagcagtagccggcgagaggctggacgggacggtatttgatgaatactgctgcacacagtgtgagcagaccttcaatatgacgtaa

SEQ ID NO: 201614 - DNA, 726 bp, Klebsiella oxytoca
atgaaagaacaacacgatcgttatgaccgcctggccgtcaggctgtctgtcatcatcagtcggctactggcgggccatgccctggtactgaaaacactggctgatgaatttgctgtctcagaacgcacgctgcaacgggatttccagcagcgcctgctccacctgggtattgagcattccggcggggcctaccgccttgcccgacgccctctccggccccattcgccggatacatccacctttatccacaatacgggaatttcagggatcatccccatccagaacagaaagctcattcggctgctcaccagcacgtcggggatatcgccctgtcttatcgggcatggcggcttaccgtcggcagtcacacagtcagcgtcatttttactgctggcagaagccattcgcgatcaccacaccgtcacgctgcaggttaacggacgcactcatgaagccgtggcgccacaccgtctgatcttccagagcaaaaactggtttctggtcaccacccgtgccagaacactccaggtgttcaggatggaagaaattaatgccgtcacggtcctggaaaccgcctttcgcaacaagcctgagcttgatgccctgacggccagcgaagagtttatctccgcgctgcctcactttcgcttcatcagtaacgttattcattccttccggggagtgttcccggaagccacttccggacttaaaggagcccggctatga

SEQ ID NO: 201615 - DNA, 507 bp, Klebsiella oxytoca
atgaaacaccccacagccctgctgttgtttagcgtcggaatgacgctggcatcgctgccgaacgcgaatgccggtacgcccgatgcctttcgcgacgcgcattatcagcgctgcgcaaagcccgtcttttatgcacagaccctgaatcacaaaaaggaggtcgaaatctgcatcgttaccccgtcggtatcgtattcattcggtcagactggcgctgagcataaggagatggatattaccgttccggctcaggcgacgggctacgcgtaccagagcaaccaggttatcagcctgcaggaatttagcgtccgcaacggcgataccacctacgaggtctctgccggttcgaatgatgacggcaaaccttttgccgcgctcgatgtgtatcggggcaaccccgataccggaaagcatctggcaaccatttcgcttgacccggataccgtggttaacgacatcagccacggattgcaggatgaaggcatcccccaacaggatggcctttaa

SEQ ID NO: 201616 - DNA, 300 bp, Klebsiella oxytoca
atgaacatttcccttgctggcggttcactccgttcggcacgttatttttccgcgatctgcctggtgttatcgacagtggtactcagtggctgcggtgatgcgaaatccaaagccgaaagcgagtttatccggggctgtaaatccggtggcggcacaaccgccctttgcggctgcatttacgacgacctcaaaacgaaatacacgcacggggagctggagaaaatgaaccagcagtacggttatgttcccccgcgcttcatggacaacatgctgagtgccgctcagcagtgcagaaaataa

SEQ ID NO: 201617 - DNA, 933 bp, Klebsiella oxytoca
atgaaaatacgatatgcctccggcatcgcgaaatggggatggttgacacttttcttcgtcatgctggcaagcaaaggttatgccgcagctccacttaaaacagccgtccaggccatgcgctgtcagccagccggcactgaaaacggcttcaacggcacctgcccttatccgacagacctctataaatccgatcccctttacaaaaaggatatgacggcaagtctgaaagaggccgggctcgcggggctgttaggtgaaaacgccacactggccggcccggaaagtccgcttgaacccatcactatcgcaggggaaacctggctgcaggggtcagtatgcgaaaccaataactgtggcgatcattatctcaattttctgtatcaacccgcagaacatcgtgtgacgggttattatttcgatggccaggggcactgggtggggcagccaggcgctgaagccatcaaattgcttcgtggaagtgaggctgtcgcgccaaccattcagtcggtggcagcctcccctgatgccccaccacccaataccatctggacatttaccggtgagggaggcaagacgctttggcaggcctgcggcgggcaaaacagcagttgcgcaatcattgccaacacgaagtattacgtggcggtccttaaccatcaatccgcgcgagggtgtgcgttcggtgatttttatatcgtcgcccgcgacaccgctacctggcaacagtacgagaccggcacctgcagccccgatgcgtggatacgaaaaggtaccatcagtcacgggcagtacctttccgtcgacatcggcgtgaacaacacgctggtacagcagtaccccatcggctactggtcaatgaaaaaggaattctccggtaagaaccgtccttcatgggataaggctaaggccaacgctaaacaatcacagcaataa

SEQ ID NO: 201618 - DNA, 819 bp, Klebsiella oxytoca
atgaaattagccagccgctttgggcacataaaccagatacgccgcgacagaccgttaacccgtgaagaactgatgcaggtcgtgccgagcatcttcagtgaagatcgccacgagtccagaagcgaaaaatacgcttacatccccaccattaccctgctcgacaatcttcagcgtgaaggctttgaaccctttttcgcctgccagtcacgcgtacgcgaccctgaccgccgggagcacaccaaacacctgttacgtctgcgtcgggccgggcagatcaatggccagcaggtaccggagatcattttgctcaactcgcatgatggctccagctcatatcagatgctgcctgggctgttcagagccatctgcaccaacgggctcgtctgcggacagtcgttcggtgaaattcgcgtgccgcatcggggcgatgtggccgggaaagtgattgagggggcgtatgaagtgctcggcgtctttgatcgggtggaagagaaacgcgatgccatgcagtcgctgatgttaccgccaccggcacagcaggcactggcgaacgccgcactgacgtaccgctttggcgaagagcaccatcctgtcacagcaacacagatactggcgccgcgacggcatgaggaccgtcagaacgacctgtggaccgtttataaccgcattcaggaatcgttgctcaaaggtggtctgagcggacgcaccgcacagggaaaacgcacccacacccgcgcgattaacggcatagaaggtgacgttaaattaaacagggcgctctgggtgatggcggaaagtctgctggagacgctgaagtag

SEQ ID NO: 201619 - DNA, 474 bp, Klebsiella oxytoca
atgaccgacattattagccttaacgataatatcccgttactgccacagtctgctgctaacaatggcacatcggcactgaccgctacccttgtccctgacgctgaccgtcagtcattctggctacagcattttggcgacatcccgcaatggctccgaatcgagtcaccgatattcgcctggctcgacctcttgtgtgaacactactgcggagattattgggaattttacgccctcagtaacgggggcgcttttattattccgtccaccgaaggtgagtacgtactctttaacgcactgaacgggaatggtgccaccgtcggtcatgaggccgccggcatcatcgcctgcctgatgacctacagccatcatgcctgcagtacaaaatgtgacgcgatgacggaacactactaccgactgcgggattacgcccttattcaccctgagtctaacgccattatgcgcatgatcgactaa

SEQ ID NO: 201620 - DNA, 483 bp, Klebsiella oxytoca
atgatgaatataaccctatccccgtcagtgacggaactgccattacccacacaacgtaccattcagcgcgcgctggcgttgctggagaaccatctgcgtaaaccgggcgagtcattcacctcactcgatgcggttcgccactggttacgcctgcagatggccggactggagcgcgaagtgtttatggcgctttacctggataaccagcaccggttactggcccatgaaaccctgttcaccggcactatcaaccataccgaaattcatccccgggaagtgttgaaggcggcgctcagacataacagcgccgccatcatcgtggcgcactgccacccttccggtcatgcagaacccagtcacgccgaccgacagataacagagcgtcttaaaaaggtgctgggcatggtcgatatccgcctgctggaccatctggtggtgggtggaatggatatcgtctcgtttgctgatagaggctggttatag

SEQ ID NO: 201621 - DNA, 360 bp, Klebsiella oxytoca
ttgtcgaataatccccccacaacaacgcacgatatcgccgatccctggtggggtctgagacgcaatatcataccctgttttggcgctcgtctggttcaggaaggcaaccggctgcattacctgaacgaccgcgccagcatcaccggtcagttcagctacgaggatttacgccatctcgatcaggcattcccgctgctgttgaagcaactggaattaatgctcacaagtggtgaactcactccacgccatcagcacggcatcacgctctacgcaaaagggctggtatgcgaggcggacaccctcggcagttgtggctatctctatatagcgatttacccgacaccagcaacaaccgcataa

SEQ ID NO: 201622 - DNA, 390 bp, Klebsiella oxytoca
atgagaatttatcctgtctccgcaaaacgggccacagagattgagcggttaacatataagtcacccattgacgtgtggcagcgcctcctgacatatctgctggaccatcactacggcctcacgctcaacgacacgccgtttggcaacgatggcgtgattcaggagcatatcgacgctggtatatcactgtgcgacgccgtgaattttatcgtggaaaagtacgatctggtacgtaccgatcgcagtggttttaacgcagaaacacagtcgccgcttctcaccagtatcgatattctccgcgcccggaaagctaccgggttgatggcccgcaacgattacaaagtggtgaccgatatcaccaccggaaaatgccgagaggtgcaaccatga

SEQ ID NO: 201623 - DNA, 492 bp, Klebsiella oxytoca
atgaagctatccctgacggtagaaaccgataccgtcaatatactggccctcaacatgggccggatcgccgtggatattgacggcattgaactggccgaactgattgatgttgcgaacctgaacggttattcgcttcgcgttgctgatgcccccggaaagctgattgttgaagatcctctcccggccgtcacccgcgtaaacggcatccagtgcagcaccgcccatatcaccgaagccgacaacactctgttgtttaccctttcacaccagcatgaagattttggtgactgcgaatggattttgtacaccggctcgggttatctgcttcacctgggtgcgtggtcgtttccagtcttgcggctcaaacgcctgggtctgtcgaaagcctgtcgtcgcctggtggtgacgcttatccgtcgttactccgctggtattattcatctggatgcttttggtgagatattgcccggctttgctacctttgactggtaa

SEQ ID NO: 201624 - DNA, 204 bp, Klebsiella oxytoca
atgccggaattaaccacagaaactgccctcgatattttgattcactggctgcaagacaacatcgactgcgacagcggaattattttcgacaacgacgaaaacaacatcaactccacaacgctgttgccctggattgaacaggcgctcagggacgttcgcgatctccgtcatcttcagcttctacaacaggccagaactgattag

SEQ ID NO: 201625 - DNA, 849 bp, Klebsiella oxytoca
atgtcagaccttaccctcaccgaacccgaagtattcaccggccataccgacgtgatttgctctaccagtattgaacgtatcgttacgggacgtaacgccgcacttacgcagattgaagtgctcattcagcaactggacgatatctcagcgctgacccgcagcatcggcggtaaaactgccctggactgggccatgaagcaggacttccgctgcggctgctggctcatggaaaaaagagaagcggcgatgaaagccattacacgcaatctcgatcgcagtatatggcgggatttaatgaagcagtcagggatgctcagcctgatggatgcccaggcccgtgagcagtggtacagcagtctggaaaaggacgatattccggctgtcagtgaagagaatatcctgagcacctttgaacaactgcatctgaataaaggtgaggtgtttgagcgcggagttataaatgtgttcaaaagtttatcgtgggattttaagacgaattcgccctgtaggtttggcgtgaaaattatcgttagcgggctggtcaaatgtgaccggtggggatttgggcttaactggggctggcagcgtgatcggttagctgaccttgaacgcatgctgatgcttctggatggaaaacctgttcccgacaaccgtgctgacgttacccgtcgattaggagaccatatccatgagaacaggaattgcaaccggtatgaggatgagatgtttgcgatcaagtactttcagaagggaacggcgcacatcacgttcaaacgacccgagctggtcgataagctgaatgacatcatcgcccggcattatccgggggcgctgcccactaaacactga

SEQ ID NO: 201626 - DNA, 237 bp, Klebsiella oxytoca
atggtatcattttcaaaaactggtggtgctcactgcgattccgtaacgagtcagagcagcgtgccagcaaaaacagttcaaatgggcgtaaaaattcccgttcaacagtcaaattttgacgctttgcagaagggggccttaatgggggcctctgtatttatggaacacattaaaaaccatatatatcagtatatatacaaatcaaaatccattccgagtccgggcaccactatttaa

SEQ ID NO: 201627 - DNA, 390 bp, Klebsiella oxytoca
gtgtccaatgtaaagattagatcaaagttaacaagcgaaaatgaaaacaaacaaacggtcccggtcaaaatcttcaaaataactgacatcccagatgtgatggaggaaaaagattggacggtgtcagcatgtttcatgcgaaaatggttcaatgacccattttacgaaatgacatccaaagagaagctaaataaagttgatatgaatactgtggacaaacgccatgtcattgaagatttggattttgattggttgttaacttcttcgttacgaattaaaccgatttacgataatttcgtgaggcaagtttcgagtgttattgagtataatgactacttggggagaaaaaacaaatatcacagcagttgtctaatggcctttgttacataa

SEQ ID NO: 201628 - DNA, 1275 bp, Klebsiella oxytoca
gtggcaagtgcaaacaaactcacgctgttcatcgtcatcttcatgctgctggggatcctctccggcgcggccatccacgcttacgccgggcaaacgaccattaccgcatggtcggaaaacattacgctgctaaccgatgtgttcctgcgcctgattaaaatggtgatagcgccattagtcttcagtaccctgacggtcggcattatgcgccttggcgaaacggcgactattggccgggtcggcggtaaagccatggtgtggtttattacctcgtcaattctctccattctggtcgggctggtgatcgttaccctcgagcatcccggcgccggcctgaacctggcgatcccgaaagaatccgtggataccgggctggcggtgagcgggatgagcctgaaaggctttctgacccataccatcccgaccagcattaccgaagcgatggccagcaacgagattctgcaaatcgtggtgttctcgatgttcttcggtattgccggggcgtcgctgggggagaaattcaatgctccgctggtggcggcgctcaacgtggtttcccacattatgctgaaggtgaccgggtacgtgatgtacgtcgcgccgctggcgattttcgccgctatctcttcggttatcgcctcgcaggggctggggatcctgcttaactacgcctcgtttatcggcggatactatgtcgcgatcctgctgaccagcgcggtgctgctggcggtggggtatatggtgctcaaaaaagaggtttttcgcctgctgaatatgctgaaagacccggtgctggtggcgttcaccaccagcagttccgaagcggcctatccgaagaccctggagcgcctggtggaatttggctgttcgcgaaatatcgcgtcgtttgtgctgcccatcggctactcctttaacctggtcggctcaatggtgtactgctcttttgccgccatgttcatcgctcaggcctataatgttcagctgagctttagtgaaattaccgtgatgatgctgacgctgatgctggcctcgaaagggattgccggggtaccgcgttcggcgctggtggtgctggccgcgaccatcccgagcttcaatattccggtggcgggtattttgctgctgatgggcattgaccatttcctcgatatggggcgctcagcgattaacgtgctgggtaacgggattgcgacggcgatgctgtcaaaaaatgaaggtcaactgcaggaagaggccccggaggctgaagccgcgcctcagcaggccgaagcctga

SEQ ID NO: 201629 - DNA, 411 bp, Klebsiella oxytoca
atggatgacgcgacgcgggcagcatttagccaaatttttgccgattatcagctattgccaccgttccgccagctaacgcgccagacggtgcagctgctggcggaagaaaccgcccgcagcgagcttacgcgctggcagggaaaatcaacaacctgcgggcaattattgggcatccgcagtcgcggctggtggcagggcgctgaaaaccgtttctgctacgatgtcgggcggcatcgactgattctggaaatcacgccagggttcgtgcactacaacatggatgcgaaggctcctcagcggtttgccgccatcagactctatgatggcgaacggcccgctgcgttctcacagctcgatccacaggatctcagcgaggcgctaagcacgattgaggtcattttccgtggataa

SEQ ID NO: 201630 - DNA, 768 bp, Klebsiella oxytoca
atggataaagctgaaattctggagaaaggctgttgggttgaaatcaatattgaagaatttgcgcaaaaggtaaaaggaatttcacgagacaggtacccttcattacgttgtatcgcttgtggtgagcaagttcatgatagtggtttagtcactcccaatcctgactatagccctagattttctcattcagcaccgcccgaaaacggagagttttgccctctggggtctagatctaaacgtttcacaggtctttctggaaatgacaagacagcatcaacagagatcgctgcatctcgccgaaatcgattcatgcaatttgataacctttgtcgggcatggatagtttgtaggtctctacgtggaggcgaaggaaaacttgatcaaaagtccttcattcgtttggtcaggatcgctgatagttttggaatctggcactatagctatatgccagactggggaatcccacttcttctgatgttgatggacaatcatccgacgccaaacggtaaatcagcttttttctattcgcttaaaaagaatagacttcgtaaaggtgtggaatggcaaaacctgaatgtccgactagaagcacattgggtaagcacaggtgatccgatagtacctgccgaaggtaaaaaagcgtcttttttactcacgattccttttagtgaagccattgttgatgacatcttgagcaaagaaagtctctcatggtgtaatgaaaatacgcttaaaactcttcacgcttttagtcttgaagagttttaa

SEQ ID NO: 201631 - DNA, 336 bp, Klebsiella oxytoca
atgaaaatggataaagaaaccgacacagtacagtggggactcaaccgacctggttctcctcaatttagcgcaaggttggtacaggaaggcaatcgcctgcattatttagctgaccgggccggggtaactggtactttcaatgaggaagagtgccatcaactgaatgccgcatttccgaactttatagagcagatggaactgctgctgctctctggtgagcttaacccccgccatgcacatcgcgtaacgctgtaccacaacgaactgacctgtgaagcggatacgctcggtagctgtggctacgtttatatcgctatctatcccactcaacgttaa

SEQ ID NO: 201632 - DNA, 480 bp, Klebsiella oxytoca
atgaaaactacgttaccccctcccgtggctgaaatgtcaccttacgcgcaacgtaccatcaggcgcgccctgaatattatccgtgaacatctgaacgaacccggagaagcgtttacctccagttgctcactacgggactggctacgcctgcacctggccctactggagcgtgaagagttctcgcttctctggctggataaccagaaccgcctgattactcacgaaacactttttaaaggaaccatcaacagcaccgaaattcattcccgcgaagtcgtgaagtccggccttaaacataacgctgccgctgcaatactggcgcataaccatccctcgggccatgcagaacccagcaaagcagatcggcaaatcactgagcatctgaaaacagccctcaacctcgtcgatattcgtctgctggaccatctggttatcggtgggatggatatcgtctcatttgctgaacggggttggttataa

SEQ ID NO: 201633 - DNA, 225 bp, Klebsiella oxytoca
atgaaattagccaatcattctgccatgcatcaaccggactcaacacaactgaatgccctgtggcaagtattgcaaaacgctgacgttatagaagcagaaggagaatcaatgataggtaagccattccgacacttttctgcgggtaccgctgtcctcgatatctggctgtggtttgaatccgtagacgacacgttctccgtagctacaaagctatataacacctaa

SEQ ID NO: 201634 - DNA, 951 bp, Klebsiella oxytoca
atggctagtaagaattcaataacaacacatatcagtgatgatttagtctatagtgtaatagaaagagaaatagcgaaaacaaagaaaaatcgctcggagtttttacgtgaaatactggaaaaagaatttgctgcacaaattgaagagcaaaaaatacatttaaataatatgtattcctataccagatattccgatgcttcgagcgtgtatccacttaatgtgacgattgattcagaacgacaagttacgagtgatggttttactcgattcaataaaattgatgaggttctatatcatgaatatgaatctcatttttttggtatgatgagttttagcctgaagcaaatgataaactcgataaaaaacgaagttcaagggttgattgctggagtgttcaaagctcagtggtttaatatcgagtctcagtatgatagtgcggatataaatcttgtttttataaacagggttgatgtaagtctttccagccataacgatgggaagttttatgtgagaatgaaaattcactttcacgtttcaagatttctttttagtgctgttgataacgataaggatttcctgcgcattgacttccttaatataaaataccttcgctttaaagatgttgcaatcaatggatgcttatctaagcagtatgaacgttatctgtatttaaaacctaccaaagaagtattacttggtggtttttttgctggtcttttgtatagacctaaagaaaagcaggatttgatggcagaaatttgtgacctgctttccgaacagaattcctctaaaaacggtatgctggaactaccggataagtttgtgaaaatacatatcaatagtgaacagattaaagtagatcggcgctctttccgaaaaggatttcagatgtttgaagaaagaagaaaaatacttcatgcagaaaaaaataagccatcgtggttaaagtga

SEQ ID NO: 201635 - DNA, 666 bp, Klebsiella oxytoca
atgaacaagactatcctgaacaaagctctccagagcaaggttgtccagagttatggaccactttacccaatctacgtgaagggtatttacgaaaccatcaatcaagccctgaatacgtatccccgtttactggttgtacgttttgacctcagactaccggatgaagacttgcgagattgcctgacgaactataatcccgatgctggagccatcacccgttttatcgcttccctggaagccaggatagaagccagtctcaaacgcaggaaaaaagctggtaagcgaacctttccgtgtgaggtcaggtatgcgtgggcaagggagttcaatgctgaaggaaaaaagcactatcatgttttacttatgattaacagggatgcgtatctcggttttgggggctatggaagaaacctgagtgtaggtgaacaatcagagggattagctgtaatggtttataaagcctggattagcgctatagggctggaaggtatgaaatacaaaagactggtgttcttccctcccagtagctgctaccacctcttcaaagatagctaccgttacgaaggggaatatatcaggctaatgcagagagcactttatctcgcaaaaaagcgcagtaaaagcaacgaagatggttatcgtaattttggccgttctgtaaggtga

SEQ ID NO: 201636 - DNA, 513 bp, Klebsiella oxytoca
atgcataaatccatcttgcaggatgtaaagctttacatggccttcgacagtgaagaccattacgtcatggtgaacaaagcctccggtaacggtcagtggtactgtaccgactgccattgccctttgaagctgtgtaacgatacaactggagaagaagtctggtttgaacatgctcccgataatgagacaacgaaagcacaggcgatgggatgcggacatctgttagctgcaatcagaaaacgggttttcatgatgcgcttacgcacgatgattaacgagctggatacgctggtagcaacgagatactggttttgtgtgtggtgccagtcgcactaccaaggggaaaaacactgtaaaacctgcaatacggggatatacagtatcagcaggggggattgggcttggagttataatcaaaagagaaatttaacggatatcaacgacaccgttagctatattagctcagatttacgcaacactttagtgggactggaccagacagttctgacttaa

SEQ ID NO: 201637 - DNA, 1086 bp, Klebsiella oxytoca
atggaaagtaatattttaggtcatgctcaaagagaaacttcaggagcaaccacattcgggaaatatgattttcaatatcattgggctttatgtaaaataattgaaaagcataagtctaattctgactatgcactattaattgaatatcatgaggatgttgtcatcgcagactcattatatggaagttctgcaagatttgaattcttccaagtaaagaacactggaaatccctttacttctgactccttaactaaaagagaacaaggtgctaaggggcctaagagttccattctaggtaagctattatgctcatgcataggcactagttatgaatcacgcattacagaaataggtcttgtatcttcaggtggtttctcatttgatcaaaaagataataagttaaagttagacgttataacttctggtgaccttagcatagattgtctatcgggattaacagggaaattaaaagctgagcttgggatagatatcttgccagaaaacctaaagttcattgttcctaaaataaaattagaaaatcaagaagaatttgttattggaaaatttgctgaactagtaaatgaaattttcccaaatagtcattgtaatgccgttaacatttatagagcaatcatcgatgaaattcatcgcaaaggacagaatacttacgactttactgtttgggagaaaatggtagaagacaagtctctcacgtctcataaggtaaaggatgtaatagctatcaatacaacaaacccaaaattcgaagattttgagaaagactttgaatatttggctaaaaacgatatgagatggaatacattaacttatagaaagtttaataaaaaaataaaacaacttttcttacgccgagttggacacgtttcagcttttgatatgaatataatgagaatagttcggcaggcgctcaatagcgtttcggaagaaaactatacagaaaccagagattacattgattcagttattatgaaagctaaagaactgaatattgaaagtcaaattccagaatatgacgatatactttgcgagataatttattgttttttaaaggtgatgcatgaataa

SEQ ID NO: 201638 - DNA, 1734 bp, Klebsiella oxytoca
atgagaagcttgagatttcagcgattggttctgatatcagattcgaaaagacttgcgaatcagttcacgtttccgaagagattgaatctaattaccggaaaagataatagtattggcaagtctacactagccaagagcttattgtggtctctaggatgtgatccttctatcgatgacgattggagatctaatgatattaaatcgatcctatatttcactataaataataagaaatatttctcttgccgaggaagtcactcaataattttgggaactatcggcggcgaagcgaaaagatatacgcatataacaggtgacttttcaaaagatctatcagatcttgttaactttaagatgaagcttcctaatcgtagtgatggaagcttagaaacacctccgccagcatattattttttaccattctatattgatcagataaaaagctggagttcaccttggaattcatttgaaaatttagggcaatatgccaaatggaaaaatccgttaatcaaatactttactggttatcttaaaccagagcattttgagattgaagaaaacatttatgaattcaatgagaacaaaaaggagtcaggagtaaaaatagagaaatttcaaagcgcagttgaagttatagtagataactccgctgattcttccatagccttagataatgaggagttcagtaagattcaagaagagataaataccgaacttctccaattgatcgactaccaaacaaggttgtatgatgctcaggctacgctcacttcaaatatttatgatctcgaaaaacagtatgagttagccattagttctgcaaacgaactcgaagaagattataaatttgcagtagagtccatacctacggataatttagagtgtccattgtgtggtactcttcatgataactcattacctaacagagcactgcttctttcagaaaagaattctctgcttgatgaggcaaattcaatagcatctaaaataatgcaacttaaattatctttagctgaattaaatgagaatgctcagtttgccacgaatgaaattgatagaataaataagaagtacatcaccaatggcggtgtaaatcaagaagatatcattgctcaagtgatagataatatatccactgaaaatgtctcacgaagcattcaagttaaaattgatcatgaagaactaaaaatcagcaaggccaacaattctattacagaattaaaaaaagaacagaaaaaaattctttcaaccaaagagaaggaagaattgaactcgtcatttattttaaaattgttgggaaatattgaagcactaggttccacaggaataaaccttagcaaagttaaatcacctactgattacaaacggttgcttggtggtggtgctgctgaggctgccaggggattacttgcttatcaactctctgtactgcaacaaatacatgatgtaaaaacttgcatagtgcctcccttcgtcattgatacacctaaccagcaagagcaggcgggacatcgttatgaaacaataattaaagaactaatgtgcagtgtccctcaagattatcaaataatattgtgtgctatggagaatgatgcattaaatgatttcaaacacgatgctaatgttattgaactgaattctaataggcttttagatgcttctcaatatgattctttgagagcagaatataaatccatccaaatgacagttacaggacaatatggagaggaatag

SEQ ID NO: 201639 - DNA, 1167 bp, Klebsiella oxytoca
atgaaatttaactttgtagtaaataatttatttaagaaatgttttatagtatctgttcctcttatctcacttattattacagggtgtgatgataatattaacagtgtaaaatcgacagtctatagttctttaaattcaacgttaaatattggtgatgcctttaaaagccggagtgattgtattgatgggaaatgggaggaaaagaaagataatcgtgaacgtattattgtcagctatgaatgttctttacctgagaaatatattgagttttataataaaaaacaaataaaagaaatatctgattcttatatggcagatgaacagatagctaattcccaaatagagtctactcagagccaattggctaattaccaaaacataaaaaaatcccttaatagcaacaaaaaggacattgctgaagttataaaaaaaagcgttaggtataaaaatacatatagtaaccaatctggtggtgatccaggagaacttatagaagcaatgcaatatggaaaagaacgtgatatcaaaaaggctgaattttgtgaatttatatcagaaaaatattttaaggatacggaggaattaaatagcgagcgttgtaatttacttttcaatattcatagttcttatgttggagttgtagaaaaatctaatatgaatgatgaaaacaggtataaatatattgattaccctataatgaaatcattaccaacatgggcagataacgattttagttcaaaagctagcgttgaaaaatattataagcagaatgaaaagattcttgacgatatggaaagaggcatcctaaacgcaactaagaaaataaaaatatacaacgacattaaagagaatataaaatcctatcgtaaaaagctggaagataatatcagtctgactaagacgatatctacaacacagtggtacgtaaccaaaacaggtggggttgaacttattgatagctacttgacttttcatcttgctgataatgaatataaatatacgttccagaatcccttgattgcaatagaagttgctttacatgattttagcgatgatcaaatcccatctgtttatatttccagtatggagagttatttcagtaatctaaaaagatctttgaaattcgacgttaggggagaatgccgcaatcagattatgccttgttga

SEQ ID NO: 201640 - DNA, 1212 bp, Klebsiella oxytoca
atgaagcttaatgcaagacaggtagatggcgctaagcccagagagaaagcctacaagctggccgatggtgctggcctgtatcttgaggttgtccccagcggcgcacgttactggcgtttaaaatatcgcttcaatggaaaagagaagcgactagcatttggcgtttacccgacagtatcccttgcacaggcgcgagcattgcgtgatgaagctaagaaaaagttggctgacgggatagatccctctgttgcgaagaaagaagaaaaacttgttcgggatatgcagattaacaatacattccagtctgtcgctctggagtggcatagttcgaaagcgagccgatggtcagtaggttacgcatccgacattcttgaagcgtttaacaaagatgttttcccttacatcggtcaaaaacctatcgctgatattaagcccctcgaactgctaaatgtgctgcggcgcatggaagatcgtggtgcgacagaaaaggccaaaaaagttcgtcagcgttgtggtgaagtttttcgctatgcaatagtgacgggccgggctgaatataatccggcaccagacctcacatgtgccatgcgagggcatgaatcgactcactaccctttcctttcagttgatgaacttcccgatttcttcaatgcactgtctggttacacaggtagcccgctggtcgttctggccgcgagattgttgattattacaggtgttcgtaccggagagttaagagctgcactctggagcgaatttaaccttgataaggctatttgggagatccctgcacaacggatgaagatgaggcgaccacatatcgttccactttccattcaggcgattgcgatactcaaaactcttcaagttatgaccgggaattatcctttagtatttcctggccgtaacgatccaaataagtgcatgagtgaagccagcatcaatcaggtatttaagcgtattggctacactggaagagtaacaggccatggttttcgtcacacgatgagtaccatcctgcatgagcaaggttttaactcagcatggattgaaacacagcttgctcatatcgataaaaacgcgattcgcggaacgtataaccacgcgcagtatctggatggtcgcaaggagatgatgcagtggtatgcggattacattgacgctttggcaaaaggaaccgttatacagggaacatttggtaagacagcttag

SEQ ID NO: 201641 - DNA, 1455 bp, Klebsiella oxytoca
atgagtacggataaaataaataaaaagacaattttcccaaagaaaaacataggtgttactgaaactgaaaggaaattatcggcgatttgtgataaaacttttctaaagctctggtcttggaccagtttgtataacgacgaaggtatcaagaaaaatggaaaagggaaggaaatctgcgatcttctggtttattacagcaatacagttattattttttcggataaggaaattatatacactgaaaatagcgaaaaaaatactcctgaagaagatggaacttctgtagcttggaaacgttggaaaagaagagcagttgagagttcagtaaagcagattgaaggtgcagaaaattggattcgcacacattatgacagaatttattttactgaacgatgtttatcgagtgaaaaatttccgtttataaatagcgagaatatcaatcaactaaagatttatcgtgtggctatcgctaacggttgccaatatccgctttatctggggaatggtgttcatgatggtattataactaactgtagagatcgtcatggtaactatatacacgtttttgatagttcaacgattgaggccctaacccaggatctaagtaccgtaaatgaattcgtaagatatctggaggaaaaagaacgtgtagcacgggaaggcttttttaccaactatgataaattgatagaacttgatttgttagcgacatatatcctgagcccatccgcgaccagagatccaggtttatattttaaggaagaggggtttaagattgaaagttttaatgagcttaacagcgctaatgattactttgtcggaaaacaggaggaccaattttcaattatttttgatgattttattgagtgtgtttctgatcagtttataaaaggggaagttatttgtacaggtttaactaagtttgaagcaaaccaaaaagtgttagaggttctatgtgattttgatcggttgactcgtagagaactttccaaaggtattattgctaagttcaaagaaaccttagggcgagctattagtagtcgttctattctattgggaggtaatgacctatcatatacccgtaattccatttttgctgtggttattttcccaaaggcagtttgtaagaaaatgaataaagtggagtatgagaaggaaaggcgtttggttgcagaggcttacgcaatttattatcagcaaaagatatctatggacagagaaattgtggtggctgcgtttgataatatttcagaatctccagtgatgtgggatacaaattatagaagctttatggctagagtgtataaaaaagacttcgcgctggtttatcgagagaagaaaaattttaccaaacaagaaattaacttgtttcatgaaatacaagacaggtgggggatattaaaatcatccccaataaatagtttccgaggtcgggcttatcagtttcatgattaa

SEQ ID NO: 201642 - DNA, 540 bp, Klebsiella oxytoca
atgaaaaccaatgtgaaaacgttagctaaaatcctggccttatctgcaggatgctctctggttgcaatgtctcatgcggataacaccatcactttcaccggaaccgttgccgatacgacttgcaccgcttctattgataatggcgtctcgtctatcgaattggggactacctcggtagcggatttaaaagctaacacctatagcgcagcgaaaagcttctctttcactttgactggttgccctgcagctgcagaaggtggcgcgagcaaagccagaataacctttggtggtgaatcagacacgtacaatagtgattacttcaaaaaccaggctaccggtacgcctgcgactaatgttgctattgctatttttgataacgctgggctggtgcagaagaacaataccgaaggttctgatgtggatatttcctctggcgaagccactattccatatacggtgaaaatggctaaggctggcaccgctgatccgactaaaggtccggtaaagacgactgttacttataacgtcacctattattga

SEQ ID NO: 201643 - DNA, 2754 bp, Klebsiella oxytoca
atgcagcagaaaggttcgaaatggtggaagtttgatttccatacgcatacccccgcgtcaatggactacggtaaagctgaccaccaaataaagcacacgatgactcctaggcagtggcttttagactatatagctcaaggtatcgagtgtattgctgtaacggatcacaataccggatcatggatcgatactttaaagtctgaagctgaaatactaagaagcgaaggtcactccatttatatatttcctggcatagaaatcacatctcatgggaatatacatatcttaggaatattcgatctagacagaacatcaagttatatatcgcagataattggtgctaccaattactcaggaacggaaggagatagtgatgaagtaacccaaagcagcccacaggaagttattgatattattatagaccgtggtggagttgctattccagcacatatcgacaagcctagcgggctatgtagggtgcatccatcaggcgctaccttaaagcaaatattaacaaaagcatcagccgttgaaataattaaaacacatgctgaatatgaagctatccaaccaaactcaagcccattaagtgggtttgtttctctcaatacaggtctccctgaagtacttggttctgactcccatcatccaaacacagttggtagagcattcacgtggataaaaatggggacgccatctatagaaggcctaaaattagccttatttgatggtggcgactcattaaaacgatctgatcaattcccagattcacctaatatttttgctgaaaatagaatcacctcaataaaagttaataaaaccaaatattgcggaagaagcaaagaatttcaaatagaatttcatccatggctaaactgtatcattggtggtagaggaagtggcaaatcaaccatcttagagtttatcagaacagcattggggagagaaaatgagcttgagcgactctcatctaatagagaaatgtataactcgtatattaatcttacgaaaaagcccaagaacagagaagatgatggcgtcttcctggacgatagcagcattcaaattgaatatctgaaaggagaaaacagatacatattagattggaaatatcctgtatcaaaagtactcataaatagaatagacggaaataacatcatctcagaagaaggagaggtgacatctagatttcctgttaaaatattcagtcaaaagcaaatatacgaaatatcacgttctccaaactatcttttaaacattatcgatgaatctcacattgttaatataaatgattggaaatataaatgggacattgaatgcaatacgctttcgcaattaagaaaagatgttaaagatctcagaaccaatatattaactaaaacaaatttaactggacagttaaatgatgttaatcaaaaaatagcctctattgaaagatccagccatgcatctattttagcaatatatcaaaaaacattaaaccaagtaaatgcgttcaaccatttcgcttcaaaaaatatagcattcctcgaagatttattagagcacattcaattaacaaaacctgaatcgtttattactgacgacgagctctttaacacccaaaatgaaatagaagctaaaaataaaatcaccgttctccagcagaaaattgacagctctattacagagttcaatggaagtattgatgcaacaataatagaaatcagagaattaattcaatggtttgattcatcatctctgaaacaagatatatcaaaccaccaaactcaatatactaacttaatatccaccttacaagccaatggtgtaaataaccccaatgaatatgaagcacttatcaactcaagaaagcaaattaaggaaaggctagataaaatagaaatcgatgaaaaaacgattaaaacaaaaaaaacctcaataactgaaagctacaataaattagtggaattacgaaaggagctcacctctcggaggagacaattcttagttgacataaataatgataacactaactttaaagtcagcgttgatttttgcggtgataaacaattcttagaaagcagtttcagaaacgctattgataaaaaagactccactttcagcaacgaaatttacaatgaagatggcaatgggttcttgaatgtctttaacgcacagataaaagaaatctctgaggacatggatgcaataaaccaaaaaattcgagttctaaagaatgaatttcttaacaaggaatcaaatactatacttgatgttagattaagcaagaggttttccgattttaaaaatgatctaactgatgaagtaataacctctcttatttgctggttcccaagtgatgctattactgtcaaatataatgatggtagaaggtttaaagatttgtcacaaggctctgcaggacaaaaagcagcgactgttctagcatttttgctttcttatggtgatgatccaataatacttgatcaacctgaagatgacttagataatcaattggtttatgagctcattgttaagaaaattaaggaaagtaaaaataaaaggcaaataataatcgtcactcacaatccaaatattgttgtaaatggtgactctgaattagttatttccctaagtcagcaatcaggaacaacagatttcctttccttaggcggtctccaggaacgtgaagtgagacaaactatttgtgatattatggagggaggtaaagacgcatttagtcagcgttacagaagaattgtcactgcctaa

SEQ ID NO: 201644 - DNA, 963 bp, Klebsiella oxytoca
atgacttactctgtttcgccgtcatcactactcaccgagtacggcaacgacaacatatgccgtgttctcgcacttgatggtggcggtgcaaagggcttttatacgctgggtgtcctcaaggaaattgaggctatgcttgggtgcccattatataagaggtttgatcttgtatttggtactagcaccggtgcgattattgccgcgctcatcgctctaggatacgaagtagatcaaatacacgcactgtacaccgaacatgtaccacgagttatgtccagccggtcggctgcggcaagaacaatggcgctccaggatttggctaaggaagtttttcaagacaagacattcgaagatgttctgatgggtattggcatcgtcgcaactcgatggatgaccgaaagaccaatgatcttcaaaggtaatgttgtgcaggcccatggtcgcaagggaaccttcagtccaggattcggggtcagcatcgctgatgcagtgcaagcgtcttgctcggcttatccgttcttcgaaaggaaagtgattgttaccgcagcaggagataaggttgagttgatcgatggaggttactgcgcaaacaaccccaccttgtttgcaatcgccgacgccactgtcgctctgaaaaaagatcacaaggatatccgggttataaatgtcggtgttggtatctatccagaacctaaaccaggtctccttatgcggattgctaagaaatggctcgcagtccagctgcttcaaaaaactctagagatcaatacacaatcgatggatcaactacgcgacattctattcaaagatattccgacgattcggatcagcgacacattcgaacggcctgagatggcgacagatttacttgagtacaatttagataaactgaatacccttcgacagcgtggtagggagtcttttggagctcgtgaggcacaattaagagagtttctgatatga

SEQ ID NO: 201645 - DNA, 894 bp, Klebsiella oxytoca; identical to SEQ ID NO: 98276

SEQ ID NO: 201646 - DNA, 1746 bp, Klebsiella oxytoca
gtggcaggtagcatcattaacctttttatgtggggatatcaggacagctacagaattcacatccagattctggcacgtaatgtactgaaaaaattgggtgcaccggctgatgcagaagtgctacttgttggtgctcgccgccctggcagtaaaaatgcgaatccgatatgcgtagagccagaagatggtaagtggcatctatctttgtttgaaggattgctggattcagttgaatcgatttacaagaatcatcggttacagagtatgatttttggtgatgggccaagcatgcgcgacaagccagagtggatacgtcgcgactcagtgcgaacatcggttagtaaggcacttgatgcttttgataccgagcataacgtaacgtcattttgcggagagtctaggcgaatagacgactattatgtcaccccagtcatacagattccaaacgacactttcgagaaattccctcctttgctctccaattctgttgacgaaagccaacaaggacatggatttcgtagtctgatacatgcagcgatgtatgcggttcttcgtgaggctaccgaggaattgcataaccctgatccaggaagatttatccatggcagtatgagagatgccgaggaaataatacggattgctgcaaaggactttctgcacaccgcaggcctctcgatcgaacgaagatacattcatactgatcttttcgatgctttgaaccttgtctcctctcttatgtacgagggggcgaaaggcataggtcagctcattctcgtcgatccagataacgaggcggttgagttcctggcgaagtttgttgagccagttccctttcgtgagccacgatgggttcggaaagtcttgcagatggcggcatcaggtgtcggcattatcgcaaatagtcagtacatctatggacttgggagactgaaggagtcgcacgatcccagtgcacaagatgcgttcacggtagattttatagatcattatcactggcagttgtactgcggtaaccaagcactgcttctcagtcaatatgctgtgcccaaacttccacaggagccttttgacaaagctgccttcctggcaaattacgcgagactatttccgttgtcttcacaagatagtggattgcacttgtggaaccttctgatgacccaaaccagtcaggggcatgggagcatgattgtcgttgcggaagatgcggcctgcgaggcgaatcgactttgcaagcaaggtactagaatcgtgccaactaagctcactgaatcactccttcgaagtgtcagcggtattgatggcacaatactgcttgatcctgctggtctttgccatgctatcgggattattctcgacggtgaagcgaccgatgagtgtacgccatcaaggggatctcggtataattccggagtgcgttacgtgcaaacgagcggcactcgaaggcttgcgatcgtcgtgtcggatgatcgaacagtcgatatcattcctcaaatcaagcgactgtgcagtcgttcaaaaatagaacaatgtgtcgtaacactggaggcggcaacgctcgacaactatcatgattctcggaattggttaaacgaccatcgcttctatatcaacgctgagcaatgcgctcgaattaatgccgtactcgacaaactagatgccgttccaaaagaagtaggtcttatctattttgaaactgagagatttgaagttgacccagagatggacgaaagctatctcatagactga

SEQ ID NO: 201647 - DNA, 1086 bp, Klebsiella oxytoca
atggggttttcaatgtctgaattgcatgtagtcaatgaccatggagtacggctactctgcctaaatggtggtggggccagagggatgtttacaatcagtgtgcttgctgagattgagaggatacttgcctctaggcaccctgaccaagaaatcagaattggcgattactttgacctcatcgcagggacatcgataggtgggatcttggctctcggccttgctaaaggcaagagtgctcgcgagttggaatgtgttttcttagataaagcgaatgatatttttccaccaagatggtggctattcaatctccttaaatcacttgtttctcccatttatagtagtaaaccacttcgacaaacaattgaaacgatgatcggtggtgagactacctttaatgacctggcccggagagtaatggtcccggcagtcaatctttcaacaggaaaacctcagttcttcaagacaccacataacccagattttacccgcgacggtgcacttaaattgattgatgccgcactcgcaacctccgctgcaccgacgttctttgcaccacaccattgtgaagaccttggttcttattttgctgatggaggtctggtcgccaacaaccccagttatatcggatttttggaagttttcagggacatgaagtctgattttcctgatgttgctcataaagacatacacatacttaatatcggtactaccggggaagagtattcacttagcccaaggctgctgagcaaaaaatggtggaatggctactgccgactttggggcgtaggtaaaaaactggtccttacaaccatgacggctaaccaacatctccataaaaatatgctcctgcgcgagcttacgctccatggtgcctccgataactacaccagtctggatgaagtgatccctaatgaagcagccagcgacatcactctggataatgccacgaaaagttccattgaaaacctgcgcgcaaggggaagacaactcgctactgtgcagttcgctcagaaccagaagcttaagagctttttcactacacctgcaaaaccctttaagcgcgcaatcgcgcaggagaaactctga

SEQ ID NO: 201648 - DNA, 1299 bp, Klebsiella oxytoca; identical to SEQ ID NO: 98273

SEQ ID NO: 201649 - DNA, 1770 bp, Klebsiella oxytoca
atgaaggacgggcagctccatcaagtgatgacgggatgcgggtatcgctatacgcgtgcccgcaatcttcctgaaaaatcgattctgcacagcagggagcgaggtgcaggatattacacgaaagaatacgcgactgatgccggtaattttaatgttgcattggtgattcatcccgaccctttcacagaactgccgacagcattcattattgagcaacctgaacagttcaaaagttgccttatgccccatgtcgccctggaagggttcctttgctatgttgagcagatggaagcagactgggattccaacgatctggaagcgacatataaagaagttgatgcacagatacaccagaccctcattaattcggtatccgctgctacgcaaggggtaaatgataagagagaactggaaggggagtttgctgcatactggcgtcccagcgagacactctttcttctgtcaaacgcaagtcgggggaccacacttaaaacctctttggcaaaattacttaagtctgatggaactaccagacaggagtacataacggttgaggaatcatccccggaggactcggaagccgttatgaccaagtggctcaaacaaaggtatttccccagaacttcgttaaaagaaatacccatcagcacgcattacatttctgtaaatcccagccgtctagccgggatgaaatggccaccggcttcattccgggacttactggaatggcttgaaaaatcagaccacaatgccagagatagagtcattgaaaacatcaaagccgaagggaagaaaaggtacatttttctctttgatgttttaaaccaggacatcttagctatctatgttgagttcaatgcgcagtctgttgatttcagaaggtaccggaagtcagccaaaaactcaacggtcaagcttgcggcgatgttgggtggcaaaagtgtttgcacggaatatcaaaggctgggtgtcattcgtgctgacattgcgacgctccttagccggaatacacgacggaagggggcagtaagtctttcaacaaagcgtatagcgttgataggttgtggaacaattggagggtatctggccgaattattactacgcaacggagccggatgtggtaagggttatctgcatctttatgatgatgatatctacaaacccagtaattttggccgtcataccctatcgtcacatgatttcgggtggcctaaatccctttcacttgcggcaaagctacaggagtctgtgcatttacagacaaaggttgtaggatttatggaacaattccgtatcagcgcagatgaaatgcagaagtacgacatcattattgatgcgacaggacgcccacctgtgtcaaaacgcatcgctgcggtggttagacagattccactggagcaaagaccatatattattcacgcgttcaatgatggcaacggccgggcatcaaaagtctttattgatgatggccgaagctgttacgggtgtatggtttctaaccctgcaaaataccataaaggaaccgattcaaggtttaatgatcttgatatatcaagcgaaaaaaataaaagttgtggcagcacttacaccctttatgatgcagcagttagtagcataacgtcatctctggcccagatggccgtgttaagtactctagaaccagagttaaagtggacttacaatgaacatatccttgagggggggcgttcgctcagacctcaatttttgccacatcagccgaattgccctgtgtgtaatgaacataaatga

SEQ ID NO: 201650 - DNA, 186 bp, Klebsiella oxytoca; identical to SEQ ID NO: 98271

SEQ ID NO: 201651 - DNA, 360 bp, Klebsiella oxytoca; identical to SEQ ID NO: 98270

SEQ ID NO: 201652 - DNA, 1722 bp, Klebsiella oxytoca
atggcagtggaaaaactgattgtcgaccatatcgacacctggaccacggcgctgcaaacccgctccacggcggggcgcggcagctcgggtaagatcgacctgtacggcattaagaagctgcgcgagctgattctggagctggcggtgcgcggcaagctggtgccgcaggatccgaacgacgaaccggcgtcggagctgctgaaacgcattgcggcggaaaaggccgagttggtgaagctggggaaaattaagaagcccaagccgctgccggagattagtgagggggagaaaccgtttgagcttcctgaaggatgggaatgggtgcgtttatccgatctcatggaagttattaacggtcgagcatacaaaaaacatgaaatgcttcaagaaggaactcccctcttacgcgtaggaaatctcttcacatcaaatgaatggtattactctgatctcgaattagatgaaaataaatacatcgataatggtgacctcatatatgcatggtcggcatcttttggcccgttcatttggacaggtcaaaaagtcatctatcattatcatatatggaaattaaaactgtttgcagaagaactatcagataagttctttatacattattttcttttatcaattacagaaaagataaaatcacaaggtaatggcattgcgatgcttcacatgaccaaggagagaatggagcaacaagttattgcattaccaccagtaaatgaacagaaaaatattgtacaaaaaattagggagctaatgtctctctgtgaccaactggagcagcattccctggccagtctggacgcccatcaacagctggttgaaaccctgctaaccacgctaaccgacagccagaacgccgatgaactggccgaaaactgggcgcgtatcagcgaacatttcgacacgctgtttaccaccgaagccagcattgacgccttaaaacagaccattctgcaactggcggtgatgggcaaactggtgccgcaggatctgaaagacgaaccggcctctgaactgctcaaacgtattgcgcaggaaaaagcactgttggtgaaagacgggaaaatgaaaaagcaaaaaccgttgccaccgattagtgatgaggaaaaaccgtttgaactgccggatgggtgggaatggtgccgattgacagatattggcgaactggcaaggggaaaatcaaaacatcgacctcgtaatgatccagccttatatactaatggcgaatatccgttagtacaaactggagacgttgcaagatccggtggatgcatccgtactttttctgctatgtataataaagtcggtttgaatcaaagtagattatggcccaaaggtacactttgcataactattgctgccaacattgcagactctggaatattagaatttgatgcttgtttccccgatagtgttgtaggttttactccttacgacaaagaaatacctgttatctattttcattatttcatgatcacaataaaatcatctttagaaaaattcgcaccttctacagcgcaaaaaaacattaatttagatgtacttagccaagtgtttgtgccgtgccctcctttaaaagaatttttgcgaattgtcgggaaaaccagaatgttattaaagcaatgtgagcaaataaaatcatgctttaaatccgcccaacaaacccagctccatctggccgacgccctcaccgacgccgccataaattaa

SEQ ID NO: 201653 - DNA, 846 bp, Klebsiella oxytoca
atgttagagcgtggattagcagcaaaaaaagcaaaatctgttttttttgaagaaagaaatacaatagacatttacattgaggacactgccgtaggatataaaaaaatatacaaatgtattttaaatagattattaggggagagatttttaattaatgacgtcttccctcttggtggtaaaacagctgtactacaatcatgggaaaatgatagaaacaagcgtaaccgcccccaattgcatatcgttgatggcgatattgagcttttaggtggtgaacgtcgatgcgactctggtttatacacacttccttattactgcatagagaatatttttctctgtgagcagtctttattagatattcttgttgaggaagatcccgaaaaagagcgcgatgagctcagccaagcctttaatttcactgaatggaatagacttaatatcgaacctctaatcaagttatttatcacttactaccttgtgaaaaaatatgttccgcaaacccaaaatgtccattatcaagtaagtagattggcggcagataactctggtgttgtcgatattggaaaagttaacatcagaataaccgagttagaaactgagataattaagataattagtgaagatgagcttaatcaagaaaaagaaagcatcctcaaaaaaattgacgggaactatgacataaagaaatatatttcaggaaaagattatcttctgccattaatagtcactcgcatgaaaagcattgttaacactaaagtaagtaatatcacattaaaacatcgcataagtcagcgatgtagtctcgaagatcttagcgatatagagagctttatcttctacccttaa

SEQ ID NO: 201654 - DNA, 1335 bp, Klebsiella oxytoca
atgaaattattaaaatttactgcatcaaatgtttatggttatataaatttcaacataaatttcaataaagatgtttcttttttagtaggagctaatggttcagggaaaagcaccgcaataaagctaattcaggctatgttcagtttaaacctaagagatcttatatcaatcccctttgagaaaattgaaattgtttatgacgatagaaacaaaatcagaaaaataaacacacacaaagataaaatgtgtttatcaataaaaattgatggggaaacccaaaccatagaaataccaataatcagtcgtgaaaactatttatctgaagaatacaatagtgatttttatgcccatactgaaagggagttaataaccaaccccatatacaaaaaaatcaggagcattactcctccagtattcctaggattagatagaaaatcacttggtttagaaagtgattacttagatgctgaactaagcattacatctcgaaaagagatatattctcacagaaaatccatatcaaggaagaacatagcgattacaggtagcctatcagaagcattattatctgttcaattaatattacaagaacaatatagaaagatccgtgaattcgaggaccgtcaaagcacatatttaagagatagtattcttaagtcctcttttaaattttcatcatttttagattttgatttaaccggaaatcaaatcaattggcaaaacaaaagagatatccttaaaagaagagaggagataactgaggctgttaagaaaatcggcagtttagataagtcacttatttccgatattaataaattcttcgatcaggttgaaagactattccaaaatttaagccagagtgaatcattgtcaatcgaatggttaatgaacaaagctcagatagatagaatttctgatatccttgaggttattgatgattacaatgaaaaaacagaaaaaatgtatcgtcccattaataactttttacaagtgatgaattcttttttcgtggattccaagaaaaaactagaagtcgataccgttggtagattattcattactaggaccgatgggaaaaaatgtaatatagatattctttcttccggtgaacgtcaattactagttttaatagcgaacgtgatgctaaacaaatacacaagcatcagccgcgtcataataatcgatgaaccagaaatatcattacatcttaaatggcaggagaagttttctgaaacaatattggccataaatccagagacacagtttatacttgcaacacactcacctgatattgttggtgagatgacagacaaatgtctgaaggttggtgtttaa

SEQ ID NO: 201655 - DNA, 321 bp, Klebsiella oxytoca
atgaaaacgcctctgccgcctgtattgcgtgctgccctgtatcgccgcgccgtggcctgtgcctggctgaccctgtgcgaacgtcagcaccgctatcctcacctcaccctcgacgcgctggaaagtgccatcgccgccgagctggagggcttctacctgcgccagcatggcgaggaaaaaggccgtctgattgcctgtgcgctgctggaagatttgatgcaggccgggccgctgaaagccgccccgtcgctgtccttcctcgggctcgccgtgatggatgagctctgcgcccgccatctgacatcgcctgtactgcactga

SEQ ID NO: 201656 - DNA, 564 bp, Klebsiella oxytoca
atgcatgacctctttctcgggctcgatatacccctgatggccggtggtgttggcgagcgggttttccatcacctccgctttcagcaccatcgcccggaccagtggcccgagggtgttgttcagcgcgcggtcgagctcttccttagcgtattcagacagtacggcatgatgcgcctggcggaatgcctttgcggtgctgttgcaggtggctttcaactggtcacgttcaaaggccagcacttcggtcaggttgtcacattcctgcgccagctcccggcgggccacgcgttcgatatggccgcttttcagctcatccgtcagcatagcgcctccggcacggaaagcagcgcgccatgtgcgggtatcgctgccgttgtcctgctccagcgccgctttctgctcctccgcgcgggtgatggccgtcagggtgtcctccatccggcgggcctgttcaagatgggcctctctggctgcgaccagccgctccagcgccggtttcaggtaatcagggataaagggggtgtcggtcatggcaggtttcctcgtggtttcaacttgaggtga

SEQ ID NO: 201657 - DNA, 219 bp, Klebsiella oxytoca
atgccggtttctgatgccgttcaggagcgttttattcgccttcccgaagtgatgcatctgtgcgggctgtcccgctccacgatttacgatctcatcagccgggaggctttcccgaaacaaatctccctcggcggaaaaaatgtggcgtgggcgcagtcggaaatcaccgggtggatggccgaccgtatcgccgaacgcaaccggggatatgacgcatga

SEQ ID NO: 201658 - DNA, 183 bp, Klebsiella oxytoca
atggtcgccttaattcagcgcaataaagtgatcaccgaaggggccggggcgttggcctgcgccgcgttattaagcggcaaactagacagctatatccagaaccgcaaaacggtcagcctgatttccgggggcaatatcgatctctcgcgggtatcgcaaattacgggttttgttgacgcttaa

SEQ ID NO: 201659 - DNA, 873 bp, Klebsiella oxytoca
gtgattcggattccgacagcgattcggattcggacagtgactcggattcggacagcgattcggactcggacagtgactccgactctgacagcgattccgactccgacagcgactctgactctgacagcgactcggactctgacagcgactcggatagcgacagcgattccgacagtgactcggactctgacagtgattcggattccgacagcgattcggattcggacagtgactcggattcggacagcgattcggactcggacagtgactccgactctgacagcgattccgactccgacagcgactctgactcagacagcgactcggactctgacagtgactcggatagcgacagcgattccgacagtgactcggactctgacagtgattcggactcggacagtgactcggattctgacagcgactcggattctgacagtgattcggattccgacagcgattcggactcggacagcgactcggattcggacagcgactcggactctgacagtgactcggattccgacagcgactccgattccgacagcgattcggactctgacagtgattcggattccgacagcgattcggattcggacagtgactcggattcggacagcgattcggactcggacagtgactccgactctgacagcgattccgactccgacagcgactctgactcagacagcgactcggactctgacagtgactcggatagcgacagcgattccgacagtgactcggactctgacagtgattcggactcggacagtgactcggattctgacagcgactcggactctgacagcgatattgaggccaaccccgatagcaacagcccggacgttgtcgcgctggaaggtaacctga

SEQ ID NO: 201660 - DNA, 261 bp, Klebsiella oxytoca; identical to SEQ ID NO: 195195

SEQ ID NO: 201661 - DNA, 276 bp, Klebsiella oxytoca
atgaaaaagtctcttctggcagcatgcgcgacgtccattcttttttgctccggcgccatggctgcggacgtaacggcttccgcaacggcaagctgggatgcttctgcaacaaaagataccaccagcctgttggtcgttacgccgctgcgttccgtctcttttgaatatgccgaaggtctgaaagcgtttaattcacaggatggggcgtttgatattaccattcaggggcaggagaacgcgtccgatttcgttttaacctctcaacggctttgttga

SEQ ID NO: 201662 - DNA, 438 bp, Klebsiella oxytoca
atgtggtcagtattgctgattatcaaaaccgtagaaatggttccgttaaagggaaatgaaatggtagctgtcatcaagaatggtcttctaaaagcagcggtgtgggtatgcgttttatctttcatcggtcatacctctttattgtttgcgcaggatgaaaaaaatcttagagacaaatcaaggcaggaacttatcaacctgatgttgcaggacttgaaagatccgtctacagcagatgtaaaggtcgtgaaagaatcccctgctcatggggaaataaaaatgatttgtggtctggtaaatgcaaaaaacggctatggtgcatatatgggattctcaaagttttatgttcgtgaagataaggtaaccgttgttgccaccgaaggaggaaagaagtttataaccaatgcaatgtgggatatctgtgactatgttccttag

SEQ ID NO: 201663 - DNA, 510 bp, Klebsiella oxytoca
atgctttgcagttcgtttaccaaaaccatcgctcccggcctgcgcatcggctggattgcccccggccgttattacgatcgtctgctgcagatgaagtatgccgccagcggcaccaacgttccctccacccaactggcggcttgtaattttattcgcgaaggccactatcaccgccacgtgcgaaaaatgcggcagatctaccagcgcaatatggagatctacacctgctggctgcgggagtttttccccagcgggatctgcgttacccgcccgaaaggcggctttatgctgtgggtcgagctgccggagcaggtggacatggtctgcgtcgcgaagcagctgtgccggctgaaaatccaggtcgcgccgggatcgctgttttccgcatccgggaaataccgcaactgcttaaggatcaactgcgctctgccgccgatagataaacataaagaggtgatggtgcagctgggcatggcggtgaaggtggcgatggagtgggcgccggagtga

SEQ ID NO: 201664 - DNA, 618 bp, Klebsiella oxytoca
atgaatactgcaaataccattccggacggttaccggattaacgctcagggtcatttagttcctgagtcacagattaaaccgctggataagctgcgtgatgagctggttatcggcgttgttgaagcggcccgcctgcagcgtcagtcgctggtcgagttcaagctgggttctatgacaaaagtcgatgattttgttgacctgtccgccgcagagtttggcgtcgaatatggcggcgctaaaggtaacgtcacgctacccagcttcgatggtcgctataagttggttcgtgccgtgggcgagcatcgcatctttgatgagcgcattcaggcggcgaaaaagctgattgatgattgtattcatgagtggtcagccggggctgacgaaaaaattatggcgatggtcgatcatgcctttcgcgtcaacaaacagggccggattgatatcaatcaggtgctgagcctgcgctcgctgaatattgacgatgccaaatggaatgaagcgatggacgccgtggccgatgctatccaggtcacgggaaccagccagtatctgcgtttatatgagcgtcaggataatggcacttataagcagatatcgctggatttagccaaactctga

SEQ ID NO: 201665 - DNA, 327 bp, Klebsiella oxytoca
atgccaaaagaacattttaaagcggctgcacagtatgacgattgggaaggaagcgttgcagcagatgagcttgagaagaaagatttcagcgacttcttaagagcgaaaggaatacttaaacaaggggaagtcgtcaaaggcatctcagtttattctggtgtaaatcgcttcgatgtagaagcgtacatcgctgatgataaaaacgtactgcggaaagaagacattcagataacccttgaagagtttttcaaaactttcaaacgattctctatcaaaatttctcgcaaaggggaatttgaagatcaagaaatcgagttcaacgtataa

SEQ ID NO: 201666 - DNA, 267 bp, Klebsiella oxytoca
atggatttttattttggtaaaaatggttcatacaaaacttattcacttaagcagcttaaagactatccgctccctttcagtggacaaataaagggtgaatactttgttcccgatggaaattctaaggttggaatggttcaaataatcaacgatgagtttacgtttccgattgggtttagagctgaaacgcttaaagttgatccgaaaaataatgcactgttatcatcgggtggagttaaaatagccgatctagtgctagtagagtaa

SEQ ID NO: 201667 - DNA, 447 bp, Klebsiella oxytoca
atggcctcgataaccaagacatacgagaagatagccccaaaacttgatgacatcgtgcgccgtggattcagcgacatagagctaaagtatgggggccagaacgaaatctacgcctacggggaacggaaactatcagcagaggatttccgcaagctctaccctgaaaaggtgaatgacattccgcaagacttcccgccagatgctaccgtgatcgtcgaagacatggttttgctctataaaccccgcaacggacaattcacaaagacagcctctgaaacacagctaaaacatcaccaggctttcaatgaatggtgtcatgccaatgttggcaaagggaaaggctacacccagacgacgaagaatacggtaaatacagttaacattatcggggccattgtattagttgggctaataatctggggtttgtcacatttgggtaaaatctag

SEQ ID NO: 201668 - DNA, 636 bp, Klebsiella oxytoca
atgaacggcccggattcagtagaaaagcacccgatggcggggtttccacaagtgtgtttcatcaaaaatacggtggataatccgaacatcatcatcggtgattatacctactatgatgatcccgaagactcggaaaactttgagcgtaatgttctctatcacttccctttcatcggtgacaagctgatcatcggtaagttttgcgccattgctaaaggagtgcaattcatcatgaacggcgctaaccataagctatctggcttctctacctttccgttctacatctttgggaacggttgggaaaagtctatgcctcagcctggagatctgccttacaaaggtgatacggtgatcggtaacgatgtgtggatagggtataaggcgttgattatgcctggcgtgaagattggcaacggggcgatcatttcttcgcgttcggtggtcacttctgatgttcctgcttatgccgtggttggtggtaatcctgcgaaagttattaagaaacgctttcctgatgaaaccatagaagctctggaaaatctggcgtggtgggactggcctgtggataagattacacagaatctgaacgtcattatgtccaatgaccttgaagccttgcgccatctggggaaataa

SEQ ID NO: 201669 - DNA, 195 bp, Klebsiella oxytoca
atgaaaaacagcttactggtgctgacgctggggatcatgccagccctggcccatgcagcgatcacgttaactttgacagacgaacaggagacagacaacgcgaagatttgcatctacagcaacgccaactttacggaaacagtgcagatcaagctggcccagcagtgcaaacacactatgacctttgaggattaa

SEQ ID NO: 201670 - DNA, 174 bp, Klebsiella oxytoca
atgagcgacattataaacgcaaccccaaaggggaaggcattcactactctgaaaattgatgattcaacgtttcaagccctttttaaggcagcgagagcgcagagaattaccgtaagagaatacattctttctattcttgaccaacacgcggagaaattaacagagggcaagtga

SEQ ID NO: 201671 - DNA, 753 bp, Klebsiella oxytoca
atgaccaaaattaagtacatcaacaccgatgtattcaaatacgtaccgattgaagacgcatttaacgaatgtaccaggatcaccaatcttaaaacaggtgttacagaatccctatctcctgctgataaacagttttacggaagaatgcgccatcgctattatctttttgctatagagctgggcggtacttattacgatgacattgatcaacttggtgcaagtattggtgttagttctgcaacagcaacacgtattgttgcaaagttgaagaaaattggactgatcgccagtaataagccaaagcgatcaaaccaatggactataacgccactcacgccggaaaacttcatctttgaacgtgatcgtaatgcgatggagcgagataccccgccggaatgggttgattgcctaaaacatccagtgtttggtaaaactaaagaagacgtagcgccagaggtggaggaagaaaatcagcagccagtgccagaagaggccaaagcagatccgaagccggagcagccaaagcaaatgcctacgaagaaacccgcctccattccagctaaagaaattaaaatagagccagtcaatttaaactttcttgagggttatcgggatgaatgggaaaacccagacaagaatttacctgtttcacaacatccgaaaatcagatggctacttattaacggatacctggacacagagaagaatccaaaacttaaaacaatctatgaggaaataaaacatctatgttaa

SEQ ID NO: 201672 - DNA, 462 bp, Klebsiella oxytoca
atgttaaaaacagttgcacctaaacaatactctgaacgcgatttgaacattatccatcttgccagtttaataaatccagaagttgaaagaggcgttgcgtttgagcaagcgcaagagcttgtggatgtatacgctgaacgtggtgaatcaaattatgccaatgctcttgttacgctattcaatgcagcgatgaagccacctaaagagatagagtgtaaattatctgcccaacatctccacgataagaatttatcaccctctgaacgtctggtattaatgcacctcgaatcactgccatcattagcaaatgtgaagcaggaatcaatcgcaaaagtattgggaataagtgtagccactgtatccagtgcaatccgcaagctacgccgcaatggttatttaacaactacgttaatcaaacctggtcgcggtaaaggttgtgacattacactcttatctgagtaa

SEQ ID NO: 201673 - DNA, 186 bp, Klebsiella oxytoca
atgacgggcgaccctactttgtgtatacatctgtatttacattgcgcccttcatttattcaagaagacattctttaacttcatggcctcctctatgatgttaaacaatgctttctttagcaaggggcattctctccaggggcttaaccgccccttcttactgttacgccttacgtgtaacaaataa

SEQ ID NO: 201674 - DNA, 1851 bp, Klebsiella oxytoca
atgcttgaaattcagaccagtaaaattaataacacggtgacattcagcgttgaccgtaattctatgaagacagcccttgatgcttttgaccagattcagaaaaaagcgaaaggtattaaagaccccacaataaacatgaagagattcagccaagggctaaagtctgctgaaagagaattagataagctgaataagaaagcctctaagccacgtaataccgatgaacgagaaaaggcaagggcagctaaggcgcaagcccgtgtagaggctcaagcagcgaaagaggccgcgagaaacgcacagcgccgtgaacgtgcggagctaaaactcctcgataccgcgagcagctttagaagtatgcaacaccttaccaatgttgagctaacacaagcggctcttgctgcaagcaagatcaccaaagcctatgccagcggcacgatctccctacaacgtcagaacagcgagattaagcgcttacagcagggttacagacgtatcaacgcagaacgtaggcaagcagctaaacgaggcgctacggctcccgctggcggctctggagcgattacaggcggattgatgggcttaggcactggtgctcttgctggcgctggtatcggtgcggctgcgtatggtgcttattcctggggtaaagacgctgtaaccgcacaggaagaacgtagcgagattgtacagcgtgccagattagggaacgttgattacaacgtattacaggcactttcgcagtatgccacggctaacgggattgattccggtatggggctgcaagggcagcgtaagctactggataacggaaaagacatttcagaaaagttggcagacagctacaccaacagcacctttgataagaagtctggacagtggaaaggcggatcggcccctgtggatgcagccctgaacatggggttcactaaagacgatctgaaatcctaccaatccaatccgtttggctttgtctctgcttacaccaacaccatgcagggcaaaggctattcacaagagcaaatcctccacaacctggaagaccttgcagacgatttaggcttgtatcacaaggcattttctaatcagggcaaagcgatcactgatcaggtggacgtgctcaagcgtaacgggcaatggttgaaccaggagcagcaagatcagcttgtagcctatcgcaagtttaatcaggaaatggacattctcaacgatagccagaagttggcattcttcgaaggtttcatggagtctctcgaccctgcgacggttaaagagtttaaggaagctatgcaggaggcgttacccttcttcaaaggcttaggcaaggcggcgggtgatgttgtagatggcttaatgaagatgaccaactggatcactggaaagctgaatcttctgaacggcgacaacaccactaaagaggctgttagccagcattacggcacaacgtcagcacctgcacagcctggaagtaatccagtggctaacgcctacggagccagccagcctaaagccacacatgagcctaatgtgtttgatacggtgcgcgagtggtggaacggtacgagcggggcgcaggatgttagcagctacgcacagagcgctaacggtgattattctcctgtctcgatgttgaaacaatccgcagcggctacagtaacaccgccagctaataatacagtggtgcagccagtgctattacaaaataatctaccggaaggaatgatctctctcactatttcccctgatccgacattcggaaacatgcttaatgcgagcgtagatcagcgtattaatcagaacaatcagcgcatggtgcttgctgtttcatctggacaagggacggggggctaa

SEQ ID NO: 201675 - DNA, 363 bp, Klebsiella oxytoca
atgaagctgactgctcgtcaggttgaaactgcaaaacccaaagagaagccctacaaactggctgatggtggtggtctttacctgctggttaatcccaacggtaaaagatactggcgtctcaaataccgtttgctaggtaaagagaagctgctcgctattggcgtttaccccgatgtatctttagctgaagccagaaataagcgtgaggatgcaaaaaggacattagcggctggcaacgatccttctcttgaacggaaaattgagaaacttagtcgtcaacaagatgcagaaaactcttttgaggctatcactcgggaatggtatcagcgtcgctatgatcgctggtctgtctcctatcgttaa

SEQ ID NO: 201676 - DNA, 360 bp, Klebsiella oxytoca
atgtcttcatgctacgcagtagttttaaacggtaataccgaaattaaatacttcccgttccataattgcgctagcgctgaagtagcagctgataaggccgacgaatggcgttatgccgctattgaggctatcggctgggatgaagcacatcgcttccatctgcgagtcgtccgcccgaccgtagttttccgcctgcccaatggctctatcgtcgaatgtgacccgttcaacgtggacatagacccggctgtatctgcggaccggaattaccacctttgcgcttttgggtttgacagggagcgccgctgttcaggtcactgggacttagacggcgctgaaattatcgaatacatcgcataa

SEQ ID NO: 201677 - DNA, 159 bp, Klebsiella oxytoca
atgacccgtaaagagatgcaaatcattggtcatcttgcgcaggggatacagccgaaatctattgccaaaattgagaactgcagcgtcaaaacggtttatacccatcagcgtaacgcggaggtgaaactggattttaaaataaataaattagccatctga

SEQ ID NO: 201678 - DNA, 915 bp, Klebsiella oxytoca
atgtacagaaaaactttaattattactttttgtattccattattttcatatgcagatgaccctggaggttttgttaatagacaactagcgaaagatcctgctttagactatgcagtaggggatgtccatggacctgtaaaagaaatcattgagagggctgatggggcaggagaaaaaaggatgattcgatatgatccggataaaaatatttactatataaaaacacccagtgaggcgatttatatctcatctggttatccaaatcctcttcctgtaagagtggatatcgacaaagcgtataagcactcctcaccatcaagcagtccgatgaagattgattattatttatatgaccgagataaatatgggaatataaaaacaattagatcttatctttatgatgaggataataaagaggcaatgtataaaacaaacttattatatagaaagctagtatcaggggatatcgaggcttcatatgataaaccgtctcctatcttgggggaaataaaaaggtattataggaatggatttgtaataaaggaagtgtttatgaattctaaggggatggatgtttcaaatttccgttcaaaaaatataccgatggaaactgttgaatatgaatatgaatttgggaggaataagaaagatccattatttgttttgaagagaagatatattgataatggcaagatgacacataaaagttggcagaggtattcagaaagtggtaatcttttaaagaccttttcctctttctttaacaaccctgaagttggagatggtgttgagtatgttaattataaatttgacaaattctctaactggattgaaagagagaaatgtgttgttgaaggccagtggggtaagcactcatcatgtactctagaacaaaggataattaattattattga

SEQ ID NO: 201679 - DNA, 189 bp, Klebsiella oxytoca
atggcaaaaggtgaatcaggacgcatagtcttagaagtagagccagaactaaaaaaagttctctactccgttcttgcaatggaacaaaaaactcttaaagactggtttgttgataaggctcaaaaacatatatgtgagaaaaagccagagctaatagagaggttttcaaaggtagacaatgaaatttaa

SEQ ID NO: 201680 - DNA, 1368 bp, Klebsiella oxytoca
atggctggacaaatcagcctgcacctcctgctgaggcaggaaaacatatttacaaaatcatatatgatggggtctgagatgcttttggcagggagtatatttttactgacgctggtactggtgatctggcaacccagaggcctgagtattggctggagcgcgagtatcggggctgtgctggcgctgggaaccggtgtcatccatatcgctgatattcccgttgtctggaatatcgtctggaacgcgacagcggcatttattgcggtcatcatcatcagcctgctgcttgatgagtccggcttctttgaatgggccgcactgcacgtctcccgctggggtaacggacgtggccgcctgctgttcacctggatagtcttgctcggtgccgctgttgctgctttgttcgccaatgatggcgccgcgctgatcctgacgccgattgtgattgcgatgctgctcgcactggggttcagccagggcacgacactggcctttgtcatggctgcaggatttattgcagatacggccagcctgccactcattgtttctaacctggtgaatatcgtctcggcggacttcttcgatctgggctttacgcagtacgcctccgttatgatccccgtggatgcggcagcgattgcggccacgctgatcatgctgcatctcttcttccgcagggatattccggcaacgtatgacgtttcgctgctgaagacgcctgccagtgtgataaaggatgcggcaacgttcagggcgggctggattgtcctgttattgctgcttgtcggtttcttcgttctggagccgctggggatccctgtcagcgcgatagcagctgctggcgcagcagtactgtttatcgtggcgaaaagaggtcatggcatcaacacagggaaagtcctgcgcagtgcgccatggcagatcgtgattttttcgctgggcatgtacctggtggtctatggcctgcgcaatgccgggctcacggagtatctgtctggtgtactgaacctgctggcagaaaaggggttatgggcagcaacgttcggcaccggcttcctgaccgcgttcctgtcgtcggtgatgaacaatatgccgacggtgctgattggcgcgctgtcgattgacgggagtacggcgactggcgtcgtcaaagaggcaatgatttatgccaacgtgattggctgcgatttaggcccgaaaatcaccccgattggcagtctggcaaccctgctttggctgcatgtgcttgcccagaaaaatataacgatcacctggggttattacttccgcaccggcattatcatgactctgcccgtgctgtttgtcactctggccgcgctggcgttgcggctttccatcactttgtaa

SEQ ID NO: 201681 - DNA, 219 bp, Klebsiella oxytoca
atggggacgctcgctgttgtattcattcagccagcgttccgtgatttaccgtgcttcattcaccgttctgaacaggtagaaatccaggatttatgtccgatacgtccggttgaactgttcaataagcgcattctgcgtcggcttacacgacttgataaattccagtatcacaccatgctcttcagcacactgtgcaagtgtcagcgagagcagttctag

SEQ ID NO: 201682 - DNA, 636 bp, Klebsiella oxytoca; identical to SEQ ID NO: 188184

SEQ ID NO: 201683 - DNA, 1053 bp, Klebsiella oxytoca; identical to SEQ ID NO: 198549

SEQ ID NO: 201684 - DNA, 471 bp, Klebsiella oxytoca; identical to SEQ ID NO: 199174

SEQ ID NO: 201685 - DNA, 348 bp, Klebsiella oxytoca
atgacagaggatgatatctataccctgctgtcgccgctggcagatgggcgggtttatccgtatgtggtgccgcttggcagcgacgatttacccgctgtggccgctccttacatcattttctccataccgactgacatattcggggatgtgttctgcgggcaggccgaatcgacgctgcacgttcaggtagatgtgtgggccgaaactaacgatgaggccagggcgttacggcttgaggcccttgcccggcttgaagtgctttctcctaccgaggtgacaaaaatccccggctacgacaccacaactcacctgcatcgggcaacgcttgaaataaccgtcattgcctga

SEQ ID NO: 201686 - DNA, 147 bp, Klebsiella oxytoca
atgcaaatagcccgtgagttaaaagtcaactataaaaccgtgtactcacataaaaaaaacgttatgcatgattttaaaataaaaggcactcaggatcttaataaattcatgcatgtattgaataaaagaaaacaatttatttcttag

SEQ ID NO: 201687 - DNA, 132 bp, Klebsiella oxytoca
atgcatggccgtatgagtcatgatgcggttgatggcagcccggtttcccacatactgcccgctttctttgttcaaacccgaagccagaagcaaaaacccccgccatttctgacgagggttttctttgaatga

SEQ ID NO: 201688 - DNA, 2673 bp, Klebsiella oxytoca
atggccgtcaatcaggcaaaaatatttgaacaactcgagcaacttacccgcgaactagatcgggatgagttcatttatggttttatggcagcctttgacttccctaaagcaacgatcacacaggttcgacaaggcagtagtcgtaatgttgccaaggaaactggtcacgttggtttgaaaaataaactctattttcaaagtgtcaatgacaaagaagaccttgatgaggcttttgagttacgtattgttgatccagtcatagcgaaaaataagatacgttttgtattagttactgattatgtaagatttttagcgtgggatacatgtagtaaagagagactcgatattgagctagatgaactttatagcaactatggctttttcttacctttagctggtttagaaaaggcaattataagtagtgagaatcccgcggatgttaaagctgcagagaagatgggcaagctgtttgatctcattcgcgttcacaacgatctcagtaaaccacaagatattcatgcgcttaatgtattcctgacacgtttgctattctgtctattcgctgaagatacaggtatttttgaaccagctcagttcacctctgccatcaagagctacactgaggaggatggtagtgatctagatacattcctgtatcaattattcaccgttcttaacgcagctccagatagcctgcaacgacaaaagatacctgctcacttagcagtttttccctacgtaaatggtggccttttttccactgatgagctgattcctgaactaggcaaaaagggccgtaaaatactgcttgaatgtggcgcgatggattggagtgaaataaaccctgatatctttggcagtatgttccaggctgtaattgatgtagagcaacgtagtcgtttaggccagcactatacctcatacagcaacataatgaaggtgataaagccgctattcttggagcctttggaagctgagctgaataaacaacgttgtagtattaaagggttaaaagctctgctggtccgcctgtccaagttaaaaatatttgatcctgcatgtggttcaggaaattttcttatcgtctcttataaagaactgcgtaaactggaaatgaaagccatcgaggctctaaaagagctagagccagaaagcttttcgatgagtggcctacatctttctcagttttatggtattgaaattgatgatttcgcttgtgagatagctcgcttgtctctctggttggccgagcaccaaataaatagtcaatgggaacaagcattcggttttgctccaccagcgttgcctttgcgtgagagtggaaatatcaaaagtggcaatagtttgcgactcaactggagtaatatctgtccgaatgatggtgataatgaagtgtatgttattggaaatccaccatttttgggcacgccaggtaggactgacgagcaaaagttggatatgcaacttgtgtttagtaactttggacctttaggaactcttgattatgttgcttcatggttttggaaaggtgcccaatatattagaaatagtaaagctgaattagcattcgtggctacaaactctatctgccaaggggagcaagtagcaatattgtggccatctgtatttaaacttgggctaaatatccatcttgcttatccaacatttacttgggcgaataatgcacgtgacaaagctgccgtgcatgtaattattgttggcctttctagtagcgctaaaactagtcggctttttcagtttgtcgaaggggaatggcatagtcgagttgtgagaaatataagcccttatttaattgaaggtaataatctcgtcgttgcacctcagattaaccctatttctaaaaaagtgctttctatgattcgtggaaatatgccatacgaaggaggatatcttcttttaaatagggttgaatatgatgatcttttaaatcgtgagcccggtgcatctagatggataaaaaaagtgatgggggctgatgagtttttaaactcaaaagaacgttggtgtatatggcttgttgaggcaacaatagaagatataaaatctatgccattaatccttgagcgagtaaaaaaagttgaaggtataaggaaaaataataatgacaaaagtgtgcaaaaattagcagcccgtccccatcaattcagagatttgaataatccaaaaagctacattcttatcccgggagtgtcatctcagcgcaggaaatatattcctatcggtttttttggcgaagatgtaatcagtactaacaagaattttattgtccctgatggcacactttacgagtttggaattctaacttcaatcattcacaacgattggatgcgattagtttctatgcgcatgaaaagtgattatagctatggtaacaaaatagtttataacactttcccatggcctgagacgtcaattcatcagcgcaaagagattgaacgacttgctgaagagattattctgactcgtgaagagttccctggtcggacactagctgagctttatgatccagaccagatgccacttgagttgttaaccgcacacgaagctcttgacgatgcagttgataaactttaccgagaacgtccctttaaagatgcagctgaccggttaagctgcctgttagcacgctatgaagcattagttcaaaattga

SEQ ID NO: 201689 - DNA, 267 bp, Klebsiella oxytoca
atgtcgcagatagtcaatgcagtaacttcctcaacgaatgcaagacgtggttaccgaaagggcaatccgatgagcgctgttgaacgtcagcagagtcatcttgccagaaagaaagaaacgcataaggaaatgcgggtatacgtcaccagtgaaattaaagatgagtttcgccggatgtgtgaagctcaaggtgtgacacaatcagaaatgattgaaaagcttataaaagatgctgttattcagcacaatggctttgttaaggattga

SEQ ID NO: 201690 - DNA, 549 bp, Klebsiella oxytoca
atgaaatcacaattaattacccggagaatgctggtagggctcgtatctctgacattatttactactcaagtactggcggccgaaacggaaattggtttttcgcctgaaggtagcgcgctacagctggtactcaacaccatcaattcatctacagaaagtatcaggctgatggggtattcgtttacgtcaccagaagtcgccggcgcgctcgtcagagcaaaacagcgtgacgtcgatgtgaaagtggttctggacgggaaagaaaataccggcaagcaacaccaggcgagccaggcggccatgaatcttctggccaatgccggcatcccggttcgcacagtttcgcagttcaaaatcatgcatgacaaagtgatcattgctgatggccgtgatgttgaagtgggttctttcaactacacccgcgctgcagatcgctctaactctgagaatgtgattgtgatccgcggcgatagagccattgcacagcgttatctccagcactgggaaagccgctggcaaatgggaacagactggaaaccaacgtactga

SEQ ID NO: 201691 - DNA, 360 bp, Klebsiella oxytoca
atgttaagaaagttctggaacaagaaaaaggaaatacaaaactatcggcgtatggaagatgttcttatcgaagaaaatagagaattaagtaatattttaagggtgcttgtaaaaaatagtgggccaggaaggtcaattattgaacttcgagatattgagcgtgcaatcaaaaacccagagatagaaccaagagagctaacaataagaagaatactatatgttgaaaaatatctaacagacctgttttatgaagcgtataaagttcgagattgggattctgggtttatacagttcaaaagatatttggatgaatatgctcgaaaagatgatggggaactaatggaaagagaaaataattaa

SEQ ID NO: 201692 - DNA, 423 bp, Klebsiella oxytoca
atgaaaacttggatagacagtgatgatatctgtaaaaacacaagagatgttctgagtgtgttatctgcacctgatcacaaggagttcaaagagttaaacgatatcattattttagtagagcaatgtattgatgacgaagaatacgattttgtgttgttttccagtaccacattttcacttctaaaaagcttactaaaaatcagacttaaattaagaaagagtgaccctagcaatactttgatcccaacactatctctagttattgatgaaatcagaaaacagctaaagttaaacgaggtttacatacgggagcagattcaggtagacatgtttacccgccgctaccggatgtcatgggttgttgcagtatcacttgtactggcagcgttattctatgcggtgaggagaatggggggctggtaa

SEQ ID NO: 201693 - DNA, 591 bp, Klebsiella oxytoca
atgttttaccatattgttcccaaactatttcatttaatggcaaataggtgtacgttggaatcagtatcagtgcctgaattaaaactcacactcgaagttgatgcaataaaaacttgccggccatttcccaataaaaacatatggagtggaatgattaaaggcagaaaaaccgttaatggaatattgataaagagtgatgagattttatcggattttacagtgcagtatatctggaatattgaggggatgggcctgataaagcataaagtgactatctgggtggaggatcaagagtatgacctggtgtctcaggacatactgcttaatcacgcttttgcaaagtgggagagtcgtacgcacgccagttatcgtactgaggcaccggtatatatacagccaatgatggaatcctatctaaccagaaagcattcaagagagtctcatgacgtgtggacagaatatgaatgggggaacttcctgaatgaacgagaagagagccttttgcttcataccatccagtcagaaagattatcatcagatttttcagtctttcataaagtccctggtttacatgatgcgttaacgatttaa

SEQ ID NO: 201694 - DNA, 5172 bp, Klebsiella oxytoca
atgctttccgtttctacggtaaaaagtgcatcaaaagcatccgtttattattttgaagaagacaattattacttccagggcgaacaatccacagcctggtatggagctggcgccgaatcacttggacttgaagggccagtaaagcaagaaatgtttaagcaggttctggaggggaaactgccagacggcagtgatttaactcatatggttggcaatgaaaataagcaccggccgggttacgatcttacattttctgcgcctaaatccgcttcaattcttgccctggtatatggcgataaaactgtcctcgatgcgcataaatgggccgttgaacggaccttagacgaagtggaaaaactcgcatcgactcgtacttacagtggtggtgaaaccacatttgaacaaactggaaaccttgtaattgcgcagttcttacatgacaccaaccgtaattctgaaccacacatgcatacccacacggtcgtggccaatgtaacgatgaacggaagtggctggaaaacattatcttcggatactaaaagtgggaagggatttactgatactgtctggaaccaccaggtagccattgggtcaatctatcgtcgcttttataaagggaaactggaagccgaaggttatcccattgaggagaagggaccacgtggtgaatgggatattgcaggtgtgcctatcgatgatttatctacgcgccggcaggaaataatcgaaaaagtgggtgaggatgccagcgccaaagcaaaaagtgtcgccgcgcttgatacccgaaaaaccaaggatttcaccgatatcgaaaacgtcaggaaaggctggcgggaaacaatggaaaaggccggtttcgattatgaacaattcgaaactgaacgtctggaacgtgtgccaggaacatctcaggttcccactttgaccgcgggtagtgatcctcaaaagggaaatgcgccagcagacccccacagagtgaatattacgccgcaaaatgtacccggagtggtgcatccgggggctgatcgccccgagcctcagcctgtcctggaaaagcaagctaaagagaatcccctgtcagctattgttgataaggctatcgagcaggtttcaagcaagaatgtcaggtttacctacgacaacgtactgaccaacgtgcttaaccagaccgaaattaagaaaggtgtgtaccaggaagcgcgccaggcgcttgatgccgcggccgagaaggggagtcttatcgcagttgatacaaaacagaccctttttacttcggccatgcatgttcgagacgaacaaagactatcccaaattgccggccgtatggccgaacaatccgctgggcttacggcagatgttaatgcccgggatatcacggcaaaaattgcagaccgtgatcgtgctctgacgctggtcgatgccaggggtgggggggaatttcagagcaatttattaagccgaatgaaagaactggcgcaaaacagcagtaaaacgccggtactgattgccggtaacgtcaaagataagaaccagtactcagaacaccattcagtgatggccataactgtaaaagaactggccacaaccgaattacctgaaaatacgatgcttatcattcctgaagccgaaaagctaaacgtcccggccatgtatgaagtcctcaaaacggcaaacaccgttaatgctccgacggttgtcattgatacgcatacccgcagggcgacgggctttgccagtgaagttttgagaggtgcaggcgcaccggtactctcatcttcgccaggaatggaaaagagctccttaacgttagttcagaaagatacagtggacgatcgcctccaggttgcagccaggtatgtcagccagcaaaaagcggccggcatccatgtcgttgctcaggcgggcaatgatcgcacccggggacagttaacgcgcgagatccgaaatgctcttcaggagaacgggatacttggtgagacggttgccactatttcaacgctttcacctgtgtggcttgatggtacaaaccggaaccttagaagcacatatcagaccggaatggtgcttgaacggtatgagggaaaggaactccaggagacaatgacgatcaccggtatcagcgataaccacaatactctgcgagtagtaaatgaacatggcgaatcgcaggggctgagattaaatgcgatcgacagtcagtatcgcctgtacaaacaacgtgaactggagattagagaaggagaacagctaaaggcaacaggtgcatcctctcaaatgaatgccggcgataacttcagagtgagtggcgtgcgtaacggtaactggctgtttcgcgagaaacttgtccttgaaactgctaatggtaaaaccatcaaggttcggatggatcagccactcaagctcgattacggctatacagaagggcttggtgccagccgtaactccgacgggcatgtagtggccgtgctcagcagtaaagaagtcacggacacaacggttaaccagctgcgccgcagcggcgaaaatatcattgcttttactccgctagatgaggccagtataacagcacgcctggagtatgaacggacgtctgtcagcgtaactcagggaattaaaaatctctccggtaatgacgatatcacccttgcgctgcgtgaactccagaacaaccgtcttgcccccagagaaagagccgtaagacaggctattgaacttgtacagggcacaaacgtcacgttttcaagtctgaacgtagtcagtaccgcgcttaaaatggaccagtcactatccccccttgtcgcccaggccgaacttctgcgtctggagaaccggagtgaaattatcgcgctggatggcaaccaggggcgtttcggggattatgtgcagcgtgagaactggcaaaacgaaaagactatcctgaaaaatattctggaaggaaaaaacgctgtcgatccgctgattgcagatgcccggcatgaaactgaaggtaagggactgacggatggccagcagaatgccgcgggtcttatcctcgaatcgcgcgatcgttttgttactgtacaggggtatgccggcgtggggaaaactacacagtatcgggtagtggcagcggcagttaatcaggtggagggattagaaatacgtgggctggctcccacacaccgcgccgtgggcgaactgcaggcggccggtattccggcgcagaccattgccagttttctttcagaacagggggagcgtcaggcaaacggccagacgacagattacagtcggacgctgtttgtgattgatgaaagctccatgatcggaaaccgcgacctggccacattgaccgatattatcgtggccggtaatggaagagcggtaatgagtggggatgaggcccagctgaagcctcttgaatccggcgttccgttttcactgacgttaaatcgtagcgcagcggatgtggccattatgaaagaaattgtccgtcagacccctgaactgagacctgcagtggaacacatcattgcagggcaggtgcaggaagcgctgaatgtggccgatatggttagcccttccattgtcccgcgtgaaaaggatgcgacggttccggagaggagcatcattgatctgaaagacagcgataaaatagcagtcgatgagatcgctacggatttcgctggccgaaccagtgaagcacgggataagaccctgatagttgcggaactgaaccgggaccgcatggcgatcaacgaaagtgtgcatgacctgctgcaggcgaaaggtgagctgggtgacagtgtcacggtaaatcatcttgtccgtgtcagtaattcgatggctgatttaaaccgcccgggattctggagtgaaaattataagaataccgttcgtatcggggagcaatatctcacgattggcctggttgatccgaaaagcaaccttgtagagcttaatcatcaggagacggggagcagccgctggatatctccgcttgaactgcgtgcgtcaaacgtagcagtgttcgagacaaaagaaatggaggtttctgtcggtgaacgtattcgatttacggccacagaccatgacagaaaggtgaagtcgaatgacttagctgttgttaccgaaattgataaggttggaaagatcacgctcgatgccggcggtcggaaagtcgtcctcgatccccgggagcagaaagaccaacatttcgattatggctatgctgtgaccacctatagctcccagggtgcatctgtaccctatattattgggctggttggcgttgacggtgccagagagcggatggcctccctggacagcacgtatgtacagttgtcccgttccgtcgaacatatacagctatatgcagatgacctcagtaagtgggttgagaaggtgaaggagcgttctggagagcgtgaaacggtccatgatgtgatgttgcgtggagaagatcttaaggccactaacgaacttaatatatggaaacgtagccaacctgtttctgcgacccggctggctgcaaaaatcgaagacggaatcgcagatgccgcacatttccggagtggaaagacgccggagctgctgtacgcggtactgaatgaacatgggcgccagaggggcaactggcatgtgccagtttcgccaacgactggcagactcgatgttgagaatgcgtactatgctggggcgagtgacggtgtaatggttgtcatgcagcagggagagagtgaagggaaaccgatttatacagataacctgccgcaggcgctgtccgagatggcggagcatcctgataaggctgtcattattctcagggatagcgacagaaatgaaacgaccgacgtcagcgcagctgaaacgattgatataaaactggaagacgaaattgaaaaagaaaaaattaaagaactgctaaaaatcgacacagaagaaccgctaaaaggtgatgagctaaaagataagatagagtctgagagagacactaaagagctgaatgatgagaagcttatagagcaaatcaacagagaaattaatgaagaggaaaacaaagagcggcaggagaactatcatgttgagttaatgaatgacgagcttaatattgtccgccatgataaagagaaagattaccaacctgattaccaacccgaaatcatcagagaagtacaaaagacgattgaataa

SEQ ID NO: 201695 - DNA, 2133 bp, Klebsiella oxytoca
atgagccttaactcccgggactttactcagggtggacaggtattgaaatacatgatcggcatgtttttgcaaatcatgaatatcgccacctactatatattaatgctttcagtgcttgtttttttaggctggttattgataaggatgagttttcagcaaatttggcatgggctctgttactggcttattagatattgcgttataccgatgcgggaacattcagttaatcaggagtggagtccctacgtttttcactttacgaaatctaccggcgaggtgattgagttctctcgcaccgccatccaggttatggtcgacccatactttattggcgtggccatgaagttgaaagacacggctttctggggttggggattagcttcatttacctttgtaggcggaattctggctgtcacctggtatctgggtgctaaagggaagaaacaacgaagtgatgaaatacttggtggcagagacctggttgatgatgtcaacgtggttaacaaacaattaaaaaaagaaggtaagtattctccgcttaacttatctggactgcattttccaaaatattcagaaatgcaaaactacgctctacacggtactgtgggttcggggaaaagtactgcaattaatgactttttggctcagatccgagctaagggtgacagggttattatctatgacaaagggaataactttatcccgatattctaccggcaggacagagatgtgttgcttaatccaatggataaacgctgcgcagcctggaacctttgggatgaatgccagagcgcagtagacttcgagaactttgctacaacactccttccagattcaggtaatggtgaccccttctggttactttcagcacgtcatttatttgtggaaaccgcccgacggctggcaaaggaaggcgaccgttctatttataccctgctgaataagttgctctcgattacgcttgcagatctccgtgaatttcttaaaggaacagacgcatcaaacctggttgaaggtagcattgaaaaaaccgcgatgacaattcgaacagttttaaccagttatgttcgttcactgcgatatttacaagggcttgatgatcaggggaaacgaccttttaatttacgtgactggatagctacggaagatccagagggagataattcatggatttttattagcagcgatggccgtaaccataatgctttaaaaccgcttattacagcatggctttatatgtctatggtaaatatcctcggcctgacagccagcagggaaagaaggatatggttgttccttgacgaattaccatcccttcataagttaccgaaccttccggagttctgcgcagaagccaggaaatttggtgggtgtacttttgttgctattcagaacttccctcagttaagacaaatatatggtaaggatttcgctgaatccatatgggatttactcaatactcgtttcttttaccgcgctccaagtggaccagtggctgaatttgtcgaaacagaactcggtgagaaacgaattaaaaaattccgtgatcagtactcatatggtgtagacattatacgtgatggtgttcagttctcgaaagatgatgtgcgcgataagctggtttcgtattctgatattcagcgacttaatgacctgcaatgttacgtgaccttaccaggtgattaccccgtcgtaaaactggacctgaaaagaaaagagtatagagatattgctattgggcatattccaagaggcgatgattttcttgatccggaagtcgaaaagcagcttgaagacgcttcggaagatttaataggcaatgcgtctgttattcttaatcgacttttcagttcatctcgtcaggaaggcgaatctgttttgaatgtggttaatcaaccaaagcattcccgaaacaattctcaaggtccgggagagggagactcttcagaaaacaacgctgaagctgaagggcggggaaataacctgaacgctgaacaagctgtccaggaattacccgaggatactgaccctgttaaaaacgaagcacccgcagaagaaaaattacctgagcgcgctgatgaaactcaaatcaacagacgtattgaaataggggctgaattggagaggtggtaa

SEQ ID NO: 201696 - DNA, 564 bp, Klebsiella oxytoca
atgcttactcatgaaaagattcgaatagagacagagcagattataaagttgcttgctacaactgacaggccagtaacatcgttcttccatattttaaaacctggcctgactcttatggtgatacctaacttactggcaacgatattgcttatccttgaatggataaatggttatattagttcaggtgtcgggccgggggctttcttaggcaatttggttctttctttcttgttggctgcaatgctttcgccgtatgctaactttttttatatgctgtctatgaaggatgtcgaaaatttagagattgttaaagtactgcgtaagaaaattaaaacctattttatagttctttctatagtctggattatatccagcattccattgatgatgttagggggcggagtcattgttatccctatcatggtaatggtgacatttatactcagtatgttcgttttttctatagatatatcaaggtatcagctttcaggcgtgtttggcgcactgaagggcgttaaagacgttgtgatcaagactggacaaaaagataatttaaatcattag

SEQ ID NO: 201697 - DNA, 2871 bp, Klebsiella oxytoca
atggggcttgatatttgggttgtcagcagcggtgaaatgatcgcaatgggattaaacgccgttgccgctctgctgaactcgggcggctggagtagtgtcctttggattgcggaaactatagggatactatgctgtgtggtcatgtaccttaaaacgcatgacctgcgcggtatgtttgcctggggcttcacctttgtcttggtaactgcgctgctcctgacccccaaggtcagtgtagtagtgaatgatctcacccggccggacaggattgaccgggtggacaatgttcctgttggcctcgctgtcccactgtggatgctgacaggactgggatacaccatagcgacaggatatgaggactttttccattttccggatgagcgagcatataccaaaaccggtatgttattcgcctcaaaattacttgatgactcatacacaatggtgggggaaaatgcagtactgcaagataatttcaacgaatacattaaaaattgtaccattcctgatattcagctaaatcacaaattcacaattaatgatgtgatgcgctccactgatgttgcaacacttatattcagcaagccaagcccattgcgaggaatatattaccagactgaaaacgggtcagaattccttgcgtgtgccgatgccgtcccgagattaaaagcggccattgaagctgatgcccgcccgggtgggggcactttccttacccatgcagccagtatgcttccgggtaacaagaatgcacagacaatttatcccgggatgctggaaagctcatacaactacttttttaacgccagtaaatcgtcaacaaatattatcaagcagaacgtggctatcgcagggttgcgcagaggatttaattcctactctaaatcgatgaatgatactgcgtcactggttgatattgcatccgaatcatcactgatgaagttgcgtttgtcgcattccgtaagttaccggattgcttctgaggtacttcctcaactccacactgtgtttatgctgctgtgcatcgctattttcccggtcatgatgctggcactctatatcaaagaagtggcatgggcagtggtgaaaaactatctcaatctgatgggaagcctgatgctctggcctgtcatgtttgcgatctttaattttgcagtgaatttcagcacgcgtgtgggttcgtcaggagaacctaccttgtccaacatgaaccgtttaatggaaaccatgtcgacaacggccgggattgcaggctggctgatgatgtctatcccgtttatctcgttcaagctgttcacttcactgggtcaaaacattgccagtgccggttcatatctcggtaactccctggggggggcggcgacggcggattctgctgcagtggcgtcagggaacctcagttacggtaatgttcaggtggataacatcaacggctttaaacgggatacaaacgtggtgaaccgtgatggtatggtgacgaaccagttagcgaatggcgccatgatcaccgagaccgcgggcggtcagacagttgtaaataccaccgaggctaactctaaaatggccacggatattaattttgaccatcatttatccagcgctgcgcagaaaatgacacgtgaaagccaggcacaaacgcagacagctctggaagggtataaccactctgttacacagaatgccgcgcagctaaaacagttccatgaacagtttggtaatagtgatgccaccacccttgctgcgcagaccggtatgtccgtgacggatgcacagaaggtgaataaagcgctatcactggcacagggttactctgacagaaaccacgtcagcttcgatcagggcttcagtgaactggaaaccaaatctaaatctgttgaaggaagagttggggttggtgcttccgtgggcgtagatactgataaatcagtcctgggtaaggtggccggactggcagtcggtgtgtcaggaaaagtggatggccatactggagtagactggaaaggggcaagtgggagcacatcccaaacttctgaaggtggcagtaaccgtcgtgattacgggcatgatgtatcagctcaggatatgcagaccttcaacgaagggatggatgtcctgcgaaattacagcgtgacctacaatggcgcccatgttgacaacgccgcttctggtctactcaatcagatctctgcaggcgtgaataccagtgacagccattaccagcaatacactaccagtctggcgcgcactcacgaataccaacagatggcttcccagaccgataccatgagtgcccaggtacgtggaaattacaatcaggaatttgtggaatgggttaaaactcggatgcctgcctctgaatggcagccaattgtggcggataccggtaatcctgaactgcgtgagcgaagggagcaactcgcagaggcatttatggaagataaattacgttcacgggttgaggggcattatgagcaaagtgctgcacatgtcggagataatatatcatcgcctcgtaacgttgccggtgagcagtatggtaatgcatatcaggcaaattcagctgagattgaccagcgtggccgagatgccggtattcgccatgatgtgaagcaggatgttactcgtcatgttgataccactcagaagaatatggatgacactgaagatgtggtgaatattgacaaaaaccagatgacaaaaggcaagggtgtaagcgaaactggttataataatgccaattcggatttccgggaaaagcatgcaggagcaaaaacgcatcaggatacagggtttgacggcaaaaacgtgcttaatagcttgacttacaaggactatacaagacagttggaacagaaactgaaaaatgaataa

SEQ ID NO: 201698 - DNA, 1365 bp, Klebsiella oxytoca
atgaagtattcgacagcagctgcgctgttaactgccctggcgcttattactacgcagtcgcaggcaggcgtaaatgatgatttgaataaattctttgaccagatgggaggaggtggcgctaacgtctccgtgccggcggcgtggaaggggcaagcggcaggatatctgaccggtggcaatctctttttgcggacaccagtcagaaacatccagctgatatctgtcaccctgccagacgtgaaatcaggttgtggtgggatcgatgcttatcttgggtcgttttcatttatcaacagcgaccagatcaaaattatggggaaacaaatactgagcaacggccttggttatgcttttgatctcgggctggaaaccgtctgcccccagtgcaagtcggtcaaagattaccttcagaaactggccacggatgtgaacaatatgaacatatcgacctgccaggcttcacaggccatagtgggaggtctgtggccaaaaacgcaggaagccagcaagaagatctgtcaggatattggcggcgcccatgatgtcttctcagactgggcggcttctcgccagggctgcggcgttggcgatgaaaccgataaggtattcagtaaagctacccctgaagaaaaaaagcgtatcccacgtaaccgtaaccttacctggtcaactttcgaaaaaataaatcagttcatcagcaatgaccgcgaattgaaagaactgatcatgtccctggtagggaccgtcatttatgacgataaaggcaatcccacttttctggcgccgcgcgggggcagtgattcaattttcgacactttactgaatggtggtactgcgaagatttatcactgtaacgataatactgattgcctgaagccaagtgctgcagagttcacactaagttcgtcacaaggtatgacaaaccgggtaagaactatgctgcagtccatattcgctaaagggcgtaccgacacaaaacttaccgataatgaaaaggcattaatctccagcacacgggtaaaaatacttcgctatgcaattgactcggcttctttaggaatggatgacagtgttctgacgagtctttcagaatatattgccagtgatatggtaatgtcatatatcggtgggctaattgaccttgctgaaagttcctcatccggaacactgaacactgaagatgaaaatgcccgatttcgggaaaatcttctttctgtaagaagtcaactgggccagcgtgtatcacgcattcaggtgcaacaaaacgggttaattgaatttgataataacctgaatcaaatgcgtcagcagctctccagcaatatgtcagacaaagtattatctaattatgattacggtggctaa

SEQ ID NO: 201699 - DNA, 555 bp, Klebsiella oxytoca
atgaaaggaaaatggttatttaaaagcggtgcgatattgttttgtaccatgttatcttttttcacctgtgccaatacacttgatgaaatagcaacgctggataataataaaagcgttacgggaaccttgccagaccgtaataatgtgcaggtaaaagtagcgcaggaaaacaaacctgtctggctgaaattagcaaatggaaagacaattgatatacagcgatggcagattgtccactttttgagttcacaatgtccctactgccatcagttcaatccggtattaaaaaaagtcagcgatacgatcggcattaatgtctttgtgtacagcttcgatggtgcaggtgatgccgtatttccgtcagtattacccactacgacagatattctaaataactttttcgcagaattacccaaagttacacctactgattttatcgttaacaaagataccctggtgactattcctctttcccagggggctataagtgaagaagcgctcgtacagagactgaacgaatcgtttacccttgctgaccatatgggggtcttatga

SEQ ID NO: 201700 - DNA, 771 bp, Klebsiella oxytoca
atgaaatattccgccttattacttctctgcattccactaatgtgtatagcagatgaaccaaaagaagatggctaccattataaaccagcagttggctggtactggtataaccaacctaaaaagaacgaagaaaggaagcaggagataaacccggaatcgtcttcgcctccatcttcttattcagaagtaatgcagaaacttcatgcaaaacgtgaagagttactcaataaagcaattctgacgggtaatgatgaagatgtaataagatataaacagtttcaggattttcttgttggtaaagtcagtatattcagttcgcgatgggaatcagcattattaagtcatcctgagcttgattataacttgcagcaccctgtatataatggtgctgcaccgatagagtatgcggcgcagagaaaaaaacaggctgaagcaataaactacattaatcagaagtacggtgtttttttcttctacaggggcaatgagccacttgataacaaactcggaagtgtagtcaaagagttttcccagcagtatggaataccgtttattgcagttaccgttgatggtcgtgtgaatcctgatctccctgatagtcgacaggatcaggggcaatcagcccgaatgcaaattacacattttccggccatctttctggttgagccaataaagcaaacgtataagcccttatcgtatggttttatcactcaggacgacctggcacgccgtgtccttaatgttgtgaccgattttaaaccgatcgattga

SEQ ID NO: 201701 - DNA, 1938 bp, Klebsiella oxytoca
atgaaatctaatgggttaaaaatatccgttgtactcatgacgggatggctactttcttttacggctttggcatctagtatggatcagtcgatgaaagagggtagagatatagcgggttctgcactcagttcaggtgttgaggcaactaaaaattttaaaccggaagatgaatttgaaggatttaattctaaacctccggaatccggatattatcacggcgtcacctccagtggcagcaatattggagataaaggaaacagtgaacttgcaacctctgatttaggtaagctaaccagggagtcatttataaataatcctgcagacaaaattgacagaaactctgatatgattaaaaacagtgattctatcagggataatgctgaagtgattgcagcaggcacttctcagcaatgcgtaaagcaagatatatctaaggttacattcactagtcatagctgctctcaggacaaaagtgtttcggctgtttgcactaataccggttcaatagatgtacgaacaacaaaggtatggactccagaaacactgcgacttgaagttaatatgaagaagtcaggaaaaggagtttggaccggtaacgtttccttgcccgagtctggccgctttaagaatataaatgtttccggctcaactgttgttgttccctataatggacagtgcaagaaagaggccggagttacaaatgaatgtcgttccagtatagatgaatcagtcagtctgatggccagaacctttcctgttagtataactaaatatccatcaataacgagtttgtgtagtggtgggcagaatacacactgcaccactacgtataacaacggtacaggaagcattaatgccacattttcaataagtgatactttttcgcaggggcaaagtataaccgttgtaaaaaaatctggacttgatgactcttccggaaattcatcattcaaactggtgttgacccttggtattgaagtagagaaaacgtcttatcagccagaaattgtctggaatgaaaactgcccagtcgataaaggtaatgcggtcaaagttcgggaatggtgtagccagcccggtgccaccaggaccgtccagtacaacggcaagcctttcaacatgtacagcgattgctggcaacattctgaggagtgggttgtttcctctgcagataccaatacctgcagccagtgggaaaacgatgcgaactgtacggtagggacacgtgcatgtactgcttatatcgggagctattgtgtgaaggaaaatatcagctaccagtgtcagcataccgtgaaaagtgagggatggctgtgtggtgacagcttctactgtgcggatggaaaatgtgccgctatgcaggaaaaccagaatggagatttcagccaggctgtatctgcgttagccgctatcgccgccgccggcaaagatgttgctgaaatggacccatcgaaagtatcagcttttaccgggaaaggtatgtcctgccgaaaagctgcagcaggattcagcaactgttgtaaaggcggcggctggggaagcgacgtaggtctggctcactgtaacagtgaggaaaaagcgatcggtaaggctaaagaaaaactgctgacaattgatgtcggggagtactgctcacgtaaggtgttaggtgtttgtcttcagaaaaagcgcacctattgtgtatttgactcaaagctcgctcgtatcgttcaggaacaaggcaggggtggacaacttcatatctcttttggcagcgccagtagcccgaattgccgtggcgtaaccgttgcggaaatgcaacatatcgactggaaagtgattgactacagtgacttctattccgagctggaagataacatgacgttacccgattcaggttcactgaccgatcgtatcagagaacaaattcaaagccagatgaatggagtaaatcagtga

SEQ ID NO: 201702 - DNA, 429 bp, Klebsiella oxytoca; identical to SEQ ID NO: 136278

SEQ ID NO: 201703 - DNA, 999 bp, Klebsiella oxytoca
atgaaactgaaaagcactgtaatttctttactgactgccggcctttttgcaacagctggcgcaagggcggctgatcctacctgtgacgggcgctgggtcaatcccattaccgatatctgctggaaatgtatgtttcctatgagtatcggcagtgtacaggttgcccgtggtgacttaccggatacgccgaacccgtcatcaccgatccagctctgcccggcacctccgcctatatttgagcgaccggggctggccattggattttgggaaccttttgcaatgacagatgtgacgcgggctcctggctgtatggtcaatatgggcggttttaccattccgatcccttttgctggcactggagccggcactaaaactgcaaatgaccatccgggcacattctataacgtccactggtataaatatcctttggtatcctggttaaacattattacctctgtcgcctgtatgcagggcggtgaatacgatatcgcatatatgtcagagctcgacccaatgtggaaagatgaccagcttgctctgtttaccaacccggaggctctggttttcgctaacccggtcgcacagatggcgtgtgctgctgatgctgtggctgcagaagccggtaagccactcgatccgctcttctggtgtgccggtggccacggcagcatgtatcccttcacaggtaatctggtgaatgaaagctctggtctgaacagtgcagctctcctgagtgaaaggatgaactttaaactccatcgccagggtatgatttttgattcagtgggtgaagatagagctgtctgctacgaatacccgtcagcaatcattccgaagtctcggtaccggtatcaaatggtcaacactattcctgatgccaaccagtgccacccgctgggtcgcagtgtaatgagatggcaaactggtaaagaaatgccgaattccaaaaaaaactatgggtatctgatatggaaaaaaagaaactgtgttgtgctgtaa

SEQ ID NO: 201704 - DNA, 633 bp, Klebsiella oxytoca
atgaagctaaattatgtggccggtcttggcttcctactcctcccattttccgccctcagttccaacctgggaacttacggagacgtatggggtatagctgagacagattttctgacagttgtgcagcagaagctgggtgattacatcaaagaaaacggtgaagagaaactgcaggaggaaatgaaagcgcgggtacaggaacacgccatgcggccagcgccggtggaaggcgttcatcgcggcaaggaaacacatgtgaaactgttcgatccggctttcgaagttacgcgtgaccttgctgatcagaacggaactgttttcgcccgtaaagggcaacgtatcagcccgttcgatgttatccccgtatttaatgaaactctctatttcattgacggtgacgataaagaacagctggcctggatgcagcagcagaaaccgcaaactccgatccataaagtgatattgattaacggaaatatcaaagataccgccgatgtactgcactcacgaatctactttgaccagggtggaacgctcatacaaaaattcggcatccgtcaggtgccggcaattgtggatcaggctccgggtgaacagttattgcgtatcactgaagtgggattgaaaggatga

SEQ ID NO: 201705 - DNA, 378 bp, Klebsiella oxytoca; identical to SEQ ID NO: 136281

SEQ ID NO: 201706 - DNA, 2622 bp, Klebsiella oxytoca
atgaaatttgatttttcaaactttaaatttgatcctctgaatgtgattgaaactgtaaacagtattatgggggagcgagacactacaaaagagacacaaaaaaaactggatgatttagattatccacatatcaaagatttattgccttttgaagattatgacagttcttcacaactatttatcaacaagggttcaataggattcattattgaatcccaaccattaatcggtggcaatgaagcgcttgtaaaaagtctggattctttactgcaggataaagtacctcgcggtactccactgcaggttatcatggtcagtacccgagcaattactgaacagatcaaatcggggctcgaaaatttttcctggaaaggatacagggctgatgagtgtaatgatattaccatgcgttattacactcatgcagcgaaagaaggtttccccaatggattgggagaaccgctaactcttcgtgattaccgtttattttttacctggtctcaaaaggtaaaacgcgttaatgaaagcgaatttttgaaagtccgtgatgtccgtcgaaatttgcttgctgctcttaatacagctgatatccacagccatgtagtggggattgaggaatttttgagtgtcatgagagaagtgctgaatcatgacaccgagagaatggattcctggcacgttccctacgaccctgaatccagtctggcttcgcagatggtagatagaaccactgcctgggaagtaaaaacaggtcacatccgggtaaaaggtgtcaaccacaaacagcaaccattctccagcagaatggtcagtatgaatcttgataagaaccctgcgattcactatctctggcagaatggtaatatcgtgactgatctgcttaacccgtccaaagggatacattgtccgtttgttttcactatgcttctcatcacagaggaacagcttaaaagccagggtgaagcaaacagcaagtttctagcactcgatagtcgtgtcaatacctcatatgcgaaatttataccagctaccagacggcagcacgcagaatggaaagaggcacgtgataatttgttgtcgaatgaagaggcgattaccagttatttttacgggatcacgtttttctgtgctgatgatgatgatgtgatggcacaggagacagaacgaacaaagaatgcgtttgaacaacaggggctaaaggtagttcgcgctgattttatgcaaatacgtaatatacttgctgctattccttttaccgcgactaacgataagctatggacagactttaagcgtactggcgctgttcaacgcggatacagttttaatgcggctaacctgatgccaattattgccgacaataaattaagtccttcaggaatcttgttaccaagttatcgtaaccagatcgcttttctggatgtttatgataagaatcttccaaatacaaactttaactggtttatgggagctacatctggagccggaaagtcagtattatctcagtctatctgccgttctgtacttgatatgggcggtcgcgtaagtattaccgatatcggggattcttataaaaaatactgtaaaagtgtcggtggtatttacattaacggggaaaacctacggtttaatccttttgctaatgttactgacataagtcaggccgcagaacgtatccgagatcagttatgtatccttgccagtcctaatggtctgctggacgatgtacatgagtctcttattctggaggccataactgaatcctggcctaattatgagcaggatatgaggattgatcatgtcgttgattatatgaagaaaaagcaaactgaaatttcaaaaatgcactctgcacaaattggtggaagaatagatgaaattgtaacgttgctaaataaatatactactcgtggtctttatggcgaattctttaacagcagtaagccgaccctcagtatggatgagcaattcgtggtcacggagttaggtgacttaaggaaaagaggggatttattatcagctgttctattcactctcatgatctggaacgaaaatatgatgtacagtacatctcgtgacctaagaaaaatgagtgtcatagatgaaggctggaaattgttaggtggttcgagtaaaaagattcgtgattttattgaggaaggataccgtactgcacgtcgccataatggttcatatggcactattactcagtctattcgtgacaaaaatttgagcaccgcttcactggcagcttatgacaacagttcgtttaaattcaccgggatgcaggacgctaagtctctgtcaacactaaaacaggaggaacccaatctttataatgaacttgagtggacattgatagaaaaactcccccctgctaaaaaagcgaaattcagtgcttttcttgtcagtgtaggtgcatacagtagttttcaccgtctgatgcttgatccgctttcagataaactcttttcatcgaaaggtgaagattttgcctacagtgaaaaacgactgaaagagaatgccgacattaaggatattatctttgaaatggtcgagaatgatgctgagaacaattttgaaaaacgagattttctcaattatcttcgtgaaatgtcaatctaa

SEQ ID NO: 201707 - DNA, 531 bp, Klebsiella oxytoca
atgaaaaccaggaaaatagctgtcgcaatgatgactgttttgttaagcggttgtgcaggaatgaattctgatttcgaatttgataagcctgctaaagatagtgggatctggatggctgaagctgatgatatgactgtttcaaaatcctctgtaaatggtgagaggaacacccatatcaacctcgaaggatatcgattgcttaatacaggaaatatcagactggatgttcagccggcaatgacgtcgggctattctggctcggttcccggttatccgatagctgtcactccatcacgtaccggtactgtattcaaccattcagcaagttcttccgtttcaggttatacccggaattcaggaataaactgtaatgccccacgttgctacccagaaccctcttctgcattcaggacaccggataatctggtcagggtctggatagctccatatgtatcaccagatgataacgcacatatgggagagattgtttattcagtcactaaaaaatcagaatggaatgggataatgtag

SEQ ID NO: 201708 - DNA, 390 bp, Klebsiella oxytoca
atgaagatgagtgaaacatcgcttaaatggttagatgctatttatcttttagtttactggttaattatgtctcttattgttacctttttaaggtctgatggcattttagaaatgtcatctgagtcatatacaacgctaatgataggaatgccgtttagtgctgtctactctctctatttgattcctgactcttctgaaaaactgcccactattacagcaagtatgcttttagctgcaatagtgtttgggtgtgcttatgttttgtttttgataattagaatgtttacaagcgacttaacgctggctgacactacatgcaatgcttttgtcgtatatattcttctttgtatgtgtgtcattccggcatttctagataaagaatccaggtaa

SEQ ID NO: 201709 - DNA, 1332 bp, Klebsiella oxytoca
atgaatattaataaacagatcctgaataaacaaaggaaactgcttattattattgtcagcgcaatagcgctggctgttaccgctttatgggcgatcaataaaaaagcatctacagcaaataccaaagagtccgaagcattaaagtcggacattcccgaaccggaaccagacttaaccggtgcagtgaccaataccttcaatagtgcagttgatggtaatgtcattctcgatgctcagatgcaacaacaggaagcagccaaaactttaaacggtgttcaggatcagcttaaggagcttaaacagagccttgttgatatgagtagtgaaaatgccgaactaaagcagcagctgacggctatgcaacaaaaaatgacagagcagcctgcggcaccggcgccacaaagcggaatgagcactggtcagtatcagccccccaggacagaataccgtcttaatgcacccagtgtgaaaaccggtcaggttgacaacgctacttttgattacacgaaagttgatcagcggaagaaaaaggcgacggacagtttctacgtacctaccggtactttttctaatgctattgtggttgaaggtgcagatgccagcgcgtcagttcgtgggtccgaaaatctggttcctatgcagttcaaactcactggccttgctcatatgccagggaatcagcgtctggataaactggctaactgttttgtgactgcggccgtatatggggacatttctagcgagcgagcattacctcagttacaaagactgtcctgcattattaatgggaaacatatcgatcaggaagtaaaagggcatgttgctttttacggaaagaacggtatcaaaggtgtacctgttatgcgtaacggtaaaatcctgggcctggcgtttgccgctggagctctatctggtcttggccagagtgtctcacaggtcggtcagacggttgcaggtgtcggggcgacaaccagtatatccggaggtgatgtagcgcgcagctctattggaggcggtgtcagttcggcatctaataaactggctgattactacattgagcgatccgaacaataccacccaattatacctattggggcagggaacagaattgaagttgtctttatcgaaggatttaaagcagaaactctggaagataaagaactcgcggaatcacagaaggaatctccgcaaactacttctgataatactgataacaaatcaatgagtgccacagggaacagtgggttacctcctgagttactcggaaaacttggtgatgctgatcatcttaaattaggagattttgtaacccctgcatcatcagcaaattaa

SEQ ID NO: 201710 - DNA, 759 bp, Klebsiella oxytoca
atgatggactttgctataacgcctttgtggaggtacccgttgaaaattaaactggcattgctcatatcggcatctctcatatccggatatgtttttgccgattcgatcaccgttaattccttcgccaccatttctaccggggtaagtaacaataatcccaacagcatcactgtacctgatgaccgaatcacttccctgcagtcaacgcagggagtgctcacagcacgtgaggccacagcaaacggaagcgttgtgttttcaaccttagcaactaaacctttcacgatgtttgttcagacggaatccggctttagttttaccgttaacgcaacccctcgtaagcaacagggcatgtcgctggtcgtgaacaataaagaggtaaaagggacagaagatgctacgacctgggaaggatcacaaaatacttatagtgctcttataaccggtctaatttcacgatttatcaacaacgataaaccccagggattcgtatttagtaagaatactgacgttcagttatcaccttcagtacaaagttattttaacgttcgcccggttacagcatggcgaggcgataaattgaggattatcagactagagctgacatctcgttcttcttcccggcttgagctgaatgaaagatggttctggcaagccggtgtaatggcggtgtctttctggccacggctggatgccatttcacctggaggtaaggtctcagccattattctcttgcgtgagaatggaggggaacaatga

SEQ ID NO: 201711 - DNA, 576 bp, Klebsiella oxytoca
atggaatacagattaaaagcatccaataaccgcagtttagccattagcatagtaatattgcttctaatagctattctcgcattgggtgtatgttttcggcttataaaggttaatcagcaactgactgaggacttagttaataaccgacaaattattattcaaccactgggggcaaataaggaatttgcattcagtggagccaaaggtgatgctcgctaccttcggttaatcgcgctgagttttctcaatttaaggctgaatgtcagtaaagaaacagttcaggctaaccatgatctcctgcttgcctatgcctgtgaagggcagcgtaaagtcatgctgcccgtactggcagaggagaagaaacgtatcacattaacggagggcagttcagtcttttacccccaggttctgcgtgtggccgccgatacggggcttgtagatattaccggggaccttgttttcacatatggcatgaaatcatcggacccactgccaaagcactaccagatcagaatggacacccgtaatgatggactttgctataacgcctttgtggaggtacccgttgaaaattaa

SEQ ID NO: 201712 - DNA, 297 bp, Klebsiella oxytoca
atggaacaacgtaaccgatatcaatttcccggtacgttttccgatcagaagcgctacgtggggctgccactggatgaactggtcatttatgttccagttgcgttgttagcgattttcgttaacatgtggatattcagccccacccttgccgcagctgttatcgggattcgaatactgaaaaagggcaaggggtcttcctttctgctcaaccttgcctactggttcctccctactacgctgatgcgtttttttatttcagttctgccggaaagctataaacgtcactggattgcctga

SEQ ID NO: 201713 - DNA, 306 bp, Klebsiella oxytoca
atgaacggaaagattcgcacgttctttagtaacccgagaaattttggtgctgcagctttggctgtaatattcgttgcgcttatgatgacgccctcattacatgcgcatgcagtggatctgttcaaaaacggtaaaactactgtcaaagatacattcggctctggttctaccgttatctggattttgtatgttctcgaaatcctggcagcaatgttctcttatataaaaacgaaaaacctggctgtgtttggcggtatcgccgcaatcatggtttttgtcaacgtggtcttcggcctggttccgtaa

SEQ ID NO: 201714 - DNA, 306 bp, Klebsiella oxytoca
atgaacggaaagattcgcacgttctttaataacccgcgcaatttgggtgcggtagctatggctgtaatgttcggtgcgcttatgatgacgccatcattacatgcgtatgcagtagacttattcaaaggcggtaagactactgtcaatgatacattcggctctaattctaccgttgtctggattttgtatgttctcgaaatcctggcagcaatgttctcttatataaaaacgaaaaacctggctgtgtttggcggtatcgccgcaatcatggttttcgtgaacgtggtcttcggcctggtaccgtaa

SEQ ID NO: 201715 - DNA, 846 bp, Klebsiella oxytoca
atgagtacatctaaatcgacaccaattgaacttaagattagtgagatgttaagcaacatcatgaatgaaaggggtatttcaaagaacaaacatactactcatatagctaatgtactcggtataaccatcacccacgcaaaccgtaaaatgaaaggttttgcgtcatgggaaaactcacagctggaaaaagtcgctaagtctttaggtgtaagcctcagtgatttatttaaaatggttgaggacagctatgaggagaaacacgccggaaaatatattttcaacaaggaagaaatggagggagagataaccttttcccctgatacagaaagaacatattcagctgttaaaattaacgatcaatggcatatttttaaaacagatgatattgaaagcaatgacatttatgaagaatcgcggcaaggtgttttaagattttccgttgaaagttcagcaagagacaagtctaagccacgtatcgctcttctggatgacgataaggagattctgacaacaacagctgaactcctgaagaaaggcccatataaaattgacaccttcaccagttgtgaagatctgatagcaagaattcaatcaagcccatacgatggatatatactggactgggtggtgaatgataaatctgcatatgatgtttgtaagaaaatccgcgaatccaaaaaaccacatgcaatgattatcatcttaacaggacaaacaggagattttatagatcaggaaattgcagaagcgtttaatgacttcgacattctaggcttttataacaaaccgttgcgcatcgctactattcaggtcaatatagacaaatattttagaaaccgaacatga

SEQ ID NO: 201716 - DNA, 954 bp, Klebsiella oxytoca
  misc_feature (519)..(528): n is a, c, g, or t
atgaaaactgaacttgtagaaaacaatggaagtcttcttgaaaaccatacacatatcacttcttcatttgatctttcaaaaggatcaaatgagggagtgataaccaaactcgcattagataatgtgctaaaccattctgtaaagggattcaggaaaaattatctaattgagaaaaacctaaacattatcaatgggatgggcgttacgcttggtgattctataattggaataaatgcactggattgcataaaaaagattaataaaaacatacagattacgcttatacgaccagccacctgccactcttacgtagaggaaatatatagtattgccagcaatcttatagatagattggaatatatgccctatgatataaagcacctaagacgagatgcggtaaacattgatatcggaaatcaactatactggcacgattttaacaaccttgaaatgcatgattttttcctgaaaaatcttggggttgactttgaatcaattcctgacaactggaaatgcaannnnnnnnnngtgcttttctgtccgaaagcaagtactagtttgcgttctatcccggaaaaattccactatcaaattattgataatttatatacatcttttaacttacctgtccatggatttagtcccatcaaacatccgatgtacaaggacattagtaagacgtgctcaaatacagctgattttataaaagcaatagctcatgctcaacatgtttatacatgtgattcctctgccttacatgttgcctccggttacgatattcccactacctgtatatttacagcaataaatcccgttcttagaagcaggtattataaaaaatgtaaatctatctatataggtgatgaaatgactcagaatctgcatgagtcggaagaccctgcaattattgagcatgtagtttcacgatttgaggctttttatgaaaaaatttaa

SEQ ID NO: 201717 - DNA, 504 bp, Klebsiella oxytoca
atgaaaaaatttaaattaactcatttgattggaatggttctgcttttttggtccgcttcgccagctgtccaggcggtacagcctgattacaaatacggcgatctccgtgttactgaccaaaatgcacacagagaggttatcatcgacaaagcgacttttgattccctccctgtctcagaaattgttacatcaacaccctggcaaaaaaagtcgacattttcaggagttagcttcagcgacatacttaagtatgcaggcatgaaaggttctcgtcttaaagtgcacgccttgaacgactactgggtagaaatcccaatgagtgatgtagtgaactacaacatactactggccagtaaaattgatggtaaagcctttagcattcgtgatttcggtccttactttgtcatctacccggttgacgaaagacgagaagaactaaacagtccggtcaagttcagtaagtttgtttggcaggttgacagcattacggtggttgacaaatga

SEQ ID NO: 201718 - DNA, 1719 bp, Klebsiella oxytoca
atgaaactcaaaaaaaaaatatgcatccaatatcttatagcatttactctgctaacagggtctttttcctggatgtacaataaatacttttccactgagcacaatatcagttcggctggcccccaggaaaactacgcatggactatagcgaaatttgccatacgccttgctgaatttgaggccagaactgagcgccagttacgattaacgtcgctcagtaacagtgatatgaaaatggaactggatttcttattttccggttccaacgtattgatgacaaaaggtgatgccacccaatatctttacaaagaacagggttacgatgaaacgatatcatctatacatcagatgcttgaagttattgataatgagatgaaaaaaaacaaaccaaattataacattattctttccacggttaataaaattaaagataaaaacaccgaccttatcttcatagccgatcacgcggaggtcaatcaaaggactgctatttttgaagactaccttaaaaaaggcgattcttttaaaatcccgataattgttacgtatatattgttacttattatgctagtcatttcctttaggcaactgacaacactcaatcgactgctggaatctgaaaaaaaagcattcaataacaaaaacgctttcctgggtaaattgggtcatgaacttagaacaacactacaggctatagttggttcgatagagtcaatcatatactcgcctcaaaaagccccggatcaaaatacattgcacagacttgagaatgcagtttctcaaatagaacgccaaatgaatgacctggctgagtatgctaaaattgacaacggtgcacttaaaataaacaaatcaactattaacgttgctgatttagttacaaaggttgttaacgattgcaacgccaagtacaccaataaaaatatagaggcatcggttgttaatcttccctctgtcaacattaacacagatggaatacgtctttctcagattctggaaaacttgctcaccaatgcatttaaatatacagagcaagggtcaattaccgttgatgttacaactaatcagtcacatcacagctcataccttcatattaaaatttcagacacaggaataggtatagataaagaaaagcaaaaaataatttttcaaccatttgtaagaattgaaaatggttcctctcttatcccaggctctggaatggggctggctattgttgagggtatcgtcaaagcgatggatggcaaaattagtgtcatcagtgaaccaggtaagggaagtatatttacagtatcactacccgttgaaattaatagcatcgatagtacgacaaattccactccattgaacgtcatggagacttctttgaagggactgtctgtattacacatagatgatagcgaattaacatgcagaacaatggcctcaactttaaggagtgttggatatagagcagagtcaaccagctctgttaacagagcaattgaaaagcttatgcgtattccttatgacattatactatgtgacttacaaatgcctgtcatgacaggtgacgagctggtagactacattcgtactcgtgaaggtcctaatagaaatacacctgtaattttcatcagcgcttatcctgacaactacttacacgcagagataccgcttattgttaaaccagctagaattgcagatatcaataacgagatatccaaagccataagataa

SEQ ID NO: 201719 - DNA, 402 bp, Klebsiella oxytoca
atgacagatgaacttaaaacccgtacaaatagagtaaacctgacaattccatactctgaactggaggtaattgaccgtcacgtttcagcgaaactcgaagatggtgaaagtcgtgatacggcgaacagatctgcgtttgtaatggaaatgtacagactcggtctacgagtctatgaaagccgtaagaaaaaaggtgacggtgaagtttcgttgaatgatcaactaaagttcatatgcagaaatttactcattacctcttttctgacggaagctgtataccatatagaaaaagaaacagtagacaagagcaaggttattaaaagtgaattgtatattgatgatgaattcttaaccatgatcaatgaacgggtggaaggaaagataagtaaaatgttcaaatag

SEQ ID NO: 201720 - DNA, 309 bp, Klebsiella oxytoca
atgtttgagtttttgggtgtgtgcgtcagtacttcacatatgacagaaaaagatgcatcaatactacaggcgcttactactaactactgtgatagagaaaattataacgaatggattcattctacatcttatggttttatcgtcagaatgtattttttcaaaaagaggctactggctctaaaaaaagcaggtttatcgaaactattcaggaaaaatttactcatcatgtaccatgaaaaaggttatcaatgttaccatttcgattgtgatgccgactgctatcctgatcttgatattagtggtttatga

SEQ ID NO: 201721 - DNA, 822 bp, Klebsiella oxytoca
atgcgtttagcttctaaatttggacatactcactctattcggctggaccgtcctttaacaaatgaagaattgtttacagtagtaccttcaattttctctgaggaaaaacatacttcacgtagtgaacgttatacttatattccgactatcacgcttcttaataagttgagagaagaaggttttcaaccttactttgcttgccagtctaaagtcagaaatgatgataaacgcggtcacactaaacacatggtgcgtttacgtcgtgagggtaacaaccagggtaaagaagtaccggaaattattcttcttaactcacatgatggttcttctagttatcagatgatcccaggtatttttcgtttcgtttgcactaatggtctggtttgtggcgattcttttggcgaaattagagtacctcataaaggtgatgtagtagggcaggtgatcgagggggcatatgaggtagtcggtatttttgacaaagtggaagaaagtgttgatgccatgaagtctatacaactgacaaaggaagagcaaagattgttcggtcaggctgcattaacctataagtatgaagatgagcagaaggcaccagtaactattgaacagattattcatccaagacgatatgaagataaaaaggatgatctgtggactacttaccaacgtgtccaggaaaatattataaaaggtggactgcctggtataacggaaaaaagaaagcgtacaacaacacgggcagtcaaagggatagatgcagatgttaagctgaataaggcattatggttgatagcggagcagttccgcacatataaaaattag

SEQ ID NO: 201722 - DNA, 354 bp, Klebsiella oxytoca
atgagcacacaaaacgtcaacgtaaaaccctccaccaaagaaagcacaaccctccggactgacggttttgtgcgcaacattcattcccgtaaccctttcgatgtgatccgcgccgatgtagtgctggctcgtatggaaaaacaggcaagtcatgggtgtggtttgtactacgaaatttatgagtcacgtctgctgggtatggctatgaattacctggcaaagttgccgctgaaagatcgtcctgtattcattggcgcggcggctcaacggggttacatgctgacgctggcggaagaagaacgtgctcatgatgaatgtgccgacctgatgagcgagctggcagcggattactga

SEQ ID NO: 201723 - DNA, 225 bp, Klebsiella oxytoca
atgcaactatggttaaagaagatgctgacatcttgtggcgtcccggccgacgggacagtgcaggttcgtcgtaaaatcggcggtcgtttttgtctgggggccgtcgtttttgttgttcccgcgatgttactggagttgcctttgtgggggatattgcttacccaggcgctctacggtatttcgatgtatatcggcatttctctcgcattcgataagaagaaatag

SEQ ID NO: 201724 - DNA, 1005 bp, Klebsiella oxytoca
atgctcaccactttattctgtactcctgccagttcacaggcagaacgatggttggggttattatccgatctcggcaggtcaccggcgacaattcatgcctaccgcggcgcacttactcacttctttcacttctgctgccagcgggaattgccccccgagcaggcaagctttgaagatatcgctgcgtacattcgcccccagttacccggcatgcctcagcctgcagccagtgcaacgcttcagcttcgcctttctgctatacgtctgtggtttgactatctgatttacatgggggtaattatccggaaccctttaccgcgagcaggcaccccccacatgccttcagcaggacgcggtatggtccagcgaataacacgactgccacaaattccagatgacggccagtggtatcatctcttgggttatatatcaggctgttcattgcgcgatcgcctgatgctagcgctggcgtatcatggtgcgctaagacgctctgaggtgacaacaataaccatagaggatatcgatcctgcccaccggcttatacggattcgcgccgaaaacactaaaggcaaacgcgaacgggtggtctgctacggcccggcgattacgccggtactggcagcacatctaaggaacctgaggcaaacgggtattactggtggagcactgtcccgttcgttttctgacagaaattatggctcaccgctttcatactggagctggagtaaaacggttcgcgagtggtcagacaggaccagcatgccatttctgaccacgcacacctttcgtcacctgcgactgacacatcttgcccgagcgggatggaagctgcatgagatagcaacctatgctggtcatcgtgatctacgcaccacgcagatatatatccatctttcaggcactgatcttgcggccagaatggcgatgactgttgcggagactgaccggaaaatcgcagctatcatgtttggcccggagagagagaatgacaggcaagcatga

SEQ ID NO: 201725 - DNA, 2127 bp, Klebsiella oxytoca
atgacaggcaagcatgataaaggtttcatatacgcgcatttttgccgtgcagattatgacctgcacgctggctttagttctgagcagaaagaagcgctaagtacaagccataaacgctcccgtaactatggcaggtccggttccctctcttccctgaacactcccctgctggatatcgccaacaacagtggcaccggctgtagacttacccgcactgtaattatggcgatgctgactgaaatgcaaaatgtagggcaaccctgctggaactggcggaaagaccagtggatctccctgtttgataaatatcgtcgcggtaaaccacttatgatggcatttgcatatcatctcggtccattcacgtcgccgcttcagatccctcatgaaaatactctgtcgctttacgccagtgccatctacggtaacgcgattttccgggaccagctgaaccggctgtcggaagcactgatatcactgggctattcccctcagcacctgcggcatgccgtttcctcccccctgggtctgctgatgctactcaatgataatcccaggcttgaagagatgaccacagagcttctctggcaagctcagcagtaccacgataagcgcatatcaagacacgtagggaaaatttctcatgggcttgccgcacttggcattattgcaaagccggtacgaatgcgtaactacaccgaatggcatgagaagccggtcgaaaatatcagccctgaatgggtcgcatggtgcagacgctggcgtgagacatctgtgcttcgtcccagaacccgtgaaaaccagtacagctttattcttcgctgcggcctctggctggcaaaggagcatcccgaggtgaaggtcccgacagactggtctattgagacatgtgccagttttatcgctgctgtggggcgaatgaaagtggatgagctgtctctggggactgaacatggactgcggaagtccaaacgctccggagagcccatgatgccacattcacgtgcacattttatctattcgctacgacgatttatgagcgatttcgaactctggggctggggacgccttaatttcagccccgcccgtcaccttttcacgccggataccccactttttcgccgtggtgtaaatccgagagtgatagatgatcccgtctggctcaaactcatctgggccagtctgaacctgcgccacgaagacctgctcagtgaaattcactatcccctttccatgcttcaggcaatggctgttatctggacccatgcaggtttacgacagaatgaactcctgcgcctgactacggaatgcgtcacgcctcagtcagaagacattatcagggaggatggtagtgtcgtccctgccggaacactatgttatctaaacgtcccggcaggaaagacatcgaaagcatttgttaaacctgtctctatcattgtaaaaaaatatgtagacatatggttgaacgtccgtcccgtggatcaggcaaaactgaatgatgatcgcaccggagaaaaagtccgttatctcttccagtatcgcggcaagccggcaggcagcgatgtgattaatcggacggtcatcccagtcctctgcgctagagcggggctgccggttgaagacagcggaggcgccataaccagccaccgtggacgggcttcagccctgactgcgcttgccagcgtaccacagggcatgtcgctgtatgaactgatgcagtggtcaggtcattcatcaccacagtcaaccctgcattacattcgcatccgccctacacagctggcagcgtcatttgtgaaggccgatcggatagcccatatgataagcgtattggtcgatcacgatccggaagcggtcacgcccactggtccggcaacctattatgaccttggtgagtccttctgcatgaatccattctggagcagttgcccgcacagaatggcctgcattggttgcgattttaatctgctgaaagacagtgcgcgcggactgatgctggagagtaaaacatctatcaggcgttatctcgaagaggtcccgctcacgcctgatgagaaagccattgtagagcaggatattaaaaaagtagaacaggctcttgcaaaattaaccggtaagtccggaggataa

SEQ ID NO: 201726 - DNA, 2139 bp, Klebsiella oxytoca
atggatgttgaaataaactactgcaataacatagataacgcttgcattacactctctgaaaataaacttaacattaagttcgctccaaatggcacgggtaaaagcaccatatcacgtgccattttgcacagtgtttctcgtgatgccgctggtcttaacagtctgctaccttttaagtttcgagcagcgaatcccgacgaatttcagcccagtgtaacgggtacagagcaaattcaggatgtaatgtgctttgatgaaaagtacgtatctcagttcacatttcagcctgatgaactgattagtaacagctttgacatctttatcaaaacagaagcctacaaccaaacggagcgagagatcgactcgatggtaatggcaatccggcaggaattcagtggtaatgatgagcttgagctatttattacacatcttcaggagcttagtggtgcgttcaagctgacaagcaagggcttatctaaagcctctacggggatgaaggggttggcaggcggtaacaagcttcagcatattccctccgggctagagccttatcagccatttattcagagtcctcgtaatgtagagtggatcgagtggcagaccaaagggtatgaaaatttctgctcactctctgagggatgctgtcctttctgcacaggtgattctcacgaaaaagcagaacaaattagcaaagtaagcgctgaatatgacaaagcagtgatcaaaaatctggttggtatcatcacagtacttgataaattaggcgagtatttttccgaagccgcacgctcccgtctgagggaaataacgacgttacagggaggattggagaagaagcatgaagactatcttgttaccgtaaagcagcagacagaaaatcttctggccatgctcttaacattaaaaactctgaacagttttacttttaacgacgccggaaatattcgtgcctctttagcctcttttcgtttggatgtgaagtatttttccgagctgcaatctgataaaactcttgcaacaattgggcgactgaacgcctcgttagatagcctcctttcccaggctggtttgctgcaggggcaaatcaacaagcaacgcgctggcatgcagcggctcattcagaaacacaagaaggatatcaacacttttctggcatatgcgggttaccgctatcaggtagatatatctggcgatggagaacagtgccgtcttaagcttcgccatgtcgactataccgactatctcagtggaggtagccaacatttgagctacggcgagcgtaatgcgttttcgatcgttctttttatgtacgaatgcctggctcgtaagcccaacctgattattctcgatgatcctatctcttcgtttgataaaaacaaaaaatttgccatcctggaaatgttgttccgccgtgactcatctgagtgtttgaaaaaccagacggtactgatgcttacacatgacgttgagccaatcatcgatactctgaagtcggtgaagaagttgtttagtaaccaggttactgcatcctatttacgttatagcactggcacgataactgaattacctatccgcgaaagcgatattctgacgtttgcccaaatctgcaaagtggttctcgaatccgacagtgatgacctgattaagctcatttatcttcgcaggcattatgaaatcatggacaatcgaggtgatgtttatcaggtactttctaacttgtttcaccgccgagaggaaccaatcgacacacgcctacctctgattgaaggaacaggggacccgatgatggacccggagagcttccttaatggatgcagtttaatcactaaaaatatttttggttttgattacccccatatgctgagcttgctgaatgatcctgacaaaattctgtcgttatatcgaagctgcacgaatggctatgaaaaacttcaggtgttccgactactggaacctgaggccgataaccgtgtcattcgcaagtttgtgaatgaaacctatcatattgaaaacgagtttatctgccaactagaccccacacgattcgatcttatcccggaatacgttattgttgaatgtgacaggctgctccttaatatcggggcgtcgaacgatgatgctgaactggaaacggcctga

SEQ ID NO: 201727 - DNA, 285 bp, Klebsiella oxytoca
atgcggcgcttcgctggggcttgtcgcttcgtctttaaccgtgcgctggcgcttcaaaacgaaaaccatgaagcggggaacaaatatgtttcctacaccaaaatggcttcatggctcattgagtggaaatcacaccctgatacccagtggctaaaagacacgccatcacagccgttgcagcagtcgctcaaagatctggagcgcggctacaagaatttcttccagaagcgtgcagcattccctcgtttcaagaaacgcggccaaaacgatgcccgcaaggcgtga

SEQ ID NO: 201728 - DNA, 312 bp, Klebsiella oxytoca
atgggtgacatcgttagcaaagcttgtttcatcagtaccggtagtagtaaaacctgtatcggtctttttactcagtcggaaaaattgtccctgaaagcgaatatattggttgcgggcactaaactggaatgggccgtcttcatagtcacccaggaacacatagccagagctatcaaggaaatgaacaaagcgagcctctttgtcagcctgcgcagcatcaaatgcagtttcctgggctgtaagttgggtggagtaacgagattcaaaatccgtaagttttacggtgaatgcagattccatcccaaaccatga

SEQ ID NO: 201729 - DNA, 273 bp, Klebsiella oxytoca
atgcgtattgaagaaatgaaagtactcccgaaattataccgggtcatcactgttgagcttgacgttttgcgcaacgggttcggggctaactacggcgtaatttacgatattgataccatcgttaaacgcaaagttcgccgcgtattagataccgatggttggcgttgggcattggtccgtgagtaccacaatcaagagcaatgggactacttctttgagtatgacaaagaatgccttcatgaacttaattacacgcttggcctgattaagtga

SEQ ID NO: 201730 - DNA, 207 bp, Klebsiella oxytoca
atgccgatgaaatattcatggtttcaccatcacgactgcacaactcagcaggctgatgagctgatggcgaaatatcgccagcggggcgtaagggtcgagcgcagcctgaatcaggatttaatcacctggaccgtcagtgcgcagctggtggaggacaaaaatcctccgcgtcctgcttctcgcacccgaaatcggatgtgggggtga

SEQ ID NO: 201731 - DNA, 924 bp, Klebsiella oxytoca
gtggaaacgacagacattgttcgaaaactttttgacggtgttgttcctgagagagcatcagagattgaatctatcgctaacgattatgatgcccagttccgactgattgctgaccgcgaaggatttaacttagatgctggagggttctccgcaatccagtacaccagcagatcaatgcgtcaaatgtggcttttcggttatgcgggaaggcaggcgttacattgttattcttcgttgatcgtattgttcaaatcattcggtaccactctcgacataaacgaaatcaacaagattccagatcaggcagcagaagatgaagccttcaagtcgatacttgatgcagtgaaagacctgagcactgcatttcatgaagacgactttgaatggccagtggctattcctgatcctgagaagggtaggccgtcagattcagagcgcgctgcagtatatgatctcacgtgcatggctacggcatatgtatttttacatgaactgaagcacgtaattttctcagctgaaggaaatgcaccggaagacccgaaggacgaagaatatctgtgtgatcagttcgctaaagatatgatgatatccaagatcgatcagtacgccgcaagcagtgggtatcccccggaaaaggttaggatgaagcgtatgatggggatcgctctagcatccgcctttatccttttcgcaacaggaagaaaccgcctcgcaggttcagagactcatcctcccatttacgggcgttggtcggcgactgtgcaagatgtcaatttaccggaagatgactggttctggctgtatttttcctcattcgcccttgcgttgctgaaatatcattcactaaccattcagccgaagatcgtaaaggattataaatcgctatgctttgacctaatcgcagatcttgaaaatggcatataa

SEQ ID NO: 201732 - DNA, 1254 bp, Klebsiella oxytoca
atgatccgtttatcgactaatcacctgtcaggtaaatcgacattgaatagcattatttcagaggacgatgagttcggcctgcttgacgtgcaaccgctaaaaccaaaatcaggcttagttaacctatatggtaatcaattttctgaaatcgtagcgtattatgaactgcatggtcggcttcctattgaaggaaatacggtatctcttgatgaaaagcgccttgcaaggcgcttaaagagtattaaagagaacccagacctgtgtttacaactaagatccatagatttttataacttacttgaatcaaatagttcggactatatacataccaacttggctgcagagtctgaatcaccctcttatatcaataaatcagaacttgttacctcattggaggacatatttgcagatgacgatgacgaactattaaatttcgatgagcctgatattttcagtattacgcatgtttcggttgatagaaaagagcaacccgatgaaattgctcagcggcagccttgccccgatttccagcggtttgagcctctttttcttcaactacggggtggtttaaaaattggcattttttccttggaacgttttacgcacaagttgaaaattagcgaaggcgatttttttgttctaaacggcgtggttggttacgtgcatagtgctggtgagcgcctgcgtgaatacagtacttataatgcgcgtttacacctgatatttgaaaatggcactgaaatgaatatgctatatcagtccttaactcatggcctagtgagggacaaagaagggcgcaaagtgcaactcaatggtcagaaacttataccttcagatgtttctgttccatctggtttagtttatatacttgcaactaagagtaaagatgcagcactcataccttataaacaaaatttatacaaaattggctttactgaaacgactgtagaacaacgaataaaaaatgctgaaaaagaccgtacttttcttgaggcccctgtcagaattgtagccaccagccaatgtttcaatttgaatgcacaaaaacttgaagctttagtacatggttttctagcaactcgtcgccttaatattacacttaaaagtcatagtgggcagctttatactccgaaagaatggtttaatgtccctctgactacagtacaggctgtgatccaatatattgtggatggtactatttctcaataccgtctggataatacaactggaaagattgtttcgaaacgttgctag

SEQ ID NO: 201733 - DNA, 273 bp, Klebsiella oxytoca
atgatggaggatcttaaaaaaacgatccgactgcgctgtgcattctgccgctcggaacagtttgccttaccttacgagggttactcccccccaagtcatagcgttgtcgtttgtgccaactgtgggagggaaaacgacgtcacatctctgctcatcgttgctaaatcgaaagggatggaaatagctgaagattatgctgatgaactagttgaaaagatgacgaaagatctgttcaaaacttttaaaaacagtaaattcataaagataaagtga

SEQ ID NO: 201734 - DNA, 543 bp, Klebsiella oxytoca
atggacgcggagaaaattcagtcagatatagatgctcttttgacatatatgaacgatgacatggagaacctgggagaaacgatcaaaactgtttcatttggatttgatatgggccagagcgatcgcattgctattgacgagcggcttcactggtcggaagagtatttattcaaaatcatcaacatctgccattcccgttctcttctacgtaaggactacggagattttgaacatgtatccctgacagaagaaggccagagcagggctatatcagttaaacatgggaaaaatcgttcctacgagttaggagccagcatgcaaatcgcgacgctaaatgttcatgggccagcacaagttggtaacggtaatacgcaaaacattcacaatgtatttaatcaattacttcagcagatcgagaaatcctccgcttctgatgaagaaaagcaggaagctaaaaaccgcttggctaaatttttggaacatcctttggttggctctattgtcggaggtcttgctggttctcttccaggtctaatgggatga

SEQ ID NO: 201735 - DNA, 858 bp, Klebsiella oxytoca
atgataatacaagaagaacataacatcgatttttttaaaaatcaaatgcctaacaagccttattgtacaaataacctcgatatgggattaagcataaggaacaaggcaaaagccttagaaatgctgtatttacaggcaaatcagccagcaatccaaacttgcttactctttgatttagataagaaaaactcattctatacatttgagaaggtgggcttacccatacctcactttattacaaaaacaccaaagacaggtcgttgccattacgggtacatgcttaaagccggtgtttgtaagacacaacaagcaaggttgaagccgttgaagtatgccgctgccgttgaaatggctatggctaaaaaactcaaagcagatctggggtttgctggattgattacaaaaaacccactcaatgatcactggtcgccgttctggtcaggtgctgacctttacgacctggattatttagctgattttgtggacttagaaaagcctcaaatacaagagaaaaaaagcgaggcttatggtttaggtcgcaatgttaatttgtttgaagatttacgccaatatgcttacagaacggttttaaatttcaaaaaaatatctactttcgagaaattcgaaaacgaactattattaaaagcacagggtttaaatactttttgcaatccactaaatccgttacaatacaaagagttaaaggcaacagcaagaagcatagcccgttggacctggaaaaattttgatagccatacattttcactaatacaatcttcaagaggtgcgaaaaataaaaacaaacccaagaagagtaatgttaaagaaatgcttggttttataggaggtgaaaaatga

SEQ ID NO: 201736 - DNA, 270 bp, Klebsiella oxytoca
atgagaagaagcacaataagaaaaggtttaactcaaaaagaaatggctgaaagatttaatatatctgttaaaacggtaaaaaaatatacagccgaacctcgtgaacaatacgaacaaacagcggctgatcgtcgtcgtcaggcttacgaactacgaagccaggggctgaaatggcaacaggtagccgacaaaatgggctgttcgtatcacggagccgttgccctgtatcgccgttatgttgccttagatatgcctaaaaacagcctgtaa

SEQ ID NO: 201737 - DNA, 606 bp, Klebsiella oxytoca
atgaaaaaaaataaattagtaaataaagaaaattactcaatattagagactttgccggaagatccattatttgaaaataaatcgactttagaaattgatttaaatcaattcgatttatttaatagaattgcaaacgaaactgtagaagaacttataataaaagaagttaacgatcctaatgaccgaagcgataaaagcaatggtgttaatttaaatgcaaaagtttatgtagaaaaagaaaaaaagacttcattaaaaaaagattttgttattacatttgtagataatcttgaggctttagcaaaattaaatttaaaacctaatgagtttagaattatcgtcgagattgtaaaggttatggaatacggaaatttaattaacctttcacaatctacaattgcgaaaaatttaaatcttgcaaaatcaaatgtaagttattattttaaaaaccttaaaaagaaaaatatattagtagaaaaagacggacacgtctttatgaatagtaatattttttctaaaggattagctcatcgtttggacgaagaaaaaagaaaaaatttgaaatccgcacaagtcgaagacgataattttaaaaactcattttaa

SEQ ID NO: 201738 - DNA, 1173 bp, Klebsiella oxytoca
atggcttatgcaattttaagagtggaaaaaacaaaaaatacttcaatcgctggaaaaaattctcacaatatgcgattgagaaaaacacataatgcagatcctaaccttaaatcccaaaaccgaattttaatcggttctggtgatttaagaactgatcttaatgcaaggttccaagcaaccaatgttaaagctcgtaattctacttctgttgtttgtaatgaattaattttaactgcttcccctgaattttttgaaaataacaaaaaattagaggattgggtaaaagttcaaatggagtatttgcaaaatgaatttggggaaaatgcaattaatgcagttttacacttagacgagcaaaccccacatattcacgcttttataactggaatcgaatataaaaacggggaatataaattaaacaataaatcttatatgaaaaaatacgaaacaatgcaggatatatattttaaatataataaaccattgggtttaattcgtggggttaaaaaagaggtttctaatgcaaaatacaaggaagttaaagaattttacagcgatattaaaaacattaaaaaagaaactgaattagaaatcgaaaacaataaaattgagaaaattagagttattgaaacagaagaaaagaaaaaattattcagagatccggaagtagtgcctaagcactacacaggagctgaggttaatcgttacatacgaaaggctctaaaaccttacaagaacgaacgaaagcccttgatagctcgtctaaacgggtttaagagccgtttagagcattcagaggctgagttgtcagatctccgtcaaaacttcaacagaagagtccaggaacgggtacaacaggagcagaagatggcagtggccaaagccacggctgagcaagaacaaatcattcaaaataaaaacagaaaaataaaagatatggagttggaaataatagaatacaaaaggcagttaaaggaaaatgcttcaatctctcagagatatgaaaaatataaaatcaacagtgatgttttagatctaatacaagagcataaaccggcagaatttaaacaactcttcaatgctgctattgcagcagcagatgccgaatattcacagaaacagcaaaataataactacacaccccagaataagccaaaggctttaaaattataa

SEQ ID NO: 201739 - DNA, 813 bp, Klebsiella oxytoca
atgaataaccccaacgggaaaatttactggattggcggctcagttgattattgtgatggtctggcacaaatcacatccgggcatatggaagttaacggacataacgaatggactggcagaacgaagcccctggtagaaatcaccggctcgaatgcatcgctgaccgtctccggggcaatttttgtgcggggtaatactgatactcaatactatatgtttcagcaatatcagaaacgacaggtgacactgaaagacacggtttttattactgacggtgtgaatgtaagtaagggtttgatatctaatcttgaggtggtgaaaagcaatctgacattccctaacgatgcagccaaaagcattgcttataattcatctgatgaaagcctgctgaccagcaataatgccgttgttgatttctcgttatcggcagcggcaaaccatacggtatcagtgacagatggtaaactgacagtgacggctgttaccggcggcaccacttcacatctgtatatcgatatacccgttatgggtaatacaaaggttggtttcaaattagttgcgtcaaatacatcctcactgggtgctatatccctgaacaaatctctgcttactttgagcaaaaggcagatatccgacctctcggcgtcaggtacggcatcatggccagccagcgctgccagtatagcgggtgggtcggtgacgctctttgatatccccagacaggccgcttttctcaggctcgattttaacgtggcaaatctgaccacgggtacgagcttcattattgaatcgctgaaaatgttcacatattaa

SEQ ID NO: 201740 - DNA, 594 bp, Klebsiella oxytoca
atgcctttcgtaagtgtcgcctgcggtgatgatatccatcaggttaatattcccgctgaacaggcacccggtgaaattccagccccagcctcctgcgccgtgtgtgaaaatcgttctgaacccacgggcggctatgttgcttacgttatggagacacgcaccgttatcattactggctgtgctgtcacgaactgcatgaaaaaggtcaagtttcttttcaccactggtgagaaacaaaacaccatcaaacaacgctcccaccttgctggccgccacggcggcattcggcccgctgcccgtaatgttgaatactttgttatctgtatacgttccatcagggtcaacatacactccacaacccgatatagcgttaagcctcactcgggaagcatcaatcgttatggttcgggttatccggtacggcttgttgagttgtacgaccaccggagtataaacgccaccggacataagactggtcgctaccgctttgtttatcgcatcttccagagcgtcagaatcatcctgaacagtatccccctttgcaccgtactgctcaggggtaataaagaatacggttgcaaggtaaagatctaa

SEQ ID NO: 201741 - DNA, 321 bp, Klebsiella oxytoca
atgggctttccatcgccggctacagattatgtagagagcacgctgacagtgagctcgctgtgtggtattggagcaaactcgcgagtcatcagcacagatagtggctttgctgttcttgatttgtctctgaaagctaagctggggagcattgtcctgataaggcacgctgggttcatggaatttgcgaaaatcttaggcagggcgtttatcacgatggagggagaagctatcgaaggggaagcgctggacgacgtagaggtgatcggcgttgtcacgtatacgattcatgacgcaaggcaggacgataacccaataatttag

SEQ ID NO: 201742 - DNA, 240 bp, Klebsiella oxytoca
atgctcagacagtcagacatcaataacgcgtttcgtgaatcgattcttcgcaactcgaagggctaccagtacctgcacacccgggatttcgtttcttcgctgcagcggcgcggcatccacttcacggagtccgaggccaatcgctggatagagcgctatcagaactgctttgctgacaagactccggaccacagcgaaaaccgtttgtggattttgagaaacatggggagggtcatgtaa

SEQ ID NO: 201743 - DNA, 3051 bp, Klebsiella oxytoca
atgacgatcaaagtttatccttcaagaatgcctggggagccattagaaatacatgaacatggagaaatgacttttcatgaatggatgctttcaaatgtaaaagaatatcgtgaattagagaaacctccaattgcagtagaaattggtggcgttagcattccacattcagaatggccgctttgctttatcaagccagaaagcgacatcagaatttatccagtaccctttgcgagtgctgcagccgttgcagcatgggctgccctggcggttgcggccgcatctgctgtatatgtcctcatgacaatgtcaaatatggacactggaggatattcatcgtcttccgggagaggattagatctcaatccagcaaaagcaaatacagcaaagctaggggatccaatccgggaggtgtttgggcgctatcgtatttatcctgattatgttgtccagccggtgacgcgctttgatgcaactgaccctactaaaatgacagttgagatgttcatttgtctggggtatggacaattttcttatacggcaggcgacatacgagtcggcgatacaccttcttctactttgtccggattcagctataccaactatgcgcctggtgctgatgtttctggtgacccacgaagtgaaaactggtttaacaccactgaagtaggtggtacgtcgagtggcactggcctggatatggcgcagacagcaccagactcaacggatattaacgctgacagtatgactgtctctggcgctacggtaacttttaacggacttaacgacgataatgacgacgatgaggggaatacacttcctgattcctgggttgccggtactatcatcacgcttatcgccccgacaaatttctttatcacaacagtttctggatcgagtgtcttatccagtaacacgcttgaagaaatcaatcccttttctgggatgccggtcaccctggaaattaacggtgcagaatatgaattagtgattgctaattatacgcctaagcaagaggctgtccctggtgtgggtgggtcatctgcaattttgcgtgcaagttctgcgccttctacttacgacttttcagttactccggaaatattctctctcacctggcagggcattacatattcagtctcacttattgcgaattatgcaagcatgtctggcctgttagttgcaattaatgaggggattactggatccggtctggttgcgcaagatgatggcggagttgtaaaaataatggagatatccagtccatggcagggaggcagtatcacatcatcctcactccctgtttcagtatttggagcagatccagtatttacggaagggaccgcttccagcggcgggagtccggcagtaacggctaatgtgacacttgcttatggtagtgctacaggaactgcattttctggagtacctgaaggcacgcagcgtctttctcttgcacatagtggaaatgaatatcgaattattagcactgacggtacaactgcaacgatagaacgattgattaacggtagttcagacccgacatggccaggtttttatgctcgtaccatgatcgattatcaggcaacgggaataaacgataatgacacatggctgggacctttccttgtctgccctcagaatgaaatagttgatgcttttgaggttaacttttctttcccttccgggatctgtggtttcgatagcaaaggtaaaaagcgagttcgccacgtcgaatgggaaattcagtatcgcatcagtggaacgggatcaggctggacaagcaggcaaggtgtttatgcccttcaaaacgtaaacgggcttggatacacagaacggtttgaccttaccacgccgggtttagttgaagtacgttgccgccgtaggaatgaacaggggagtaacaacgcgcgcgataacatgtactggcatgcattgagagggagattactttcgcgaccactctcatatgccggtgtgactttgatgggggttacgctcgaaacaggagggaaattagcagcccagtctgacaagcgggtgaatgtcgtcgcaacgcgagtatataactcaggtgcagcaagaagcatttctggagccctttatcatgtaggtaactcccttgggctgaatatggacactgaggctatagatactcttgaggactcagtatggacgccaaactcagagtttttcgactatgcaacgagtgacagcgcatctgctctggaaatgtttcagaaaataacgaatgctggcaggtcatatttctttcttagtgatggtcttgcttccgtggggcgagaaggcgttaagccgtggactggaattatcagcccacatgaaatgtctgaagaattacaaaccgcattttcaccgccttctgatgatgattatgacggagtagacgtaacgtatataaatggcacgacctgggctgaagaaacagttcagtgcaggacatctgataatcctacaccagtgaaaattgagaattacacacttgatggtgttctcaataaagatgatgcatatcagataggtatgcgccgactcatgaaatatcaacgacagaggctaacattttcgactaccacagagctggatgcactttgttataactatggagaccgaatcctttttactgatgacatcccaggaaacaaaactgttagttgtctggtaacagaacttcataccatcagcggcgtaacgacgatgaccgtcacagaggccttagactggacatttgaaaacccgcgggcaattttacgttaccaggatggttcggcttctggtctgctggtagccacacaagtaggtgattatcagttatcggttccttaccaaccagagtttgatgacatcattttgaatgatccatgcatagagccgccgcgtctaattttttgtacatcgacacgtcgaacctacgatgctcttatagaggaaatagccccacagtctgacggaacttgtcaaataaccgcaaaacagtaccgagacgacttttactcttacgacaatactccatatcccggcgatatctcctga

SEQ ID NO: 201744 - DNA, 405 bp, Klebsiella oxytoca
atgcctgagataagcggaggcgaaatgtttcatcaggagaaatataaatcagttatctgggtaaagggtggacgaacttatcctgaacttgactgttttggcctcattaacgaggttcgcagcgatttaaatctccctctatggccagactttgccggagtcactaaagataatggtggactggaccgtgaagccaaaaagctcatgttaagtctggaaagttgtgagccttgtgaaggggcaggtgttgtctgctattcgggatctacagttactcatgttgcagttgtcgtcagaataggtgaccaactgagagtagcagagtgtaatccacagacaaacgtaacttttctgccgctttcaagattcaaaaggcgatttgtcaaagtggggttttggcgatga

SEQ ID NO: 201745 - DNA, 483 bp, Klebsiella oxytoca
atgacggtacttgacaggctctatgccagtagtggttcagaaattatttatgaaacgcttcagataaatgttggtgattcagttcactatattgtcaaggggtatgaagatatcaccgcagttacggaaaatggtgataccgtaacattaaaagcaggagcgatagatatagccctaccagccaggaacagtgatggaacccaggatctgcagtttgctataggtaatatcgatggttcaatatcgaccatcattcttgatgcaatagataatctcagtgagtcttcgttgacatatcgcaactatatttcaaccgatctctcagctccatcatcaccaccatacacattgcagcttaagccgggttactggactgcgattgaagcgcaaattacagctggttatatgaacgtgcttgatactgcctggccgcgaaaccgttatatcttgcctttctttcctgggctgcggtacatgagttaa

SEQ ID NO: 201746 - DNA, 480 bp, Klebsiella oxytoca
atggctatgtcaactccgttaaattacccgtccgatgcactgccttgccctcttaaagaaaactttgggctaaagccagtttcacctttgaaacgcacacaaatggttacggggcggaccaggcagaggcgtgcttatacttctgtgccaaccgagactgatatagcctggatttttactgatgcccagggccaggcatttgaagcatggtacagggacgtaatcagcgacggtgcagcctggtttaacatgccgctacttacacctgtaggccagcgcgattatgtatgtcgattcaaagatatatatgaaggaccaactccagaaggtggtatgttctggagatatacagcaacgcttgaattgtgggagcgccctttagttccgccaccgtggggtaactatccggagtggattgcgggaagctctcttcttgatatagcacttaacagagaatggcctaagtatgacggtacttga

SEQ ID NO: 201747 - DNA, 2514 bp, Klebsiella oxytoca
atggctggtaaatcactcggcacgctaactatagatttaatcgcaagagttggtggatttgtttcagggctaagccaggctgaaagagcatctcaaaaatggcgtaaacaggtgcaggctgatgcaaaagcagcagcagttgcaattactggatttgccactgctgccagctctgctgcaattggtgttggagtcgctggatataatctgctgaaaactacatcaaaacagattactgaaacagatcgctgggctaagtcgctcaacatgtcaactcagtctttattggcgtggcagtacgcagctggaaaggctggtgtatcaggcgaccaaatggccgatattttcaaggatattggtgacaaaattggtgatgctgtactcaatcaatctggagaagcggtagatgctcttaacgcattaggtttgtcagcgaaaaaactggctacggaatctccggataagcaattgctcgccattagtaatgctcttgggaaaattaaaacaaacgcggaaaagactactatccttgaaagccttgggaatgatctttccaagctactgcctttgcttgaccaaggcggcgagaaacttcgtcaatatatggatgcatcaaaacagtttggtgtggcacctgacgatgctgatattgagaagctagttaaggttaacaccctttttgaggacatggagacacagatcaatggcgtaaaaattgagattgcaactggcctcgcaaatattgacctttcaggactgcaaaacgcgattgccgatatgggtgatgtgtttaaagatccacaagtgatacagggattgaccgaccttgttggtggtgttgtagatctggccacatggcttgtgaaggtgggtagcgaagctggaagactcattgatctgtataagggggggaagccggttggaaacgatgcatcagtatccgacatagagcgccgtatccgtaatttaaatgccgatctggatgacaaaggctggatggcagacatgaaccggatcggtatggacttagctgggaaagaagcagaaagggctgaattgcaaaagcggctcagttttttgaaaaattcccaatttcctatatctgacaatattcctcaaaaaccagcccaatccaattataagcttgataatggcggaacaaatagtaaaccaaaaaccgacccgagagtagcgcaggcaaaaaaactagaatctgcctataaatctcttgaaatgagctaccagcggcagatttccttaattgataccacaggtaagaaaaatcagcaggtcacagagattgaaaagcttcgctttgatttaacatcaggaaaattaacgggtatcaatggcgctcagaaggagagacttgagcaattagctactgaagttgacaggctaaacgctctcaaaaaatcgaatgaggaaaacctgaaggtcgtagaatttacggcgaaccttcaaaagcaaaaccaacttgcacgagctgccaatgatgctgattttgtaggggccggtgctggtgaaaaaactcgccagcgcatgaaagaaatgctggatatccggcgtgattttcttagccaacaggcggatctgcagaaacagtttcaaagcggcgacataagcaagtccctctatgatcaggagactgacgcgcttcagaaagctcttaatgaccgacttgaaatacaggaagattactataagcagtctgatgagcagaagaacgactggcaaagtggtatcaatgatgcactgaatgactacgcagatagtgcatctgattattaccaaaccgcagcagatgcgatgacgtcaattctgaatggtgctactgattctgtttccgaaaatatctacgacctaatccgcggtacagagaatcttggcgatgcctttggcaatatattttctagccttggtgagactgtcatcaagacgttatcggatatggctgctcagtggttagtattacaggctgttcaattaatcactggaaagtctgccgcgactgctcttgttggtaacgcccaggcgcaggctattcaggcgcagatagctgcgtttgcatcaactgcagcaattcctatctttggtcctgctctggctccaggggccgcggctgcagccgctgctttcacagagccccttgtgggtgcggtggcagcctcggcgctctcaggtatggcccatgatggcgtggactctgtgcctgaaacaggaacctggctccttcagaaaggtgagcgggtaactactgcaaaaaccagtgcaaaacttgatgccaccctcgatagagtatcccgggacacaacagcgggtaatatgtatgcacctaactttagttttaatgtgaacggtgatccctcggatgctcaaattgcgatgatgaaaaaagcaacagctgacggtgctgaagccggatacaaaaaggcggccagtgatttggcgaatggtaaaggggatatggggaaagctatgtcacgctggactgcgaaaaggagaacaggttag

SEQ ID NO: 201748 - DNA, 288 bp, Klebsiella oxytoca
atgaaaaaaagaatacttttggctcttattggttttaatttattaccgctgccatcaatggctggtaccagtaattatgataatcaattgaaattgatttgtaataatacaggtggagaggaagataaagtttgtgttcaattagtttcaagtcttatatcaaccgcgattgatcaaggtaaaatatcatatatttgtgataaattaagccaaaatggacgtgatgtaaccaaggaacagaaatgtgttgatgctaaggaatttgagaaatatttcaacaagaattaa

SEQ ID NO: 201749 - DNA, 372 bp, Klebsiella oxytoca
atgaaaaagttattagcggtggcgcttggtgtgttgatgttatcaggatgtacgtattcaaaccattatgaaagcggatcaaaaatttcagtagacgatgtgaatcagattgttaaaggaaagacaaccgaggctgaacttgtttccatgtttggacagccattcgcaaagtcggtagttagcgataacgagatgaagtggacttacacacacaatacggtttcagcatctgcgcaggcattcactatgaaaacaacctcagacgcagaaatgaccacactggatatccttttgaaagatggtgtcgtagtaaactacgcatacagtaagacaccactaaaccccacaatgaagatgacaacttctctttga

SEQ ID NO: 201750 - DNA, 264 bp, Klebsiella oxytoca
atgaatggtattggcggccgcacaatcgctgaagcacgagagtgtatcagtatccatgagttccacatctggttaaaatatcgtgagaaatacggacaactcaaccagatgatgcggacagaatgggctgcggcgctgatttcatctgtgctggcgaacgtaaaccgcaccaaaactaaaccacctttcaagatcaccgacttcgcccctcacatcaatgaacctgcgatcaagcttgaagatgctatcaatacctggtattga

SEQ ID NO: 201751 - DNA, 381 bp, Klebsiella oxytoca
atgaaattgacgcttgatagcctgaaaaaagtgggtgcatttaccgggcgaccagtagaaaaagaaattgagtggaaacagggtgacgaggattataaagcaacggtattcgtgcgtcctcctggctaccatgtagcgatgcaaggtattcaggctgcagccgggaaagttgacggtgtggcagcatacattgctgcagctatctgcgatgagaatggcaagccgatattcacgcctgaagatatcacaggtgaggcagatcctgaacttgggccgctcgatggtccgctgacagtcgcgctactggttgctattcaggaagtcaatgaactgggaaaggtgaagagctcagcgcagaagacgaattctggtgcgaattag

SEQ ID NO: 201752 - DNA, 483 bp, Klebsiella oxytoca
atgtctgtgttgacacaaggcactcaactttacgcgcttatccgcggtgtcgttcatgaaattgaatgtatcaccagttttaaccctggggccaacccggcagaccagattgaagatacctgtttaagtgaaaggaacagcagaacgtataaaaaggggcttcgtactcctggtcaggcgacggtaactattaatgctgacccggataacgaatcgcactatctgatgtggcagcttgctgagcaagatgaatatcaggatgagcttattcagtgggctatcggctgggcagacggtgaatctgtcccaacagtaactgaaaacgaaatgcaactgcctaccgatcgtacctggtatacgttccatgcctatgtgagcgattttccttttgacttccaggcaaacgctgtagttgcgacgagcgcgactatgcagcgtagcggtcctggcgtctggatccgtaaagtcgaagcgaccagttaa

SEQ ID NO: 201753 - DNA, 366 bp, Klebsiella oxytoca
atgattgctcctgtctttcctgtttgcgcggctagtccggaagtcaccgcattactcggtagcaatccgttaaggatttatccgtttggtatccaggacgataacgttatttacccctacgcagtatggcagaacattagcggctctcctgaaaacttccttaaccaaagacctgacgcagacatgttttcacttcaggttgatatttatgccaatacctcagatgaagtcatggcggctgctaaagccatgcgtaatgcgattgaggtaaaagccaacatagttcgctgggggaatcagacgcgagatccggaaacactgaagtatcgattttcattcgatgttgactggatagtcaggcgataa

SEQ ID NO: 201754 - DNA, 483 bp, Klebsiella oxytoca
atggctgatgctgatggtgttgaatttaaactcacaggcctggattcccttctgggcaaactggaaacaataaataccgaaacaaaacggaaaacagggcgttctgcactgagaaaagcaggtaatgtcattgttacacaaattaagcgaaacgctgaattacttgatgatgtgaaaaccgcacgtaacatcgcggataatgcggcgctcaggtggaatggccgggttttcaaacaaaccggcgatctggctttcagaataggcatccttcagggggcagttctgaaaaaacaccccagcctggcaaaggatgcacccacgccacactggcggttactggaatttggtacggaaaaaatggctgcaaaaccgttagttcgtgcagcggcaaacgcccgattagtagaggttttcaatacctttgcaattttttatgaagacggcatcgatcgcgccgtaaaacgagcacaaaagaaaggataa

SEQ ID NO: 201755 - DNA, 333 bp, Klebsiella oxytoca
gtggaatttgcaaaactgcgacaccgcatcaccatccagcggcgaactgcttttcagtcacccaccacaggcgcaatggattacgtgtggagcgaccttgcagatgtgtggggtagtgtggttgcttcctcagtcagggactttattactgcccaggcggctaacgtaaaagttactgccagaataaccatccgataccgggaagatattcaggaaaaagaccgtatcctgtttcgcggtaaaatttacagcattgaagggattcttcctgaccctggtagtggactcgaatatcttacgcttccgtgctcagagggggtaaaagatggctga

SEQ ID NO: 201756 - DNA, 198 bp, Klebsiella oxytoca
atgaacgagcagcaggtaaacgaattaacagaagtgctgaaggcactggcggcgtctcaactcaaactgtcgggagcgataaaccgcctggcgcaggcggatgaaaccctgatctctctgattgcaaaaacgctaattgaagaatctgaagatgaaccacttccaccgcaaaattatctgagtggtaagccgaggtaa

SEQ ID NO: 201757 - DNA, 327 bp, Klebsiella oxytoca
atgattgaactggtgacgctcgaagaggcgaagatgcatctccggattgatgacgattacggtgattctgacctgaccttaaaaatacagggcggaagcgcagcaatcctttcttacattcaggggagtaggcaactggtcgttgatggctctggaaatcttatcgatggtgagccgcttaccagagttcagacagccctgttagttcttcttggctatcttgaccgtaatcgtggaggcgaagaagaagagaagctgaaacagggtgagcttcctttctctgtatcaatgctgatttatgacctccgtaagccgaccatcatctaa

SEQ ID NO: 201758 - DNA, 885 bp, Klebsiella oxytoca
atgaatgaacgtgaattatccctgattcaggcgctgggtgaagagtttggagcagccattcaaaaaatggcagatgactttcagaaagcgttggaaaaaacagccagcaattttgagaggcaggttgaagatctgagaaattcaattcctgaagctcaaacagcagaactccctgatatttccagaatggtatctgatgctgtaagtgccattgaattacctgcccctaaagaattgccagatatcaatcaactagtgaatgacgctgtgtcgggggcagttaaacagattacggaatccattcgaattccagaggatgggaaaagcgtcacggtagaagaacttcgcccattagtagaagaggttgtatcagcatcacttcctgagccggtagatattgaaaagttggcagaagatgtggctgctaatattccatcacctgaacccggctgcgatggcaaagatgctttgtctattgagcttgaaccatttatcgatgagaagaaaagctaccctcgcgggacctacgcaacccataacggcggactctggcgctctcatgaaaagacgcacggtatgcgtggatgggaatgtatcgttgatggtgtgtcgaaggtcgatatcaaacaggataaccagcgaaccttctcaatatcactcgaaagagcgagtggaacagttgaagttaagtcctttgacgttccggtaactatttatcgtgatgtttttaaagctggtacagagtatcagcctggtgacaccgttacatggggtggctctatgtggcactgcaacgaacctactacggacaaaccaggtgaaacaggctccaagggatggacacttgctgttaagaaaggtcgagatctgagggataagccatga

SEQ ID NO: 201759 - DNA, 1353 bp, Klebsiella oxytoca
atgtggaatccttttagacggaaagagaaagcactacagcaaccatcatctcgcggctggactccgattttttcctttgtcagagaaccttctgcaggtgcatggcaaagaaacatggaaatcaggaatgaaacagttctttcctattatgcggtgttctcctgcattactttgattgccagcgatatttcaaagatgtcgccagcaattcaggccaaagattcgaactgtatctggaaagaaatttctgataccaattttgatacattaatcagcaagcctaaccagtttcagaacacaattcagtttttcgaaacgtggatgaactcaaagctttcacgcggtaacacctacgtgatgaaggtgaaaaacactgccggtaagattacagagctacgcattctggatccggataaagtcattcccctggtcgctgatgatggttctgtcttttatcaaatcagtcctgaccagattagtggattaccaacacaggtaaccgtacctgttcgcgaaatcattcatgatcgctttaactgcctgttccacccactgattggtatttcccctatctatgcatgtggcctggctgcaatgcagggtaagcacattcaggaaagctctgcgttcttctttaagaatggtggaaaacctagtggcgttatcactatcccaggctctgttgatgctgcaaaagcaaaagaaataaaagaagcatgggatgtaggctacacaggtgaaaatgcaggaaagacaggcctgttatcaggtggcgcagaatacaaagctatcactatgtcggcagtggatgcccagaccgttgagcagcagaaactctctgctgaaatggtttgctcagccttccacgtcccggcatataaggctggtgtgggagaaataccaagctcagataacgttgaagctcttgaacagcaatattactcacagtgccttcaggtactgattgagtctatcgagtcacttctgaaagaagccttcgaacttgatgcaaaaaagcgtgttgaacttgatatcggtgctctgctgcgcatggacagcgagcgcaggatgaaagcgctgggcgatggtgtcaaaaatactatcctcacacccaacgaggcccgtaaaagtgaaaatcttccccctgtcgaaggtggtgattcactcttccttcagcagcaaaactacagtcttgcagcgctggccagacgtgacgcttcggaaaacccatttggaaccagtcagcagacaactcaacctgtcgatgcgcctgccgatgatggatctaaagcattaagcgatacagagcttttcgcggcgaaaacaatgctcagaggattattaacaaaatga

SEQ ID NO: 201760 - DNA, 1938 bp, Klebsiella oxytoca
atgaagcttgaccgcgcatgtacgctcatgacggtgaaagctgtggatgaagataagcgggttatcaccggtattgcctccacaccatcaccagaccgtgacggcgacatccttgactctgacggcgcgaaatttggcagtgaaacccctttcctatggcaacacgatcgctcacagccaattggtaattgcgcagccaaaagagtgaaagagggactgcagattacagcccaactggtaaagccaacttccgacatgccatcgcaactggtcgcgcgtctggatgaggcatgggcatctattaaatcaggccttgtaaaagggctatcgatcgcctttaagcccatcaaatatgcgtatctcgattcgggaggtgttcattttatcgaatgggaactgcttgaagtctctgctgtgacaattcctgcgaatgcagagtgttctattcagactgttaaatctttcgaccgccagcttcttgccgcgtcaggcaatgagaagccagtggttaaagcaaatcacccggctggcgctacagcacaaaaacaaatttctcaaaaaggaaaaccaacgatgaatatcgctgaacaaattaaaagtttcgaaaacaagcgtgcagcgctggccgcttcactgagtgacattatgagcaaggctgctgatgaaggccgtactctggatgctgaagaaactgaaagctacgacaacacctctgctgaagttaaatcagtagacgaacacctgaagcgcctgcgcgatatggaagtaaatatggccgccacagccaagccagtagcaaaaacagcaagcggtgatgttactgttgttaatcaggctcctgctattattcgcgttccgcctaagctggaaaaaggcatcgcgatggcccgctttacgaaggcgcttgccgccgcaaaaggcgttcgctctgaagccctctctatcgctaaaagtaaatatccagaagataacaaacttcaccatgttttaaaggctgcggtagaagcagggaccactaccgacccagcatgggctggagccctggttgagtaccaggattttgcaaatgactttgtagattttctgcgcccacaaacaatcattggacagtttggtgtaggaaatatcccttcactgcgcgatgtgccttttaatgttcgaattccggttcaaacctcaggtggggctgctcaatgggtaggtcagggcaaggctaagccacttaccaaatttgatttttcaaacatcacttttggattctcaaaggtggcagcgatttcagttcttacagaagagttgatccgcttctcaaatccgaaagcagatgttctggttcgtaactccctcgccgaagctgtcattgcgcgattggatactgactttgttgaccctaataaatctgaagtggctggcatttcgccttcctctatcacaaatggtgctacaaccatcccgagcaccggcgatcctgatgctgatagtactgcagcattccaggtatttatggacgctaacctacaacctaccggagttgtctggttgatgtctagttcaaccgcgttagctatttcaaagcgcaaaaatgcgcttgggcagaaagaatacccagatatgacaatgtttggcggcactttcgaaggtctccccgctatcgtgtctcaatacgtcggcaatcagctcatcctcatgaatgcaccggatgtatatctggcagatgaaggtggagttgctgtcgatatgtccaccgaggcatctctggaaatggagtctgctcccactggagatagtgtaactccgacaggcgtggagcttgtgtcaatgtggcagaccaacagcgttgcaatccgtgctgagcgctggattaactggaagcgtcgccgtactgccgcggtagctgttatcagcggcgttaattacagcaccggacaaacaagctaa

SEQ ID NO: 201761 - DNA, 1659 bp, Klebsiella oxytoca
atggctcaatggaccacagcttgccctgaatgggaatcacttctggttgcaaagcaatcaatcatcccaccgccaattttcccggaccaggcagagcaggcgcttagcatcttcaaagagctacgtgtttctgatttaccaggtaagccaacatttggtgagtgctccgaggaatgggtatttgactttgttaatgccatattcggtggctatgaagcagagactggtaagcagttaatccgcgaatacgggctgcttatctcgaaaaagaacacaaaatctaccatcgccgcagggattatgctgaccgcactaatactgtgctggcgtgaggatgaagagcacctgattctcgcgccgacaaaagaggttgctgataacagttttaaacctgctgcagggatgatacgtgccgatgatgagctgtctgatatgttccagattcaggaccatatccgcaccatcacacaccgagtaacgcgaaatacgctcaaagtagtagcagctgacaccgatactgtttcaggtaaaaagtcagggcgcattctggttgatgagctttggttgtttggcaagcgagctaatgccgaagccatgtttatggaagcacttggaggtcaggtatctcgcaatgaagggtgggttatattcctgactacgcaaagtgacgaaccgcctgctggtgtattcaaagaacgccttgattactggcgagctgtgcgagatgggaagattaatgatcttaaaacactcggcgtcctgtatgaattccctgactctatggtggaaagcaaggcttaccttgaaccaaaaaatttctacatcaccaatccaaatattggacgttcggtaagtgaagaatggattgccgatcagcttctgaagaaccagaacaaaacagacggcacattacagcagttccttgcgaaacacctcaatatcgaaattggtcttaacctccgcagtgaccgatgggcaggtgttgatttctgggaaccgcaaatcaggccagtgaccttcagcgatatccttcagcgtgctgaagttgcaacggttgggatagatggcggtggccttgatgaccttttgggcctttacgtaatcgggcgagacaaaaacacacgtgaatggatcgggtgggggcacgcctgggctcatgaaatagcagtgcgtcgccgtaaaagcgaagagtcacgattcaatgatttcgttaaagccggtgatttgaccattgttaaacgtgttggacaggatacggaagaagtcgctgaatacgtcagccgtataaatgatgctgaactgctagacaaaattggtattgacccgtccggcgttggtcaaatcctggatgctcttgtagaagctgaaatacctgaagtttcagtggttggtgtcagccagggatggagacttggtggtgcgattaagacaacagagcgcaagcttgcagagggggtgctaattcatggtggacagccattaatggcctggtgtgttggtaacgccagggtagaaccaaagggtaacgcaatcctcatcacaaagcaggccagcgggaaaggaaagattgaccccctaatggcgctttttaatgccgtctcgttaatgtcactgaatccagaggcgaagaaacaagattaccaggtatttttcatatga

SEQ ID NO: 201762 - DNA, 462 bp, Klebsiella oxytoca
gtgttaacaggacaaaagcgcaaattcgcacaagcgctgatgtccggttcatcccaggctgaagcagcccgaaaggccggttactccgagaaaaccgcgaggtctcagggttcacggctggcaaaagacccggatatcatcgcgtttatcggtaaaaaacgtggggccggagtcattgtcgagaaggatgtttctgaaccagatgatctgccaaaagttgttaacagaacagtgaaggaatttgatgatccgcttgagttcctgaaagcagtaatgaacgacgtatcagaagagacggatgtcagaaaagatgcagcaaaagctatgctcccataccttcaccccaaaaaaggagagggcggtaaaaaggatgcaagacatgctgccgcaaaagtcgccgccactggtagcaagtttggagcaatggcaccgccgaagcttgttgttaataacaaggggtaa

SEQ ID NO: 201763 - DNA, 369 bp, Klebsiella oxytoca
atgggtaagttaaagacactacagccacgcctgaaggctatcgacacccgacgcattaaaccaatctatggtgagcatcgtcgcgtaagcggaagcgcaaggataagccttaagcgccggatctatgttcgtgacggcggccattgctgcatgtgtggtcatgtagtggatctgcatgatagtgagcttgaccaccgcatagccctgcagtttggcggtgacaatgatgagcgtaacgtatggacgctatgcattgcctgtcactctggtaagtcatcgcgtgaagcatcaaccaatcagcctgacagtgaagctctgaagcactcagttcctcttgataaatcgcaggatggaatcgtaattctctga

SEQ ID NO: 201764 - DNA, 591 bp, Klebsiella oxytoca
gtggaaacacaagtgaagttcgttgtggttggacaccatgatcgctttgcctcagcactccttctggcaagcgatttaggcgctcatcttcttctggatgaaggcgatcacggggccaactggaatcatcgccgtgcgcttgaatgggccgcagaacaatcatgccgtgttgttgtgcttgaagatgatgctatccctgttattgggttcagcgacaaggttgctttatggcttgctcgttatccggacgcactatgttcgttttatctcggaactggccgtccgccacagtatcaactggagatagcttcaaagctgatagcggctgataaagcatactctgactttataaccatgccgcgtctgattcacggtgtgtgctatagcgtcccgccaaagcatatacagaaggtcctggatagatggaattacagcaaggcggctgactacgctgtcggcgatgcttatggtggcccggttatttatccatgttattcactggttgatcacgctgatggccagtcagtagagccagcacgagataaccagccacgagtagaacgtcgaaaggcctggaggttagatgggtaa

SEQ ID NO: 201765 - DNA, 1458 bp, Klebsiella oxytoca
atggaagtcttgataaacggtgtgcgttttgtacctgaaggcgtaaattcatcacgcataggcatagcaatcacaacccacaacagacctgaagtgcttaagcgagccattgagcaacacgttaagcatcttccatctggtgcgctgatggttgtaatagacgatggctcaaaacctgccgccattgttcctgataacgtgaagcttgttcggcatgaccaatcacgcggtattgtcgcgtcgaagaacgccagtctgacagcgctggtggacgcagggtgtgagcatctttttctgtgggatgatgatgcatggccgatagccgataactggcatcttccctacatagaatcacacgagccgcacctggcttaccagttcctcgacctcgctgggcgcaataagttgaatgatatggctgtactgtaccgggatgataagcatatcgcttacaccggacagcgcggtgtaatgctgtactaccaccgctgcgccattgataaggttggcggctttgatcctgtatacggtcgtggcatgtacgagcatcccgatctggcgcttcgtattcacaacgcagggttatcgacatgggccttcgctgatgtggttggttcagaaaagctgattcactcaatggacgagtatgaagaggtggcccgttctatcccgcgacctgaacgcgagagcctggcaaagaccaatgcccaaatttatagcgctcggcgggacagtggatattccgggtatgctccatatcggctgcagcaggatgtagtgattacctcgcttctgacaagcgaagcagatccacaacgcaaagtgaagatggcagctgatgccgacttattaaaggtgtggtcccgttccattcgtggtgctaaggctatagtgctggcagatgagcttgctgctgcgccggaaggtgtgaccctgcagtctgttcctgcattgaacatgagcccgtactttgcacgctgggtgcatatctatcagcacttgagagcgcatcctgaatatcgcttcgtctggtgtactgacggtactgacgttgagatgctgcgagaaccatggacagaaatggagcagggtaaaatctacgtcggctctgagcataagacctatgcagaagagtggatgaaagttaatcatcacggcaaggcctatagtgatttcatcgaacagcaccgggatgaacagctgcttaatgctggcctgttaggtggtagccgtgaagacgttatggagttcgctcatcgtataatccggcagcactaccttattgaaagccaccgcttctggaagatggagacagcacccaccacgctggtggatatgggtgcgtttgggatggctgctaagtcattcggtgatcgaatagttaccggacctaaggtgcacaccatctttaaaacggacggtttcggtaaggagttagcgtggtggaaacacaagtga

SEQ ID NO: 201766 - DNA, 336 bp, Klebsiella oxytoca
atgaaatatcagctcgcaaaaatatatcgcggtgatcgtttctttgggtatggaattgccgtaggtggcttgcttctagatggccaggtctcaacagtggtagaaaccgagccaaatgaagtgcctaaagtcattgcgacatttaacctcagcaatgagcattctgaaaaacagccacggattgatttagacaatcccggagcttctaacgaattccagattgttatccacccagataagccattaaccgttgagcagttagaagagcttcaagagacggtgaaaggctttcttatcaaacacaatttgtctgatggtgggatatggaagtcttga

SEQ ID NO: 201767 - DNA, 720 bp, Klebsiella oxytoca
atgaaagttatcaagtattggaaagttcagcttctgcagttgtctcagccttccagcattatcagcgcccgcaatctggtcgagaccatgttgtttgaaggtttctcaaaggagaaaccctacatcaagctaggctcaggggtaaatattgagttatttacagcccccgactcgctggaaacgcgtatcttccgagaccacctcattgacggcgtgcgctgcatcccggtatgtgagggtgatgatgaaattgacggaagtcgtgaagagcagactaagccgccctcacgcgaagccatgattgaatatatcaagcaggctattggggaaggctatcagcctaaaatcggccatgagctcattggcaaacctgatctgctttggcagttgcatgacgaggcggtcgattatgaatatcgcgcttgttggctctggtaccaaaacggtcatggttttcatgagacttttagcgtccctgagaaaatccacgatcactcctgcgtcaactgttttgccgataaaggcccatgccttggcaagtgctacgtatccgacgttaataaggctcgcagctcctcattcgaagatgtggtgaagccggtaatcaaatggcttaacgaaaacgccaaccctcatacatcagtgagcatcgacgcaaccagtgctcatttgcttaccggtgaaatcggcatccacacggaagagttcattaaggactga

SEQ ID NO: 201768 - DNA, 303 bp, Klebsiella oxytoca
atgaaaaagaactctggcaaacaagccgttattaacttcatcggccagcatcctggctgcagctttcaggatatccgccgcggtactggtcttgactcttcagtggtcaattcctctctgtggcagatgcaccgtgacggccaggtacagcgcgaaggcgagtgcaggagctaccgctacaccctggttgatacgacagccgtaaccgaaagtgatccgtcttttgagtatcgccagcgccctggcggagtaaacccaatgaccaacctgtttaaccagtgcctggcgggagtaagaaaatga

SEQ ID NO: 201769 - DNA, 726 bp, Klebsiella oxytoca; identical to SEQ ID NO: 96494

SEQ ID NO: 201770 - DNA, 348 bp, Klebsiella oxytoca; identical to SEQ ID NO: 96493

SEQ ID NO: 201771 - DNA, 510 bp, Klebsiella oxytoca
gtgataaataaaacaaaggcagctttgcagagctgccaatgtcactacgaaaaaccgaaacagattaagcataccagggttaatgctggtggtcaaagaatgagccagcgcaattctgcgcccgctgattatattcagtttttttcttcgtctttggcttttttacgttgtcggcgtttgatctcacctttgattgaggcaacaacaaaaccggccgtgctttcgccttcttctttcactttttcaagttcaccaatcaactctaatggcacccttgagacgatttgttgtgatttgttatttcttgaacctgttgccatgtctgtgtttccttctgattggtggcattcagtatatgcaaaaagaaaacacaatcaatacttgaaagtggcattcactttgttctatggtaagtgcatgccacctgttatggtgaagcataaatggcaacgccccggagtgcttggaaccactaccgaggcgtctaaccaaaaacgttatcagaggtaa

SEQ ID NO: 201772 - DNA, 591 bp, Klebsiella oxytoca
atgaaaaaattaaatgcccgcgcggggcagggattcgatcactctgaaaacagcctgattgataattcagtaccaacgatgagcagcttgcaaatggttgaatacatcaacgctgatcggaaagcaaagtccgaagcggaggggttggctttcccgtgtaaagaataccgggtgctgcaacacaaggattttctcaagaaaactccgaaggttttaggtggggagcactcagcgaaatttttcgctcagtacaaagacagtacaggaagatatctgccttgctatcagttccctaagcgcgaagcctgtctaatggctatgagctacagctatgaacttcaggcagcagtatatgactacatggaagaactggatcgccagaagggcggttatctggcccataccatcaatgaacttcagcatattgttgcttccgctcgtcagttctccgatgaggattcgagtgatgcaggtcttcggctgagaaaacgtcaggatgatttagtgctactggagagagcggaatatctggttaaaaacctgagtcagttaccgcttaacttcgggggaggtacttctggtgataaataa

SEQ ID NO: 201773 - DNA, 819 bp, Klebsiella oxytoca
atgaatattccaataccagaatattgtactttagagcgagcatcaaagttaattggctgtgagattggcgacttactacattttggtgagattggtacggtaactatttgtattaaagtaccttcatcaacaaaggcaatggttcatgttttcaaaaaagatgaagaaaccgtttatgatattgaagcagaatggtcttctcgcggaaaatactctgagtttgtgactgttgatgaaccaatggaacatgcagaggattatgagtatgagtttagaattcctgcttttatcagtggcctgtggggtatgttgcgttgttctgattttggtcaaccatttacacagattccctgtgaaggtatggtggttttgactggtactgacagaccatttcttgcaattctagattttcccggttcggagtggggcgttgatcaattattaaaaatacaaccggaagatatgtatatattaggtgctgacatcgaaaaaattataaattatgcaggaaagagattgcctgatagatcggatgaacatatcgataatatcaatgttaagcccaatggtgaattattggtgagacatgaggataaattatcgaccaaaacaataaatagccgtgcgcaatttatcaagtcacttttatacacaatgtacgattctgatgttgctgaaaatccaagaaaatactttgataatcctgatagtgaaataagtgagctttttaaagcaaaaggaataaaggctcccaatggcaggactgtgcaagcttggttaagtatggttgatattcccttcattgaaggaaaatcataa

SEQ ID NO: 201774 - DNA, 261 bp, Klebsiella oxytoca; identical to SEQ ID NO: 195195

SEQ ID NO: 201775 - DNA, 822 bp, Klebsiella oxytoca
atgaccagcaaattgaccagagaacaagccaagcgcctacgtaacgatttcgaatgctggcagcaggattacgacccgaaagacgataaagagcagtacgatatgtttggtcgtggtatggccgtaatggacatgctgattgcggggatgtatcaggaacctgtggcgtacatgtaccgcgacaatcttcattcagatgccagattcagtatggagtcgaaaattggcaactggtctccagaagatattaacgagtatgaaattacggagacgccgctctatcgccacgcgcagcagccggtagttgacgccgacgataatttctattcgtggtttggcagggagtggcaggagaattatcagcataaccaatacacaacagcagccaagcaaatgctgggcgtgatggctgaatctgcgtggatagcagcaactgaaaggcaacggcaaaagcaaagcgtttctgtccctgatgtgaaaatctacgaagacgtgccttatgaagttggacgcttcaaaactcatcgagattgctattgcgatggctggaacgcctgccgcgccgccatgctcgcagccgccccgcagcttcccgacaatgaccacgctaccgtgccggttaaatggattccggtaagcgagcggatgccagtagagttcgaagcggttatcgcctttgatggtgatcaggtttatggcgaggctgtgtatagatctggggatggatttaccattgccggctatgacccatgcgacagggtgcaattgcaaagcgtaacccactggatgccgctcccggtcgggccaaaggaggttaagtga

SEQ ID NO: 201776 - DNA, 822 bp, Klebsiella oxytoca
gtgaagagcaaattacggcgaccattccttaaatgggctggtggaaaatacactcagttgaatgatctgttcagatttatcccggaagggttacgactcattgagccattcgtagggggaggatctgtctttcttaacagtgataaacatgctgatttccttctggcagatgtaaatgctgatctcattcatttgtatcagatgcttgcggtagtacctgacgttgttgaaagcaaagctcgctggatgtttgaaagaatgggtaatcctgagggttatgaaatgattcgaaaagaattcaacgaacagacactggatggagcagaacgcgcagcggccttcctgtacctgaaccggcattgcttcaatggactgatacgttacaacctgtccaaccagttcaacgttggctggggtaagtacaaagctccgtatttcccgtttaaagagctaaaggctttcgctgatatggctcacaactgcgtattcatgacatccggttatcgccggactatcggccttgcagggaaaggtgacgttgtgtattgcgatcccccttacgaaccgatgcctggcactgcagggtttaccgcgtatgccgctggtggttttaactgggatgatcaggtattgctggctaagcactgcgcagaagcacacaaacgtggcgcaaaagtaatcatttccaattcatcagccccgaaggtcttagacctttatcgggcccatggtttcaccctggaattcatcaaggctcgtcgttcaatctcttgcaatggaaacacgcgggaagttgcaaaagacgtggtagcaattctttag

SEQ ID NO: 201777 - DNA, 330 bp, Klebsiella oxytoca
atggaacagacaaataaactcactcagcgtcagcaggaagtcttagacattctgtgcgcctatcaccacaagcatagctttccaccaacggtgtatgagattgctggccttttgggatgtcgatctccaaatgctgccgccactcacctgaaagcactggctaaaaaaggggccattactgtttcccgcggtgtatctcgcggcataacgataaatatgccaaccgaggaagatctgcttgtttgtcttttgagatctgtgctgaacggtgaagaaaatgccagagagcaggctattaaatttctcaattctcgcggggtacgcttgtga

SEQ ID NO: 201778 - DNA, 267 bp, Klebsiella oxytoca
gtgctggagtccggcagtcaggcctcgcgcggcgtgacgctgtggcagggagcgcgctgcattcagcccggcctctatccggactggttcagccgcgtcgaggagtcgtactacgcgcatctggatgcttttgtccgctcgtcaggcggagaagaggagccggacctaccggggctgctggacgggctgcgggcgcaggctatcgccgaagccgccgtgctttccctgcagcaagggcaatttgtcagcgtcgaaccgctggcgtaa

SEQ ID NO: 201779 - DNA, 213 bp, Klebsiella oxytoca
atgagaaacggccagcactatgcatacccgagcccgagcaatgcaacacctggtggtatgacctaccgacagcaccttatcgctcaaatcgcgccggttatgctcgcggattttttcagtaacgatgcctgggctgattacgacgacctcgccagaactctggtgatggctgtagatgccatcatcgaagccgagcaggagacagaagaatga

SEQ ID NO: 201780 - DNA, 1293 bp, Klebsiella oxytoca
atggataaagtcgcatatccaaaaggcgtcgaaaaccacggtggcacgttgcgcatctggtttacatttaaaggtaagcgtgtcagggaaaatctcggtgttcctgacaccgctaaaaaccgcaaaatagccggggagctacgtacctctgtgtgttttgcgataaaaatggggtcgttcgattatgtagcacagtttcctgactctactaatctgaaggcttttggattagttaacaaggaaattacgataggagaactttctcagaagtggctctctctcaaggaaatggaagttgctaaaagctcaatcactcgttacagatcggcggtaaaaaacatgctgcttcgtatcgatccgggccgtcagatagcgacgatttcgcgagaggatgttctgattatcagaaaggaattgttgaccgggtatcagataatgagaaagggacagaagaaaccagttaaggggtgcagcgtccccacggtgaattattacatctcaatcatgtcgggcatctgtaagtttgcgattgaaaacggataccttcaatacaatccgtttgaaggactttcatcactgaaaaggtccaaacctctacccgatcccctgactcgggaagaatttatacgactgattgaggatggatgcttacaacgtcagataaaaaacctctggtcgctagccgtatatacgggaatgcgtcacggtgaaatctgtgggttgtcgtgggaagatatcgacctgaaagctggcaccttgatggtaagacgaaatcacacaaagggtggtgaattcaccctgccgaaaaccgacgccggaaccgacagggtgattcatcttattaagccagcaattgatatattgaaggatcaggcagagctaaccagattaggtaaacagcaccaggtggaagtaaagttgcgagaatatggcaggtcaaccattcacccttgcacctttgtttttaaccctcagtttactaaacgtaataatctgaccggctatcactacgcggtgaattctatcaacaaaacctgggagtcggcaatgcgtcgggctgggctgcgttatcgcaaggcgtatcagtcacgccacacatatgcatgctggtctttaacggccggcgccaacccaagctttgttgcaaaccaaatgggccatgccaatgcgcaaatggtttaccaggtttacggaacatggatgccggagaataatgcggtacaggtggctttgttgaacaagcagctttcagactttgccccaacaatgccccagagggcaagcgggaagtaa

SEQ ID NO: 201781 - DNA, 1218 bp, Klebsiella oxytoca
atgtcgaataaaccctttgtatatcaggatccttttccactgaaaaaggacgataccgagtattacctcctcagcagtgattacgtctccgtcgccgaattcgccggccaggaagttctgaaagttgaacctcaggcgctaactttactggcacagcacgctttccacgacgcctcctttatgcttcgcccggcgcaccagcagcaggtcgccgatattctcaacgacccggaagccagcgacaacgataaatacgtggcgctacagttcttgcgcaactcggatattgccgccaaaggcgtactgccgacctgccaggacaccggtaccgcaattatcaccggcaagaaaggtcagcgcgtgtggaccggcggcggcgatgaagccgcgctggcgcagggcgtgtacaacacctatatccaggataacctgcgctattcgcagaacgcgccgctggatatgtataaagaggtcaacaccggcactaacctgcctgcgcaaatcgacctctacgctaccgacggcgaggagtacaaattcctctgcatcgccaaaggcggcggctcggccaacaaaacctatctgtatcaggaaaccaaggcgttaattactccggcgaagctgaaaaattacctcgtcgagaagatgcgcacgctggggaccgcggcctgcccgccgtaccatattgcttttgtgattggcggtacgtcggcggagtctactctgaaaaccgttaagctggcctcaacgaagtattacgatggtctgccgactgagggcaacgagcacggccaggccttccgcgatattcagctcgaaaacgagctgttgctggaagcgcagaaccttggcctcggtgcgcagttcggcggtaaatacttcgcccacgatattcgcgtcatccgcctgccgcgccacggcgcctcctgtccggtgggcatgggcgtttcctgctccgcggatcgcaacatcaaagcgaagatcaaccgcgaggggatctggattgagaaactggagagcaatccgggcaagtatattcccgagcatctgcgtcaggccggcgagggagaagcggttaaggtcaatctgaaccagccgatgagcgatattctggcgctgctgtcgcagtacccggtgtcgacccgcctgtcgctgagcggtacgattatcgtggcgcgcgatatcgcccacgccaggctgcaaagagctcatcgataa

SEQ ID NO: 201782 - DNA, 186 bp, Klebsiella oxytoca
atgagtaacaaaaactacgaaagccaccgtaaagcgattattagcaagggaatacctgccgacctgttaaaacggatcactgattcagacattcaggtgatcaataccttcctcacacgggtgggcaagctgggattatctccacaagagaaagagtggatcataaaaaacatctctaacatttaa

SEQ ID NO: 201783 - DNA, 195 bp, Klebsiella oxytoca
atgaaaggcttactggtgctgacgctggcgctattaccaactctggcgaatgccggacaaattaccctgattctcagtgatgaaatcgaaacatctgatggtaagatttgcctctacgagaacgcagttagaaatgagcaagtaaaagtggctgccagcgctcaatgtcgccacacattgaccttcgaggattga

SEQ ID NO: 201784 - DNA, 249 bp, Klebsiella oxytoca; identical to SEQ ID NO: 160003

SEQ ID NO: 201785 - DNA, 798 bp, Klebsiella oxytoca
atggcaaaaaccctcgcccagattcaggcaaaacacgagtacacgtatcaagatgaagacggaaaaactgtaacatcgcaaaccttcataaaggacttcaccttcttcgaagacattgaatacctttattcaaaagactgccccgatgggataaaaatcgacagccatcacgtcgctctgtattgccgctttatgagttatcaagcagacagcaaaacttgctacgagagccacgctacgttagcgagaaaacataaaacatcaccttcgactgtgaaaagacggattagcgacttgaaaaagctggggctggtgacaacagaaccgaatcccgatcccaagtatgacacccttctgtacactgcattaccgcttacggatgctcacgttatcccaccagatcaactaccagcagcgcccaatagggtttctgacgtagtggcagagcagcctgtacccacagccgcgcctaatcctaataagacagcagcggaacattccgttcctgattttgatgatcttccgtttgtctgggatgctccacagtatcaaccaacactaacgatccccactcagcaggacaagccagagcttccttggggcggtgtggctatctgcaaaccgaatggcgatccaactgatgccgctttgaaatgggcgcttacagagacaattggtgatgaggaagctgcctaccaacttatctctaaggtcgcgaccaaacagcttggtaaagagactattttcaccgtaccaacgaatgaaaccttcgatcaacgcgaagatctaccattttaa

SEQ ID NO: 201786 - DNA, 399 bp, Klebsiella oxytoca
atgagtaagaaggaacgtagcaccctcacccgcattgagcgggaaaatgtcaacaggatcggcaaagcagcacaaaaacagcaacagcgattattaatcacatccctcgaagaaatcccaggcacattgatagaacatgttgaagaagtgcattcaacaccgccctctgtggaagagtgggccgcgttaaatgatcttctcgaatgttcaagcggagtttattaccgaccacgtaaacgcaaagtttacacctgggacgatagccagcttcaccgttggcaatgcctcggcttctcctctttacgccattacctcacatacaacgtaatgaataacaccgtggcgggagccagggattttgatgaactttttaacattggagacaagtacaaagaatga

SEQ ID NO: 201787 - DNA, 204 bp, Klebsiella oxytoca; identical to SEQ ID NO: 160001

SEQ ID NO: 201788 - DNA, 303 bp, Klebsiella oxytoca; identical to SEQ ID NO: 160000

SEQ ID NO: 201789 - DNA, 216 bp, Klebsiella oxytoca
atgttcttattaaacaatcgcgaccgaatcctaaaatacaaaaatgaagtgattcaagttaatcctgaattaatagctaaagtggctgaaatggcaggatgctccgttgaagaaattgaaaaagctgtagaccagtatttcccttctgaggacacacatcaaattagtatgcaggaacggatcgcaatcaaatcaaaggaaataaaacaacaatga

SEQ ID NO: 201790 - DNA, 357 bp, Klebsiella oxytoca
atgattgatctgaccgagcttttcccaattcgaaaaagtttcacggacgtagtgagctacgcgacggactcttttgcagccgtcgagggtcgtgttttcgacctgccagtggatgtgcaatgcggcgacgttatcggggccgatggtgctctctatgcgtccggcgctgatgccttagtggtggtgtccgatttcgtcagtgctggcgacggtaaaaccgtaaatgtcctacgtgcgcctaatgttagcagcttcgtagcactgaaagccgacaacttgaacgcagcgaatcacgccgcagctatcaccacgctcgaatccaaaggattcgtatgccgtccattcttcacctcttaa

SEQ ID NO: 201791 - DNA, 1032 bp, Klebsiella oxytoca
atgagtaaaatcgcaattgggcgtgagatggtcgatttagcgccaatcttccaggccctacctgaacgtaactatttgatgaatgccctcgacctcttcgacggggtaggcgtccagaatccaaaagtggtggtgacacagcttcttgatgataactacagcctgtttaacaccccgcagagccgttattcatcaaaccacgacacaaccgcgcgtcagaatggtaaagaatacctgatcgagatcccttggtttgcaagggaagatgaattcaagcctgtagacgtacaaggccgtagagtgcaaggcacggactacgagcaaaccgttaccgacctgtacaccgagtacactggaaagcataaaattgcttaccttcgtacccgagaatcatacctggcccgttgcctgttcaaaggtgaagtggcaacccctgcaaccgatgacctgctgatctcttatgctgaattgtttggcgttgtgccaatgaccgccagcgtgagcacagcgacagcggcacaagattttgatgccatcttagacaaagttcaggctgccgcaggtggattggctggtcagattgaacgagtgatcgtatttgccaagcctaccgcattcagccagattcgattctctgacagcatggctaaggcattcacctacgtagcgccatacgatgagcgtaacctgttctaccagcgtcacgaacttttacctggtgtttcaacctttagcctgcctggtgcgcctatcgacattgttaaagtgacagatccgctgatcctggcacagatgccggacgatgccgacatggtggcggttcctgtgttcagtaaaggcacaaatgcttatcagaacatctacggcgctgcctctggcaacttcgcactgatcgatgctgcacctgctgaatactattcttggggctacctgagtgaacgaggcgatgcgtaccacgttatgcacgaaaattcggcgttatgtgtgaatcactgtctgggtatgcaggtgaagatcaccatcacagcttaa

SEQ ID NO: 201792 - DNA, 201 bp, Klebsiella oxytoca
atggagatgattttaaaatcaagtcgtggcttgcacgtccgactgaaagcagatgatgcagaggggcttctcaaggtgagccagctttgcgaactattagagatttcgtatacgggcgttagagctcgtattttccgtggtgagactgtggaacaggccattcatcacttcttggatcagaaaggcggttgtgatgcttga

SEQ ID NO: 201793 - DNA, 1872 bp, Klebsiella oxytoca
atgcttgatatcaacgtagcttccatcaagacgacagtttcctttgtggtggataagcaaagcattgcagaagcaaagaaagccgccactgacctacagaaatacttccagaaaatagccgatccgaaaattcgatttcaggctcagaaacaacgccgacaatcagcaagggaaaaagtcgcagatgctaaggtggctccctcgaagagcgtcagtgacttgaagcagcagcaacgccaggcagaaaaggctgggaaagcgcaagccagggaagcggcgaagattgccaaacgtaatgaaacagccgatctgaaattccgcagtgctaatctacagatgaaaggcatagccgggaaatacggcattgatcctgcgaagcaataccagttttcccgcttcgctaaggaacagacagagcttttccgtaacggtcagattagtagccagaagatgaactatgagctacgcgaacgcatagctcttatgcgtcgtgaagcagcgttacaagctaaggtgacagcttccactcaggctcaggcggcggcaatacgccatgctaagaaaacagactatgcaggggctgcaaagggcattaaagaaagaggtataaacggcatcatcggcggtggagtgggcttaatcggggccactgctgcatttgctggcggggcaggtgtcctgtctcgtattcgtgacaaaggtaatgaaaaccttgatttagttagaaagtcagcactggttaaaactaatccaaatgctgttaaagcccttgtagcttacggacagcaacatggtatagatagcgcatcagtagacaaggtgacggacaacttcaaagatgtgcgcgaacgcttgggagaatcggttacaaactccgcatttgaccagaaatctggtaaatggaaaggtggtaacggagctatagacaacgttatgaacctgttcggctggaacaagaagcagatcgctcagtaccaggataacccgttagatttcattcaagccactgttaacgaaggtcagcgccgtggaatgtctcaggcatctatcgggcatctgatcgaggattttggagatgaccttgcgcattacaccgatgcttttatgaataatggtgcgcagtttagcaagacgttgaaaacccttgtagagagtggtcaaacccttaacgatgaacagatcaaacaaacctatgcttacggcgatcttaccgttgcaatgggtaatctgatgaatggcgttgataacagcctctttactggattcatgaaaggttttgctgatggcggtgatgacctcgtgaagaacaccaaagtgatcaccgaatcagctggaatgctcggagagggtttaggcaatctttctaaagaaatcaccggatttatgggggaaatctccggcgtaatctccgatcttaatgcagggcttcgctctcgtttccctcagtggttcactgaaagcgataagccagcggcgcaggccctctacgatggtgctgtgggtggttctgcgaatgctacagcggattggattcaggataagacaggctttgatactcgcacagtggggccagctatcatggattggttgggcattggtggcggtaatgctggaacagcggcaaatcaatacagcgtaaatggtgattctcttcgtggttctgcaatgtcactcagcagcggcaatgcgccagtgtacacggtgaatcctacattcaatctaaatcttgaggcatccgtaccgctcactatcgccagcgattcgagcagacttgcggattatgtcgatttcacggctaaagcctcacaagccagcttcatgcaatcgctcacgttgtcagcattaagcggtcaatcatcaacgggtggctaa

SEQ ID NO: 201794 - DNA, 1248 bp, Klebsiella oxytoca
gtgtcaatcaagggccaggcgtacttatacaagcgaaaagacggaatctggatgtttcagatcttcgtaccgaagtacctcagatttttatatccgtgccggatgtggcgtaaaaccacctcaacccgcgatcttaatgaggctcgacggttcagaaaccatctgttgttagaatgggaagagctaaagcggaagtacaatccgagcaaccctgatcagtggttgcagcagtcaatagccgccttgcataccgaagggaagaagaacaagagccgccctaaacctgtagcgcgatcctgttctattcccactctgtgcctcttacgggacgaatacgccgaaagctacaaagaccgccgctcttattcaacgttaagcaaatcagcgcgagccgttgagctattccttgaaagtgccaaacaaccggacattgccttagaaaggataggtcgtcgcctggtgactgagtttctcgaagctcaaaaggagaagggagccgccgatcaatctcgtcaaaactggctaacgtgtttagggagcctctacgagtttgcaaagcgccgctacgatggcataccagaccgcaacccttttcacggtcataacctcgaagcaaggcgaacaatcgagagctatcagccgtttgagcctgaccagattcaaaagctacttgatgcagcagagccggagataaggaacatcatcattatgggcctgtattcaggatgccgccttgatgaactggcaagccttaagaaatcagagatccagactgcggaaggggtacggtgtttctacatctcgaagtcaaagacgaaagcggggatcaggcatgtgccgattcactcccaactttctgcgattgtcgatgaatacctgagacacagttacggcgaatacctattcccacacgctaacaagataaacaggaaggatggtaagaaagggccgtactactcccaaaacttcacaaggctgcgtgacaaggttttgcctaccgctacagatcggcaatgcttccacagcttgcgcgggatgttcatcacctgccttgaccgtgcaggagtgcaggaaacacggatcggcagtatcaccggacacactgaacagaaagcgaaaaccgaagcattccgcacctattcacagggggcaagcatggaagagctagcgaggtatgttgagatggtggattatgaacaaataacgaccaacacaaccagtgttataaactataaagagcataaataa

SEQ ID NO: 201795 - DNA, 363 bp, Klebsiella oxytoca; identical to SEQ ID NO: 201675

SEQ ID NO: 201796 - DNA, 258 bp, Klebsiella oxytoca
atgttacccacacggttatcccccgttactgtggataatcaatatattgtgtctcagacagctgctttttctaccatatgttgtgtccctgatatcccctcggacggcgtgacaaacgacatcacactggagacgctgatgacgggaccatgttcatccagggtcgtaagaacggccgggactggttaccggccggacgaaggaccggccaacgcgcagcggcggcagctggttttaaaaatgctggcggaaatttaa

SEQ ID NO: 201797 - DNA, 438 bp, Klebsiella oxytoca
atgaatgtacaggaaaccaaattttcatctaaagaatttctaaggcgccgtcgccctgaaaaattttctgattcaacaatcagagagactggtactttagatagagttgtactggaacacttcctctctacgctaaatacaagaaatcaagaactacaattcgaagattttgcaaaaaaaatatgtgaaaaaataatttgccctaatctccttgaacaaactggtcctgtagcagggggggatggtaaaactgacacacaaacattccctgtttcggaacagaataagcttctttggttcgaaggtgttaatgaagcatcaaataaagaacgttgggcctttgcggtaagtacacgtaaagactggaagaaaaaatgccatgaagatgtacttaagataaaaaaacagatcgtgggtatactaaagtattttgcgtaa

SEQ ID NO: 201798 - DNA, 441 bp, Klebsiella oxytoca
atgctgatggatcagtctgcattcaccgggaaaggttccttatcccgttatacgctggatattaataacagtaccgtcagaccggatgtcttacggttcaggggaacagaagccctgagtcagcctttttcatggcgtattgaattcaccacgccacaggttgttcagggcgaggacgtattgctgaaatacgccagtttccatatgcagggctgcaaagcggtgcatggcatcattaccggtcttgaatggctctccaccagtgctgaccagtcacattacgctgtgactctgcaatcacgccttgctctgctctcccgctcacgtcgctgtgctatttaccagaacctttctgtacctgaagtggtggcgcaggtgctgcgttctcacgggctggaaggggcggattttgcgtttacactttcccggcattatccgtaa

SEQ ID NO: 201799 - DNA, 813 bp, Klebsiella oxytoca
atgaaagtcattggcataggcgacaacgttgtcgataaatatgaacaccggcgtgtacggtatcctggaggcaacgcgctcaatttcagcgtgtatgcggcgatgctggatgcatcggctgcctatctgggcatttttggtaacgatgcggcggctgaccatgtgatgcgtgcgctggcaaagttcggcatcgatatacgccattgccgtcaggttgcgggtgaaaatggctatgcgcggctgacgattgaacagggggaacgggtgtttctcggttcgaatctcggcggtgtgcgtcagacggaatcgatggactttattttgcaacagatggactggcttaatgatttctcgctgatccacaccagcagctacagctatattgatgcgcaactacctgcgctggcaacgttatccggatggctttcatatgatttctcagatgattttgtcatcgcacaggcgctgccattatgccgctggctcgacgcggcatttttctcctgtgcgggatggtcgctggtagaaacgcgtgaacttctggtgcaggcggtgcaggcaggcagcggtttggcggtcgcgacgcgtggcgagcaaggtgcacttctgttcgatggtaaagactggtatcagcaggagccggagacggtaacaccagtggatacattaggtgcgggtgatgcgtttatcactgcgtttctgctccatttacgtcagcacggtaatatcaccgcagcactgcaggctgctgcgcattttgcagcgagaatttgcctggtggacggcgccttcggcgaaggcgaagcttattaa

SEQ ID NO: 201800 - DNA, 975 bp, Klebsiella oxytoca; identical to SEQ ID NO: 133330

SEQ ID NO: 201801 - DNA, 786 bp, Klebsiella oxytoca
atgaaaattaaaaaagccatcgccgggcttgcttcagcgatagccatgttaggctgcattcacacgtcggcggcggcggatcagctgcgtttcggtatcgacccgaccttcccaccgtttgaatcgaaaaatgccaatggtcagctcatcggtttcgatatcgaccttggtaatgcgatttgcgcggagatgaaggtgcaatgctcctgggtacagaacagcttcgacgggcttattccggcacttcaggcaaagaaatttgatgccattctttcttctctgtcgatcactgatgaacgtaaaaaagccatctctttcagtgacaaactcttcaatactcccgcattcctggtgaccgctaaaggcagttcgctcgcccccacggcggcatcgctgaaaggtaaacgtattggcgtccagcagggttcggtatttgaaagttatgccaacaaatactggcgcaacgcgggcgttgaggtggttgcttatccggatgcggaatcggtctatgccgatctgattaatggccgccttgatggcacgctcgatgatgcggtggtgatcactgaagcgctgttgagcaaaccccagggccaaaagttcacgctaatccagccgcaagtcaaagatgatgagatctttgggcccggcaccgggatcgggttacggcaggatgatatagatttgcaggcccgttttaacaaggcgatcgccgcgattcgcgccaacggaacctatgatcgtttagcgaaaaaatacttcaatttcaatatctacggtgattaa

SEQ ID NO: 201802 - DNA, 765 bp, Klebsiella oxytoca
atgaccagcccagtaaaacagaccagaaggccgcgcaggagctatctcgacgcgcgcaaaaaactactcggaatgctcaattcacccgatttcaacagcggcgatcagatccccgcagagcgcgaattaagcgaggtgttgggtatcagccgtgtgacagtgcgaaaaatcatcactgaattgattgacgaaggcgtgctggaaagacgggggaatcagggaacctggttggtcgatacggcgattgaacgcccgctacagcctgcgctgggcatcagtaaaattcttgaattgaatggcgcagtgcccagcagccagttgatctacttccatatttccgcggccagcgcccgcattgcacggctactgcacattgaagagggcgatcctttagtcatgatcaaacgcctgcgcctggctgatggacaccctttctgcatcgaaaccagttacttacctcaagcccgtgtcgcggatttgaacgctgatatgttagaaaaagaagggtcgctttatcgcctgctggctgaacgttacgctattcacgatgtgtacgatgaaggaaccatccgggcagcggcgatgagcgaagaggagcatcaactgttgcaggcgaaaccagagagcccggcgctggtctaccgtggtgtgatttacgatagccagcatcagccgattgagtatctggtctcggtgaatcacccgcaacgcgtcgcttttcgcatcaatggcggcctgaaggaagtggacgtgctttcaccgtga

SEQ ID NO: 201803 - DNA, 753 bp, Klebsiella oxytoca
atgacaacattaaaatgggatcacgctgttcagtttgtgaaccagccggacgaggcgattgcaacgtttgccgggcaggggctcaacgcgtttgccggtgggcgtcaccctggctggggaacctggaatgcgctcagttatttcgggcttacctacatcgagtttctcgccatttacgattatgttgagctggcttcggcgcaggccgattttttgctctcccgtgatgcggcgcaactcttgcccgaaaaccaggtgctgcatcgggtagcgttgcgcacggatgatattgaccagacgcatgcagagttgcgcagtcaagggttacaggtctcgccaattgttaacggccagcgcaacgacccgcaaggaaacgtcattagctggcgtatttttaccattgatggggattttaacggcctgccgtatccctttgttctgcaatggggagaagatgataacgcacggctaacgcggctacgcgctcaggggctcgacaagccgcatccggcaggcgaagtgacattacagagcgccatttttgaggtgcaggatccgcaggccgcgcgtgagcactggcacgcgttgttcggttttaatgaactgtctgaaggtctgtccgcaggacagcagcgctttctctttcgtcagggggaggccaatcgattagtcgaactggtttttaacgcctctgatccgtcgctgaaaggccagcgttttcgcgtcggtcgcggtgaatatcgctttcaataa

SEQ ID NO: 201804 - DNA, 525 bp, Klebsiella oxytoca; identical to SEQ ID NO: 133311

SEQ ID NO: 201805 - DNA, 474 bp, Klebsiella oxytoca
gtgcgtaacaatgaaaacgatattcatactctgggcgatctggcgagcggcaagaagaagctggtgccgattcatacctccgatgcgcgctacaccgttattgataactacaacaagaaacaccctgggcagcaaatcaatctgcaaccgaacggcgagcagtctgcggcggacattttcaaagccgttgcttccggagagtacgatgcggctatctatccgattggcgcattactggcgttaaacaaagccctcaatctcaatctgaaagcctccgagtctgtcggcctgttccctaacgtttatttatacaaaaagaatgctgacccgaaactgatcaaagccatcgacaacgaactcgctgccctcaaaaaggacggcacgctcgctgcgctgtcccgcaagtggtatgacgaagatgtttacggtctgccgggcgcggaaaacgtcaaagtgaataccgactgggaataa

SEQ ID NO: 201806 - DNA, 702 bp, Klebsiella oxytoca
atgtctgatttgatagcctacaaatccaacgcccttatcgaggccagttacaagctcaccttgcaggaacagcgcttcctgctggtctgtatcagccgcctgaaatccggggaagatgccccttcgccggatgaacaaaaaaccatgaccatcacggccgcagagtttcatgatgcttttcctgatatgggacggcagcacgctgaagccaagctcaaggaagcgatagatcgcctctgggacaggtcagtcatcatcaaaaacgaggagaaacgcgaggagttccgttgggtgcagtaccgggcacagtatttcaaaggtgaggctaaagtcgagatcaccttctccgatgccatcatgccgtatctgacacagctcaagggacagtttacacgggtcgtcgtgaagaacgtctccagcctctccagcacctacagcatccgcatttacgagctgctccagcagttccgcagcaccggtgacagaactatttcactcgatgacttccgatccatactggaactggaagataaatattctgattttaagatattgaacagagacttaataaaaccggccatcgctgagctgaacgaaaaaagcgatctggccgtcaccgtcgagacggtgaaaaaggggcgaaccgttgtcgcgttgcggttccggttcaaagaggacaagcagatcaagatggccgtatga

SEQ ID NO: 201807 - DNA, 162 bp, Klebsiella oxytoca; identical to SEQ ID NO: 106558

SEQ ID NO: 201808 - DNA, 390 bp, Klebsiella oxytoca
atgaaaaaactgtctgtttattcacgtcttagccggaaagccggcgcgaaaatataccctaacagtaaccccgatgttcacctgcataaagcagatcgcattatccccgtgcgccaggagtatgccggcgcggccgccgcaacggctggccgcattgctgtggaagttgagcgccagacgctgcgcagcatgacctataagcgcctgtatccgtgggtactggcgctgtccgttctctgcctgctcccgccgtttgcctcgatgggggtcgatatgttccatgcaaaacaggcgcaggcggaaatgcagcgccagcagaaacaacagctggaagagatgaatcgccggcagcaggaaagaattaatcgcctgcgcagcggcatttactga

SEQ ID NO: 201809 - DNA, 2106 bp, Klebsiella oxytoca
atgaaaaaactgtcacttaactggtctggcaatgtgagtcagtccatcgaaaaagcccgcacactggccgccgaatactctcgccgtgatgtacccgacaacgcaccggccgatctgcgcgactcggccagtcagggactggaaacgagcaaggggtttgcgttgtctggccgtctgctgcaaagcgaactggtctacggttcagatgtgccgctggcgcagttcggcactgtgctgatcccgctggtactggcgttcacaaccctgcttctgtactggctcccggcatggctggcattcattccgtccgtcttatgggcgctgtttgccatcatgaccggtggttttacgctgggctggtttgccggcgttctggcgctgctcctgctttggggatctgatatttcgctgttttcgatgggcgggacagcgcagatgctccagtttggcaccggtatgacgctgacgctgatttcgctggccgctctgccgctctgtcaccttctgcgccgcgccgagcgctttaccatcatcaacgatgacgctaaagccggcgcaatcattctgtccgcctcacgtcaggcaaaagcccgcgaaaaacagacagaacgagccgcacgcgacacctcgccgctgatctggctgggtgaggcgcagggcgtgacatgggagaagggggatattatggcgcccgatccggcgtcacgcgttgccctgtcggccgctgacctgtccacgggattgcttgttctcggtggcaccggcaccggcaaaacgtccggcgtgttcaggccggttatccgtcagtggtgtgagcacaattgcggtggcctgcttctgatggacggaaaggggcagttaccggccgaactggccgaaagcaacaggggaataacgctgctgaccccggataacccggaaacgcctgtcccgctgatcgatggcctgaatgccgaagaagtggccgccgtgctggtttctgtctccggcaaggggaatgataaaggctctgactggacatttgcggccgaaaaacagttccgtttttctgccctgctcgttgagttggccgtcagcgttcaggccgcaccgtggacgctggccactattgcccgctgcgtgtcagatacggcattcagggacacgctgattgaggctgtaagcgcccgtacagaaacactgtcacctgaactgaccacggccgcactggatttctggctcaaggaatacccggaactggcaaaagccgaagggtataccagttctgtgcaggggattgtgaccgcgtggctttctccgctggtcggtcacaggaaaatgcacggctggattaatgccgccggaggggtaaacccttctgatgtcctgcgcggggcgcggtacggcatagggattgattcatcggtatatggcgaactctgcaccgcagcggttaacgggttcatcaaaaaacggctgtacaacgaggcaacgcggcgcggtgataactggaaagcggacagcacaaatacagcggccatgattgtgatggatgaagctgatgtgctgctcgatgaaaccgatgccggcattctgccgcgtgggcgctcactggggctgaatttcgtggttggcttgcaggcagtggaacaggcggaagccgctttcggcgggacgcagaacgcgccaaaagccctggcgatgctggcacagctgcgctccgttgtcgcgctgtcatcaacccatcacaccgcgcagtatgtctccgatcgtgtggggttcgggctgccactggagccggtatcgctctccaccgtgccggacatgcgctataccgtactgcaacgggcggcggcctcaccgtttaacgacgaggaaaacgagttccgcagctcgataacgctcgatattccgcatgtgattagtcatacggttggcaaaatgatggatcacaaaaatgctgccggcgaacgtctccagctggcaaaagagcctaagccgtggatctcaccgcaggaatgcaacatgctgacggcgacggagggcgtggccgttgtggttctcaaccgcgccggcgctccccgccgcgatgcgatagagctggttcccgaataccgcgccggctga

SEQ ID NO: 201810 - DNA, 1440 bp, Klebsiella oxytoca
atggcgattgcacgactcagcatgaaagcgggaatgaaaggccgtggcgcagaccactcggcctacatttcccgtgagggcaagtatgcaaatcgtctggaacggggagagcgtctggaggccaccgaccacggcaatatgccggagtgggcgaaggacaatccgcaacagttctggctggccgccgatgcgtatgagcgcaagaacggcacctcataccgtgagatggaaatcgccctgcctcgtgagctggacagcgaacagcgtgaggcgcttgtcagggactggacggagcaggagctgggcgacaaacacgcttatcagtgggctatccacgttcccaccgccgctgacggaggtgagcagccacacgtacacctgatgttctccgaacggcagcgggacgggattgagcgcgatccagagcagtatttcaaacgctataacagccggaacccggaagcaggcggggcgcggaaggggtacggtgagcatggcggccagccgcgcacgctggagcagcggcgcgaggaacttgtcgccctgcgcggccgttgggaggccaaagctaacgaacatcttgagcgagccggccagcgcgaacgtatcgacatgcgcagctatacagcgcagggcaaggacgccattcctgaaaaaaagcagctaccgagtgaatggcgcgacgagcggaagcgtgcagaaatactggatttccgcgctgcaaaagccgagcaggaacaggcacagaaagacgccggcaaggttctttatgagcacaacagcgcggtagagcactatcgcggcgttgtggccgcggtgccggagcaccggctgaaaaactcctcaccggacagcatcgctctggatttgcgagaaaaactcgtcgggcagcgcgttgacagcgatccggccgtactggccgcacgggagcaggaagaaaaaaccggtaaggcgctggagaatgcgcggcaggaacgggacaaaacccggcaggaagccgagcagcagcggcaggagcagcaacgatgggaagaagaaaaccggatgcgccgctggctccatgacaagggcatcaaaaaggacgagcgttataccggactgcaacagcaacgggaaaaatcagagcagcaggcacaggccgccgtgcagaaggagcaacaggcagaaatgcagcaccggcaggccgtcactgcgcgggaagaaaccgaaactgatgtccgtcagcaggccaatgaaaaatggttcgagcatcatcatacggccgtgaaagaggctgccgccgaacgccagcgggaacttgagcggcaggagcgggagctgcagcaggcaaaacaggctgaatatcagcagttgatcgcccagcaacagcggcaacgtgagcaggaaaaagagcaggagcacacaccgcaacggcagcacggccgcggaatgagcatgtaa

SEQ ID NO: 201811 - DNA, 459 bp, Klebsiella oxytoca
atgcacgaaaatgaatggctggagaaacggctcgcatatattcgcggactgaacgcaccgaacgaacagcagcgccttttgctgatgctggcgcagttgtcccagccaacaccgaatgaccgccgcaagctgggagtactcattcgtgctgaaaaagccgcagagagggcgctaaaggctcgcgctgatgccgctaaagtgctgaatgccgaacgtcgcgccgtccgcaaagcgcgtgaccacgaactctacaaggcggctggtctgatgggcgtggccggcgtggttgaccgtgaaaccgggcggctcaatgtggatgccggcctgcttgtcggattgctcatggagctggctgccggtacactgccggaaaacctgcaccaggaagcacttaaatctcgcggtgatgctgctatcgctgcccgtgagaaaaaaaataaaacgaatcaggctggctaa

SEQ ID NO: 201812 - DNA, 171 bp, Klebsiella oxytoca; identical to SEQ ID NO: 152568

SEQ ID NO: 201813 - DNA, 1740 bp, Klebsiella oxytoca
gtgttggtcaacgtatcgggacaagccctgaaagatgagcaaatgattaagttgccaatcaacttaattaacgaagataaaagtgagtggaagcgcactttgttgctcgcacactctaagctgagtgaacttgatcgcgatgctcagcaggttcagaacgaaacaggccgttatattcgccctatcatgctgatccgtgtagagcgcacaggtaaagatcagcgtgattctgcttttgttcatgctgaagatgcgcgtgagtatctgatggataagttgggcgtaaatgaaaatgaaatccgcctgaaaacgtcagacaaagatgaactaggtgatgatgatttgctcagtgatatgtgcccagtgaagtacatcattactaaagatgctttgcgtgaaggctgggactgcccctttgcttatgtgttgacagtattatctaagatgacagcaagaactgcgattacccaaatgattggtcgggtgctgcgccagccacatgcgcgtttaacgcaaaaaccaagcttagatgaatgttacgtctacacctttgatcaggacgtaatgaatgccgtttccggtgttaaggaaggtttagaagaagaagggatgggagatgtggcaaatcaggtcaaggcctctgaagctaacctacctgccacagttgtgaacaaagaaaagttatttcttagagaacgttttcgctctttacctaaagtatttttgccaagaattttgcatcgggataaccgttgtgaagacggttaccgattattcgattacgagcaagacgttttaggtgacatagattgggagtctttgttatacattaatgccgataattttcagttactcaatgacaagttgcaacgtactattgctcgcatcgactataaaatgtcaaaagataaccaaggtgaattggatttagctgacccagttcatgaaaatatagagtttgatgccagtttgagattggatatttcctatatggttcgccagcttactgatgttatccccaatccatggcaagcaatgcgggtgctaaagcatactttagatatattgcgtgataatggtgtcagtgaagagtcgttgttcaccaatcgccttgaactgctcaaggaaatgaagcgtgatattaagcagcaggttgttcaattatcagaacaaatcttcatgagcaagttgaacaagggagatatttctcttcgattactcgcatcagacaatgacaaactgaattgggaactggcgcaaacgttagaagtaaatgtcacggagcatgagcaagtgcttcgtcgcaaagacggctcagagctagaaagaagcttgtttgagaaagtgtaccaaaatgggcttaatagcctagagcgagaaactgcttggtatttggataaacaagaatcagtgtattggtggcatcgtatcgcggtaaatcaacgcgaatatagtcttcagggctggcagaagcagaaagtttaccctgacttattggtgtgtgtcgaagagtctagttcaggcagttaccgtttctcagtgttggagaccaagggcgagcatttgaaagggaatgatgacactgaatacaaacgtcgcttatttgaattgttaaccgaacacgtcaaaacggcggtcaatgcgggagaacttactttggaagcagcatctggtggtatttcattccgcatgctcatggaaaacagctggtcgcaggaaattgtgcatgaactgaactag

SEQ ID NO: 201814 - DNA, 1581 bp, Klebsiella oxytoca
ttggtatccgcgttggcttgcgggatatccgagtcgctatccgaatccgaatcgctgtcagagtcggaatcactgtcagagtcagaatcgctgtcggagtcggaatcgctgtcggagtccgaatcgctgtcggagtccgaatcgctgtcggaatccgagtcactgtcagagtccgaatcgctgtccgaatccgagtcgctgtcggaatccgaatcgctgtcagaatccgagtcgctgtcagagtccgagtcgctgtcagagtccgaatcgctgtcggagtccgaatcgctgtcggagtcagagtcactgtccgaatcggaatcgctgtccgaatccgagtcactgtcagagtccgagtcgctgtcgctatccgagtcactgtcggagtccgagtcgctgtcggagtcggaatcgctgtcgctatccgagtcgctgtcggaatcggagtcactgtcggaatcggagtcgctgtcgctgtcgctatccgagtcgctgtccgaatcggcatcgctgtcagagtcagaatcgctgtcgctatccgaatcgctgtcagagtccgagtcgctgtcgctatccgagtcactgtcggaatcggaatcgctgtcggagtcagagtcagaatcggaatcgctgtcggaatccgagtcgctgtctgaatccgaatcgctgtccgaatccgagtcgctgtcagagtccgaatcgctgtcggaatccgagtcgctgtcggaatccgagtcgctgtcggaatccgagtcactgtcagaatcggaatcgctgtcagagtccgagtcgctgtcggagtcggaatcgctgtcagagtccgagtcactatcagaatcggaatcgctgtcagaatccgagtcactgtcagaatcggaatcgctgtcagagtcagaatcactgtcagaatccgagtcgctgtcagagtcggaatcgctgtcggagtccgaatcgctgtcggaatcggagtcgctgtccgaatccgaatcgctgtcggaatccgagtcgctgtcggaatccgagtcactgtcggaatccgagtcgctgtcggaatccgagtcgctgtcagaatccgagtcgctgtcagaatccgaatcgctgtcggaatccgaatcgctgtcggaatccgagtcactgtcggagtcggcatcgctgtctgaatcggagtcgctgtccgaatccgagtcactgtcagagtccgaatcactgtccgaatccgagtcgctgtcagagtccgagtcgctgtcagagtccgagtcgctgtcggaatcggagtcgctgtcggagtccgagtcgctgtcggagtccgagtcactgtcagagtcagaatcgctgtcggaatccgagtcactgtcggagtcggcatcgctgtcgctatccgaatcgctgtcggagtcggagtcactgtcagagtccgagtcgctgtccgaatccgagtcactgtcggagtcggaatcgctgtcggagtcagagtcgctgtcggagtcagagtcactgtcagaatcagaatcgctgtccgaatccgagtcactgtcggagtcggagtcgctgtcgctatccgagttgaatcgccacggataa

SEQ ID NO: 201815 - DNA, 2178 bp, Klebsiella oxytoca
gtgctgggtacggtagttgccggtgaggacggacgctggagctacacccctgatgcactggatgaaggcagccacagcctgagcaccaccgtgaccgacaaggccgggaacgtcagcgagcgttccccggcgtttgagctgacggtggacacaatcgtgaatccggtcagcgatctgcaggtgactgataatgcaggagaagacacgggtacactgaacagcggcaacgtaacggatgatgacacgccgaccctgagcggtaccgccgaggcgggcgccacggtcacgatctatgacggcgacacggtactgggtacggtagttgccggggaggacggacgctggagcttcacacctgatgcgctggacgaaggcagccacagcctgagcaccacggtgaccgatctggccgggaacgtcagcgaacgctccccgatttttgagttaactgtcgatctcagcgacgacaccgacagcgactcggatagtgacagtgattcggactctgacagtgactcggatagcgacagtgactccgactctgacagtgactcggattcggacagcgactcggactctgacagcgactccgactccgacagcgattcggattcagacagtgactcggactctgacagcgattcggactctgacagcgattccgactctgacagcgactcggattcggacagcgattccgactccgacagcgactccgattccgacagtgactcggatagcgacagcgattctgactctgacagcgattccgattctgacagtgactcggattctgacagtgactcggattctgacagcgattctgactccgacagcgattcggatagcgacagcgattctgactctgacagcgatgccgattcggacagcgactcggatagcgacagcgactccgattccgacagtgactccgattccgacagtgattcggactccgacagcgattctgactctgacagtgattctgactctgacagcgactcggactccgacagcgattccgattctgactctgactctgactccgacagtgactcggattccgacagcgattcggattcggacagtgactcggactctgacagcgattcggattctgacagcgactcggactctgacagtgattcggattccgacagcgactcggactctgacagcgactcggattcggacagtgattcggactctgacagtgactcggattcggacagcgactcggactctgacagtgactcggattccgacagcgattcggatagcgacagcgactcggactctgacagtgactcggattcagacagtgactcggattcggacagcgactcggactccgacagcgattcggattccgacagcgactctgactccgacagcgactccgattcggacagcgattctgactctgacagcgattccgattcggacagcgattccgattctgacagcgactcggattcggacagcgattccgactccgacagcgactccgattccgacagtgactcggatagcgacagcgattctgactctgacagcgactcggactctgacagcgattctgactccgacagcgactctgactccgacagcgattccgattctgacagtgactcggattccgacagcgactcggattccgacagcgattcggactccgacagcgactcggattcagacagtgactcggattcagacagtgactcggattcagacagtgactcggattcagacagtgactcggatagcgacagcgattcggattcggacagcgactcggattccgacagtgactcggattccgacagcgattccgattctgacagtgactcggattcggacagcgattcggactctgacagtgactcggattccgacagcgattccgattctgacagtgactctgactccgacagcgattcggactctgacagcgactcggattcggacagcgactcggactctgacagtgactcggattctgacagcgattcggactctgacagcgactcggattcggacagcgattcggactctgacagtgactcggattcggacagcgattccgattctgacagtgactctgactccgacagcgattcggactccgacagcgacttgaatcgccacgcgtttaacagacacctcagagtcatttaa

SEQ ID NO: 201816 - DNA, 1053 bp, Klebsiella oxytoca; identical to SEQ ID NO: 198549

SEQ ID NO: 201817 - DNA, 363 bp, Klebsiella oxytoca
atgaagacgttaacggtgtttgacccggcaatgtgctgcagtaccggcgtacgtggctcagatgtcgatcaggttctggttgatttttctgctgatgtgcagtggctgaaaggatgtggtgtacaggttgaacgttacaacctggcgcagcagcccatgagctttgttcagaatgagaaagcgaaagcattcctcgaagcatctggagcagaagggcttccgctactgctgttggacggtgaaacggtgatggcagggcgatacccaaaacgtgctgagctggctcgctggttcggtattccgctggagaaggtagggttagctcccaccaactgctgtggtggtaatacttcctgttgctga

SEQ ID NO: 201818 - DNA, 258 bp, Klebsiella oxytoca
atgaaaggcacagacactaagcaggttgattatctatatcgtggaattatggattattatagtaatatttctggtctagatataacaatagatcaactaacaataagaaataaatttatatccgacagcgctatcgtttgcgatgactcacttgatgagcatatactatccctgcagaatgagtacattgctgccgatggtaacacgtcagagcagagagcaatcatagagaaaactatcgaattacttggcgcttaa

SEQ ID NO: 201819 - DNA, 2388 bp, Klebsiella oxytoca
atgactgtatcatctgaacagaactacattgagtacaacggcgatggctctaccaccaccttcgctattccgttctacttcatcctgaacacagatatttctgtgcaaatagccgatgctgattcaaacatcacgaatctgacgtatggtatcgattactccgtctctggcgcagggaatgcttctggcgggagtggtacgcttaacacggcatatgcgagtggatacaccattctattttatcgcaatcctcccgcaactcaggagactgcttattatgagaatgggaaattcccggctaagtctcacgagaaagccttggataagctaaccatgctggtacagtggcttattaccaatcttggactggcactgcgaaagccttcattcctggctaactattacgatgcattgaacaacagaattagtaacctggaagaaccatcactgccacaagatgccgtaacgaagagttatgcagatagcatacttacgggagcaaatagccattccgatagcttgtttaaaaggaccctgcgcgttccagaatcaacagtaggccttctccctccgatagatgttcgaaaagagatgcttcaggggtataactcatatggagatccaatagcaattgcagggcaaacggcaacggcagatttggcattaaaattagcggcatattttggtacgtcactaattggaatgccattatcgggtgatttattcgatctggtaaagaacatggttacgcctgccatgtttcatgctaacccagggaacacagataatggcggtcttgattttgctcatgataactcactgtgcttccagaatatgtttaatgccgtgcgagataacggcggtggattagtcattatagatgatgagtactgtgttgatttttgccttttcccgcatacaaataccaccgttttatttgcaggtcgtggttctatgcaatttataaatccgcgttcagcgacaactggtcgcggcgggtttataatcgggagtagccgtgaatttaactttgaccaggcgtggagcttgtatcagtctggtaattatcccggctcgatcgttaacgcttcgttcactgatcccgcacagaaacaatatttgcgtgataatcagcaatttgttcaggctgagcgtgttaatttcattaacccagtaataaagtcatattacacagactcaacatattggggcggatttgcgattaactgtgttaacgctcagcacatcagaatacttaacccagtattcagtggatggactgaaggtgtcaatgttggttctgacgtcccgccgaatacgccttcgtgttatgacgtgaaaattattaacatgcgagtcattaaggccgatctcgttcgcacttactatgctggttttttctatgcaaactcaactaatatcgaaatttctggagggtcacttgaaacccctctcacagcaggtacaagtaacggtagttttggtgcaacaaacttcactgaagattgtgtgattagagatatcaacgttcctaatcttggtcgcactgtatcctcagaaggtatcctcattaacaactcaaagggttgtttagttaaaaacataaaaatggggaatgctaaatcagccgtcagtacgttttatgtcgatgcaacaactaatgatgcaaataacccaaactttatagatggggtcgaggctaacaattgcgatcaggctttggctgtaactggtaaatacgcattgttttctaacgtaaaggcggtcaattgtctgcaggagctttttttcagaaatgctaacgcaacaggaaacagatttaaaagtaagccagactcgatcactatcagtgattcaagcgccaaccttaaatactggtacctgattaacaatacagttagcggttggcgtaggaagtatacatggttacgcccccttgatattttgaggacgccattcacttcactatcttcatggaactctaataattctgtgaaattcaatagtggggcaactggtacattcctttataaaattccagaaaacataactgcagtatcaggatttactgcttatggagactttagcgttggtgctgcagcggctgcaactgattctgtatgcacgatagatattatttcaatggcggccgtagatggaaaccagacggcaccggtagttcttcttactgcgtcagtttctgcgcatgctaatggcgatggaatatggtcactctctgcagatgtacagtccacatctcctgggtatcttccaatggaaggcgctgcaagtggggtagataacaccatgtatctccgtgttacatattcaaatggtgtagcaaacaacaccttaaaagaaattggtttacgtctctatggagtataa

SEQ ID NO: 201820 - DNA, 264 bp, Klebsiella oxytoca
atgtatagcaaatacgatgaggcgcagttccacttgaggcttacacatgaacttcacgcgaaaattaaacaacgcgcgaagatgaataaccgatctatcaatgcagagattgtagcgacaatggaagagtcgctttcaagacctagccctgtcgccggatatcgcgatgaggctgagcgtgaggctgacatagtttcgcaagaaatccagaagatggtctttgagaagcttaaagcgcactatggaaacaaaaaacccacctaa

SEQ ID NO: 201821 - DNA, 288 bp, Klebsiella oxytoca
atggcgaacctagattatcgatacgagagagtatggtttgttttgtttatgttgtcgctgcttgtttttgttatttcctgtttcactttggatacaaatcattattacaatatcttcgagagaatcatccagtgcatcacggggcaggtctacttctctggatacacacgcactgtaatgtactcattttggtctgcaatggttagccttttctttttgtttggatataaaagaaccatttacagagcttacaagtggattttctctggaaagagaattaacgactga

SEQ ID NO: 201822 - DNA, 2541 bp, Klebsiella oxytoca
atggcaaatcagtttctcactcaatgcgaaaaaacagttaatgctgctgccggccgcaatttgtcagaagatgaaatgggtcgcctcgtatctgacatggaaaacacagtcaaacggatacgcgctgagaacgaagggatttcgcttgaggcagcagcgttacgggctgccgaagaacttagcaatgctgagaaactggcaaacgttattgaagcacgtaacaaagctctgaatacgcgcattgcagcgcaacgacttgcgttcattcgtgactcatttccagatcgccctgatataggcctgtcagcaattcttgttgggagaaatgaagcccgcactggcagccggtcctctgcgtctgcggaacagtttcaactacgatcaaagtacctgtccggactgaatcacgaccttgaacaggcaggagtgctgaagtatctctccagtggctcaaatgatgctgaggtagccgatgctatgtggcgtcttggcaaaggcgagtctacagacggcatgatgaaagagtcggttaaaatcgccgaaataatcactaaatggcaagaatcagccagacttgatgccaacaaggccggtgcctggattcgtaagatgcctggctacattgctcgccagggccacgacatgatgaagattcgcgctgcaggttttgctgcatggcgagacgctattctccccaaactggacaaggcaacattcgaaggcgtagcagaccaggatgcatttctgagaagcgtttatgatggactggcgtctggtgtccatcttgcctcagagaagccagactggatgaaagggttcaaaggatcacagaacgttgcaaggcgagccagtcaggagcgcgtgctgcactttcttgatggccggtcatggtatgagtacaaccgggagtttggcgttggttccgtgcgtgaggctatctatggaggccttgaagcatctgcacgtaataccggacttatgcgcattctcgggaccaatccggagaacatggttaattaccttgcagataccatttccgcagatctgaaaggtaacgaaaaggctctggctgcatttaacgatgccaggcgttcaactataaaaaatgaaatggcagaagttaccgggcagacaaacatccccggctcatctgcgctggctagatttggctcaactacccgcgcggtagattcgatgcaaaagcttgggatggctatgtggtcatcatttaatgacttggcaaatggagcccttgagcttcgttatcaaggcatgaacttcatggaagctctgactggctcaattcagggtaggttaaagaggtattcatctgaagaccaaaaacagattcttagttctctcggtatttatgctgattccatgcgagatgaaatcctgcaaaagttttccggagatgtaaccctacctggcaagatttctcgcttacagcgtcagttctttaaacttaatgggctgaattggtggacggacgcctcaagaaacactaccgccaccatgatctcccattggctgtctggtaatgcaaagtctcctcattccacactgaatcctgacctgaaacgagcgcttgatctgcatggaatcggcgaaccagagtggaacatctatcgcacaatggacatgaaaggctcagaaggtcgaaccttcatgacgccagacggtattgattctgtaccagatgatgtaattgcaaagtatgtctctgataaaaacgtcactgtgaatgagcgaagcattgccaatgctcgctctgaactaggtgataagctgcggggatatattctcgacagaacaacctcagcaatgagtgagccaaatgcaagggttagggctctaatgaagcaaggaactcagcctggtactgtgccaggtgagatactccgttttatggggcaatataaatctttcactgcttcattcatgcaacaaacgttggggcgtgaagtgtttggtagaggatatacccccgccccattaggggaaagtcgctggggtagtttatcgaatgctctttttaaaagtggaaagggtgagcttttagggctggcacaagttgcattatggatgacattcttcggttatctatcgatgcaggcaaagctgatgctgaaggggcagactcctcggccagcagacgccaaaacatttctcgcagcagcagcacaaggtggcgggttaggcatcttcggtgacttcctgtttggagaggctaatcggtttggtaatggcccaattacttccttagttgggcctgtttcaggttctgctgaccagttagtaacgctgtttcagaaggccagatctggagatgcaaaagccggtgacttctttagattcagtgtggatcacacgccattcgtgaatctgttttggacgcgcccaattcttaactatctattccttaaccaactgcaggagtccctttcccctggttctctttatcgctacgaacagaacatacgcaagaatcaggggaatgacttcctgattcctccgtctcagtttatgctaggccgataa

SEQ ID NO: 201823 - DNA, 270 bp, Klebsiella oxytoca
atgggtgagcaagccgctgcattcgctgacaacggtaccgggacgggtggtagtaatgctctcatccagcgctcgacagcgattgatacagaaatggacgccgcaaacgcagactataacggtcagttgcagattaatgatctgaaaaatcaggcgtcagctttgcgggccacggcaaagaatcagcagccaggactgttgagcctggtcggtggtacggcaagtacgctgggttcttactacggaacaaaatcacttctgaagggttaa

SEQ ID NO: 201824 - DNA, 417 bp, Klebsiella oxytoca
atgaaaataatcgactttgaaccagagcacatcctgcagattaaaccacaagagaggcaatcctatattcacctgacaattgaatatggacaacttctggcagacggcaactgttttaccggggtacacgaaggtaaggtggttgcaattggtggaatcatccctgtttgccctggtagaggcttcctgcatctcatcgtctcagaaggcatcccgcatcaatggataaaattattccgtgcggccagacgccttattgatgccgtgcaggatgattatattcgacttgaaacactgagtggatttgaagaggccgacaggtggcttgaactgcttggtttcgaatttgaaggcgttcttcgcaaagtcatgcctgatggctctgatgcgaagtcgtacagcatagtgaggtcataa

SEQ ID NO: 201825 - DNA, 2313 bp, Klebsiella oxytoca
atgccttcaacatctccagccatcaatagctttaacgccggtgagttctccccgctaatgatggggcagaccgatttcaacaaatggaaaagcggctgcaaaaagatgctgaactttattccccggtcgcaagggccggcagagcgccgcggtgggacttactttgtcagcgaagtaaaaaactctgccaaccgcgtgtggttggccaggtttgagtacaacacaactcaggcatttattcttgagttcggcccgggttacatccgtttctattcagatcacggcgtggcgcaagatggttcaggaaatccacttgaggttgcgtcaccatatacagcaggtgatctgacaaacgaagatggggcatttggactttcaatggttcagagcggtgatgtgatttacatctgctcttatgctggcgataagcctccgtataagctatcaagattcagcaatacaaactggacccttgaagcgtttgattatgcatcggcccttggtccttttgacaatatcaactccgatcgcactgtaactgtctacactgaccaatttcgaatctggtcagcagatggcgcaactcgacctgacggcacgccaacaacaacaagtttgtgcacgataaccgcgaactctgcgatatttgaagctggtcatgttggtgggctgttttatatcgaatcctcaactgacgctgttgatgacgggactggtcattcaggatacatatcagcctggtctgcaggaacaacagaaacctttaccgaaggttcgttctgccgcagtgatggaaagtattacgaggacatgagcggcgaccataccggtagcactcagccaacctggacagctggcgctcaccgtgatggtagtggtagcgatgcggtattgtggcgatattcaaatggcggctggggagtcattgagattaccgcagtgaacagcgcaaccgaggctgtaggcaagatcagaactgaattgccgccgagtgttcgcaacaccacagggaaaacctataaatgggcctttggtgattggtcatccgagaaaggttttccgacaaaggtcgcattctataagagccggctgtgcttctcaggccgaaataaactgtggttctctgtcgcgtcggattacgaaaacttcactccaatgtcagatggtttcgaggtgcagaccgatgactctatcaacgtgcagattgaagccgactcgaccaacgtcatacagtggctggcggccagtagctctttgctgattggcaccgcgggtaacgaattcgcctgctctccctcgaccacaacaaccgcgtttggcccggataacattcaaattgtccaggaatctaaatacggctctaagggcgtcaatgcagttatcgttggcgataccgtcctgtttatccaacgcgcaggcaggaaagtacgcgccgtcactgctgattatcagagtggcacatacagctctgttgatctttcagtcattgcagagcatatcacctcaacaggaataatcgattttgcctggcagcaggagccggactatgtggtttgggtcgtactgaatagtggaatcctggttgggcttacttacaactctgagcaggaagttattgcctggcatcgacatgatgtcagcggcgtggtggagtctgtagcgactatacctgggccggatggaaacagggatgatctctggatagtcgtcaggcgtactattaacggtgttcagcgtcgttatgttgagtaccttcatgccgcatgggattcctataccgaatcgatttctgatgcgttttacgttgattgcgggctcacatacaacggtagcgcagtcacgtcattgacagggctttctcatctggaaggaaagactgtggcagtcatgaccgatggcgcagcgcatcctgaccgcgtcgtgtcaggcggcgctatcagtcttgaatggtcaacgaccgtagctcatgttggtcttccgtttacctctgagatggtgactttgcctcttgaggctggcggtaccgcaggtacggcacaaagcaaaactaaacgagcaaacgaagctgcgatcaggttcgtaaatactcttggcggtaagatggggatagagggtggaagataccttgatgttatcccaactcgcgattatcacgatctcatggaccaggctccgggcccgttcacagatgacaggaagctaactcttccatcgcagtacgatacaaatgcgtgccttcgaatcgttcaggaccaaccgttacctatgacggtttgcgctatctatcctcgtgtatggacatcaggcgaatga

SEQ ID NO: 201826 - DNA, 549 bp, Klebsiella oxytoca
atgagcgaggctgacgacaatgctgcatctcgggccatagaggctatctatgatgggctgctggatactctcctgcgcacatacagatggtcttttgctattaaacgggctcagttagcgctgctatccagtgagcctttgtttggctatcagtttcaataccaactcccttctgattgcatccgtatagatgcgatcactgatgtggtcaatcaggagtggtggaatcacgactggtgtggatacaacctgccatacccgcgctatcaagttgagggccgtcaagtcctcaccgatatggagtcgccggtatatatccgctacggcgcgagaatgccagacccaacgaattatgacgaagcctttactgaggcgttcgcttgcaaacttgctgtagagatttgcgaaaccatcactcagtcttcgacaaagaaacaggctgctcttcaggacttcgatatggctattaaagcggcgcgagctgcaagcgcaatcgaaagaccacctattaagcagcaggacacatcctggtatacatcgaggttataa

SEQ ID NO: 201827 - DNA, 447 bp, Klebsiella oxytoca
atgtatctcgataagcaagctgagttctcggacagccaggcggttactgcaacagcaatttccaccaacgtcatggacctgaacacagcattcaactacaacaccggggttgatatcggtaccggtgaagatgtttaccttgttgttcaggttgatgccgccgctaccgctgctggcgctgcaaccgttcaggtaactctggagtcatccgctgctgcagggctgaccagttcaactgtccacttcacttcggcaaactatgcgctgactgacttaaccgcgggcaaaacgttgttttcagttaagctgccgagcggaacatacctgcgctatctcggcgttcgctataccgtaggcactggcccgctgacagccggctctttctccgcgttcctggtgaaagatgttgaggcgtggcgtgcatacgctcgcaactacaccgcgtaa

SEQ ID NO: 201828 - DNA, 1005 bp, Klebsiella oxytoca
atggctacactttctggaaagtacacccttctggatgtggcaaagactcttgacccggatggcagcactgctgcggtggctgagttgctgtcacaagacaatgaaatgctgatggatatgccgtggtttgagggcaacctccctacgggccatcgcatcacaacccgaactggcttgccggatgttatcttccgtaagctcaatggcggcgttccgccaagcaaggcgaccactgctcagctggatgaagcatgcggtatccttgaagcccgttctgagatcgacaaagacctggcgatgctgaacggcaacactggttctttccgtctacttcaggcgaaggcattcatcgaagcgatgaaccagcgcatgcagcagaccgtgctttacggctctactgaaacgactccggaagcattcctcggtctggctcctcgttacggattcgcaccttcaaactcatctgctgcgcctaacaaggtcaacgtgatcgatgctggcggtactggtgccaacaacacgtcaatctggcttgttggctggggtgcaaacaccgttcacggtatttacccgaaaggctcacaggctggcttgatccacaacgacctgggcgaaggtgacgcattcgacgttaaccagaaccgcttccgggcattcatggaccagtatcagtggaagtgcggcatcgcccttcatgactggcgctatgtagtccgcatcgcaaacgttgatgttaccgcgctgactaaaaacgcctcggctggcgctgatcttattgacctgatgactcaggctctggaaaaaatccacagcctttccggtgtcactccggcgttttatgtcaaccgtaccatccgcagcttcctgcgccgccagaatgtgaacaaggttgcctccggcactctgatgtacgacgaagttgctggtaagccggccctgcgttttggtgaggttccagtccgtcgcgttgatgccctgggcatcgccgaagctcgcattgtttaa

SEQ ID NO: 201829 - DNA, 261 bp, Klebsiella oxytoca
atgactgcaatcaagcaggagtggggagctgactttgatgccaatagcgcaatcgtcagtagcgcagtgaaaaccttcgcgccacctgaattcgtcgaaatgctcgacaagtccgggctaattaacagcccggtcatcgcaaagatgttcctcaaaatcggctcagcaatcggcgaagacaaatcggttgcagctaaaaagaactctccgcagggcggtgagaacgacctcgctcaacgcctctggccgggcatgagttaa

SEQ ID NO: 201830 - DNA, 273 bp, Klebsiella oxytoca
atgtcccgcgcatatcgatgcgtgtttggcgagcatgggtcacgcacgaaagagcaacagatggtgataggcgacctgatgaatttcagcaagctgctcgccagttctgtagcaatgtcaaaagtgaccggctcaatagatacgcacgcaacgatgctcgcagaaggtcgccgggaagtggctcaccgaatcatcaactacacgacgctggatgatacccaaatcctcctggcgatttcgaaactggacgaggcattgaaatcgaatgtttaa

SEQ ID NO: 201831 - DNA, 1653 bp, Klebsiella oxytoca
atggacaaaagccaggaagaactgctcaatcagattttgcgtgaccagtcctcaatggaagtgtcgcgcaagacctgggagcagcactgggatgaagttgccgagcgatgcctgccgagaaattccggtttcactaaaaagcctcaggatggctctaagcgcagcgaaaaggccattgactcaaccccaatcctggcccttgaacgtttcgccgcggcaatggaatccgtcatcactccgcgcactcagatgtggcatggcctgcagaatgagcgctttgctgatgataacgaggtgcaggagtattacgaggagtgcacgaaaatactcttccgtgttcgctatgctcctcacgccaactttgccaaccagcagagcgaaaactacatcagcattggcgctttcggtaacgggtgcatctacgttgatgaggtcccgggcaaaggcacaagatacatctgctacccgctgcaggagatttacttcgaggagaactatcagggaattgttgatctcgttcaccgcaagttttgcctcaccgctcgccaggcagtgcagcagtttggcaaagagaatctccctgacttcatccagcgagcatcagagaactctccgctaacgaagtatgaattcatacaccgtgtgtggccgaacgatgatattaaatacattgaaggggagccggcacctggccccgcaggtatgccgtggaaatcggtatacatcagcatctccggaaagaaattaatccggcagggtggctatcacacaatgccgtattgcatcgccagatattataagtcgcctggtgagacatacggtcgcggtcctggcatgactgccttgcctgacatgaaagtcctcaatgagatgaacaaagaaactctcattggtgcgcaacttgcaaaccgtccaccggtacttgtcgcagatgatggtgccctcgatgcgttctcgttggttcctggtagcattaactctggtgccgtaagcgctcaaggtaatccactcgccgtcccgttcaacactggagcccagccgcagttagggcttgagatgatggaccagaagcgtcagctgattaacgacattttcctggtgacgctgttccagattcttgtgcagaacccgaacatgaccgctactgaggccatgcttcgcgcacaagagaaggggcaactgcttgcacccacagcaggacgcattatgtcagagcagcttgggcctatgattgagcgcgaggtggatatctgtgcacgtatggggctcttccctgatccgcctcagcagttgcttgatgcgaatatggaattcgacatcgattacaagtctccactcatccgcatgcagcagagcgaagagggaactggcatagcgcaaaccctacagatggcgacgtcgatcgctcagtttgaccagagcatcatggggctgttcaacttcggagatatcatgcgcgagttcgctgatatcaacggcatgccgcgcacgctgattaaagacccggaagaagagcaggcgatgaaagaagctcaggcgcagcaggaacaactaaacaacttgctgcaggccgcgccaaacattgcaactgcggctgacaaaattgcttcggctcaacagaagtttaataccccactccctgcacctcaataa

SEQ ID NO: 201832 - DNA, 1326 bp, Klebsiella oxytoca
atggagataaatcttcctaacaactggtcacctcgccactaccagatgcctctatggggtgcgctcgaatccggaattaaacgcgctgtagtttgctggcctcgccgcgctggcaaggatgacctctgcctgcactggtcagctattcagtgcatgacaaaggtaggaaactacattcactgcttgccgcaagccaaccaggcaaggcgggcaatatgggatgcagttaacccgcacactggtcgcagacgtatcgatgaggcattccccgaagctatccgcgcatctgtacgtactgatgaaatgaagatcaccttcgtcaacggttcaacatggcaagtggttggctccgataactactcggcgcttatcggttctgcataccttggtgttgtgttctctgaatacgcgctaagtaatccaaacgcctacgcattccttcggccgattttggcagaaaacggcgggtgggctctattcatctccacgccccgcggacgtaatcacttccataagctcttcctcggcgctgagaagagcgatggttggtttgcagagcatctgtcagcggagaccaccggacatatcaaatcagaagtgctggctaatgaactggcagagatgattgatgagcgaggagaggaagagggcaaagcgctttacgaacaggagtacctctgctcatgggatgctgccattcctggtgcgtactactcacgccttcttgccaccgcaacaaaagaaaatcgcatcactaacgttccgtatgacccagcattcccggtttacacagcctgggatttaggcattggtgattccacggctatctggtttgcgcagatgatcggcagggagatgcgcatcatagacttctatgaggcatcaggtgttggtcttgaccattacgcaaagatcataaaagacaagccatacagctatgagagacacatcctgcctcatgatgtcatggcatcagagcttggcactgggacaactcgatacgaaacgttaaggaaattaggtatacgcgcagaagcgctccctgcatcccgtgttgatgacgggataagcgcggtgcgcatgatgttgccgcgttgctggttcgataagaccaaatgcgaaaagggtctaaatgcgctagcgcagtatcagcgtgaatgggatgagaaggccaaagcctacaagccaagacctcttcatgactggacatcgcacgcttccgatgctttccgttacctcgctgtaggtactgaaaaatatcgaccagagaagcgtgagcgcaacaaacctcgcatggctaacacagactacaacctattcgggtga

SEQ ID NO: 201833 - DNA, 441 bp, Klebsiella oxytoca
atgggtaggccgactaagtatcaggaggcgtacgccgaacaggcacgcaagctgtgcttactcggatacaccgatgttgatctggctgacttctttgaggttagcgaggcgacgattaataactggaagcatgaattccctgaatttctggagtccataaaaaaggggaaagcagtagcagatggcgaagtagttgcaaaactcttccatcgagcaactggctatgagcatccagaggatgacataaggtcagttgatggttctattgtcatcacgccaactgtcaagcattaccccccggacacaactgctgcaatcttctggttgaagaacaggcagcctaagacatggcgcgataagcaagaagtcgaacaatcaggggatttaggcctgacagtcaacattaagaggttcacgccagatggagataaatcttcctaa

SEQ ID NO: 201834 - DNA, 378 bp, Klebsiella oxytoca
atgaatgctcaagagcagcgtgctttgatatccactctttttgaagagttagcaattgcaaatggattgattaaagaaatttgttctgtccgaaaaattaccccgcccacggcatcattaagtaggattgaaagagctctccatgatgcaaaagataaaatgtatcatggcttcgcatccgattggatcagtgttgatgaaaggctgcctgaaagcaaagaaggccaatggtcgaaagaggtaattgcgcttagcgacaatggggatgtgttcaaactatcctgcatgggctcttactggcagagaacaaaaacattcattgattcaggatccggcaagataacccactggatgccgctgatttatccggatgattaa

SEQ ID NO: 201835 - DNA, 489 bp, Klebsiella oxytoca
atgattccagataaagaccttaccgacgatgttctggatgaaattatcgccggggccaaaacatcgatggagcagtatcttgctctgtcgttgaaggctgagcgtgaagtgtggcggaaggaagtgcccaccgacgatgaacgcattatggccattgagggcattcataactgcgaacggtgcggtgatgaagggtgggtggtcggtgaaattggtatcacgcgctgtgcgtgtggtcaggcaagcaactctccggtaattggtattgacccggcatctggtccagaccgcaccgttgaagttcgctacgttgcgcctcctggttacgtgatggtgccgaaggagccgacgcgccaaatgatgtctcaagggcatttcgctatgaaaggtactgaccggggtaaattcagacgtatttatcaggcgatgatagcggccgcccagcaggagatgatgaaagatgaagcaaacaatctttctcagaagtaa

SEQ ID NO: 201836 - DNA, 423 bp, Klebsiella oxytoca
atgaacatctcaacagtaaacgagctcattcagtcgctggagagtgcgggcgagctgtcgatcaaagagcggaagtatctggagctggcgagggagtttaagcggctggctgcggagaatgtggcgctgaaggaagaccgagacaccttagcgcggtattggattgaagacggcggcgatgaagattgcgcgatgtcttattgcgagccaacccccgccaccgatcgcatctattccgggattaaggctgatggggttactgctgctcttgaatcttgctccgattatctcgatacagactgcgttatggataggcttgatatcagctacgaagacgccgagaagcgaacctcaggggcaatcgattttcatgatgcgatggtcaattttgcaaaccagctgcgcgagggggccgacaaatga

SEQ ID NO: 201837 - DNA, 225 bp, Klebsiella oxytoca
atgaataaagttatcaaaaaggctttaaagattgttggcagccagaagcgtctagcagagatctgcggcgtaagtcagccagcagtccacaaatggctcaacggaggctgcgtatcccctgagaaggtaaacgccatcgttttagccactggaggaatggttaaggctcacgaaattcgccccgatcttcctgacttgtttccgcatcccaaaaatgccgcctaa

SEQ ID NO: 201838 - DNA, 540 bp, Klebsiella oxytoca
atggttgagatttcccgtgcgctgggggtcaatcctgaatggctttcctcagggagcgggccgatgagatcggatggtcaggagccggtgcaattccagagaaatgataattatcgcgttgaggttctggacttgaaggtcagcgctgggccgggaacatacatgctttcagaagcggtagaagtgctgtctgcaatcgagttcaccaacgatcacgccaggtctctctttggcagccgtagagcgaaagacatcaaggtgatgaccgtagacggcgacagcatgtatccgacaataaagtcgggtgacaggctgttttttgatgtggctgtgcgtgagttcacaacagatggggtctatgcgtttgtcttcgggaaaacgttccatgttaaaaggctgcaaatgcaagggcttgaactggctgtactatccgacaacccggcatataaagactggattatcagcgaagagaattgcgatcagctttacgtaatgggtaaagccctacttcatgaatcaatccagtatgggaagctgtaa

SEQ ID NO: 201839 - DNA, 297 bp, Klebsiella oxytoca
atgaaaaccttacgttgcatggcctaccagcagaacggtgtttacgtggctgcatgtttagacctgtcattggcagcgcaagcagacactatgcaggatgctgtgaacaaactggatgaacagatcaaagatttcttcgctgaagcattatccgaaccggaatacgcaaaacaattgcttaaccgtaaagcaccgctatctatgtggtttaaatattgggtaatagcatttcaggtttttgtcagaaagcggggggaagcaaagttgtttgctgaaccttgtgatgctcacgcttag

SEQ ID NO: 201840 - DNA, 285 bp, Klebsiella oxytoca
atgttcttgaaaaagctcacccctctgaaatacgacgaggtaatcagggggcttaaaaagatgggcttcgaaatgaagcctaagactggaacctcgcatgaacagtgggttctcaagaacaataaaggaaaatgggttgtaactgttgacaaacatcacgccccattttcaagggacttaattaaatccatggcaaaacaggctggaataaaagataggcattttcatgccctgtgtcgcggctccgcaacccttgaagatattggatttcagattacaagttag

SEQ ID NO: 201841 - DNA, 300 bp, Klebsiella oxytoca
atgagattacgcgtttggcatatcccacaggttccaatgaaggcattttatgttgacgtttccagcgtcgaagaaggcgtaaaaattatggacgtgctggccgactacgacctgttccagtacgacaacaacattaagcctgactattgcaatgcaaatggcctgcaaatgtatgacgaaagcctgactgatgaagaccttgctgatatggaactatccgatcgctgggttgattgggctggagaatatcacgatgaccctcgcgaatacctagaagatatgaaagaagccgctaactaa

SEQ ID NO: 201842 - DNA, 297 bp, Klebsiella oxytoca
atgcaagagtttaaaggtacgccaggaccgtgggaaatgaaaaaggaaaagggcgagccggagtggtttgttattaagaaaggctccatgagaaaattgtatggcggaaccattcgcacgccagtcgctgaggagattaataataaacacgatgctaatctcatcgctgccgctccagaattactagaggcgctacgcgaagtgatagggtctcttggggttatggttacagaccctggaaattgtcctgaaataatcaaagctcgatccgtcatagctaaagcactcggcaaataa

SEQ ID NO: 201843 - DNA, 366 bp, Klebsiella oxytoca
atggattacagcaagatgagtgattttgagattaataaggctgttgcagaaattactatcaatggcgactggctacttgaaccaaccgatgaacgtccatcatggttttttaatcacggagtgcaaggcaaaaataccgtcaaactgcccgattactgcaacagcccggcggacgcatggccgataatttctgtaaaccgaatcagtgttgaatacgattctgaggatcaatgtgatattcctgctgaatgggttactgcttacggaattgacgatctaaaggtgcacgttgtggctcatcagccatgcgacaaagccctccgttcggcaatgattgtcttccttatgatgcaggaatcgaagtaa

SEQ ID NO: 201844 - DNA, 309 bp, Klebsiella oxytoca
atgagctacacacccggcccttggaagtggtggacatcgaatagctttcttcggctttccagcgaggcagatggcaaagacggaggcgttatctgccctacagtatcgcgcagtgacggacatccacacctgatagtaaagcgtgaggatatggcgctgattgcggctgcgccagacattctggaggcgctgcaattaatggtagagagattcactccgggagataaagactacatcttattcagcaaacgaatggcgctagctaaagcgaaagtcgcaatagataaagcaaccggagccgccaaataa

SEQ ID NO: 201845 - DNA, 165 bp, Klebsiella oxytoca
atgcctgaattctgggcgttctggataccagtcaacctattcttttggctatacgtcgccgcaactgtcgttaacccgaagagaatacatttcggaatatccgtggtgatgtggttaatcaccggggtttttcctctgattattttcaaaatgctgagtgagtga

SEQ ID NO: 201846 - DNA, 168 bp, Klebsiella oxytoca
atgaaattcagagttaccggtgaatggaatggagagccgttcaatcgcgtcattgaggcagaagactggaatgactgctatgaccactggatgatgtgggcgcaaatcgcacatgcgaatgtgaccaatatgcgcattgaagaaattaaagctgaagccgcccgctga

SEQ ID NO: 201847 - DNA, 318 bp, Klebsiella oxytoca; identical to SEQ ID NO: 197345

SEQ ID NO: 201848 - DNA, 225 bp, Klebsiella oxytoca
atggataaaatatgggaaaaaataacagcattgattctttacctgtcgagatcagaaacgagctggacaaacgtttacgacagtcccgattttcaggtgttggtgatctccttccttggctcggagaaaatggtcactctatttcgagatctgccctctaccgctatgcagcaatctataaggaaagcattcaaccagaaggtaatgatgcaacactaccactga

SEQ ID NO: 201849 - DNA, 147 bp, Klebsiella oxytoca
atgaacgaggggaataaaaaaagcctgctcaaaatgaacaggctcaagaaatatgactatcgaggtttgtggtgccgggtgcctcccggtgaggatgccccaacagacatcactcgcgcggtattcacagggctttcgctctattag

SEQ ID NO: 201850 - DNA, 282 bp, Klebsiella oxytoca
atggcaacagacaagtatggtattgttcctgataatgtttttttatcatctttacttgaaaccggtgttataggtctggcgttgtatataggcctgcttatgtctatttgttattgtatttataagaaaaatgcagaaagtcttcctttactgattgctttcatagcctccgggatgtttgttgatatatcaacgttttggataagcatcccggtgctactcttctttgtcgcggttaacagtcagcgcgatgatcagacaaaaagggtaagcatcgcgtag

SEQ ID NO: 201851 - DNA, 726 bp, Klebsiella oxytoca
atgacaacgcacgaaacccgactcaacgtcgtcgacctctggctgcagaggctgttgacctggacgccaggacagacggatatcatcaaaacggtggcgctggtgctgatggttgtcgatcacaccggtctgctactggccgggaataatgagctcatgcgcctgctggggagaggctgttttcccctgtttggtctggtctggggaatgaacctggcgcgtcacgggcagatccgtcagacacagctgaacagcctgtggtgctgggcgctgatcgcccaggtctcgtttatgctcatcgggtacccgtggtacatggggaatattctgtttagctttgcggtcaccggccaggcgctgcgctggttcagtctgcagacccgcaatgatgttttgctggcgattgcgctggttgtggcgtggctccccttgtctgctgacagctacggtctggccggggtcttcatgctgatcaacagctggcggctttgccgggcgaaggagccggtagagcggatcgggtatgccgtgctgtgggctgtcatggttatgctgatgaatatccatgatatcacccagtctctcgccggcctgacggtcgctttactggtcctggcggtctgttctgacctcggtcgttctgtcccgcgcttctggccgcggcacttttttgtgatgttttatgccgtgcatctggcagtgctgggcatcgttgcctccatgtaa

SEQ ID NO: 201852 - DNA, 435 bp, Klebsiella oxytoca; identical to SEQ ID NO: 177759

SEQ ID NO: 201853 - DNA, 855 bp, Klebsiella oxytoca
gtgtctggaaatatagggtcaaatacagaatccgaatcgctgtcagagtccgagtcactgtccgaatccgaatcgctgtcggaatccgagtcactgtcggagtcagagtcagagtcagaatcggaatcgctgtcggagtccgagtcgctgtcagagtcagaatcactgtcagagtcagaatcgctgtcggagtccgaatcactgtcggaatcggagtcactgtcggaatcggagtcgctgtcgctatccgagtcgctgtccgaatcggcatcgctgtcagagtcagaatcgctgtcgctatccgaatcgctgtcggagtcagaatcgctgtcagaatccgagtcactgtcagaatccgagtcactgtcagaatcggaatcgctgtcagagtcagaatcgctgtcgctatccgagtcactgtcggaatcggagtcgctgtcggagtcggaatcgctgtccgaatccgagtcgctgtcagagtcggaatcgctgtcagagtccgaatcgctgtcagagtccgagtcactgtctgaatccgaatcgctgtcggagtcggagtcgctgtcagagtccgagtcgctgtccgaatccgagtcactgtcagagtcggagtcactgtcgctatccgagtcactgtcagagtccgaatcactgtcactatccgagtcgctgtcggtgtcgtcgctgagatcgacagttaactcaaaaatcggggagcgttcgctgacgttcccggccagatcggtcaccgtggtgctcaggctgtggctgccttcgtccagcgcatcaggtgtgaagctccagcgtccgtcctccccggcaactaccgtacccagtaccgtgtcgccgtcatag

SEQ ID NO: 201854 - DNA, 1122 bp, Klebsiella oxytoca
atgccgtatggatcgtattcagccctgcagttcactacgtctccgacgaaccccatcccggaactgacggactttgtctattccgattttgaggtggattgccaggaccaggtcctgcctgatgaaggctatctcccgcggacgaaggggctctattttaacttctatcgccgcggccacctgcaccgcctgcgggtgagaaactctggcgcgactgggattggcatcgactttgcgcgcgattccgccattactgaatgtgttgtggagaatttcgggcgtctggcaccgtcgggtaacgataaccctgccggtgcatccggtctcgggttaggcgccgggggaacacagagtgagccgctgtatgttgctggcaacttctgccgcaacgggaagaatttcggcatcttccttgagaaacagcatggcaccaacgcgccatacagttctgagcacaccatcatcatggggaatacctgcaccggtaataacggaggtatgggcgattgtggcgtggatggcatgattatgcagggaaacaacttctctgaaaataattatggtgtcgttattagtccggggacggtgctggcttaccccggttcgcgcggcctgttgttgggtaatattatcgccaaaaatgctaaacatggcgtctattacaacagcacaacagagcaacgtgatggtgaatatgcaatcactaataacaccattcgtgataacggggaggatggtgtttgcttcaaagcgccgggccaggaagtccgcagtatggaaatatccggaaaccgtatttataacaacgggcgtcatggattccacctggaagacggtacagccattaatatggacgtgattaataaccgaatctggaataacggcctgaccgcttacgggaacggaattaacctggcatcagaggtaaaactcagctcgttcagtggcaataaaattcgagacatccaggctacacccactcagcaatatccttttaatgccactggcgcactgaccgacgtcgatatttcgtttaaccactgcgttggcaatgcacagaacacgcttaatctgaccggcacacaaacccgcgtcaccactctgaacaatccaggaatctga

SEQ ID NO: 201855 - DNA, 1221 bp, Klebsiella oxytoca
gtgatttacttgccgccaggagtataccggctgagttctttcctcacgcccgcgccgaacgtatcgattattggcgccggtaccggcaaaacaatcctgatgccgtatggctcatattcggcgctccagttcaccacatcaccgacgaaccccatcccggaactgacggattttgtgtattccgattttgaggtggattgtcaggaccaggtgttgccggatgagggttatctccccaggactaaggggctgtattttaacttctaccgccgcggtcacctgcaccgcctgcgcgtgcgaaactctggcgctacggggattggcatcgactttgcgcgcgattccgcgattactgaatgcgtggtggagaactttggtcggctagcgccgtcgggtaacgataaccctgcgggggcatctggtctcggattaggggctggcggtacgcagagcgagccgctgtatgtcgcaggaaacttctgccgcaacgggaagaacttcggcatcttccttgagaaacagcacggaacaaatgcgccttacagctctgaacacacgatagtcaccggcaacacatgtacagggaataacgctggcctgggtgattgtggtgttgatggcatgatcgctaccaataacaacttctcagaaaataattatggcgtgattatcagtccgggaactgtgctggcatatcccggttcgcgcgggcgtctgcagtgcaatattatcgccaaaaatgctaaacatggcgtctattacaacagcacgactgagcagcgagacggcgaataccagattgacagcaataccatccgtgataatggcgaagatggaattaacctcaaagcgccaggccaggaagtccgcagcatgtttatccaggggaatgacgtttatcgaaacggacggcatggtctgaacctggaagacgggacggcgatcaatatggatgtggtaaacaaccgcttctggaataacggcctgaccgcttccgggaacggaattaatctggcctcagaagttaagatcagctcgttcagcgcaaataaaattcgcgacatccagtctacgcctactcagcaatatcctgtttatgccagcggtacgcttaccgatgtcgatatttcatttaaccactgcgtgggtaacgcgcagaacacactaaatctgaccggtacgcaaacccgcgtcaccactctgaacaatccaggaatctga

SEQ ID NO: 201856 - DNA, 855 bp, Klebsiella oxytoca; identical to SEQ ID NO: 201853

SEQ ID NO: 201857 - DNA, 183 bp, Klebsiella oxytoca
atgtggtcagccttcatcatatcaatgggagaaccgcagcaggcgcacacgcccgcgtattgccactgtgtgaccatcaccaccagcacgcagcaccagcagcaatacgcgctgtttatgcctggctggttccggttcacgctgatggaacatgcggaggaaaagccgcatttgaatcgctaa

SEQ ID NO: 201858 - DNA, 1197 bp, Klebsiella oxytoca
atgagcatcgaaaatgtatcaagggtaaaacgtaatcgcggaatacctgtaacgatcaaacgtaaattgcttgagaaatacaatcatgcttgcgctgtatgtggtgttaaagatgacgtggttccacttgagtttgctcatcttgttcccatctatgccggtggtgaatcatctgaagataatttgacaattctttgcccaaattgccaccgaacatttgatcgccagccgcgtgaatatgaattttccagttttctctctgaactattaaaaagtcatcacaacttcagtgatatacaacaagatgtactgttaggacgagcaactcgttataggattgatcttctagtaaaccgacagttaaatgatacaaaggaaattttactaatcgagtgtaagacctatttagcactaactcccgaccatattcataatgtcattgggcagttggaaaaatacaaatccagttacagcaatgctaggatggttctcgctattccagcaaccttgagagcaactgacttgtcggctctgaatgcggcggaaattgaagtgtgggatatcgaatacattgcaaataatttctctaagcaaatagaggttgcatttccaagctactacagggcattatttcttgcacggaatactcggtctaaaaataatgtcactcgcgagcaagagctaattaattctctatcttcttgtactccagggaagaaagactgctacgtgtatcagagcctcgttggagatattcttgaacatttgtttacgccccctcttgggaagccgattccagagctatctgacaagttgaaagccaatcgccgcgacttcatcatgccaaactatactgacaagggattttggcatttcttgcgagaaaagtatgaagctgattacgttgtgattgatgcaaaaaactacacaagaaaagtcaaaaaatctgaggtcttgcaaatcgctaactacttgaaaccacatggagctggtctctttgggttaatcatatctcgcaagggtggtgactcattaggttgtgatcatacgttgagagaacaatggttagttcataaaaaaatgatcttagtgctcgatgacgaagatgttaaagcgatgctatttgccaagtcagatggtcggcagcctgaagaaatattggagcagaaaattgaatgcttcaggctatcaatgtag

SEQ ID NO: 201859 - DNA, 576 bp, Klebsiella oxytoca
atggcacggaaaaataaaagcgtttattcaatttttactgtaacatgtttatatccagtagggagggggaaatatatggatagtgactatataaaatggatgccgtttattacgggtgtattaagtgctcttattgctgctgttgttgcatgtttcattgcaatgttaaataatcacactgcgagggttaagtctcaaaatgaatggcgtagagatagggctgttgaagttataatggagttcagaacggcaatgaaggaatatgataatgccctccatctcaaggcgattgagttaagtgaacaaaattgttatgataagagcgatgccaaacactttttaatcatcaattctttatgtgatgataaaattgattctttagcaattgctaaggaaaagcttgaattgtttgcaccacaaacagttagaaagaaattaatgaaagcctacatttcatatactgatgatatcttggattactatgcatcttatgctattcatgaacctcaaggtataagtaaaactgatattgatatgcaacctctatttttaaaaatcattgacaatttaaaatga

SEQ ID NO: 201860 - DNA, 171 bp, Klebsiella oxytoca
atgaaggcgattaaggggctgaagtttggtgaaacctatattaaccgcgagaactttgaggcgatgcagggtttccatgccggatggcgtaaatcagggataggcggcgccgacgggcgtcacggcctgaatgagtatctgcaaactcaggtggtctatctgcaggcctga

SEQ ID NO: 201861 - DNA, 534 bp, Klebsiella oxytoca
atgaccatgacaactgatatcaccgacctggcgcagagcctgaaagcggcggcagagaaagcgagcggcggcgactgggtaaaagagtctggcgatggctgggatgccacttgcagcaacgatgaccaggccaacagcggattcatcattgcacactttgtagggccggattcagaggctaatcgtgaatttgttcagttggctaaccctgccaacatcctcgcgctggtagaggcgctggagaaggcgctgaagagcaatgagtttctgaaaggccaattgtctgagcttgccaacttcaaccctgattgggacaagcttgaggccagttatgaaagttggcgtgaaattgctgctgaattattggtggcaaaagagcgcatcgccgagccggagtctcgcactgtgaagctgccagagcgttacgcctgcgagctgggttacaacgccccagacccgaacggcgacatgctcgaccgggatgatgttattgccgcgctaatcgccgctggcatcaagtgggaggctgagtga

SEQ ID NO: 201862 - DNA, 153 bp, Klebsiella oxytoca
atgaccaataaccagttaaccagagagcacattgaagatactaattatcgtggtttttggcgtgtaaccgtgtgggcctgcttattctgtgtaatatttttctggttgcccgccattttagtagctatttattatttttcctcggggaattaa

SEQ ID NO: 201863 - DNA, 192 bp, Klebsiella oxytoca
atggagttaacaaaaggcagtatcgtaatttgctataacaatgattatatgacagatattctgactataggaaaggagtacaaggttgaggaaatactggatgaggatttgatgagggtggttggcgtgtcagagccggtatttatctggcgattcatcaaccctgacacattaccctcaaaccatagctaa

SEQ ID NO: 201864 - DNA, 897 bp, Klebsiella oxytoca
atggatatcatcaccgcaggcgacacttacgaaaggcatacgtttgtcggctgtctgtggggtaacggtggttatgcattcaaaatgaataaccccaacgggaaaatttactggattggcggctcagttgattattgtgatggtctggcacaaatcacatccgggcatatggaagttaacggacataacgaatggactggcagaacgaagcccctggtagaaatcaccggcccgaatgcatcgctgaccgtctccggggcaatttttgtgcggggtaatactgatactcaatactatatgtttcagcaatatcagaaacggcaggtgacactgaaagacacggtttttattactgacggtgtgaacgccagtaaaggcctgatatccaaccttgaggttgttaaaagcaatctgacattccctaatgatgcagccaaaagcattgcttataattcatctgatgaaagcctgctgaccagcaataatgctgttgttgatttctcgttatcagcaactgcgaaccatacggtatcagtgacagatggtaaactgacagtgacggctgttaccggcggcaccacttcacatctgtatatcgatatacccgttatgggtaatacaaaggttggtttcaaattagttgcgtcaaatacatccccactgggtgctatatccctgaacaaatcgctgcttactttgagcaaaaggcagatatccgacctgtcgaattcagggacggcatcatggccagccagcgctgccagtatagcgggcgggtcggtgacgctctttgatatccccaggcaggccgcttttctcaggctcgattttaacgtggcaaatctgaccacgggtacgagcttcattattgaatcgctgaaaatgttcacatattaa

SEQ ID NO: 201865 - DNA, 708 bp, Klebsiella oxytoca
atgtcccgagtagttcagtgcgtaacctgcgaaaaatgttgttttggcaaaatgtgcaaagactacctctttgataattccctgaatctgtttaatcaaagcttacaaagaaataaagcgatgagaaaaggcgaatacctttatcgttgcggagattctattacttaccttatggcactgcgttccgggactgtaaaaatttatgatatcaatggtaatatcgttagcgtaaaaattccaggccagttgattggtacagaagatcttgattattctgcctatcaccattgcgccattgctgcgacagatattcagatttgcttacttgaacgcagccgcatttacgacctcagccaaataactgagaactttatcaactacactatagagctactttcatttgagatatttgaacagcagaaaatgatttctgtattggtcagtcccgatacacagaccaaggtcagagagtttcttaaactgattgcacaacgatatgtaaggtacggtttttcaccaggcaatatcccactgcctgtgacgtttaaagaaatgtcaacgctacttggcgtatcgctttccagcctcaatcgcgcgttggctgagcttaaagagagcgatgagatcatagtagagaagaagatgatgcagattaaaaatcaaaaccgtgactacgattcgcggcatgcgttgctcccggaagaatag

SEQ ID NO: 201866 - DNA, 564 bp, Klebsiella oxytoca
atgttcaataagaatttagtcgcagccactattatgattttatccggtagcgtatacgcggcaactgatgaaggtgtagctgggggaactattagttttaacggttcagttaccgacacaacgtgtaacgtcacaacaaacaatggttctgactttactgtcaacctgtctcctattacgaccacggatctgggtacttccgtcggtattgttactaatggtgcaaaagagttcactatggccgtatccggttgcaccggttataccggcgacactgatgctctgaaagtaacctttacaagcggtaacgtctctgacgatgaaaagtatctcactaactacagcggtaccgctgaaggcgtaggtattgctttaacaaaagatggttctactcaggtgaatttcaacgaagcgctggataccggtttaaccgcggcagatgtttcgggtagcaccagtgcgtctaatattacgtattatgctaactactataattacggcggcgctgcaacgtctaccggtagtgttgtaactgcggcaacgtataccttcagttacgaataa

SEQ ID NO: 201867 - DNA, 717 bp, Klebsiella oxytoca
atgaaaaagctaatatttttattatctgcaatggtcattccttttgccagtaatgccagcgtagtgattaatgcgacacgcgttatttatccggctcaatcgaaatatgtcaatgtgcagctggtaaaccggagtaaaactacacatctggttcagtcatggatagatactggaaacccgtcagcggcaccggaaaccatcaaaacaccttttagcctgactccccctgtggtcaaaatggcaccgaatgaagggcaggcgctgaagctttcgattatcaatagcgggctcatgcctgacgacagggaaagtgtttattggttgaatgtgctagatgtccccccggttcccgaaggggctacaaaaggtgaaaattatctgcaggttgccttacgaagccgcattaagctgctttatcgtccgcaaagtttatcggaacccgataacgagatgatgaaaaaagtgagcgtgagccagcaatctggcgcggtctgtttgaaaaatgacacaccttactatatcactattacggaaataattagctggcacggcggagatgttaagaaaaagacgacagataaaaatctattaacgagcgctgcatttattgctccgtttagctgtacacaggttgtcggtactattaagcctgcgggacattaccgtgcggcatggattgatgattacggttcaaagcgttatgcactaatcggttga

SEQ ID NO: 201868 - DNA, 2496 bp, Klebsiella oxytoca
atgaaatataaaaaaattctccgccgaggtttattagttaaatccatttgggctgcgctgtatattagctcctcttcagcagaagacttcaataatagtttattgatgggcaactctgcgaatatggactggaataacaaagccgttattatgactcccggtgaatatgtttttgatgtttatattaacgatgactggaaaggaaagtacacattcattgtcgaaaatgataataaaggtacgttgaagattaaaacttccgatgtccggatgttagatattcgcgatcttgagccggttcttgcactggagaaggaagcctacatcaatgtggataagatcctccatggtggttcacgttcactcaagccaggcgagatgcgtgtcaatctggaagtaccgcaggcatacgtcaaccgcactgaaagaaactggatatcgcctgaaaaatgggattcgggcattaatggggcgtttactaattataatctgagttattacaatttccgtggtaaaacagcgggatatacagactcagaaaatgtttatctttccctaaatagcggtctgaattttgggggatggcatcttattgataattccagctacagccgttctagctcaggagaatcagggaaatggcgtaattcaacacgttatcttgagcgcccttttgcggcgatcaacgcgattgtgcgagtcggtgatgcctatacctcatcggaatattttgacagcgttcgctttcgtggattaacggttaataaaagtcaactgatgctgccggatagccagcgtgtctatatgccggtcgtgagcggggttgccatcagttctgcggtcgttcgcgtcctgcaggatggtaacgttatttatcagattaccgtaccgcctggtccctttgcgattcgcgatttgatgccgactggctcaagaaacgaactacgtgtagaagtaaaaaataacgatggccaggttgaaatctttacggtgccgttctcttccatgccggaaatgctacgccctggtaccagcgactatcgtttcaacgtcggtgaagtgaatatgcgcggtacatcggacagttcgaaatttttacaatacagctatacgtatggcgtgaacaactatatgtctatttttgccggattaatgctcagcaatgactataaatcctggctggcaggtagcacggtttcgttaccctacattggctctttctcgggaaacgtcgagcaggcacgctatcaacttccggatgcggagaatcaaagtggagagaaatactctgtgtcatggagtaagtacttccagacgaagaccaacgtgacgttagcgtcctattattatcgcactcaggattatgcttctttcagcgactatattgctacccgtgaaaatctggatcggcttggttacatcaataccacgcgtaacagtaagcaagcgtttagtgcgtcggtatcgcaaacgctgccgcagaaattcggtaagttaacgctcaccggtttctggcggaattactggaataatcaacgcagcaaccgtcagtataacctgacgtatagcaataattatcaaaatattacttacagcctatctttgcggcgcacagagtatacacagagctattacgacagtgattacgatggtgataaagtgagtaatctgcgaaagatgaaaaacgcggatgaaagtctctatttttcgctaaccatcccgatgagtattttcgagacgcacgcaacagtctcttcgcggacgacggttgagaaaggtaaatataccaactcggacgttagcctgagcggcgaagcgaaagatatcagctatagcatggtgttaactaatgacaatgatgcaaaatcgcggtcggcggatctttacgcctcctgggataccagctacagcagcctgagcaccggtctgacggaagctacggattatcgtcagatgagtcttggggccagcggtaatattctggcatggtcatccggcatactggcatcaggtacgaccgggcgaaattttgtcattattgatgccccgggacttagcaacgcggtggtcaacgggaatactgcggttcgaacgaataccagaggacaagcgttatcaaccagcgcggtagcctatcgacaaaactattaccgcctggatcctgatggaaatcaagatagtagcgtcgatcttttaggtaatattgaatacatcgcgccatatgaaggcagtatcacctatctgaaatataagacggatactcgcaagacatttacgctgaatgttatgcggccgggaaatgaggcacttccgttcggtgccgccgttatggacgaacagggaagtctgctgggatatgtgtctcagggaagccaagtttatctgaaggcggatacgttgccaaaggtattaaaagttaatattagcagtaaaaaacaaaagcagtactgttctgtcgtagcccctacggagaacggtttaaatacgtgccgctag

SEQ ID NO: 201869 - DNA, 639 bp, Klebsiella oxytoca
atggcatatagatattatatcgattctgataatacttatttggctctggctatacataacattctggatagcatcgggccagagagccaggccgtatcgacacggcgaatgcgtatagttgtgctctcagagaaaaaacggatccaggatctgcttacggttaaaaaccgccgtattgaagagtatgatctgattatctgctcagagccctactattcgctttgtcgccaatatttggttaaaggcaaaggtaacatagtcagtttggataaaggacttaaggcattacagaaggatttgtatgcctacatccataattgcaaagacgtattatattcacatgatgtcagccggctaaagatattaacccaggatgagcgcattacgattacgaactatatctctcaaaatgactatcggtatatggcgcaaatgcatgttcgcgacggaaaagctatatcgcgcttgaaacgagcagcgatgctgaaactgggttatcgcaataatatggtgctctggctagcaataaattttatcttctttctgggttacattactttgaacccttcggaaagaaacgacaagaaaatttatcattctcattcgaaacaattacaggataatcaatttaacccttga

SEQ ID NO: 201870 - DNA, 846 bp, Klebsiella oxytoca
atgaaatacagtatcgttgagaaaatcatatttgattctgactctaactggattgtctgcagagacaacgatagcgtgttgattgagaaaaaactctccagaacggcgtctcaaatactcgctatcctgttagcgaactatggtgaactggtagaacgagattatcttttaagtgaagtatgggaaactcgcggtcatcatggttctaactcttcacttaatcagtacatcagtatactgagaaaaactttacatgagatggggataccgaaagactgcatcgtttctgagcctaaaaaaggatttattttctccagagcggttccagtagctgagctattttccccagagccgttggcgcaggaggacagtttacccgatgagttgccgcaacaggtcgttatcacccccgctgcgataggatctcttgcggcaggcggattgcgtcccgatcgtaatacggtcatcaatatggcactatggattttagtggctatcactatgatagcttcgctttttgtacttaataagacgagaaatatcacctccagccatgaaccagtaaagctgttcaccttgaaaaattgtcaggtgctttcggatactaatcattacctatcctatcagacaatcatgaaacacatcatctatgatattcatccagatatcgaagtaatgtgctccccggcaaatatggttgtatttttaaaaatacaaccaagcatttactttggccacgcggggcgtgtttttctggcactatgcacaggcaaaccgaatggtaatggcttaacctattgcgataacaactatcgctatcaatactcatatattcggaagcaataa

SEQ ID NO: 201871 - DNA, 474 bp, Klebsiella oxytoca
atgcgttggctaccttctttacttctgatactcagcatcgcattgttgtctgtattaattattatgtattctcccgggcctgactactttaatgcaagctgccgggcacacatggattatcgagggattacacagggagaaggttttgattttgaaggtgatatatcctttttttttaataacgatcgaactggcagatattatatatcaggcattataaacgacaacgagaggagctaccccatctcgcggtttgtgacctttacgtatcaaaacaatggaaaaaaagtatatacctttaggcgtgttaacgttgagaagtcagtgcatgataatctttctgatatgactcagggtaaatcaaagaggatgttgccgttaacgcaaaaaatatcatttaatattggggtgaataaaaattatatcattttcagtaatgcggtaagcccgctatttatttgcataaggtcttaa

SEQ ID NO: 201872 - DNA, 1119 bp, Klebsiella oxytoca
atgtttaaaaaaatacttcactcaacaatctttttctttttgcttattctgcttggatgtcagttagcatcagcctcgtgtggcattcttcttggcagcgtcaagcattctgaaaagtcgataaacctctccaccgcgtttaccgcttcgacggtttataccgttaactatacctccaattggtcaggttcatttacctgtacactcggtcttgggcttgatgcggtctacttcttttccgctttcggcaacaagcctgtatatctaaactataccagtcctgatggcacggaagattactggatcaaagtcacgaatcaaattaccggtagtaccaaaactaccgttagcgggcttgccggtgtacacagtctgggaagctatcaaacgcaatacaccttgacgttcgaatatctgagcaaaaagcccgaaggggtgagcacgtctaccaaaacgaccacttccggatccatttacattgttccagccgtggtcagcgacagttcatccagtaccacatactgtactagcatattgctttgtcaaagccagagctacgcggacaatgtgtggagttatatgatgaatgacacgacttcatggtcatcagcacgttatctgggttacgagagaatagcgattaactttgaaccaaagcaaaccacctgcaaccttacacatgatttaaccatcaaacttcctcccgcgacactggatactctactggcccagggtgaagcgcccggtacgagcttccgcctgcccgtggtatgccgtgatgctatgggtgatactatatcgacccgaaatattaccggctggctctcgagctccgatattcttagcaacgcggacaaaggcaccgtattagttaatgaagactcggaagcgggtggagtcggcgtctcggttcgcaccgcttcgatcggcaatgatattacttttgccagcggttcgtcacagcaaggtgccactgaaatcttttccttgcacacaggtgattccatcgagtcagcattcaatgtcaatctttatgcctactacaaagtttatgacaccaccaagatctcgacgggtaatgtatttgctaccgcacaactaatgctaggctatgactga

SEQ ID NO: 201873 - DNA, 264 bp, Klebsiella oxytoca
atgattaatctatctcgtcttttcttttttttcctcttactgatatatttctcttcgtctgcaaatacagtacagtttattggtcgcgttattgacaattctgcttcggctcgagaaacctgcctcaacctggccataaaaagtaaagaggcaacgtgctctgctgaaaccggtacagttattacaagcagcattaaaaataaaccaatccaatataaaggcaaatcaggacaggccagaattgtcactttcaattataaataa

SEQ ID NO: 201874 - DNA, 207 bp, Klebsiella oxytoca
ttgctcaacagccatgacggctcattaagctaccagatgctgccgggactatttcgtggcgtctgtaccaacggcctggtcagcggtccgtctttcggagaagtgtgggtgccacataaagggaatgtcgttgagaaggtgattgaagagcctaacgaagtacgcggggtctttgaccgagtggatgaaaagcgcgatgcgatgtag

SEQ ID NO: 201875 - DNA, 1215 bp, Klebsiella oxytoca
atggtaacggtaactaatagtactgcatacggctcacttttttcctcattgcgtagctgctcagaaataacgccaccatgtgaaataaaagatggcacaagcgacatcatcgaagactttaatgtaaagtgtgaaagctatataggaattttaaaatcccatacgtcaaacctagcaaatcatcatcacttatcaactaaaatggctatgcaaaggctacgacgttatatgaggaccatctacgatgttcaagacaccatatctgagtgtttagagcattttttgtcaggtgatattcaagctgcctacgacctcttcgataagacctttagtagtaaaagtaaaagtgagcatcttaaaaacatttgtataaacctgaacgaaatttgtaatgatgacagaccattatatagagtaaggaaatcagatcggtttttagaagatcgcaaggaattatttcacatcccatttacaatgagacacttagtaagtgcacaaagatattctgttgctggccttccttgtctatacctcggaacatcactatatatttgctggcaagaaatgggaaagcctgactttgatagactttatatatcgtcatttaaatcgataagcagcccaaccgacaagttaatattaaacttctcctcggaattattaaactcgtcaatatcccttaaaaaagattatattctaagagttatccccgaggagatattaatttcatatttatgtttgtggccattaataattgcatgcaactacatcaaaaagcaacctgatgcagcgtttaatgaagagtacatcattcctaacatattaatgcaatggataagcaaaagagagcgctcacctataattggcatagcatatcgctcaactaaaataacatccatcaagcatagcaacttggcaattaatgttgtaattccacctaaagcaacttacaagcaaatgacaacaaatttatattgcccaactctttctaaaacattcaaattaacaaagcctatatcatggcaacttcttaaaaccttagattatccaattaaaagagatacagaatttgataaggcaatcgatcatatacaaaatagagaaattcaaaactttcatgaagatttggttaaattttatccaataaccgatttcagacgtcttgaaaagaccattgatgaagttttaccttatgagccaatagaaggcaattaa

SEQ ID NO: 201876 - DNA, 633 bp, Klebsiella oxytoca
atgagatctatcaaggttggcaatgacagcggaggacgtgaagcaatcaataggctgattaaggcttataaattcaactctcgacagcaactatgcgaccatctttctgtttcaaaaagcactatggcaaacagatatttaagggatagttttcccgcggaatgggttatacagtgcgctcttgaaactggggtttcgctactttggttagctaccgggcagggagataaaaatgataataatgctcaggaaaatagttttggttttgtgaaccactcccacatcaaaccgttatccgaggtagtagcacctgagattgacaaggccacattggatggtggagctttagttgaccatggaaaagtcatactagataacagcctgatccctcacaacataactaatccgtggctcatccatacggatgatggttcctatctcgttgaccgtagcggcactccgccagtaaacggtacatggctcgtcgatatcgatgggataaaaacgatggcaaagcttgcacgaatccccggtaatcgattagttgtccagcagggcgaatcatcttttgagtgcagccttgatgatattgaggtcgtaggccgggcagttaaagtcataaagagcatctga

SEQ ID NO: 201877 - DNA, 234 bp, Klebsiella oxytoca
atgcgaaatatagaaacccgttccaacaaaatcggcccggatgatgcaggtcttaaccagatactgacagaggcccgcatggaagaacgccgtgcacgtgctgcggcaatggctgcccgtcttgatagcctggcgtgtcacatcacatcgcgccagcttaatcacgttgaggcggcggagctgctgcgcgttgctgcggaaaacatccagaacgaagcgcaggagatccactga

SEQ ID NO: 201878 - DNA, 888 bp, Klebsiella oxytoca
atgagcaccatactgaaatgggcgggcaataaaaccgccgtcatgcatgagctgaaaaagcacctgcctgcaggcccgcgactggttgaacctttcgcgggttcatgcgctgtaatgatggcgacagagtatcctcattatcttgtcgcggatattaattcagacctgattaatctttataagcagattgcatttgactgtgagaagttcatttcaaatgcaaaacatttctttttaggcacaaatagcgcagagtcttattacaacatccgtcaggactttaatcattcgtctgaaatcactgatttctggaaagctgtatttttcctttatctaaatcgccactgttatcgtggattgtgcagttataacaggaaaggtgaatttaacgttccatacgggaattataaaaaaccatatttcccggaagacgaaatcagagcatttgcagagaaagcaaaacgcgccaccttcatttgtgccagctatgaggaaactttagcaatggtcaaagtaggtgatgtgatttattgcgacccaccttatgacggtacatttaccgattatcacactgatggtttcaatgagcttgaacagcgtcgcctggcgacgactcttgatgtacttgcatcagcaggccatcaggttgttgtgtcgaacagtgaaaccgagctgacgaacgcgatttaccagagttttacccgccaccgtattaacgcaaaacgcagtatgggcgttgccggtggtgatggtaagtctgcaactgaaattatcgctgtttctcaacctctgatctggtccgggtttgatctggcagcgtatccagtcgtgagtgcgtcttacgaaactttccaaagagagtatttgtgtgagccatcacgacgttaa

SEQ ID NO: 201879 - DNA, 186 bp, Klebsiella oxytoca
atggtagcgagtcagagattgacctgtttctgcgcggcggcagtattccgtcaggtgccgggtggcgtattttttaccgcaaccaccggctgcaggaagatgacaaatggcgtcagtgatactgatgccaaggatttagcaattcttgctcttattggtccgcatcagatctatccaattgactga

SEQ ID NO: 201880 - DNA, 1056 bp, Klebsiella oxytoca
atgtctcttacttatgtcgaatttgggaaagttgacctctctgacgttttttttgactcgcttaaaaatgactacccagcttttgaaaattggttcctaaaaaaaagaaatgagaaagcatacgtatcttatgacgactatggaaaaatagatggttttttatatctcaaaatcgaaaatgaagaattaaatgatatgaccccatcattccctgtgaaaaaacgtcttaaatgtgggacattcaaaatagatgctcgtggaacgaaaatgggggagagatttgtaaggaaaatatttgactttgcaatgcctcatgatattcaggaagtgtatgttactatctttgataagcataagggattgataggtttacttgaacgctatggttttaaattgtgttcaagaaaaaaacttgagacagaaaacggttgtgaaggtgtctattttaagaattttaactggaagttgtcatcagcatcagtttatgataactatcctatgataaaaatgaatggaagaaattttttattagctattaaaccagagtttcattcaaagcttttccctgagtcgattttaagaaatgaaaatgattctattttagaagatgttacctatactaatagtattcataagatatatattggtgcaatgaaaggtatggagtttcttcagcctggagataatataattatttatcgaacgtcagatgggctgggtccagccaaatatcggtcggtggctacttctgtttgtacattacaagagtataaaaacattcgagaattttcttcatataatgattttaagtcttattgtggaggcgctagtattttttctgatgaggaattgcaagcttattataggaaatgttatcctccgcatgtaattaagttaacttacaatttccctttgcgaaaaagaatcattcgagatgaattattgaatgttttaggttatactccaagttactcaggattctttgcgttaagtgatgtccactttaaagctgttttaagtgcgggaaaggtaaatgaaaattttattgtcgattaa

SEQ ID NO: 201881 - DNA, 585 bp, Klebsiella oxytoca
atgacagatagtgtgaaaatttttaactgtggtacctaccatccatatcgctatcgtggggctcttaatccgaaagctggtgatagtctatcccgttctatgatggacttaaaggaccctaagaatggtaattacaacgcggcaattcaaacgttctcaaccttgattatcaagacattacctacttttaactatcgatttggcaatgccgggagttggacaaaacatattgatgtacctttcgaggtggtagtcatcccatcacatgagcagggaaaaatctcaaaagctcttgaggctatcgctaaaaatatttgcagtcattacgctaatggtacgttttctcaatctttaatgagaaacgttaccgtcgaaagcgcccataagggaggcgatcgttctgtagagaaccatatgaatactatttctgtaatttcgaacgtttctggaaaagttatcgtattgatagacgatgttacgacaaccggtggaagtatgactgcgtgtgtaaatctgttaaaatctaaaggtgcaaaggtagtattgccattggctttgttagaaacagcaagttatgaggagtaa

SEQ ID NO: 201882 - DNA, 963 bp, Klebsiella oxytoca
gtgcacccttcaaatctgaaacgatacttaggccttactgtacaaacagaaagactaacatcagaacaagggttatttaaactcataagttctttgcgatttgagtctttaagggatttacacgatctaattgaatcggtgaatatgacttcaattctcaaaaacaagttgagcatatcagcattttcagatacagagaaatactttgatatacatcgtaagtatgatgtgaaaattatcccttttggcgatgaattgtatcctatttgtttggcgatgactcctaatcctcctgctatgttgtatttgagaggggatgaaaatattttaaatgaaatgcctggtgttgctattgtaggctctagaaatgtatctgcggcgggtgaggaaataactagaagagttacggctagagtttgtgataaagggctggtaattatcagcggtttagctattggtactgatgctaatgcacatgttgccgctcttaatgcgggggcgaaaacaatagcagtattagcacatggtttggaattagcaaaacctaaacaaaatgcaaggttggggatggaaattttagagagaaatggagcttggatatcggaatatccggtgggccgcccagcttttaagcaatcatttgttcaacgaaataggattcaggtcggattgtctgctacatctattttaatcgaagcagctaaaggtagtggtactatgactcaggcagattttgccacaaaagctgctaggccaatatttgcagtggtacctcacaaagataataatccattaaagcttaactgtgaaggtaacattgatttggttgagcgaaatctagcgactccgctcagaacaagtaatgactatgatgagctagtgtctgtgatagaaacgtctataaaacgtattaaagaatgctccaatatttatgttgggaataaagaagcatctttgttctag

SEQ ID NO: 201883 - DNA, 444 bp, Klebsiella oxytoca
gtggctgagctgcaggaagttgatgcctggttagatgcgctgctggcggggctggagcctgccgcacgtaagcgcatgatgcgggagctggcgcagcagctgcgccgcagccagcagaaaaatatccgaatgcaacgtaacccggatgggaccgcatacgagccgcgccgcgtgacggcccgcacgaagcaggggcgcatccgtcggcagatgtttgcaaaactccgcaccacaaaatacctgaaagccgtcgccagccaggactctgccagtgtcgaatttgagggtagagtgcaacgcattgcctgcgttcatcattatggcctacgtgaacgcgtcagccgtaaagggccggtggtaaagtattcgcagcgtcgtttgcttggtttaaatcatgagatagatgaggctttccttgagattatttttcgtgggttattttga

SEQ ID NO: 201884 - DNA, 765 bp, Klebsiella oxytoca
atgaacaaaaatttagaactttttataaacaaatttattcataaactatttcctgaattcagcaacaaggtgacatggttattaatcacattcggaataagcattcttgcattaccagcgccaacatacatattattcataaacctaataattgacttttacaataaaaccaccaagtcaaatgtcatgctaatagacattgataaaattgcaccaagtagcggcatagcattaactttgattttatccggactgggttatcacctaattataaaagggttccaaacttaccttgaaatatttaaagaaaacaatgaaaaatatcaatccgatatgtttagagctgcagacaccactctttacaatcaattcattgagttactaccaccagactcactagccatagaattacttaaagatcaagattttggtcattcatttcatgagaaatcagttgattacttcaataaacttaattacaaatggggactagcaaatcaacatttccatgatgatgaattagaaaagaaagccacgcaactctgtgatgagataaaaaatttttataattttatatctttacattctaactatttaaatcaaggacctttactcagcatgctttctgactgggatagagccatggatattcaatgggccccgaaaactgaagaaaacgtaaaaaaagccaataaatggggcaccgaaatttataatctatattgtgatttcatcatcacatgcaaaaaaaggttggctgtataa

SEQ ID NO: 201885 - DNA, 594 bp, Klebsiella oxytoca
atgaatagcctgttaccgccgggatcgtccgcgctggagcgcaggctggcgcaggcctgttctggaatcagcgatttaaacgtgccgctgcgcgacctgtggaacccgtggaaatgcccggcaggttttttgccttatctggcatgggcgttttctgtcgatagctgggatgagagctggagtgaacaggaaaaacgaacggttatcagtgagtcgttccggctccatcagcacaaaggaacgatagctgcaattcgccgggtagttgaaaaaatgggatatgccttctcaattgaagagtggtgggaagtggcagatccggcaggaacattccggcttgaggtcgatgtgaatgatattggtgtcacgtccagaatgctggatgagttgacccggttgattaacgatgcaaagcccgttagccgccacctggcacaattcaatatatccgcgaaagtgcatggaaatgttcatgtcggctcaacgctgtgcagcggcgacattatcagtatttaccccgcaggatatgaggcggaagaaaacattacttataacggcgtgatttttcacgacagcaattttcactacaggtaa

SEQ ID NO: 201886 - DNA, 585 bp, Klebsiella oxytoca
gtggcaagtgcaaacaaactcacgctgttcatcgttatctttatgctgttggggatcctctccggcgcggccattcacgcatacgccgcgcaaacaaccataaccgcatggtctgaaaatattacgctgctgaccgacgtgttcctgcgcctgattaaaatggtgattgcgccattagtcttcagtacgctcaccgtcggcattatgcggcttggcgaaacggctaccattgggcgggtcggcggtaaagccatggtgtggtttgttacctcttcgattctctccattctggttgggctggtgattgttacccttgagcaccccggcgccgggttgaatctggcaattccgaaagagtcggtcgataccggcctggcggtgagcgggatgagcctgaaaggctttctgacgcatactattccgaccagcattaccgaagcgatggccaacaacgaaattctgcaaatcgtggtgttctcgatgttcttcggcattgccggagcgtcgctgggggaaaaattcaacgctccgctggtggcggccctgaacgtggtttcccatattatgctgaaggtcaccgggtaa

SEQ ID NO: 201887 - DNA, 198 bp, Klebsiella oxytoca
atgaacagagcctctcccgttgatttaaggaaatgccttgaggccgcacatggcctcgctcatatcggcatccgttttgtgccgatcccggtagcgacagaggaagagttccaggcactgtctgccgagctttcacgaaagttgagcttgatgcggaaaaaagcgaaggcggtgaagcatgagcgcagaaatcattga

SEQ ID NO: 201888 - DNA, 207 bp, Klebsiella oxytoca; identical to SEQ ID NO: 119948

SEQ ID NO: 201889 - DNA, 162 bp, Klebsiella oxytoca
atgatgacagtaacccacaacggcaagcagtacaccgccaaaaagctcaacgataacgagtggcagctgacgtcgatatcggcaccgcgggaaaaactggtgctgaaccgctggcagatgcatatcgctggcctcctggaacaggttgaggtgaaggtatga

SEQ ID NO: 201890 - DNA, 261 bp, Klebsiella oxytoca
atgagcactgtaaagatgattggcgccagtccactaactggaacaattttcgaaggacgacttaacccagtcaaaagctgctgggttggaaagaaaacagatgttaccgatatggttctgagagctaccgctgaccacctctacgttgtgaaaaaggaatatgcgttcccgttacgagacggaaaggtggctgtgttgagcatgcagattttcgatgaaatgccagagcgcttcattggtggcacggagcatggcgaatga

SEQ ID NO: 201891 - DNA, 483 bp, Klebsiella oxytoca
atgaaaaactcaattttgatatcgctactgctttgctcaacgtctctttatgcgcaggacatggctttagttgatcaagcaaaaaacgcagttgttgacaacctgaaggctcgtgatgcaacaaacaagtgcactgagtttatgaggttagctgctgatgatgaatccaagaagccttttgctttagccacttgtgacaatacctttgccgttgcaaacggacttacctttagtgatgtcacagttgtcgaatcagaaggtggcaaggctgtctgtggcgtggtttctggaaaaacacacctcagcaaaattggcgcaaggttcgtatacgctgaaaaaaacaaatctgtaacgattaaaccttctaagcagccggtaatgacaagctctgcggctggagatcttgggcgcaaccaggtaaaaatggagaataaacaatatgaactggtttataccgcctattgccagtctccaacaagctaa

SEQ ID NO: 201892 - DNA, 219 bp, Klebsiella oxytoca
atgaacaacatccgaaaaatccgcagaaacatcggcttaactcagcgccagatggccgaagagctgaacctgacgaccggtgcggtatgtcattacgaaaaaaacaaacgcagcttaagccttgagcagtgccgggcgattgttgcagctctgaataagcatggcgcttcagtaagcgtcgatgatgtttttccaccaatcaacagtaatgccgcttaa

SEQ ID NO: 201893 - DNA, 546 bp, Klebsiella oxytoca
atgcattcacttgcgtatcaacaaggtaacaaattttcgccaacggcgatgatttaccagaatcgccgggaacctgattccaaggcgttaaacatcgatgggatccgcgcggcagtacgcgcctgggcagctgattgccgcagccgtgaatttgtcgcagcgctgattgtagaagagtggcgggcaaccggcggaaccggtctggatatcccgaccgactcgcaccgccagatgcagaaggtattccgctggatcgacggcgacaccgaatacgccgccaacaacattcgccagctggccccggcaatcatgtccgtcctgccactggagtaccgcaaccgcctggcaccacagaacgacacgatgtcgctgatcgcctctgcgatgaaagagtgtgccgaagctaagcaggccgtgctgctggacgctccagagcatcagaagctgaaagaggtaagcgagggtatagcgtcgctgttccgtctcatgccggagcaggtagggccactgatgacgatggttacttcgatgttgggggttatgtga

SEQ ID NO: 201894 - DNA, 147 bp, Klebsiella oxytoca
atggcaaaaaatccacgctattaccataccgctgtacataaaaacataacccgcgaccgcttcatccgctcggttaacccgattgtggcagagaagatgcgcgccattctggaagaactgaaacgtaaggagagtggccgtgggtaa

SEQ ID NO: 201895 - DNA, 315 bp, Klebsiella oxytoca
atgagtgctaaatccatgacagggcgtgaagctatcgagtggtatctggaaggatgcggttcattcactgcggagctggtatgcgaagcaaccggagtgtcccgatctcaggtgctggcggcatcgttcaagatgcggcagaacggagagattgttcttcgagaacgtaactggcgaaccaatgtttacgtggccgccgaagacgaccaagggaagccgatcagtcgcgacggcgagaacacaattttccaggagtgccgcaacagcgcggctatgaagcgagtattgatggtttgggggagggtaggggtatga

SEQ ID NO: 201896 - DNA, 189 bp, Klebsiella oxytoca
atgagcaacatcgacaaacaggcgctgctggatgagctggaagccaaagacaatcgtgctgtcgaaatgccaaccttcgacggctatgtgccacacattgcgcgagagctccaagcggcattccgcattgcctgtgattacgctggcatcaaagtctccgctggcaccgatgagggagatcgagcatga

SEQ ID NO: 201897 - DNA, 309 bp, Klebsiella oxytoca
atgaaaacttattacatccacccgatggcattcggtagcacgaaaaaccccggctacggccatgtacccgttgtgaaggctgacgaagcagagaagctacgcgccaagttggaagccgcagagaagcggattgctgagctggaggcgcgtacattggttccggtcgagcccacgcttgatcagctggtagctggtaagcgccgattgacttcatccgggcgcatgtctcgactgatgtcacagcgcctggctgaagtatatcgtgcgatggttaacgccgccgcagccggtaaaggagaggcatcatga

SEQ ID NO: 201898 - DNA, 495 bp, Klebsiella oxytoca
atgaaaccagctaacttagcaccggtttattgcgccctctaccctgcgcttgcagagatagctcgcaagcacggctatgcgatggctattcacgggacaatggcgcgtgactttgatctgatttgcatcccctgggtagagactccatcaaaaccagaggaagtcgttgcagagataactgcaacctatgcgactacagatatcaccagccctggctataagcatcacggtcgccttgcttactctgtgtgctttggatttggcgagttctttgctgacctgtcattcatgcctgccgaatcagctttcaatgacggtgtaactgctgccgcgaactgggtggataaacagcgagagtcttacgacagcgagcatggccgcacggatagcgacacaggcacgtttgagtttggtaatgacgctcagcgcgactactcagaatcgttatttgatattgccgaaggtatcaggaattccgtgaggactaacccatga

SEQ ID NO: 201899 - DNA, 480 bp, Klebsiella oxytoca
atgagcactattaccagagaacctgtgacgcacaacctcaaaatttggcctgaatacttcgcagcggtccgggatggacttaagcgcgcagaactgcgttggaatgaccgtgagtatcaggctggcgacactctcgaccttttcgagtgggatccgaatgaagaagccttcacgggtgatttcatcagcgttaccgttacgcacgttgctgagcttggtcagtggatgccgggttacgtgctgctgagtgtctccccgccagcgccggtatctgtgccgggcaccgcagtaaagttgttggatatgctcgatagacacaccattgagcttggttggggtgagaaaccgataacactggctgagctcgtcacttctcgtgatggtgatgaggagcttaacgcctgccgcgccgccatgcttcagggggcagaacctgtaacgacggattgcaagttgtctaaattcactgattctcaatga

SEQ ID NO: 201900 - DNA, 813 bp, Klebsiella oxytoca
atgattttcatgagtcataatcataaagacaaggattttgttgagcatatctcaaataaaattgctgctatatatggagtagaaaatgtattttacgattcttggtctatccaacccggtgatgggattattgataagatggacatagggttaagcaatgcaaaatttttcttctttttcgtgacgaaaaacagccttgctagcaaaatggttgggcttgagtggcaaaatgctttgatgcgggcatctgctaatcagctgacattcataccaataaaatgtgatgattcggtaatgccagccttattaactcaaaatctctatctagacctttatactacaggtatagacgttattatagcacaaattaaagatattattgatggtaagagcaccttcaaaccaaaggatgaagaattttctaatctttcttttgacgttaagtttgatgacaaaaagcttaaagttaggattaccgcagattactttagtgaggtgttagcggattttatttttgttttaaatgataagtacacagaggcagatcttaggtggcatgtgcctggtgaagcaagcatcatctctggtactgcagcaaatcatactctcaatgatggtaataagtgtttcgccttaagaatagcacttcatcatggaatcacgccaaaaattcctgttgatgttgagattagcttggtcacaggagaaaggcccgacctactcgcagtaatgtcaaaggaatctgcaactacctacaaatcaataccattcaagaaaaaaaacgactttagcacctttgattttaagttttag

SEQ ID NO: 201901 - DNA, 171 bp, Klebsiella oxytoca
atgtctactccactttcccgcgtcatcacaaacgaaatcttccgcgttccggcgcgccgccagcgcaaggccgtggttaagccgtccgaaatcccgaccatgaaggactacaccgcccgcctggttgatcagaaatggctgcgtctcgcggcgaggagaaaatccgcatga

SEQ ID NO: 201902 - DNA, 570 bp, Klebsiella oxytoca
atgaataatctacctgacgattattttttggatgctgacgatgaactcgttgcttttctggaaaagcagggtgaggactgtatacgagagattcatcagtccaattcactcaacaaagaaaatggtcagaagcttttgagcatacttattgccggtattggctcgtcttttttgttgctaacccaacgcacaggtttagattatctcaccgccggcatgtcggtttttttagtctactggtcactgtgtgcgtcttatcttattcgtcgtgttctcgttgtaaggtcacgggcactcgtatcatcgacaccctatgcattgtatcatgacggttataaggggtttactgaagttgattactctggttttgaatcgaaaggattttcagcaaaacgttctacgctgaacattctgaggcgctaccggcttgcagatttaaccagaatggctgaaatgagtaaaatagagaatgccagaataggccaagaactcgaaagggtaaggattgcaacaatctttacccctgtttgcgcacttgttatttcagcacttacttaccttttcttctga

SEQ ID NO: 201903 - DNA, 462 bp, Klebsiella oxytoca
atgagccgcttaaccgccattatcagcgcagtgtttatcggcctgattgtttgtctcgggtggctggctaatcactaccacgacaactccacagagtttaaaaagcagcgcgacgagaaaactaaggcgctcaatctggcgaatgccaccatcactgacatgcagacccgccagcgtgatgccgctgcactggatgccaaatacaccggagaactggctgatgctaaagccactatcgatcatcttgagcgcgatgttgctgctggcaagcgtcggctgcagctcaacgccagatgccccgcgaacggagcgaccgcaaccggcggcatgggcgatgcttccagcccccgacttactgactccgctgaacggaattatttcaccctcagaaagcgaatcgccacagtgacgaagcaggtaggctatctgcaggagtacatcaaagagcagtgccttaagtag

SEQ ID NO: 201904 - DNA, 204 bp, Klebsiella oxytoca
atgaccatgacaatgacaatcggccctatcatgttaactcttgatatgagagagcaggttgcacgttcgcgcgaagtacttgacgagttgcagcgtagagcgagtgggcttagccctctaatctcagaggaggacgcgctacgcattctcctcctcggtatgacatttgattacctgaaggccaggaaatcattgggggattaa

SEQ ID NO: 201905 - DNA, 336 bp, Klebsiella oxytoca
atgtctacagaatctcttctcgataccatgctcgaacatgatcggttccatggccaagatgcgatggtggctggaatagctcagagggctgtaaataatggttacgaaaacttaactccgcgacaaaaagcggtactagtaccgtttctcacccaaccttgcgatggcgtaaccgaccctggcgggtatcacaatgactgccagcatattcttgaaggtgatgatcttgaaagcgccattcaaaacgacatgtactacggcggattactttgcccttcctgtgtggatgagaaggaggagcatcgacgccaatgggaaaacattcaaagacagtag

SEQ ID NO: 201906 - DNA, 441 bp, Klebsiella oxytoca
atgggtatttatatggaatgggatgtttataataaaaatgaatggaatgtagaggatattaattcaggacagtacgccgcatttgtctacttaatcacttttgatgatggatcattttatatcggcgtaaaacacgtttacaaaggtatcaaagacattaagaaactaaaggacagtactaaagaatccaactggagagaatataccagtagtagtaaatcagttaatcagatgattgatgatggagtagagtataagaagtatctactttggtgtttccctactactaatcaagcagccttagtagaagcaacattgattgggctatttggttcaaaaccaaattgtgtgaataaagcagtaatggttaaggcaagaataccaaatgataacggtgcaacgtgccgtatcattcaacagttaatagaggaattaaactaa

SEQ ID NO: 201907 - DNA, 597 bp, Klebsiella oxytoca
atgggatggaagaggggcaatagtcctagtgatatgaagaaattcataaatgacaattcaccaaagattggtgatcagtttaagaaagaacttagtgaacgtatgcgtactgtaactaaacaaattcaacaacagattaatgtagaatctaagggtggtgtagtagcttatacaaatcgtgctatgaagtttaacttctataagcccaatggttttactagtattaatcagattatagtaatgccagatcaggcagattacctaaagaacgttattgatcctaactatgttcgtaaacatgaatacaaagtgatcccatataaaaatgctaggctaactaagcagggaaacatatctcaattaaagaacaaggataaatacaaacgagtgaagagtaagaacggtaaagagtatcttattgacacttccaaaaactctagcaaacgcgatccagtaatggcacgtaagaaaagggtagttgggtactatggaagtgtaggaagaaaaccattgtttgatttctacgacgacacagaaaaaaaagtaataaaacaactacgaacattacgcggtacgtttaactaccgttggagataa

SEQ ID NO: 201908 - DNA, 321 bp, Klebsiella oxytoca
atgaactacttagaacaatttccatgctatgactatacagtactagatagctttgctttccaaagcatcaaaccagtgagtgttaccctaccatatgataaagcactatcagggaagatgattaagaaacaagttgataaggctaaaggtgatttaattgcattcagttttgaattgactaaaacaccaaatgttaataatggtgatgtactaactgtagatctaattgatggtaagagtacggttacagtacttacatctttccagcaggtttataaaggacaccgtgtaatgtcgtatatatgccaaaaggaactataa

SEQ ID NO: 201909 - DNA, 294 bp, Klebsiella oxytoca
atgtttagcattatcgcagaactaatatctaaaggttttgattttttcatcaaaaggaaaaccttagagaaggaagtacaaactactaatgccgaagggcagattgaagtaaacaaggaagagattgaaaaagtatcattccattggcgtaatgcccttggtttcgtgatcaccctaatcatcctctataactggattatcgtaccagtacttgatgcctttggtatcgtagtaattcaagtacctttggggcagctactacaagtactattgattatggttggtggtagctaa

SEQ ID NO: 201910 - DNA, 801 bp, Klebsiella oxytoca
atgaagcttacacccaaaaataaaaatttcgcagaaaaaagtctatatcccaacacattgtttcatttcactaataataatgaattccttctggatattattaaagataagttttttaaagcctcatatgctaaagagattatagttggtccaaatggtactaaacgcacatttggtatccctatggtctctttttgtgatattaggttatcaaatttacatgagcatatgaaaaagtatggctattatggtattggactaaagaaaagttgggctatagataaaggacttaacccagtaagttacctgaattcaaattgctctatgttccaatattttgatcaacagcttagagaaatgagtgatgagtttttaaatattgagtcaaatgaggaccgtaaactttccaggcaaaaatacctgaatcttcaaaatgtgatgcgttatatgaagaattacgaaggtgaattacgtcgtggtaacgagtatcaaaaaaaatatagatttgctaatgaaagtgaatggcgatatgttcccgatattaacacaagtgatataattccggttaagatcgtcagaaatcatgatacaaaatggaaagcaaaagctaatgatgctctatggaaatccgagtcgtcacggttaagatttaattataacgacataaaatatattttggtcccgacaagtaacatggcttttgatttaattgaagggattagagattttgtctctgaagatgaatttatatatctaatatctaaaatattcgattcacgtcatatctatcaagatctataa

SEQ ID NO: 201911 - DNA, 210 bp, Klebsiella oxytoca
atgactgaagaacaatttgaacgtgattacccaaaggatcagtacaaatacgtgtataagcatggtcgtaaaaaaggacctatggacgaaactgaaatcgacacttacgacattgtttctattcaaactggtcaggtagtgcttacagcaacacgtaccgagcatacccagatacgaggactacaaactactgtcaattggagttggtaa

SEQ ID NO: 201912 - DNA, 990 bp, Klebsiella oxytoca
atgcaaaaacgttatctgggtaaatcccgactcgaagtatccgcgcttgggctcggttgcatgggcttaagccacggctacggcccggcgaccgatacccgtcaggctatcgagctcattcgcgcagcggttgaacgtggcgtcaccttcttcgataccgctgaagtgtatggccccttcctcaatgaagaagttgtcggcgaagccttaaaaccattccgtgaccgcgtggtcatcgccaccaagtttggttttacttttggtgacgacaacaagcagcagattttaaacagccgtccggagcatatccgtgaagcggtggaaggatcattacgtcgtcttaacactgatgtcattgacctgctatatcaacaccgtgtcgatccggacgtcccgattgaagatgttgcgggaacggtgaaggacctgatcgctgaaggtaaagttaaacatttcggtctgtccgaagcgggcgcgcaaaccattcgtcgtgcgcatgccgtacaacctgtcacagccctgcaaagcgaatactcaatgtggtggcgcgagcctgagcaggagatcctgccgttgctggagaaactgggtattggtttcgtgcccttcagcccattaggcaaaggcttcctgacgggctcgattaagccaggaaccacttttgggaaggatgattaccgcagtacagtgccgcgtttcgccgggcaggcgattgaagccaatgaaaagctggtttcattgctgggtgaactggcggcagagaaaggcgtgacgtctgcacaaatcgcgctggcgtggctgctggcacaaaagccgtggattgtgcctatccctggaactacgaaactgcaccggctggaggaaaacctgggggccgccgacatcatcctttctcaggatgactcacggcagataacccaggcgcttgaaaccattaaaatcgtcggcgaacgttactcccctgaacatcaggctcgcgtgggccgttaa

SEQ ID NO: 201913 - DNA, 129 bp, Klebsiella oxytoca
atgaacaaaattaataaatcccagaggggtaccctaaatgtctacaacattcacagcgccatgcttaataatgggttgctggtttttatcacgctgttgtggacatcagaaaatcgatcaggtctttga

SEQ ID NO: 201914 - DNA, 1314 bp, Klebsiella oxytoca
atgagcggtggagttgagcttgatatggatgtcatgaaagcactaaggtggctcgcagaaacgactactgaccctcaaggattttccgagagattggaaatcgctcaggataattatattaaagaaacatcaaagaaggtgaatttcggtgctccgtatgataaaagttggtatggcgatgatgttgtcgctggttttttttcgcaagcgaagtctttaattgataatcgacgagccttcgaaatatctaccgcgtcacaaatcattccttgggtgaagcaattaggtcaaaacgtaaacattcttaatgaaatatcaggagctaaagagcgggctaaaagaatgctcgatagcaccagtgtttatccagatacagcattgtttgaattaatacttgcagggaattatgccgcaatggggtatgatgttgagtttattcctgaacaaaagggaattgcaaaaaccccggaatttaaatgtagttttgatggcggggtggagttttttgttgaatgtaaaaggctccagaaagggtcatatgcaactcaggaagaacatacacactttatcagagcccatttaacagaacttcgaatccattctaaaaggatgagtgtctggatggatgtgacctataaaagtgaagtcaaagacactcctgataattatcttgtgaatcatttaagtaactattacgggaaagattactcctgggatgatgattttggtgttggatttgtaaaagcagtaaatttaaattcggcaaaatatgatgtggaagttaacggatcactttcgtttcatactaaactagcaaggttacttaaaggtggtccgcttggtgatgacttttataatatctttgcgtctggtaggcctgatgagcgtgaccaacggtttatttcaaaaatcaaatacgcgtctttgttgacatggcggtgtattaatgaaaaatccctggaatgtcgttctcggcatattaaaagcacattggctgaaatagaaaagcaaatttctaacaatgggcttggtgttggtcatgttgcaatagatgctgatgttcaaaagaatgttgcagataagcggcgtgagaaaaatattgaggttacgacatcattcaagcttgagtcaaagcttgtacggttaaatattcattaccttgtccaacgtatagaagaaagtcattcttggatggttgatgaaactcttgactatttatataccgataggattttagagtattttattccagctgttcaaatatttcctgaagccgatgcatttaataacgacttgccaggctggcatcaatga

SEQ ID NO: 201915 - DNA, 243 bp, Klebsiella oxytoca
atgaccagcaaactgacagtcgcgcagatggcagcaatcaagcgcatgcaggcgggagacaaactttttttcaacagcatgaaagggaattattacttttcgactgttcggggctacgacaacgccacgctacccgcaaggtcgctgcttaaaaaggggtttatcaaaattagcgaggatgctcccttttacacaaagccgatggagctcaccgccgctggcaacaagtgggaggctgagtga

SEQ ID NO: 201916 - DNA, 237 bp, Klebsiella oxytoca
atgtgtactgaagatgatgctctcattattgatagctgcttagggcggttaaagcaaaagcgtcccgatgaatacaacctactgttcgaccactacgttaaaaatatatcaaagcgggctatagggcgtcgactcaagttatcagaaggaatgataagaattaaattccagatggctgagggattcatagagggttgcctggcgatgcttggtacaaaacttgaaatggaccaatag

SEQ ID NO: 201917 - DNA, 354 bp, Klebsiella oxytoca
atggctatcaaagctgagtatttacgtgatacatgccaattgcttgttattgaactgactagacttcagcaattgaaccgaaagttaaccatcgatgatttcttccatctgagcgaaaacgggaaatttgttagcacggtaattaatagatatggcgaatacatgcgttcaaccaaacacttagccgatgaagaaagcagttatggaaaagagatgctttcttatcttgaggatgcttttgcacgccatgcgaacgttgttactgaaggtacctatggcgtagttgatgatgctttccttctggcgataaatgttactgtcgccatcatgcgcgaagctgatcaaatgaattaa

SEQ ID NO: 201918 - DNA, 381 bp, Klebsiella oxytoca
atgtgcatatcaataatcctacacttcccaaaaggctctacaaccatcacagacggcattatgtcaggctatgagtattcacgtgatgatgtactaatatcggctcacatagcgattgatgaagcctacagcctattcattgatgactattcaataacagccaaacataaatatatcagtattaactacaagcatagctacacaataggccgctggtggtatcactggaatagtattgataactatgaaggtagtgaacgtacacatctggattatctacacggactaataaaagaactattagaacatgaatctctaaacggtagacctatcaatagctacagagtgtcagtactactcaataaaataaaagatgagtaa

SEQ ID NO: 201919 - DNA, 675 bp, Klebsiella oxytoca
atgattaccacaactttcatagcagaaccaatcatgactacttcaggccagctcgtaggctgtgaactattaacccgctttcatagtgaaggtatgcaagtactgaacagtaagtacttcatcatggctatggatgctgaagggaagagggaactactaatacgacaactacaggccatagaagtacatgcgtcatggttcagggatcaccggctttactgcaccgttaacatagacaccatacaagcaaggctatgtgtgtttgatagagaggtgataaagctactggataaactagagtatgtcaggctggagatatcagaggactttgaagggcttgaactcggtatcaatcatccagtactcaagaccctattaaacgtgggctatcgcttgttcctcgatgatcttggttcaggccgtgccaatgtcgcagcactcactgctggatgctatgaggcagtaaagattgatagggcgttctatcttcaggaagtacagaaaccaacattcaacgtactgatgaagaacatcatgcagtattgcccctatgtaatcgtagagggaatagagcaacagaaagaactatcagtactacgtgattgtggagtaacggcggtacaaggctacctctacagatcagtaccattcgacaaggtaaacaccctgctttaa

SEQ ID NO: 201920 - DNA, 315 bp, Klebsiella oxytoca
atgggcaataagaacgcttacgatccatccatacgtagaggtgttcaccagttctcacacgctggggtatggttcacggtctgttattgggggagtgctcttgagcaattcaagtttggtgatcgggtgatatttgaaggttctgtaggcggggtgttctggctgggaacggttgaaagggattgttttatactgattagcgaaacgccattcaaagatgtattggacgctatgagttatctacatgccgaacaacgtgtgattgaacaacatgatgatgattggttctgtggacaagaagaactaccattctag

SEQ ID NO: 201921 - DNA, 627 bp, Klebsiella oxytoca
atggactataaaaaactgaatatggcacttttcataacagttatagttcttataactgtagctgtgtttgcttttttaaaagtactcttctctgatacaaaagctttagaatggggaagtatatctgatttcattagctcaatttcaactttcggtacacttcttgtagcattctttgcttataaagcagcaccacaatgggtgaaacaaaaacaatacgatgaaggaattaatcatgttaaatctctaatggctgaatatgatgaaattgtatcaagcattttagagctgcaccccgaaataataaccattaacaaacaaagcccaaaatttaaaatgctttcagaaaaagtcgaacaattaacttatcgcactttcgatttaagagcaaaattgaagtcctgcaaaagatggaatattgtatatcccaaggaagtcagtgaagcatttcttagactaaccatgtattttcatcattgtttcatacaattgactttcagtgatacttattttagtgatgaaagttctaatgaaatagatactgccgatctcatcattgttaaagtaaaagaagatattgattttttcaatcgtagcctagataaaatcttcacttacccaaaatga

SEQ ID NO: 201922 - DNA, 459 bp, Klebsiella oxytoca
atggaaatgaaactactgcaagtttactctctctacttcatggaaagtgactatgaaaaaatgacagtcacatataaaaaccagtacggaaaagtagagaaccagacattttacagggatgaagagataacactcccagcgtcattagtacctattcatataatttactcaacatggggtgatgatgaattgactatagcaccacatacgctatcagaattcacattaggtatggatggtaaacactcatactatgcagaaatcaaaaatcatctacttggaaaattctatatatatgatgataaaaatgatcaattccttctccataatgatgggaatattcatgatgtagtatcagaggaagaacgatttcaagattcagtatgtgatgatcactattcagtactgataccaatgcaacaaaaactactatcactaaaagagagactattaaaatga

SEQ ID NO: 201923 - DNA, 477 bp, Klebsiella oxytoca
atggcaggaaagaaacaaaaatttgataactcacagttcataaacattgcgggtggatttagtgagtataaagatctaactacagaaggtagaaacattgtgggtgcgatcatcgataagtgtgcaggtactaaaggttatccacgtgagaaagtatattacgtactatatcattgtcatgagattacccgtgattctgtaatgtactggttacagtacttctatggcctcagtaagaatgattcagcaccgaacgataacaccgctcgtaagttcgtaacgattactaagcagctatcggtagcaatggtacaggcacacaaagaaggtgtgaagctattcaagagtcagaaggatgggatgtactacccaacaccagtacagaagtatgaaattgataagatgtacaataatggcctatcagcacaggaaatgatcctggcattacagaaaatgattgatgattctgcgaaataa

SEQ ID NO: 201924 - DNA, 492 bp, Klebsiella oxytoca
atggaaaaaatcaatgacctaaaaggccaggtaacactacacctatataaagaagcactaacgaaatggcataacatgcactctagactaaaacgcaatggttatcaaaacacaactatttgtgatgaatggtacactttcagtaattactataactggtacatagaacatagcgtaagtggttgggatgtagataaggatatgttaggtgcaaatcgttattcaccaaaaacttgtttattcataccacacgaagtaaatcaactattcagaggtggttacggtaaacataagaagggagtacagaagctttacaataagtgggcggctaaatctacgtacaatggtgaacaagagtattacggatatttcaatactgaagatgaagcacaccaagcatatcttacacaccgccgtattcgtatagtcaatctagcaactaagtacagtaactatccagtacttagtacagcactactaaacagtaagtaa

SEQ ID NO: 201925 - DNA, 153 bp, Klebsiella oxytoca
atgaaagaactaaaatcacatccagtaagcgtgaaactaaatgatgctcaagtacaactacttgaaaaactaattcaggagggaaaagcaaaaactaaagcaagtgctctacagtacctaatcaatcagtactcaatcctaaacagtaagtaa

SEQ ID NO: 201926 - DNA, 1821 bp, Klebsiella oxytoca
atgaaaaaagtctttgtttatcaccgagttagctcagatcagcagctggacgggtcaggcatcgcacgccaagcagaactgcttgaagcataccttaaacgtactaacatccttgctgagatggatgatccagagcctgtaatcatcaccgagtcgggcggggtgagtgccttcaaaggacacaacatgctaatcacttctgggttaggtgcatggatgcaagaagtacgtgcatctatgtgggatggttctcacctcgtgtacgagaacggcgatagattttccaggcagaatccgtttacggtgattggatacatcaacgatttaatcaatcacaatataacgattcacgatgcaactatgaatattatcattaatcgtgaaaatagtgcgatgttgcctatggttttgatgaatgctcaacgggcatatgatgaatctaagtataaaagtgatcgtatacgtaaaggctgggcgaagaaacgcgaacaagcatttaacaaaggtactattgtaactaataaacgtcctcaatggatcgaagtagaaaaagataagtatgtacttaatgagaaagcggcagtagttaaagagatttttgctctttatcaaactggcatgggatgtcctacgattgctaaaaaacttcaagggaaagaaggtgagcaatataaatttaatcgtccgtggactggtgaacttgttcataagattcttactaatcgccgtgtaactggtaagattttcatttcagaaatcatccgtaaccatgctgatattgaaaatccagtaactcagaaaaagtacgatatggacgtgtaccctgtagtgattaatgaagaagaatttgaattagtacaggaattgctaaagtctcgtcgtcctaatgctgggcgtgttaccgtgaagaaagacggacaggaagaagtactgattaaaagtaatttgtttagtggtatcgcacgttgtactgaatgcggcgggccaatgtatcataatgtggttcgtgctaaacgtacaccaaagaaaggcgatcccaaagttgaggaatatagatacatccgttgcctcaatgaacgtgatggactttgtgaaaacaaagctatgacctatgaaacggtagaacgatttgtagtagaacatttattagggatggatcttagtactgtaatgaaagaacaggaatttaatcctgaaatagaagtattacgtatccaaattgatcaagtaaaagaacaaatcactaactatgaaaatggtattgaacgtcgtaaaagtgctggtaaaattataacttttgatatgcgtgaagatctcgatgatgctaaatcagagttagagagattgttagcacgacaggcttcattagctacagtacaagtagatgtgccagtactacaggatgttaacgttactgaattgtatgatgtgaataacgtagatatacgcacacgttatgagaatgaacttaacaagattgtttctaatattcgtctaaaacgtaatggtacatcttacactattgatattagctataaacagaacgagctaaaaagacatgtactttttgttgagaataaaaagaaggaacaaacgttaatcagtgaggttatcattgaagatgtagatggtggtaagttctactataccccttcattcatgatccggcttgaagatggtgaaatcagttttcagcagactaacgaagatctttcaatcgttgattattcgctattgctgaactatgtagatgctgtagatcggaatgataccgtaggtgtttggatgcgtaatcaattcaattttcttacgtctaactaa

SEQ ID NO: 201927 - DNA, 291 bp, Klebsiella oxytoca
atgaacctaaatgatttaatgagcgtgattggagtaaaaactcacgaattcgaactagcaccaaatgtagttgtgaaaattcgtatgccgtcactctctcaatattccgaatgtactacaccattcaaaattatctatcattgtgtagttgatgacgaaggtaaaccactattcgaatcaccagaacagattgaagaaaacgtagaattatcagtacagatgaaactaagccaagagattgatcgtatcttcactgaatcaatgaatattgataatattgaaaaaaagtaa

SEQ ID NO: 201928 - DNA, 330 bp, Klebsiella oxytoca
gtggatgaactctacactatgccccttttgcttttcttctatatatacgtctatgacacggttatagatccgaactcagcacaagtagatcaaatgcgtcattgtgaaatcatgcaagctctatggttaagtactggcaatattagaaaagaagatatgcacaaattcagtactaaagaattcgattcacttggattgcttagtaataaaactcgtgcagaacaggcagaagaaagagtagagaaggagaagcagatcgcagaagaacaagcaaaacaacagcgtgcaaatatgctcgcatggatgggagtaaagccagatggcaaataa

SEQ ID NO: 201929 - DNA, 2460 bp, Klebsiella oxytoca
atggcaaataaaaaacaatcaatgatttttgaaatcacaggtgatgaatctggcttgaaacaatcattgaaaaacgcgggtaatagtttatccgatttcaataataaagcaggtggtgcatttggtaacgtagatggtttacttacttctagtggtgcagctttcggtactttcgcaggtggtgtaggtattgccgcagccgcagctatggtagctattagtaagatgcaagtacaagcagagaaagcatttgaagtattccaatctgcaagtcttgcacaaactggtgtagagaacttacagaagcaagctaatatgtttgccgaagtaggtttaactatggataacgtggcagaccaaattaaagatagtaaggataagttgggtgatgccttaactaaccaagctggttctatgtacactgatgtaattaaaccacttaaattaagcattcttgatcttcagaaagccgcagatagtggtgaagatattattgctaagatttactatcaagctaaacaaatgggctttagtaattctcaaatcattaacatgatggaaactatagcaaacgatgcggataaacgtattaccatttatcaaaagtataatagtgaacaagagtatcaaaacaaactagcagatgagagcgtacaactaactggtgaacagtctaaccagttccaacagtaccgccaagctacgttagaactaagtaaggcttgggaagcatggaataactcagctttagcaccagtagcggctaaccttgcagatattctaaacctaatgaccaagatacttaatagtaagcccgtagcagccgcagccgcagctacaagccgtgaaggtatcgcagcagtacaggaataccagaagggctatcagcaagatatgcttaagaactcttctatctatggtgctcaattagtagaagaacagcagaaggacgcagaacgcaaccagaaaacttttgataatatgttagcaaatcttgataaggctaataacgttattcagaaacaacgtgaagattacaataaaggattcgagaaaagtactattgatgctgcaatgaaaccctttcaaactgctaaatcacagactcaatctaaaattgatgatttagataaacagtacaaagatacacgtgcggcaattaaagaatcattactaaaaggctataagggtaatcaggatgctttgaataaagaccttgctactcttgatgctggttataaagaaacacgtgcagacctcgttaagaaactaacagagagtgatgataaagcccgtgatgcagcaagcaagaaagcagccgccgcagctactaaggccgccgcagaagaaaagcaacgtcttgccaaacaagtacaggctcagaaagtactagatcagactatggcagcaatgggtgctaatgccgctcaggtgaaactacaacaattcaatcttcaacaggatgaaattgaaaaacgtattcgtgattcagccaaactcactaagaagagtgaagcagaaactaatgcaatgttgagtactcactatgcagatagagcacgcaattacaaagaaatggttgatcagatgttggcagagaatgaccgtttgaaacaagctcagaacatcgcagctatatcaaatgatccaaatgccacaccagaacaaaaggcagcagccgcagccgctggtaacaaatgggctactaatactgctactcagggattaggttatcaagacccattcaatacacaggcagacccaactaagctagcagctatcggtacagaacagcaagataaccaggatggggcaaaggctctatatgatgccaaagtaattggattccaagaataccaagatcagcttacagctattcagactaatgcagatattaaacgtgctcgtgctactgctgatgcattgaatagtactattggcctttggggtaatgccgctggtgatattggtactactttagctggtgcttttggtcagggcaatgacgccgcaaaagcgttttttgctgtacagaaaggtattgctattgctcagtcaattatcaatatccaacagggtattagtgaggcaaccaaattaggctggcctgctggtattgccgctggattaaaagtagcagcagagggtgcaaacattatccgtactattaagggaacaactattcaaggtcaagcccatgatggttgggattcattgcctagtactggtacatataatcttgaaaagggtgaacgtgtagtaggtaaatcactaaaccaagatcttactaactatcttaaagatggtggtaataactcttctggtgaaatcaagattgaagcaccacttgttattcaaaactctggtgatctaactgataaagactttactcaaatgtgtaaaaaacatgctgatgtaattgtacaggcagttcgtacatcacaacaacgtaatgtgtaa

SEQ ID NO: 201930 - DNA, 555 bp, Klebsiella oxytoca
atgctagataacgctattattagtgaatttgtcttgaatgacaatattccacaatatttaaatcagacgtggactggtgaacaaatcacacgtgtagtaggtactcagtactttagtattacattcaaagctacgatgaataaacagtttcgtgcagaaattgcaaacttctatgcacagtacgcacaaggtaaaccatttgatatgtctcttggttggtggggtaagtatacgggtaatcagaacgcaggtgtacagacaaccgcagcacgtacagcaggtgctacatcaattgccgtaaactcaaatagtctcgaagtaggttcaataatccaatttaacggtcataaaaagctatatcgtgttattgcaaatagcggtactactatgaccatattcccaggattaattaagaatgtccaattgggtgaagtaatcaaatacgataacctctctggttcgttcgtcctaactccacagaatgcagtgtattcattcccaagtactaacttaattgaagtaacaattcaagcaaccgagaatatcaggggttaa

SEQ ID NO: 201931 - DNA, 645 bp, Klebsiella oxytoca
atggctattccaaataatgtattaaacaatgccgtactggttaactactggaatctagtacgcggagataacaagacagtactaacagaaaaagaactctatcaatgtggtgttatggttaaaatggttgacttgatacctcctactggttctgcattatatcttatcgatgggctttcagagaaaacagtaaatggtataacttatcaaccagtaccggattttatcgattcgagttttgcaaactatgtagaaaagaatcaggtgaacaacaatggtactacatttaaagtcagtaacgtaaaccaagaatatctatctatggcattacgtggactttggaaagatgcaaaagtgaatatatggatgggtattgttagtcctgctgatggttctattctatatcgttaccgtatctttagtggttatattgattacttctcttcagattttaatgttgaaggtggcaatactgaaaacacaactactgttagtctcaatagtctatggaagaagttagaccaaacacaacgcctactatccagtactagtattcaccaatccacacataagggtgataagttctttgacctaatcggcatcataaatagttcagaacaattctggaaagcgagtaagaaataa

SEQ ID NO: 201932 - DNA, 3528 bp, Klebsiella oxytoca
atggcagtagcagcattagcagccgctgtactggctggtgcatcggcggcggcggcgacctatgcaacagtaggtttagtagcggcaatcgcaattggtgcagcagtaacagcactatcctatattacatctagtcagatgatgaatgtaggtcaacagggggtaaactatccaagtacgggtactagtaatgcccgatcagtttcgccctccacaggtattcccatagtgtacggcggatctaaccgaaataaagatgaagttgcttatgttaaagtaggttctattgtagtttggcagaacgtatataaaggtgaatctaaccaactatgttccgtacattgtctaagtattggtgagattggacaagtaccaggagaaacacaagcaggtgtgattaagcagctctttttcgacaacgtaccagtactacgcgatgatgcatatattacacaggaaggtatcattcctgaatcaatgttaattgagaagttccgcaagttcctacagattgaagtacgttttggtaaaccttcatacggtggttcaatgacgttagcccgtcaatatggcggcagtaaatggactgatgatatgcgtggtgatggtctagtacagatctgtacggtcattaagaaaactaacggtagccttactgatggtatcttaacgaatatgaactacgtactatcagcagagattagaggtagaaaaatctatgatctaactgataacgttctaaaaccttcaagtaatccaccaagccagttatatgacttcatgacaaatacagaatttggctttggtacagatccaaatgatattgatattgcctctttccgtaacattgcacagtactgtaaagataatcacttttattcaaatggtagtattgcatatgacaaaagttataaagagaacatggaagcaattctacaaacattcggtggtgtactatatgaatcaaatggtgttcagtacttaagtgttgatacggcagatttaccagttgaacactttgatgaaagtaatattcttggttctgttaatatcactactggttcaaatacagattatttcaattgcatggattccacgtactgtaatccagatggtgactatgccgaagatattattcgttacccaagtgatacactaactaacgaaactattgtacgtgatggttatatcattaagaaagatttaaactgtaaatggattcaagataaagaacaattagccaaacgtagtaatatcgaacttttaaaagctaagtatgtacttgcagcaattacatttaacactttcgtaactgatattacagtaaatgatgtattcacaatcagctttaaagaagcaggttttgaaaatgttaagttccgtgtggtttcccgtactgtaccaatgacagtagataaagcagggatagtacagattaccgcaacgcagtacgcagacggcatctattcgggcgttgacccaggacagttcccacagaatggtattactaacctacctaacccttcacaggtagagccaccaagcaacctacaggtacaacgccttggtactactgtaaatggcagtactgtattaatgacttgggatcttagtcaagatactggtgtacgtggttataaactacgttataagagaagtgattccagtacttggattaatattggtaacgttggacagtacagtacaagttatgaaatcttgaacttgattcagggagtaagctatgattttggaattgaaagctataacacacttggttattcatccgaactagtagcaatctataatcagttgccacagatcatttttgcattaccaaaagtaactggacttgtaatgactaacgctgatgcaggttttaaccaaacatattccgaggcatttatatttgattgggatgatcagctaaacctaccagtgaatggtaaacgattcattgactatttcagatattatgaaattcgtgtatatgaccgttaccgaagatacattaagtcttacttcacacaggatagtgcatggtcttatacgttcgctatgaaccaatcagacggtctaagccgttatcgtgtatttggtattatcgcacacggatacggtactggcatctattcagaagaagtacagattgaagttagtaacccacagcacccacaattactaggtgttaaattacgtaatggttatgatcaggtgttctttgaatggactgaatcaaatattccagattatgctggtgtagtattccaagccgcaaaagatgaggggtttagttctggtgttgtctactttagtagttctaaccgttatactgcatcattcccaattgaagacggttcttggtacggtagattggctgcatatgatgtgatggggcaggatgaattagtatggtcgcctacaattggttttaaccagaatacgaaggttccatattctaagttgaatgacgatgttattgatggactacttaaaagtgatgttgctactggtattgttgaaaaacaaatcgtagatgaacttggttcacgctggcaggttcaggtatcaaataatggtaacgttactggtattgccctagcagcagatgaaaaatcatcagttttcacggtgatggcggatcgcttttcaattatcagtactgactcagctaaacaaagtgataaggtatatccgtttgtagttcagaatggtaagactttcattaactcagcagtcatagccacggcctcaatcaatgaagctatgataaatgacctttcagtatcgcgagcgaaaattcaaaatgccgctatagataatttaaagctagcaaatggggcagtccgtaatattcacataatggacggcgttatagactctgcgaagatctcccaacagatacaaagtagtaattgggatggtactaatggttggatgattaataaaaatggttctgctaactttggtaatgtaacagtacgcggtaatatccaagcaacaacgggtgtattgaataacgttactatcaatgagtcttgtaatattcttggtactctaagtgctgcaaaaatcattggtgatatttgccgtcctcaatctactggtcttgtatcagaaccatggatttttggttctcgtcaggtatcaggtggtacggcagcattagaccctgtagcgaaccagcattatgtagcattacgtatccgtggtgaagattttgatcgtattcttgatagtaatatgactctaaaacttacttcatatgaacgtcaatacttctatattcgtatgggtggtgacggtattccaatgactaaccttaagtactgggatgctggtaatggtggtggtgtttacacatggcctattaatggtattactattccagccgttgggcgtggtaaatggaactacatctatattatgtgcactacttcacgtagtggtattgcagcgttagaagtaccagcactattaaatgcttgggtatatcgtgcaggtgatcagcctttatataatgcttaa

SEQ ID NO: 201933 - DNA, 282 bp, Klebsiella oxytoca
atgggttttgatgtagtattcgcattactcttttctgctggtgcactcctatggacaatataccgtgataagtctggtgacacagatgatttaattgatagagtaacatctcttgaatcaactgtatctggtcatactgctgatattgcacgtctaaatgtggatcacgaagatctagaagcaactatacgagtaattcaaaaacagatacaccaactggacttgaaaattgaacgtattatcgtgattctagaacaacaggaaaaagaaaaggggcgataa

SEQ ID NO: 201934 - DNA, 366 bp, Klebsiella oxytoca
atgtataaagatacggaaaatttctggacaattggttacggtcataaagtactaccaaatgaaatgcaaaagtacaaagatggtattagtgctatggatgcagatctactattagcatgggatattgaccgtactaaaaaggatttagcaacactaggattagtactaccaaaggattgggaagatttcatgatcatcatgactttccaactcggtttaggtggcgtgaagaaattccgtaaaatgattgcagcacttaaagtacagaattggaaagaagcgatagtacaggctaaagatagtctatggtatcgtcaaacaccgaaccgacttaatgcaatgatacaagaactaaaaaacaagtaa

SEQ ID NO: 201935 - DNA, 1692 bp, Klebsiella oxytoca
  misc_feature (592)..(601): n is a, c, g, or t
atgtcatttctaactaactatacaacggtatggattcataccaatatactaaacaccgatccaaaatctagagcgtttgaacaagttgaaaaacttgcatcatttccagtagtcggtactacaacacaagttgcatcaattgaaccatataatgaaacatttatggctaaggccgtaggtgataaagcatatgatgatgtatcaattactgtaaactgggttccaacagatcaccaattcctagatgacttggtaaactctggtgatgaaattcagttgaaaattgaaatgcctgatgatggtgctggtgatactaccgttccatatgcaatgtataacggtacactaacttcaatgacaacttctggtagttttgataatgtagtaaccaaaacatatacctttgcaccaacagcattagttagttctggtgtactagatgatacagtactaccaattaaccgtggtgattttggcgttggctctaatggtactacgtatccaagctggcaagaacgcgatggtaacggatttattaagattgccgcagcctcatcaccaactggtactgatgttctaggtattaacaatnnnnnnnnnnttgatgcaaactttggtactcaattagtaattagtaaaactggcaaccccattattaacgtccgtaactacggatcatctatgggtgcatggtataaagtctataccagtgctgataagccaacactaacagaacttggtgcagcgtctagtgctagtcttacaaactacgtactaaaaacacaaacagttaatggtaaacagctacagggaaacattactctagtagccgctgatatcgctgatgtgtactcacaatcttatatcactaatacatttgttcctaaagtatttcagttaaatggtcatgcactatctggtacttcattaaacttagtagcggcagatattttagatgtgtactcacagacacaaaccaatactaactttgttgcaaagactcagacgattaacggcgtggcattaagcggaaatattacactaggtgcatcacaacttaccgatatggcaagtctaagctacagtaacagtacttttgtacctaaaacattcctagtgaataacaaggcacttactggtactaatattcaacttgtagccgcagatatcccagatgtgtattcacgtactcaatctaacgatctatttgcactacgtatcactacggtaaatggaaaaccattaagtagtagtgtagtactaaattatgatgatgtgggtacatattctaaggcacaaattgatgctaaggataaaacgctacaagataatatcgatactaaagtaacaatagtaaatgatttgctagcactaaatactctcacaggcactagcctagagattgatttatccgatagtaagactgcattcactgttaccctatcagcaggaacaactaattttaccattgttaacgcaagtggtaatacacataatactcaatctttcactgtagctatgaaacagggcacaggggcaaataaaatatcatggcctgattcaattttatggtcttatgggcgtgtaccagtactgacatttacgcaagattcaaccgatgtattccagtttgtttcttatgatggtggtagcacttggtacggctccttactaatggcagatctacactaa

SEQ ID NO: 201936 - DNA, 438 bp, Klebsiella oxytoca
atgtacacggcagactatacaataagaaagtacctaacaaacaagttaagtactaaagctaatcttcattttccatcgaaagcgacagtagaaaaaaaagcaatggtatatattggggaaagttcagttaccagaaataaaattccccaaaatatgccagtaatcgcggctcaaatagtaccgcaagaagtgcagaatctatgtcagtttactattgattttgtatcaattgccgaagactttaaaaatgcctcagatgaaattgaaaagattctagaggcaatctttactaatggttttctagatgatttagataaactactaagaatgccaatttatgaagtactagttggtgatagtttaatgactactcaagccgaagcacaaaaaacaatgtatgtacatacgcaatcaattacatttagctacggggagtaa

SEQ ID NO: 201937 - DNA, 294 bp, Klebsiella oxytoca
atgagagaatttagtaatagccaaaaaaaggtactactaaattctttcggtgaagatctcgtcattgttcaggatggagtaacaagtactgttacagtgatattcgagcaagacgagattttttttgaagggacgcaatctaccgtggattatttcacctctgattctggtttacctttgggtattacttttgaacgtaatggtattacctacatagtaaatagaatagatgatgatttgagtggaatctcagattatcgctatacccaacagattgatttagaggacatataa

SEQ ID NO: 201938 - DNA, 1923 bp, Klebsiella oxytoca
atggaaattcaaccgacgcaacagatcagggcagtaacacagatccagatcgataaagcgattgatgaagtgaatttaacggtacaaatagcctttgcatcagaaaacccagtacagagacaaatccaaggtaagacttacgacgagattcttctttgtaatccagagaacgtagacctatcccgaattaatatgggtatgtgtcctctcctaattgaacacagtatggataaacaaatcggcaaggtggaacgtgcttccgtcgatgccgataaaatttgccgtgcgacagttcgcttttctgattcaggcagtgcaccactaattttcaacatgattaaagaaggaatccgtgaaggtattagcgttggatataacgtaattgatcagtacctagatggaaacaaactaatcgtaactaaatggcagccctacgaaattagttcggtcgccgcccctgctgatttcatcggttcaggtgtagcccgttcactaaatagtactgtagaaattaacctaaccgaaggaattagaacaatggatcaagaagaaaataaattaactgatgaaacacgtgatttaccacaagtagatgaagttaatgaacctactccaagcccagatgcagaaccagcagaagatagtaaaacaactaccttccaacgtgatgaaaatggaaaagagtttgtagagattgaaggtgctcgtttttatcgtgcggatatcgtagatgaaaaagattcccctgaagatatcgatgatcaggaagtaaatgatcaagaaaataccccagtgattgatagtgaaaaacgttcactagaagttgaagcagaagataaacgtgttcgtgatattcaaggtatcgcaactcttttcaatgtggacgcaactcaagcactaaataacaagactagtgtagaagaatttaaaaacttcattcgctcactaaatactgaaaataaacttaacgttaaggaaaatccaaaaatggaaaaaaatgttattcatgatatggttcaatctgtaattgacgacaccgaactaaaaactactgcaactcgtggtactcgtggttataacgtagctactcgtgctattgacccttcaactaacactacttctggtgctggtctagtacaagaagtatatgaagattcatatatccctgaactactaaaacgtagtgttctaggtgatctaatgccaactctatacactggcctagcaggacgcggtactctatctattcctaaagcagatggcgtagcaccagcattcaaagtatatgccgaaggcgaagaagtagaaacttctattgcatctttcagtaagatcaatatggttcctaaaattctagctggtgaaatcccagtatctaaatcactaattctaactgcaccaaatgctgcacgtttcgttcaagaagaacttctacgtcacgccgctgaaggtctagagaattatgtgtttgcacaaatcgcagcaaaagcaccagtagttgaaagtgctgtatctggcaaaatcaccgaagcagacgtacaagcagcagttgcagaactaggttctaaaaacgttgatactcgtcgttgtgtcgccgtgatgaatagcaagatggtagcggaattccgtcttcaaccagtactaggcaacgtagcagcagttgcaatgatcgaaggtcaacgtactgatgatcgttggttgaactctgaactaaaagtattcgtatctgaacacgtagcagatggtgtagtactaattggtcagttcgatcaacttttaatcgcacagtgggaaggtcaggaagtggattatgacacaactacttaccgccgttcaggaactgtagcatatcgcgtttggaactttatcgacgtagctctagcacatgatacttgcttcctacaactaactaagaaagcgtaa

SEQ ID NO: 201939 - DNA, 1578 bp, Klebsiella oxytoca
atggcatggaatttttttggtaaaaaagaagaaccgaagattgaactacctaaacaatccgaacgtatgattgatgggaaagtacctcgtactgcaccgccacttggacaagatttaaaacgttctattagtgcaattaatgttggtgcaattgttaataatgcacagccaaagaactggggatttagtaatggtctatcagttggaaatataaatagcattattaataacttttgggctattcaggccgcaacttctgcaaacctccatttgaaaaacccaatcgcacgtaaatacatctatgcaaatacatcaggtgtggttggttgtgaaggtattacagtacgtccaaatgtacatattggtagtgatgaagaaaactttgaaacctcaaagattttatatgaagagttttataaatgggcagaagatcctcgccgttttagtctatgcggtactatggacttctctaaattccaacaacgtatggaagaaacacgtgcaatctttggtgatgcctttgcaatcgttcacattattgatggtaccgttaaattagaaatcattgattcaatgcgtatcaatactaaattcaatcgttggttagaatcaggaaactacgtttcaaatggaattgagtatgagttaaatacaggacgtccaattgcatattacgttacccagattaacccaattgattattcatatcatattggtaaatgggatcgtattacagcagatcgaatgattcacctattcacagcaaactatccaaatcaacaacgtggactacctgacttaatgtgtagtgctccagttcttgatgatcttgaccgtttcatgaatgccgctattcagtcacgccaggtagcagccagtgctatggcctttgttactaatacgcagaagactacatatgaaggtattccagatgaagatgatgaagaaggtgaagatgatagtggtattactcgctttgatgatgcctaccttaaaggcggttctattatcgaacttgaagaaggtcaagacgttaaaacggtaacaccatcagcaacatttgatgctctatcagaatttgttgaaaaccaaatgctattagtagctatgggtttagatatgactactcaaactttaaaaggtgatacttccaatgcatcttattctgcaagtaagttagtcgataagattcaacaacaaacctttaagactaagcaaaacaatttaattatttcagtactgaaaccaatttatatcaattggctacgtatggaaatactaaataacagtagtccagttagtaatttcaatccctccgattttaataaactaaccgaagctcaatatacaccagctaaaccacaatcacttgacccattaaaggatcttcaatttgaagaactcgcaatgcaattaaatttgaaaagtagagagcaggtaataacagagatgggctttgaccctcgcgtaatgcaggagcagatcaacaaagagcaaaacaaggataaggaagaaccactaaatggaaattcaaccgacgcaacagatcagggcagtaacacagatccagatcgataa

SEQ ID NO: 201940 - DNA, 447 bp, Klebsiella oxytoca
atgaataataaatcctcaccaaccagaaaagtagaggtgcatacaaccgataatggcacgccattttcctactcaatgacttcccataaaaatataaaagtgaaagcggaagttcaaccgccattgcagttgcctggattaattatattcgtacatggagttaattcagaaggcgaatggtataaagaggctgaagtatcattatgtaatggtttgaataatcgacttgggttatctgacaaagatactgtacatcaattgcaagctaacgaatacgcagatgctcactggaacaaagatggcaccaaatggattgttcctgccaggaaaattatcaaagaaaaccgctccccagttatccgcttctactggggttatcgtgctgctaataacgaaaccgatagatacgccattccgttaaaaaacaagaaaggtgataattactaa

SEQ ID NO: 201941 - DNA, 486 bp, Klebsiella oxytoca
atgagcagtcttttagcgctggcgaaggacttggagcagcaatcgaaagcgcagcagcagagtaccggcgagatgctgaaagccgcattcagcgagcacgagaagtctgtaaaagcggaactgagcgcaagcgcgaagagaatcagcgacgccatcagcgcccacgagcagggtatgaccgcggcgatgcagtcgaaccggctgagcgtgctgcgtatggttggccggacgtggctgaccatcaccctggtctcggtactgctgatcgccacgagcgggagcattctgtggtggcaggggcagcagatcaccgggaattaccagactatccgggcgcaggagcggacgcaggccatgctgtcagagaggaaccacggcgtgcagctgtcgctctgcggggagcagaaactgtcctgcgtcaaagtgaacccgaaagcgggagcttacggggaggaagggaactggatggtactggagaggaaatag

SEQ ID NO: 201942 - DNA, 213 bp, Klebsiella oxytoca; identical to SEQ ID NO: 147759

SEQ ID NO: 201943 - DNA, 519 bp, Klebsiella oxytoca
atgtcagagaaggcaaaaaaagtaggtaggcgctctctatcaaaaagaagagaaagtctaataaaagagctttggggggatgagctttccgaactgaatatatggaacaggaaagaacacgatggatttacaacaatcccaagaacattgaattatatcaataggataatcgattaccttgctggcgctggatctcctgtatcacagacatacctcagtttatggtgtcgagtttttgacgagggattcgtcgaaattagggataaagatgctctggcatttgagtcagggtttagtgggcagcgagcggtgactacttggctaggaagaatgaaaaagctacgggagctgggactgatatcaacgaagcctggtacttctggcgagtttcattatgtaatcatgttgaatccactttacgtaattaaaaagtcatatgaatcaaatggatgggcaagggatgagcgttacaacgctctattttctaggatgcaggaagtgggggctgagtgggaatga

SEQ ID NO: 201944 - DNA, 564 bp, Klebsiella oxytoca
atgaacgacatgaaagctgttcgtcaccgatataagcagagatatgattttgctgcgtcagaagtagtgggggcgtttgatgaacttaaaagtttggattggagtttagaaatcgcatctttaagtgacgtggaaatgtcaaagagatggattggggctgttgatcctaacggtgttgcaagactaccacctaacggtggatgggactgggttaagctctataacggctatttgaagaaccctagcgcattcgtctgtgccattaaatcagaaggcaagctatgcgctctgattggtggcggggtttctgatagtaaagtggtaactaagctgcattaccttgaatcagccccttatgacacggctctttcaggatatgcactggatatttctgttacgtatgttgttactgtcgcgaatgcgatgggaagcgaatacacagccatctatgagccaaatagcaaagtcagagagatagctataaatgattatggatttagcgaggacaacttgtttgggacaagtaaagatttcgctctgtatctaccaatgagccggatttaa

SEQ ID NO: 201945 - DNA, 1593 bp, Klebsiella oxytoca
atgcttaaaaagtttagacaaggtaaatggcaacaggtaattgaaaagtgtccaaatctaaaagcactcgttactgataagaatgataagaactcagtaaacgatatgagtactcaacagaataaagatggcactcttacatactttctaaacatgggttcccctgcatccttgcgtactttaacagtaccagtagtatgggtagatgagttgtctggtgttgatccagatggtgaagagggtaatccattacagatacttgaaaaccgtactgcatcctttccccaaggtttaatagtaatggcatcaactccattacacccggacgatatgatcagccaacaatggcaactctcaaatcaacagaagttctttattccatgtcctcattgtgaacatgaacatgaattagtttgggagaatgtaaagtttgattggaaaccattcaatgaacgccgcaacgtaccagtaccggaaagtgcaaccttacattgtcctaaatgtgatgaagtaattactgaagcacaacgtatcagggcagtgaatcaaggccgatggattgcaactaatccagaagtagaagattactatggttatcacattagccgtttatattcccccaattcatcaattcgaaagatagtacaggactttgccgaagcatggttgaactatgatgaagccagcttttataacaataccttgggcttaccttgggaagataaaagtaatattcaacctgacttaacaatgttagagaacttacgtgattatacttttgatgtaatgaactttccagaaaaggcaattgggtgcgtactcgcatgtgatcagcagcttgaccgcctagaggtcagtactttggcgtttgatgaaaagaatgtttggttagttgatcatcgctatttcaggggcgtggattgtactaaggccgaagataaagcctatgccgagttagtagcatattccaattcaaagtttactacaccccttggtaaaagggtgaaggtactacgttgctttatagatagttcgaatggtggtgcaactaaacaagtttataaattctgtaataccaatagaaactggactccaattaagggtaagtcagtaactactggtgcattcacaaatgatagccgtgaagctggtcatgaattagtaaatataaacgtacatgaaggtaagaatacagtacgcaaactattactacaggcattgaatgaaccaggaatagaaaaagcaatgaacgtacatttttcccattcattaccagatgattactttcttcaattaacagccgagaaactaaacaaacaacgtcgatgggaattacgtgttgaaggttcaaggaatgaggcattggactgtatcgtgtatggccttgctgcaatagatcacaaagtaaatgctatgggtgctcaaccctataaacagttacgtattcatgatcaccgccaaaaagaacttgcagcagaaaagcctaaatataaagaagaagaaatactaaataaaccaacaacccctacgaaaaagaaatcatcaccaaagaaaaagggtatatctcaattaagaaagggaggttggttctaa

SEQ ID NO: 201946 - DNA, 1446 bp, Klebsiella oxytoca
atgaatcgttttacacgtgttagaaaaccagatggtggggaatacctaaccgcagatatgcgtaacatttctgattatggctctaatactgtaactaaattcgaataccaatcaggtattgtaggtaagtactatgataacgtaatttcaagtactatggatggtgacgggggtatggtaattgggttctatatctatgatcaagagttacaggatatcaaatcattcacttatcgtacttacaatgataatttcaatattcgtattacagatgatgatggttggcgttggtgggctatgttacctgcaaataatggtgcatgggttacacaggacttcactcaattagatttcaaactaaacagctatcaaccgaaccattcagaaggtgatgaacaacccgcagccgttaccctaacaggccgtgaagacttcactattttacttgatgatgatccagtagatggggtatcaggccatattgattggtattgtgttaacgaactaccagagctatatgatgatatgggtactggtgactattcagtactggttaatctaacattcaatgacagtactagtagtggttatacagcacgtcttggtgactgtacgataaaagattatatgttaagtagtcttgcttatactcccggtctaatcccgttcagtaatattacagatccgtatgctcaattatattctggctggcgtggtcttccatatcctggctaccaattacctactatttggtgtttcaaaggtactactattgatacagaaagactaaataacagtatcaagttcttatgtgatgcacaggattggtttactaataaattccatcctacgttacctggtccttgtgctcaggcgtttgtgtggaaccgtcaggatgcattagcgtacttaccagaaggtgagaaagtagatacatttattatggatcacttctactcagaggcatggtctggttatgaaccacgtgcattctatgccggatgtaatgtagtacatgaattgtggtcacgtggagattatacaatcccctctaatataattcagtactgtaaaaactggatgaattacttgaaatggtttatgaaaaataatgatggtcatgcaccaacacgttttaaaaacaatggtgaagtaatttatgatgggtttaccgctcatatgtcaggtctatggctagcaggtgcttgtattatggcaattgctggttatccagatgatgagttaatacaaatgttgtttgatgaagtacagagtttctatgaggtaatcacaccaaatcatgtaatgaatggtacgtgggcagccgctatacgttccggtactccaacaacagcagaaaacaatagtatgttctttggcttttatagtggggaagtactaagaggattgggattatacattgagtactacaatcttcataaataa

SEQ ID NO: 201947 - DNA, 1014 bp, Klebsiella oxytoca
gtgactcggactccgacagcgattctgactctgacagcgattctgactccgacagcgattctgactccgacagtgactcggattccgacagcgattcggattccgacagcgattctgactctgacagcgactcggattcagacagtgactcggattccgacagtgactcggattctgacagcgattcggactccgacagcgattctgactctgacagcgactcggattctgacagcgattcggattctgacagcgattcggactccgacagcgattccgattctgacagcgattcggactccgacagcgattctgactctgacagcgattccgattctgatagtgactcggattcggacagcgactctgactctgacagcgactcggattctgacagcgattccgattcggacagtgactcggatagcgacagcgattctgactctgacagcgattcggattcggacagcgattcagattcagacagcgattccgattcggacagcgattcggattccgacagtgactcggactctgacagcgattcggattccgacagcgattcggattccgacagcgactcggattcggacagcgactccgattcagacagcgactcggattcggacagcgattcggactcagacagcgattcggactctgacagcgactcggactccgacagcgactcggattcagacagcgattccgactctgacagcgactccgattcagacagcgattcggattccgacagtgactcggactctgacagcgattcggactctgacagcgattcggattctgacagcgattccgactctgacagcgattcggactctgacagtgactcggattcggacagcgattcggattctgacagtgactcggattccgacagtgactcggattctgacagcgattctgatactgaagcacccactgcagcacagaacatcacggttaatgacaatgttggttccatcactggtgcgcttcattccggtgatgtga

SEQ ID NO: 201948 - DNA, 255 bp, Klebsiella oxytoca
atggcgttaattcaggatacggtgattaaaggcctgaaggtcgaaaactgttatatcgccgtggggagcattacgcttgccgcagacagaacggagatatatttcaacctgaatttctcagtaacaaaagagcacccgcctttattcacggattatttcacctgcccatacgacagtgacggcggagaaatcgacgcgcaggcctatacctatctgaaaagcctttcccggttctccggcgctgctgacgtatag

SEQ ID NO: 201949 - DNA, 897 bp, Klebsiella oxytoca
atggacatcatcaccgccggagatacatttgaacgccacagcttttttgggtgtctgtgggcgaatggaggttatgcattcaaaatgaataaccctgacggtaaaatatactggcacagtggctcagttgattattctgacggactggcacagattaactcaggtcatatagaagctaacggacataatgaatggactggcagagtgaaacccctggtagaaatcacggggtcgaatgcatcagtgactgtctccggggcaatttttgtgcggggtaatactgatactcaatactatatgtttaagcaatatcagaaacggcaggtgacactgaaagacacggtttttattactgacggtgtgaatgccagtaaaggcctgatatccaaccttgaggttgttaaaagtaatctgacattccctaacgatgcagccaaaagcattgcctaccattcatctgatgaaagcctgctgaccagcaataatgccgttgttgatttctcgttatcggcagcggcaaaccatacggtatcagtgacagatggtaaactgacagtgacggctgttaccggcggcaccacttcgcatctttatatcgatatacccgttatgggtaatacaaaggttggcttcaaattagttgcatcaaatacctcttcactgggggcaatatccctgaacaaatcgctgcttactttgagcaaaaggcagatatccgacctctcgacatcagggacggcatcatggccagccagcgctgccagtgtgacgggggggtcggtaacgctctttgatatccccagacaggccgcttttctcaggctcgattttaacgtggcaaacctgaccacgggtgcaagcttcattattgaatcgctgaaaacgttcacatactaa

SEQ ID NO: 201950 - DNA, 213 bp, Klebsiella oxytoca
atgataggcaatgcttttggctgcatcgttagggaatgtcagattacttttaacaacctcaaggttggatatcaggcctttactggcattcacaccgtcagtaataaaaaccgtatctttcagtgtcacctgtcgtttctgatattgttgaaacatatagtattgagtatcagtattaccccgcacaaaaattgccccggagacagtcactga

SEQ ID NO: 201951 - DNA, 273 bp, Klebsiella oxytoca
atgggtcaggaacagcatgttcatcccttcaagactcgacgcccaactggattgttttgtcgtatggccgaccatgaatggcggcacgcgaaaccagcggcatatttcctcaatgctgaaggagcggctttcaagaagttgtgcggcttccgggttcatggtgacattctggtatgtcagctcattttccagaaccatcagtttcccggcatttttagagccgataaagttctggagggccttgcgaagcctttctcgctgcccttcgtttag

SEQ ID NO: 201952 - DNA, 255 bp, Klebsiella oxytoca; identical to SEQ ID NO: 193102

SEQ ID NO: 201953 - DNA, 132 bp, Klebsiella oxytoca
atggaacgtttcttccgcagtctgaaaatagaatgggtgccagcgaatggttacgcaggcaaagatgaggtctggaaaaaaataagcgcttatattttggactattacgatagcgtcagacctcactattag

SEQ ID NO: 201954 - DNA, 1896 bp, Klebsiella oxytoca
atggcccgaattccagaatcctcattgtgggaagaagagattgagcttatttccagaaacgagcgcgtttctggagggctggacggtgtggcgaacaggccactaaaaagcctgaccaatcgtacacgatacctcaaagacaaagcggatgcgtcgggcgagctgattgctgaaaaagtcagtgcggtaaagactttcgttgaaggtgcaacgctaaagtcgccgcgtgaagaaatcttgcatgacgcttaccgcctggtgtggactggtgaatttcccaaagtcgtacctgtagcctcatcaccagagacaaccggcggggtgggggccgggcgctgggcttatacatcggatgctgtcattcgctcaggtctggcctcaagcgatccattgctgggtgattccctcgtcatgcaccacaccgggaaaactgtcgctgaatatttagacctttaccttgcaaccgtattctttattacccctgagcagaacggtgcaaagggggctactgttcaggatgattctgacggtctgcaggatgcgataaacaaagcagtggcgaccagtattatatcagggggcgtttatactcccgtggtcgtgcagctcaacaaaccctatcggataaacagaacgataacgattgatgcttcccgcgtgaggcttaacgctatatcgggttgtgggatctatgttgaccccgatggaacgtatacggataacaaagtattcaacattacgggcaacgggccgaatgtcgctgtgtcggccagcaagacgggtgcattatttgatggcgttttgtttctcaccagtggtgaaaagaaacttgacctttttcacgcagtgcgcgacagcacagccagtaatgataacggggcgtgtctccataacgtaagcaacatagccgcccgtggtttcagaacagtgttcactcacggcgccgggggctggggctggaatttcaccgggtgcctgttcagcgggaatactaacctgatggacattatcaccgccggagatacattcgaacgtcacagcttttttgggtgtctgtgggcgaatggaggttacgcattcaaaatgaataaccctgacggtaaaatatactggcacagtggctcagttgattattctgacggactggcacagattaactcaggtcatatagaagctaacggacataatgaatggactggcagagtgaaacccctggtagaaatcacggggtcgaatgcatcagtgactgtctccggggcaatttttgtgcggggtaatactgatactcaatactatatgtttaaacaatatcagaaacggcaggtgacactgaaagacacggtttttattactgacggtgtgaatgccagtaaaggcctgatatccaaccttgaggttgttaaaagtaatctgacattccctaacgatgcagccaaaagcattgcctaccattcatctgatgaaagcctgctgaccagcaataatgccgttgttgatttctcgttatcggcagcggcaaaccatacggtatcagtgacagatggtaaactgacagtgacggctgttaccggcggcaccacttcgcatctttatatcgatatacccgttatgggtaatacaaaggttggcttcaaattagttgcatcaaatacctcttcactgggggcaatatccctgaacaaatcgctgcttactttgagcaaaaggcagatatccgacctctcgacatcagggacggcatcatggccagccagcgctgccagtgtgacgggggggtcggtaacgctctttgatatccccagacaggccgcttttctcaggctcgattttaacgtggcaaacctgaccacgggtgcaagcttcattattgaatcgctgaaaatgttcacatattaa

SEQ ID NO: 201955 - DNA, 177 bp, Klebsiella oxytoca
atggagttatcagaaggcagtaccgtgacttgctataacaatgccgatatgaaagatattctgacggcaggaaaggagtaccaggttgagaaaatactggatgcggatttgataacgctgatcggcgtgtcagagccggtatttatctggcgatttattttaccggatattttataa

SEQ ID NO: 201956 - DNA, 186 bp, Klebsiella oxytoca
atgactacaaatgattttatggaagagcaggaagtttttaacctgttgggcaagaaaaaaacagccgtttggagattacggaaagaacatggttttccacaacccgttctaacatatcctactcgctatagtagaaaagcagttatccgttggatagatgaaggaggaataaataaacattcatag

SEQ ID NO: 201957 - DNA, 447 bp, Klebsiella oxytoca; identical to SEQ ID NO: 201940

SEQ ID NO: 201958 - DNA, 321 bp, Klebsiella oxytoca
atgctcacgatgtgggtgacggaagacgaacaccggcggctgctcgagcggtgcgacggcaagcagctggcggcgtggatgcgtcagacctgtctcgatgagaagccggcgcgtgccggcagactgccgtcgatatcgcctgcgctgctgcgccagcttgccggtatgggtaacaacctgaaccagatcgcccggaaagtgaatgccggtgttgccggtcatgaccgggtgcagatcgtggccgccctgatggcaatcgacgcgggactggagcggctgcggcatgcggtgctggaaaaaaggggggatgatgatcgttaa

SEQ ID NO: 201959 - DNA, 531 bp, Klebsiella oxytoca
atgcagggaatagttaagacagtgccgctgttatgttttttactgctgggctgtgatccggcagaaaaagaagcaccgcgcggcagcgggaagaccagctacgtagcggctaatctgctgggctataaccatatggcaggcacgaatatcaactggttctccgtcaacggctaccggggacacgccggagggtttacctgctgcatatcgctgccggaaaaatggcgacccaatatgcaggtggtagtggagtgggaggttaaccctaacccttttccgaaggatctcccccacttcgatgatccaaactatgaacattatatggaaaaatataaggctacctttcgtcagtataaagcggtagccactattcccgaatatgaagattcctgcggcctgcaggtgcatttcttgccctgtcagcagattaaagtaacggccacctgccacgggccgacccatcctgaccacccgattaaagaacctttcgacctgccggagcctgcccagtgcccgccagaaacgccatga

SEQ ID NO: 201960 - DNA, 177 bp, Klebsiella oxytoca
atggggttaacaaaaggcagtatcgtaatttgctataacaattccgatatgaaagatattctgacggcaggaaaggagtaccaggttgagaaaatactggatgcggatttgattacgcttgtcggcgtgtcagagccggtatttatctggcgttttgtctctccttccctgttttga

SEQ ID NO: 201961 - DNA, 255 bp, Klebsiella oxytoca; identical to SEQ ID NO: 193102

SEQ ID NO: 201962 - DNA, 177 bp, Klebsiella oxytoca
atggagttatcagaaggcagtaccgtaatttgctataacaattccgatatgaaagatattctgacggcaggaaaggagtaccaggttgagaaaatactggatgcggatttgattacgcttgtcggcgtgtcagagccggtatttatctggcgttttgtctctccttccctgttttga

SEQ ID NO: 201963 - DNA, 177 bp, Klebsiella oxytoca
atggagttatcagaaggcagtatcgtaatttgctataacaattccgatatgaaagatattctgacggcaggaaaggagtaccaggttgagaaaatactggatgcggatttgattacgcttgtcggcgtgtcagagccggtatttatctggcgttttgtctctccttccctgttttga

SEQ ID NO: 201964 - DNA, 255 bp, Klebsiella oxytoca; identical to SEQ ID NO: 193102

SEQ ID NO: 201965 - DNA, 177 bp, Klebsiella oxytoca; identical to SEQ ID NO: 201962

SEQ ID NO: 201966 - DNA, 177 bp, Klebsiella oxytoca
atgagaaccttactggtactgatggtgcttcttacttccaagttgttaacggttatatctctactaacactactgctggtgatttcgattcacaagcacaacgtgaatatacctttgttgttactggtgctccagttgcaagtggtgaaacttctggtgactaaatactatcaataa

SEQ ID NO: 201967 - DNA, 903 bp, Klebsiella oxytoca
atgaaaacttcgccagttcatgagttgcagggtttggctgctgatgtcagtaatgacattgttggggttttaataaaggccaaaatgattgcagtgaagttgaatttgcccgaattggcagaatggtttgattgtgagcttgatggctatcctgatagtgttgttctccctgattatcgtatagggcaaggtgtagttagaggatggaatccctatcacggatggataaatgtccagtatcgtgatattaaaccagaaattataacaatgattcaagagtatggtttaagtgactcaatttcagcattgagaaatcttcgtgaagcagatgataacctgcgacttggaatgtcagccgaaaaaataaaaatgcttttcccttcaaatagtgctccttcggaagtttgctggtttatcaatgcttcaaagttggaatgtatagtaactactgtaaggaataggatattaacatgggctttggagttagaaagaaagggaatattgggtgaaggtgtagtctttagtgaaaaagaaaaagaaattgcacctgcaactttttacaacactaataatttttatggttcagttcataatttaggggcgataggggcaggtaatcacggtagcatttatcaaaataataaaaccactattaacgactttgagtctcttaatctggcgctcaaagaatatggtttagctgatgataatattagtgatttagcaagggttattagtgagtcgccacttcctaaaaacaaaaatgaggtgagagaatactttggtgattggattggagttatgacagcaaaagctttaaagggtggtcttgttatagagggagcgaacgtccctagcattttaatgaatgatttgtatagctacttcaatttacaaagataa

SEQ ID NO: 201968 - DNA, 195 bp, Klebsiella oxytoca
atggaagattcgattaacgcaccgattaactattacgattctgaaaagcgtctaattgttggtcacaatctggttggtaagattcatcctcagttaatgagcaaattaatcagacgttcttcaaacgatggttcaacacgttcccagcaagcccgagtcacagactatctagaggggttactaactaatgtctaa

SEQ ID NO: 201969 - DNA, 1035 bp, Klebsiella oxytoca
gtgcgcggcggcggcccgtttgattccggcgatgcgctgcgtcaaaaccagggcgttggcagcggcgctggcgtattaccaaacgagctcaccagcctgaacgatgatcaggtccgtcatctggccgatctgacccgtcttgggatggccggtaaccttgctgactttgtgatgatcgacaaagacggcgcggtgaagaaaggcagcgaaattgactataacggcgcgcctggcggctatgccgcagatccgacggaagtcgtcaactatgtttcgaagcacgacaaccagacgctgtgggatatgatcagctataaagcgtcccaggaagccgacctggcgacccgcgttcgcatgcaggctgtttcgctggcgacggtgatgctcgggcaggggatcgctttcgaccagcagggttctgaaatgctgcgctcgaaatcctttacccgcgactcctacgactccggcgactggtttaaccgtgtggattattccctgcaggacaataactacaacgttggtatgccgcgcatcagcgatgacggcagtaactatgacgtgatttcgcgcgtcaaagatatggttgccgctccgggcgaagcggagctgaagcagatgaccgccttctaccaggagctgaccgagctgcgtaaatcctcgccgctgttcaccttaggtgagggcagcgcggtgatgaagcgcgttgatttccgtaataccggttcagaccagcaggccggtctgctgattatgaccgtggatgacggggtgaaagcgggcgccagtctggatagccgtcttgacggcctggtggtggcgatcaacgctgcgccggaaagccgtacgctgaatgagtttgccggtgagacgctgcagctgagcgcgatccagcaggcggcgggcgaaaattcgctggctcacggcgtgcagattgccgcagacggcgcggtcaccctgccggcatggtcggtggcggtgctggaaatgccgcagggcgatgctcagggtgcggggctgccggtcagcagcaagtaa

SEQ ID NO: 201970 - DNA, 600 bp, Klebsiella oxytoca
gtgattccgactccgacagcgactcggactcggacagcgattcggatagcgacagcgactcggattcggacagtgattctgactctgacagtgactcggattccgacagcgattctgactctgacagcgattccgattctgacagcgattccgattctgacagcgactcggattcggacagcgattccgactccgacagcgattcggactctgacagcgactcggactctgacagcgcttcggactccgacagcgactcggactccgacagcgattcggacagcgattccgacagcgattccgactccgacagcgactcggattcggacagcgactcggattcggacagtgattcagactccgacagcgactcggactctgacagtgactccgactccgacagcgactcggatagcgacagtgattctgattccgacagtgactcggactctgacagtgactcggactctgacagcgattccgacagcgactcggactccgacagcgattctgatactgaagcacccactgcagcacagaacatcacggttaatgacaatgttggttccatcactggtgcgcttcattccggtgatgtga

SEQ ID NO: 201971 - DNA, 165 bp, Klebsiella oxytoca
atgaattataaatttgaatgcaagtttaaagacataaccttgctgcctatcgccagcattatgcaactggcgtactctgtaccgcttgccaatcatactcgatacgcgggtttgatacctgagaacagtgcccagttgaaggctgagaggggactgattaattga

SEQ ID NO: 201972 - DNA, 456 bp, Klebsiella oxytoca
gtgctggccggggatgaccgtataccgggcagaatgcagacactgcgcgatattattgatgtcaaaaaatgggagataaatcaggccgccgggcgctatatccgcgcccatgaagcggtacagcgcatcagtatccgcaaccggctgaatgactttatgcaggcacacgggacagagctggccgccacgcttgccccggagctgatgggactcagtcagcagcccgcactcctgaccggccatgcactcgaccgttcggcgcattacctgcgcgaagccctgtccgtgtggctgagcaccggtgaagaaattaattattcggcagaagacagtgatattttaacggccatcggattcaggcctgacgcggcttcgcgggtggataatcaggaaaaatacacccccgcacagagcctgatttatgcccgccggcgcgcggaactggccagtaagtag

SEQ ID NO: 201973 - DNA, 1011 bp, Klebsiella oxytoca
atggtacagagcgcaacctttccggtggatgtgggctggcaagctttactgaaagacctggacctaaggcctgtaaatgttttgcgtcgggccgcccttcctgaagatttactttccagaggaaaacacaccctttctgcacacgactatttcaacttctggcgcgcgctggaaattgagtcaggtgacgcgatgtttcccttacgtgttatcgaaaccctgacgaccgaaactttcagcccaccactttttgccgccctttgcagtcctaaccttatacaggctgcacagcgcctcgccacgtacaaaaagcttgtctgtccaatggaactaatactgaatgttggacgagagggagatttgacggtatctcctcgctggctgaatcttcagcccgaggctccgctgtcactacaaatcgcagaaatcgccttttttttttggtttgccagactcgcaacccgcgagcctgtccgcgcacatcgtgtggtactgccagacagtcttcccgaatcccatgcccgacgctatgagaaattcttcggtaccagcatcatgaaaggaagcgtaccttccatcactttcaccgccggggatgcattaaggccgtttcttaccgtcagtgaaggtatgtggcgcgtattcgagcctgatctccgacagagactaagtgaacttgaagcaaccgccgcaatagcagaacgggtacgggccgtcctgctggagctgctaccgggaaatacggccacgataaagaatgcggcaacccgcctcggactgagtcaacgctcgcttcaacgccgccttgcagaagaaggcgtcaattttcgcgaactggttaactctacccgcgagcgtctggcacgccattacctcagcaccactacaatgtcaggtggagaaatcgcgtttctgctcggttttgcagatcccaattctttttaccgcgcatttcagggctggactggacaaacgatcgggcacgctcgtcagagtcttccccggaaataa

SEQ ID NO: 201974 - DNA, 903 bp, Klebsiella oxytoca
atgtatgaaatcagcactcaacggggccgcagggtcattatcaccggagccaacagcggcacgggtaaggaagcagcaaagaggctggccgcagcgggagccgatatcatcatggccgtacgaaatgaggcgaaaggggaagaggcgcgccgggaaatttgtcaggctgtttctggggcctcgcttgaagttcgtatcgttgatctctccagtcttgaaagcgtgggtatgttcagccaacaactactaaaagagggacgcccggtggatctgctcgtgaacaacgcggggattatggcaccaccgcgtcgtgagctcaccgcagatggatttgaactgcagtttgcgacaaatttccttggccacttcgcgctgacgaatcttctgctgccgcttttactggaagcaaaaaatccccgcgtcacaaccatgaccagcagcgctgcaatgatgggaaaaattcagttcgatgacctgaattgtgagcgatcttacaaacccattgcggcgtatgcacagtccaaactggcctgtttgttgtttgctaatcaacttggcaatatcgcacggacgcgtgactggccgttactcagtacgagtgcgcatcctggccatacgcgtactaatctgcagacaagtggcccgaacctgggaagaacatcgacccgtaaaaaattgatgtattatctcgtgccttcagtgcgtgtagagtgggcaacagaatcgctattgaaagcagccgttgacccttcggcgacgcagggagatttttacggcccacgctttctgctttttggagatccccatatagcaaaacaacccaaaaccgtaagggaaaccgacctggagcgcctgtggcagacagccgaagtgttaacagacattccgactccagtcgtctga

SEQ ID NO: 201975 - DNA, 861 bp, Klebsiella oxytoca
atgttttcaatcgcagctgatatcaggaatacgctgggggagtgtcccctatggtgtgaaagaacacgaaggctttactggactgacattgaggccagtgaactgctcgcattagaagaaggtaatgacgctgtaatgcgctggtcgctgcctgaacgccttggttcctttgctctgactgaacgaagtcatattctgctaatggggcttgcgtccaggctggctttttatgatctcaataccggcttactttccacggtggccgcctcaccgggaggtacgggtatccgcattggggatggacgatgtgaccgtaccggtaattttgtctttggaacaatggatgacgattttcccgtgaaagttatcggtaagtttcaccggcttaatgctgcaacgctgacagttgagacgcttgcactgccagatgttgccattcctaacagcatctgtttcagccccgatggcggcaccctctattactgcgactcaatgcagggtcggataatgtgctgcgattatccctcgctgcaaaaccagcgcgtattcactaaaatcgaaggtgaaggtgcccctgatggttcctgcgtggatgccatgggctatttgtggaatgctgagtggggagggagtcgtgttgtccgttaccgtccagatgggagtacagaggtaattctgtcgtcgcaggcaattcagagtacctgcccggcactggcaggtgagaacttcacccgcctctattgcaccacagcttctgtagggcttactacgttgtctgaatatgacggtaaattacagaaagctgaatctgctgtcagtgcagggttatctgaaagccgatttgcagcgcatacaatttaa

SEQ ID NO: 201976 - DNA, 2070 bp, Klebsiella oxytoca
atgaatattgaaacattttctagattaatagaatcatccgatgtatcagttttccgttcattaactgcaatgctacttccattaatcggaatcggggatgctgattattgtgatggaccttatgacggtggaaaagattttaacctggccgtaattccaatatcaggcgttaaagtaggaattcagatctcggtagagaaaaaatgggaaagcaaaataagaaacgacgctattaagttaaaaaataactatggcacaaatatcacttattttatatcctctcgaagaattccagaggggagttatgaaaaagtaaaggaagatcttttattaaaacatggaatcacagttattaaatatgacaaccaagcaattgctactcgctttataaataacaacaaggttaacgatgcgttaagattaatgggtatagatactacttccacgcccgaagaatataaaaagtatcttggcccaaaaaatgaagcagtgtcatcacttttattatttgatgaaaatacaaaagatcttcgccagcgtttctttaagtcaataataatgtccgtactttcaaggaatgttaaaggcctgcctcggacagatttgttagataaaataaaaataagctttagcattcaagaaaaccaatttatgcaaattagctcaaatatagaccgacttttgcaatcaggtaaaataaaaagcagtgataacatacttactttatccaaatctgaaacagataggtttttagggttaaagaaaagcactgaacttgagttagagtttttaagagcaagctttaaaaatgaggtaacccatttacctggtaatttggataataaaacacaggacttacttattaatcactttttggaacttacaatttatctatctggacaaaactatagtacctatgatagtgaattaaagcaaaatgaagcctataatttaattaaggatattttatcctcaagctttggcagagaaaatacatcaaggattttcaaagagctttctgttttttttgcaaattcagagtttgccaaacatattgcatgtgcaaagttatacgatgcctttttaaatacaaaatcatctcaccttataaatgctttaggcggcacagaaagtcttaatgtttatatagactcatctgtttttataccaataatttgtagcttattatttgataaagtccaggatagattttctcaatctggttcttcattatatacattaataacaaaccataaattcaaagccatagttccatatgattatatggaggaggttgcgagtcatttaatagaagcgtgccgggactataagcatattattgaaaaggatatagacttatctcattcaggaaatgcatttgttagtcattattcaaaatacaaggctaacaattcagacattacctttaatgagtatgtgaaagtgtttggcatcaaacttagcaatataaacaatgacatgtcagatagcttattttactcaactagggataaagttgtacgtgagattagtaacatatcatctagatatgatttttttgttgaaaaattcccagttgaatatttagatggtaaaattcaacaacataaacaattcatatccgataataacataacaagaccagatgtcttaataagacacgatgcaagaataattggttatttgtcaggtaactacgttcaatcaggaatcgtaaaactcttatgtacatgggataaggtacactcgattaaaaatccagatggtaatgatggatattatgtaatgcatccaattgcagtcattgactatttttccctagcaaaaggaaatggtgatacatctatttcacatttacttgatttcgcgatgatgcaagaagaaacagatcttgagctaagttcgaaaatatgggatacaatagctcgaatagaaaacgacaaactatcggatgccaatctattgataagcgccaaagaattcaaagagcaatatatggaaaaacatgccaatgatgaaaaaatagtaagcaagcaggttgaaaaagagtggatggcttggaagaaatag

SEQ ID NO: 201977 - DNA, 2217 bp, Klebsiella oxytoca
atggaacttaggcttaaaaatgtcactagttataaaaaagatgacatcaccacattaaacctcacaaaaaaaataaacattttatatgggcaaaatggttgcggaaaatccacaatctcaaatttcttctataacactaacaatactgactttaaagaatgcacttgcacttcactcgatgattatcgccccgttgtttataactcaaaatttatagaagataatttttataacacaagagaacaaaaaggagttttcactcttagtaaggaaaatgcagacatagaaaaagagctcttattaaaagaagaaatcaggcaagatttatcaaaaaaatatagagaaaaaagagatgaagcagataaattaacaaaagatcgaaataaaaaagaagatgagtgcatcgaagctatatggaaaaaaacagaatcagctagggcctccgacctaaaacacttgatgagaggtctattagggagtaaaaagggatttttcactcaagtgcaaaaaacacccccattactcactacagacttagaacatctagtaagtgaatatagcgaactagtaaaacacaaaaataaagaactccccttaataaccccgttatctgcacttagcatatcagatgaagacaaacaacttctagccactcccgtaatagactccagcaatagttatttatctgaaacaataaaaaaacttcaaaatcttgactgggtaaaaaagggaaaagaactatatcttaatggcacgtcttgcccattctgccaagaaggcacaatcaataccaaatttttacaagcaatcgagtcaatctttgatgaaagtcattcaaaaagaatcaggcaaataaaagattttaaagagacttattcacaagctacaatttcactctatcaaaagataactcaagaaataaatacttgcgaattgattagccatcatgaaaaagaaacgacaatttctcacatcaagattctatatgaaattgcaagtaacaacttaaatttaatcaccaacaaaattaacaacccctcatcagtgcttatgttagagcatgaccgcctaactgaatttaaagttactgcttgtatcagtgaatacaataaagcaattaaagatataaatttaaaggttgctaaatttaaggatagtgaaagctcaatcaaagaaaaaatattgcctgcattaaacactttttgcagcgccgaaattgactcattaagtaattacaataaaagctataatgaaaaccataaaaaagtacttgatgacatgaaggaaattgaagataaaggcagggaaaacacaaaaataataaaggagttaagagagaaaatatctaatatcgatgaaacaattgactcaataaatcagagattaaaaagtttaggcataaatggattcagcattaagaaacatgatgaaaatccagacatgtatatcatagctcgctcagaaacaaccaaaaacagtgacgtatacaaatctcttagtgaaggagaaaagacattaatcacattcctttatttcttagaatattgcaaaggaaaaacagacaaaaatgacacagataccagggataaatttatagtaatagatgaccctatatcaagcctctcacaaaattatgtttatgacattgcatcaataattcatcatgaaataatcaaggaagaaacaacaaaaaaagcacttatactcacccacaacctttatttttttcacgagttaataaagctatcacctaaaagcaaaggtgacaaagtgtttaaacgtgattattacctcggcagaattacaaaaaatgagtttagtactataactgaaataaataaaacaagcatacgaaatgaataccaatcactttggcaaatattaaaagatgcaaaagatggaaaagtaaacagaataatactacctaatattatgaggaacatattagagtattattttgcatttgttcgcagaacagacgatctacaagatgagctaatcaagcttgaaaaagatgaacaacacagagatttcagagcattttatcggtatataaaccgaggctcacactcagattcagtaaatatcacagacatgggtgatatagattctgaaaaatacctcaatcaattgcgtaatatattttcagcgaccggcgacgagaaacattatttaaaaatgatggatgaacttgatgaggaaaacgttaccgcttag

SEQ ID NO: 201978 - DNA, 561 bp, Klebsiella oxytoca
atggatgcagccgcagtcgagacggacaaaaccgtcatcgcggatttctttaaatggaagaacaacggtgtgcctgcgggcaacggctggaaccgttcaaaaaataatgccgagtttggtgtggattactacaaccgtaccggtacgtccaaatccaatatgttcgacaacaagccggacgaaacgcagtatttctacaccgacaatgatgctacaggtaagcagctttccggtgagcatgattacacagtaaccttccctaaaggcggtcttccgccggtgaagggcttctggtcacttacgctctacaacggcaagcatctgttcagcccaaatgaactgaaccgttattcgctggggacgaaaaataaaaacctgaagtataacgaagacggttcactgacgctctacgtaagcaaaaagcgccctgcagaggataaagtgaataactggctaccggcacctgatggcaacctgtcactctatatccgagcatattggggggaacaaccaattctggatggtacctggcagccgccaaaaattgaaacggttaaataa

SEQ ID NO: 201979 - DNA, 195 bp, Klebsiella oxytoca
atggacgatattttgctgacatccgacctgaccagtcgatacaaaatttctcgcaagaccctgtggtcatggcaaaacgaagaaacaatgccacggggttttgctcgccccttccctgcaccggacttccccgggaatcctaaccgctggaaagctgagtcgattaaggagtgggaagggataaagcagcattaa

SEQ ID NO: 201980 - DNA, 612 bp, Klebsiella oxytoca
atgactgatatcgccaccttcactaatgagcaattaatcgccgtgtgccgtgctgacgtggcggaaatgtcgaagtttttaaaagagggtgaattcagcaatccgtcccgcgcagccatgtatttgcgtattactgaaatcgcattggcagcgctgatgggggagttctcatttgctcgcaatcaggttcgccgagaacacgctgaatggtcacatgccaccttcggcaatgttggtccggctggcccactgaaacacctcagcatagaagcgcttgaagctgccgcggaacctaacgaccacagcgaatgggctgatatgcagttcctgatgtgggatgcccagcgcagagcgggaatcactgacgagcagattacccaggcgatgatcgataagctcgcggtaaataaggcgcgccattggcccgagccaaaggacggggaacctcggatgcatttacgaagcgaagacgaatcactcaacgccaggcgccgccgtaatcgtgaatcaaatgcgcgcgctcgcgaacgtgaaacgcccgcacaacgcaaagccagactggagaaaaacagattgagaatggctctttgtcgtaagggaggtgccaaatga

SEQ ID NO: 201981 - DNA, 354 bp, Klebsiella oxytoca
atgagcaaatcacttaacgcacgatgcatacgccgctggaaagttgaattcaaagggcgctgcgattcgaaatatagcccctactggcacaagcgcgatctccgcggttacatccgtgaggcggcactgacttcggcgtattgcatggttgaaaacttggcctacaacaacgcaatgcacgattttttcgctgatgtgggtgacaggaatggctggtcgccagacttctcagcatggtacgactggcgtcgagagcattatctcaaagaagctcgcgactacctgaatgaagaagccaccaacgacgaaatagacgacgaaatagagaacgagctggaggcctggaatgactga

SEQ ID NO: 201982 - DNA, 753 bp, Klebsiella oxytoca
atgctaaatatcaagcaagaaagatttagcaatttgcacatttatcattttgctataagcagtaaaaatgaagggatggaaaataaagagatcagaaaagccaaccttgaggcactgtacgaacagcggcatacagatagcggaatgactaaagcacaatttgctgaactcattgaaaccagcccagccgcttttagtcagttacttggggtaaatccaaatcgcaacatcggcgataaattggctcggaaaattgaaactgcactcaatctaccgtttggttggatggatgtgttacatcccactgagagtgacggtaacgtcaaataccgcggaattaatgagacaaaaggaagctatcctgtaattagctggataagcgcgggccaatggatggaagctgtagaaccatatcaccgcagagctattgatcgctggtacgataccaccattgtttgttctgaagactcattttggcttgatgttaaaggcgactccatgacctcgccggcgggactaagcatcccagaaggagcagcaattcttgttgatcctgaagtcgagcctattaatggtaaattagtggttgcaaagcttgatggtgagaatgaggccacgtttaaaaagctcgtcattgatgctggtcgtaagtttttaaagcctctaaatcctcaatatccaatgttagaagttaatggtaactgtagaatcatcggtgttgtggttgatgcgaaaattttgaatattccttaa

SEQ ID NO: 201983 - DNA, 234 bp, Klebsiella oxytoca
atgaataatgaacttcttcgctggcgcaaaggcgccacctctgacgaatggtcccagcttgcaaagctggctaaaacaaccgttggctaccttgatcagattgcatatgggaatcgccgggcttccccggaaaaagcatctgcgatcgaaacggcaactcatagctttcatcgtcaggcaccggttttaaaagagagcttggtatttgctgggccgcgtaactcaactgcctaa

SEQ ID NO: 201984 - DNA, 543 bp, Klebsiella oxytoca
atgcaatcacttacgtatcaccaggatagcgcgttttccgttaactcactgataaaccgtaatcaatcagtgcaaagcgtatcaccggaaaaaatccgcgatgccgtccgcgcctgggcgacagccatcaacaaccaggacgttgtcgccgggctgattgtcgaggaatgggaacgacagggcgggggagcgctggacttccctgacgatctgagccgtcgccgtcagaaactgttccgctggctcgacggcaccaccatggcggcgcagcgcaacattcaactgctgaccccggcaatcctagcagttctgccgctggagttccggggccgtctggcgcagcaagaagatttcatggcgcgttatgccgcaatggagaaggaggtaagcgaagcaaaacgagctctgatgctgaatgcgccgcagcaccagatggtgaaagaggttcgagaggggatcgagcatctgctggggctgctgcctgttgaggctatggctcaggttctcagcggtatagcctctgttaccccgggccttatgtga

SEQ ID NO: 201985 - DNA, 858 bp, Klebsiella oxytoca
atggccgacctgtcgaatgggtataccaaggtcgctaacgagattcaacagctcaagcctcgtctgagaatgtcaggtcgggagtggcagtgttttgaggcggtgatctggcttacctacggctggaacaagaaacaggatcgcgttacgaacacagtgatcgctaggcttacagggctgagtgattcgcatgtttctgatgcgctcaaatcgctcgcagaacgtaaaattatctttagtcagaagcagggcatgatgaaaacggtcggtataaatactgacctttccgcctggattttagacaaacccaaaacgggaaaaaccttcccgaaatcgggaaaagtattaccgaaatcgggaaaagtcttcccggaaacggtagacacccaagactataacaagaacaatattaaaagatcctcgtctcggaattctgacgaatcccgaaaccagaaaactcaaaagtttctctctcgccatccagaagctgccgacgggatatacaccccggcaggaaaatcatggggatccgctgacgacctcaaggccgcacgctggatttacgacaggcttctcaccgtcaacgcatcgctatccgaaccaaattgggttgaatgggcaaacaccatcaggctgatgcgtgtccaggacaagcgcactcactacgaaatctgcgatttgttccagtgggccaaccgggacgagttctggaaagacaacatcttgagtccttcaagtctgcgcaagcagtgggatcagctcaccaccaaacggctgcgcgcaaccgcaacggcaaaaccttcccggggctgcatcgacctgcacaacaccgactggattgatggggtgctggaatga

SEQ ID NO: 201986 - DNA, 687 bp, Klebsiella oxytoca
atgaaaaatctagccgagagcattcacaattttgaccgggaacaggctcgccgcgttgcgcacaacatgcctgagcagtacaccgaacgcgaacaaacacagcaggtggcgcagattatcaacgggctattcgtacagctggcggctgcgtttccggcaagcatggttaaccgaagccaggaagatgtgaacgagatccgccgtcagtgggtgctggcgttcaaagaaaacgggataaccaccatggagcaagttgaggccggcatgcaaatggttcggcaacaggacagtccattcctgccgtcgccaggccagttcatcaagtggtgtcgtgaaggccgtagcgcgcttggtgttagtgctgctgacgtcatggtcgagtactggaagtggcagaagctggttttccgttacccttccagcgagcaatacccatggcctaaaccggttctgtatcacatctgcctcgagctgcgccaccgcagcactgatggccagttgagccgtcaggagctggagcgcgaagccatcaaggttctggacatatgggaacgccaggctctctccggtaagcctgtaccgccaattcgccgcgcactggcagcaccaaaggccgcgaccgggccgacgccagccgagcagctgcttgcgcagtacaaccgaaacaaagacgcggggagggcgtga

SEQ ID NO: 201987 - DNA, 1902 bp, Klebsiella oxytoca
atggatcctttaatggaagcgtttttaaccagtgcggttgggaaagcaaccgaggttttggccgggcgtttgctggataaaccgtgggccagagactttgatgcaggaatggccttgatcgaacagttaaaagaaaatgcagctaaagaaaattatgtaagactccaagtacttccatcattaaaaatgaggacattacatagagcagattacgatgttctgcttgactcaatttattatcctctaacattaaagacggcaaaaaaccatgactcaatcattgtaaaagatggagaaacgatctcttttgatggcgttgtaaatataattggaatcgctggccaagggaaaagtactattttaaggaagctctttagcgaagagttgaaacttggtgagaggattccgttttttattgaactcagaagagttgatgatggtgatgtgcttaactatctcaaatcctgcattagagatatagggctaggcgttacagatgataatgtagaaatgttgttgcagtcaaaaaaagttgttttaatgcttgatggttttgatgaagttaaacatgatttgcgaataattgtattaaattccatacggaatattcgtaatagttataacactagagtgatagtgacgagtcggccaaatacagaaatatgtacagagattaacattcataacttatacattgaggatttaaacttagttgataaaatcagagtgttaaatattctttccttcaacgaccatgatgcaaataacaatgacacttttatcatattggctgggcttctatgtgaaaatgaagatttagaagaaacaatatgtaatccaatactgattactcttttgtatcattgctacccgcatttagatgccatccctaataatgttgtggagttttatcgaagcttgtttatgacgttatatgcaaggcatgacaaaataaagaaccatgctagggagaggaaatctatcattgatggtgaggccgctagatggtgtttttctgcaatatgcttcagctcattaatggaagaagactatgaactttttggtgagtcactttttaggtatgttgaggatgctattgaaacagagggctatgacaggacacaaacgcaaccatttatagatgacatcattaacattacgtgtttgattcaaccagacggagataatagattcgtttttctacataaatctgttcaagagtttcatgcggcttttgcagttgcaaacctttcaacagatgataagttaagtgtttatgaagatttagtcgagcaagttaagtcctccgaacaaattgataacatgatggtgtatttatctgtacttgataaaaaagcatattcagaatttgtgactttaaaagcttttaatgagctcggatttgtcgatatagcaaatgcatctgatgaaactattgatgatacattccttagtgcgttggacggtatggatgttcatgggcgacaaaaggtaggcgggcatgaggttgttctatcgcattcaatatctttaggtgaagttcttaatcttaatattctacctgtattagctgggtaccctagggaaataatgagtgttattgaccatacattcgaaactgaatttagctttgtaattgataaaagcgatctggaaacggatgttagctatcgaactctcaatataaactcaagcgcttttgatattgaaaagtccgattctgaatactatttaatagattttgtatctctgctaaaaaaacaaaagctctatgagccattaaaaatggattatataactgcagtaaaaaaatattatcaagatgtatataagccaaatcatgcaaagaatgccatgcgtaataaggctataaagaaaaactttaagataaaaaggcggtaa

SEQ ID NO: 201988 - DNA, 471 bp, Klebsiella oxytoca
atggcttttgaaaaaaagttgaaggatagaacagaaaccgaattgatttgcttactttatgacattgtcggtgaacttgaaaaacgtaatccaggacgccggtttacactagatggtcatctcatcggcagtattggcgaagccattgctgctaggcagtacaacctgacattacttaaagctagtgccgagatccatgatgcagtatcttcatgcggaaaaatggtccaaatcaaagcaactcaggttagccgtgtttctctaagctctgaaccagaacatttacttgttttgcacttgtcgaaagatggctgtgctactgaggttttcaatggaccgggacgtttggcgtggaacgaggcaggaaaaatgcaaaagaatggacagcgtcctatttcgatcagaaagctgaaactgctgacagatagcgtgatcgtctcggatagaatcagtactattaagccagtatga

SEQ ID NO: 201989 - DNA, 597 bp, Klebsiella oxytoca
atgaccagctggcagcaatacaatgacaaagcatctagcttcttcaattcctacattggtatgagttttgatgaaatttttagcgatgttgctgagtatttaccttcttcaggtgagtcatgcttggacattggcgctggctcgggacgtgattccgctgctcttgctatgcgtgggttaaaggttaccgccgtagaacctagtgacgagtttcgagcgttagctaaggattatcataaaaatttagatatcacctgggttaacgacagcttaccgcatctaaagaatctgagctcaagaaatcagaaatttgatttcatcttgatgagtgccgtatggatgcatcttccccctgaagacagaacgctagcgttgcagactgcttttaatttattaaatacatcaggtagaatgattcttactttacgcttgggtccggcagaaccagaacgtgtcatctatgaaatatctacggaagaagccatttcaaaagcaaaagaagttggattcgatattgagttcgtgaatcctattaaagaagatggatttaatcgcaataatgtcacatggcaaatcgtggttctttccaaaagttaa

SEQ ID NO: 201990 - DNA, 195 bp, Klebsiella oxytoca
atgacgatgttgatcgggagctgcgcgaaagatttacacgccccggcagtcgttgataccgcatgtaactgggtgcggatcatctacctgaccgaccacgatatcgacgtgctggatatgcagaccaagcgagacattctggcgcacaacaaatccgtgctggctaactgcgagaagaaaaccaccaaaaattag

SEQ ID NO: 201991 - DNA, 234 bp, Klebsiella oxytoca
atgactgaagaaagaataaaaagacttgaatctgaactattacaagttcgctatgaacttgccgtaataaaaaaactacttattccagataaaactccggtatgggctctacttgcgaaagatattgcctattctgaggggctaagaccctcaccctatggtgagggatacgatatgtgtcgtttgctcgaattactttgtaaaattggggttttatcggaggagggtcactaa

SEQ ID NO: 201992 - DNA, 879 bp, Klebsiella oxytoca
atgtcaatcagctcaaacaggacagcgataagcaggattcaaagagaattggctgatctgcgaaaaaaaatagcggatgaaagcaaaaaggaagcacaactactaagcagtattaatcagttacagagaagtatcaccagttcaacttccccatcgactgtttcctccaaaatgtctcaaatatcccgatatacaagcgacatatccaaatgcaatgcaaaaaacgccgagttatcaaaaaaaattgctgataaaactgctgaacttcatcgttatgagacacaattgactaaagatgaagagtccgagcgcaaaaagctggaaatggcgcaaaaaaaacgtgaaaaagaacaacaggatttacacaaaaaacttaaagaaaaaatggactcgcaaatacggacccttcatagtcgtatgttctccagtaaaactggtatccacgatgccattaatgatgaagatgaatctccgcaatatgatgtttttatttctcacgccagtgaagataaagacttgttcgtaaggccatttgcggagtacctgaaatctcagggcgtgaaggtctggtacgacgaattctctctcgcatggggcgacagcctcagaaagaaaatcgacaaaggactcgcgaattcacgtttcggaatagttgttatatctaaaaatttcattaaaaagcaatggacagaatatgaactaaacggattaatcgcatctgaaattgaaggaacaaaaagagtattgccaatctggcacgaaatatctaaatcagaagtcataaaatttagtccatctttagctgataaggtagcaatgaataccgcaatacagacatatgaggaaatagcggatcagttagtgaccctcctccgataa

SEQ ID NO: 201993 - DNA, 1947 bp, Klebsiella oxytoca
atggcctttgatccgccacttgggagcacttcgcccgcagtgctgctcgataacgccactcgcctggacgaactcgttaacgggccagcgggcaccgttcccgaccgtgccgggcaaccgctggactcctggcgcctgatgctgcaaaccttcgctgctattgtcgaaaatactcgccagaacctgatcccacttggcaagcaataccagagtgttgaagaggctcaggctgatattgccagtattccagaaggcgccaccacctatgcacgcagtccggatgattccgctctggcgatcgaataccgaaatgtcgccgggacgctgacggcaaccgggcgcagaatgccctctcagggctctgtcgatgcaattatccagtttatcgataagtttattgccaccggcaccgtcagcggtgacttcttcccattctttgtcgatggggccggaaatgtgcctgtgtactgggataatggttttgcagcttcccgtattgccacatcgttgtatcagatgatctatgaggatgttcatgcgcggcttggggatgcgctgaatgcaccagtgacaggggtttccccaggcttttttccgttattcatggacaacgcgggaaatataccggtgtactggaatggcgggctggatgcgtcggcggtagcgacggggttgctggaaaaaatatgggcttatatcaacggcatcatcgccagcgcgcttaaccagaatgtccctctggtttcccctggctttgtaccggggatgatggatgccgccgggaacgtcccgttctggttccatgatggaaagcttgatgccagtggggtcgggccgaacattcgcggggatatggtcagctggtttcaggggaggatgtactctgccgcctacaatattccgctgcatactgatggccggacgctctggcgctggaaagcgaagaaagcacagctcaaagcaggcctggcagtccgcccccatttaatgctgaccggcgacagctggacgcagaataacgaactggcaacagccatcgccagcctgctgcacaatgattacggtgatgcgggtctgggctggagaacggttaactacggggccgcgcgcgacggttcgggaatatatcgatcagagggatgggatttgtatgactcgtcaccgacgagcggagcgccgctttatggctgtggtattgacggccagtcaatcaataccacaacgagcacggcctatttcagggtgacgaatgtccgctgcactgactgccggatttactaccaggacctgaacggtaagtttcagtacggctacgacgttggcggggtcactcagtggactgaggttgtctgcgggaataccggcgcgacaaaatcggtgttgctgacaggcatggccgacgaggccaggacgatttacgtcaaaactgatggcaataccgggtgtgtggccatccacggtttttacctcttgcgcgccggtgtggctggctgcgtgatgagtaaggcgggtaactccgggattcttgcggaccagttcctgctgttctccgacaaaatctctgagtacctcagcacgatgcagccggacgtcatttgtatcgtcatcggcaacaatgattaccgtaattctgacgggacgcaggtatttaaaaccgcattgcagacgtacatcgccgcctgccgcgcggtattaccagatgttggttttatcctgatggcaccaccccgcacgaacggaacggcggtaacgccgctcgttaatttccgtgacgtgatgcacgatctctcgcagacgctgaatgtcgagttcttcagcatctatgacctgtttgacacctggactgaaatgaacagcctgggctgtttcctcgataatcttcatccgaatgctacaggcagtaatctggtcgcatcatcacttaataacgcactgattaaaggctaa

SEQ ID NO: 201994 - DNA, 801 bp, Klebsiella oxytoca
atgaatactgtttatatcccaaaactcggtgatgtcgtgatccccggagcacatccgaaaaaaggtcatttcatgcagccagaccttcctgtaacagcggggcttaaaggattgtacattcagggaggaacagcagacctcagcatgaggaatcgcgccgacaattccgccccgctgacaaaaatcggaaccccgacaatcctctccgaatttggggcgatctgtagttttggaaactgttttgataccgggaaggtctcaaccaaaaaccagacgcatatcgtgatctgtaagccggtaaagccgacggcggcaaccgaaacgcagcaggcattcatgatggggaactacagctattccggcgcaccggctgtctaccgcggcgacgggcttgcatttctgttttccgggcaaagcctttacggagcgtttgttgaggataacggtgctacgccgttgaacatgatcaactattacagcgcagcgtatgacagcgccagatgggccgcctttgtcgagctggttgacggtgataataatgtggcgaggattgcagcccggcagggaggcgccctgaactggcagaactccaaaaccctgaccagccgcacagcttataccgaccgtacgatccgcatcgggtcgcaccatgcgccagctgcctatccagcaggggaaaatatcacgatggggatggaattgatttttgaaacagcgctgactcaggctcaggtcgcatcagtcctcgatagtgtaagtgcctacctcagcgcagcatggggaattactgatttaggttaa

SEQ ID NO: 201995 - DNA, 870 bp, Klebsiella oxytoca
atgattggatcagctcttcagaatgcctttcacatagagtcattggctgctcgtggtgaagtagcactattccgtgcattcatccgcgctttcaattcactcggttcaaatgcactggcgcaagaatatcatggtaatcgttaccaagtgaaatttagtgctaatagaggtacagggcgaccagtcccacgctgtgaattatgtgacgtaatgatcatctattacccagcgggtaaccctagagcagcccgcgttacttttaatcaagcaaaggtctcttctaacccattacagtgtactccagtagtgtttgcaccatacaaatttcgtgcaaatttagagcaatgggacttgctatcaaatcgaccttcaataagtgctactacagcaaaaattaatctccccgccgatctactttctaacgcgctactaccatcagtgggtacatttggagttttttatcctaaaggtcaggggttcgattttgcttactttattgcgaacgaacttagtcccttgaaaaacaactataagccgtcaggtacactccagtggaaaactcaattaggacaagttcgcaaaattggccattatgatgaaataactgcaacttgctgtatgtatacctttggactgtcacttgaattgggcttgatagggacacctcttcagcaggttttatacggttcaactgaaaccactgaaatgcgactttggttggggagtatactatcgtcactccaggaaatgcaccctgactctgatctaccaaatgagttggccgaagggtttgaattgacactcgaagaaccctctaggaaatttgagctatcaactccacgtgctgtagtattggtcagaactgaatag

SEQ ID NO: 201996 - DNA, 906 bp, Klebsiella oxytoca
atgaagttcaagaatcaaacatatgaagatttagttaaagatttaattaatgatgccttttatattgaatccagatcaaatagaggtaaaatttccacagttcgacaatattcagaagttgtgatacgcaaaatacttgacatccctcaaggtgaaaaaataaccatcggtgattatgaggttattaaaaaattaaaaaccgtgagttcaaatgataagcttttaatgggggctgttagaaaactgcaaaaactaggaaataaatgtactcacacacaagacccaaagcccattcttgatgctgatgtagattctgcaattgatgcattatttaaattatatgcaagcttgtttgttttgcacttcaaaaaatataattttggttcaagtaatgaagtcatgaacgtattttccattctacctccaattattaggttttttgttctcgaaaatctatatggtagtgataaagttaatttacaagtcattgataacttatgtttggttttgctcaaagcgtttaataagaatgatgcattaaattggctgaatgaaagggaatgtgagttatctagcatattgccgtatacgcctgaagctattgctgaaatagaagttgcccgtggaaaacagtttgcagagttaattatagctaatgctccagctaatatgtacgtttgttgtctggaacgtttggaaaaagttgccttaactattgagaagcaagggttgctttacaatagctttgaacaagcaaaacaactctacttaaataaaggtattctcgatgacaacaatcctgaaaataaagaattcaatgatataatggaatttgtttatcttgggcgaaaagtagaaataaacgaaaagcttaatgaacgacatttatacagtataattgtttag

SEQ ID NO: 201997 - DNA, 666 bp, Klebsiella oxytoca
atggcaaaaaagctagagcaatggaaaaatacacttgccgttgagaaaattgtagaaggcatgaatgctgcatcatctaacgcacgaaggcttctgaacgatgcctctgctttgtttgatttagaacgctatccctctgctacctctttagcaatcttggctatagaagaagcaggaaaggtgtcaatacttcgagagatgtcgctgttgaaagatggcaaagatatcaaacagatttggcgcaggtatcgctcacatactgaaaaaaatatgatgtgggtgtttcttgatgcagttaaaaaaggcgctaggaatatcaacgattttgcaccaattttcagcgatgaatcagaacatccctttgtattggatcaattaaagcaaatatcattttatacggattgtcttggtaaggcacattggtcgataccagacaaggtaatcgatagagatacagctataagcatcatagaagccgctaaacctttagtgtcgtcaaaattacacacagtcgaggagattgaactctgggtgaagtacttgggacctgtgtggaaaactgatgatgctcttaagcgtgaggcattaaaaagttacttcgatgccatggccgcaaaaggactactttcaaataaaactgccgtctcagcattcttaagcatctga

SEQ ID NO: 201998 - DNA, 129 bp, Klebsiella oxytoca
atgggattgtgttgcagtaaaccggctcgtttacattctggaaagctgctcgcaaaaaatagagtgggggatcatttaatggcgaccattctgaacaatgtgtacctatatgtgtccttttttgaatga

SEQ ID NO: 201999 - DNA, 411 bp, Klebsiella oxytoca
atgatcagcactgacgacaaaatatacttaggtttgagcctgataggattcgccctgattttcggcagcgtgatcctagcagctttaaatcgtaagagattcgataaaatttgtgtcttgtataaagaaaaacacggctgccttcctgaagctctcactactttctatgattcagacaaaaatatggtgaataccctttacttcaactacgggtacaatgtgaaaatgcagttcatctttatgccactaatcaggaataaaaattcactgcatatgcggaatgtcgacaaagattttatccgtggattgccgaagcagcttactgtacctttttacctggagttctatcttacaattcttggcgcttttctcatacttgcggcttttgttctcatgaaggttgaagggtaa

SEQ ID NO: 202000 - DNA, 1386 bp, Klebsiella oxytoca
atgaaaactgaacaattgatcccactgtgccagcgctacaaggcattgctgctcgatagcgatgaaaacaccattgccatcgccgtagtcgatgcccctgcgccggaactcatggaagccctgcgcttcgcgactcagaaaaggattgatatcgaatgctggaaccaggaccggatggacaaacggctgcagacgccgggaatatcaacactccccccacctgttgaagcgtcggccagcatcgttgaacaggtaaataaccttctcgaacaagccctgcgccagcgcgcatccgatattcatatcgaaccaggcgacgatcgcctgagaattcgcctgcgggtagacggcgtcctccattctcttgctccgctcgccgcggaactcgccgcccccatcaccgcccgacttaaggtgctcggcaatctggatatcgccgaacaccgggtgccgcaggacggtcagttcaccctcacgctctccgatcgcccggtctcgtttcggatcgccacgcttccctgccgcggaggggagaaaatcgttctgcgtttactacatcaggtcgaacaagcgctggacctggaggcgctggggctctccacccagcagcttgccgccttccgttcggcgctaaaccaaccccagggcctgatgctggtcactggtccgacggggagtgggaaaaccgtcactttatacagcgcgctgcaggcgcggaaccgcgacgaagtcaatatatgcagcgttgaagatccgctggagatccccattgtggggatgaatcagacgcagattaacccccgggcgggtttaacctttcacagcgtactgcgcgccctgctccgtcaggatcccgatatcgtaatggtgggagaaatacgcgatgcggaaaccgctgaaattgcgataaaagcagcgcagaccgggcacctggtgctctcaacgctgcacaccaattcaaccagtgaaacgctggttcgtctgcagcagatgggcgttgcgcgctggatgatctcatccgcgctttcgctggtggttgctcaacgtctggtacgcaagctgtgcccccactgccggcgggaaaccggcagttcggctgatgttccgcacagcctgtggccgcgggcgcttcctcgctggcaggctccgggctgtcagcactgctatcacggctactacggtcgcctggcgctctttgagctgctacccgtcaataccgcgttacggcaggcgataactcagggtcttagcgccggggagatcgagtccttggcacgggaatccggaatgatgacgctatttgagagcggttgcctggccgtcgaacgtgggatgaccagtctggaagaagtggtacgcgtgttggggataccgcatggcgactaa

SEQ ID NO: 202001 - DNA, 1191 bp, Klebsiella oxytoca
atgttgactgacaccaggctgcgtcatcttaagccgaaggagaaactctataaagttaatgaccgtgatggtctgtatgttgcggtcactccggctggaactatttcatttcgttataactattcaataaacggaagacaggagaccgttacttttggccgctatggtgttggagggatcacgcttgcagaagcgcgtgaacggctcaatgaagccaaaaaaatggttgccagtggaagatcgcctgcgagggaaaaagccagagataaagcgcgtatcaaagatgcggagacttttggtgtgtgggctgagaaatggttacgcggttatcaaatggctgaatcgacgcgtgatatgcggcgttcggtatatcaaagggagttgaagtcaaaatttgcccagcagaaacttagtgagattacacatgaagacttacgcgcattaaccgataacattgtcgagagaggggcaccggcgacagctgtacacgccagagagattgtattgcaagtctatcgctgggctattgagcgcggtcagaaggtggagaatccagctgatctggtacggcctgcaagcatagcgaaatttgagcctcgagacagggcattgacgccaattgaaattggtctgatgtatcggtacatggaacgggtaggaacgacgccatcaatcagagcagcggttaaacttttgctgttaacgatggtacgtaaaagtgagcttactaacgcaacctggaacgagatcaattttagtgaggcattatggacgataccaaaggagaggatgaaacgacgtaatccacatttggtttttctttccagacaggcaatggatattatgattgctctcaaaacctttgccggtagctctgattttatccttccttcgcggtacgattccgatgcgccaatgagtagcgctactttaaaccgggttttgacactgacgtatcgcctggctcagaaagaaggggagttgttgcctaagtttggtccccatgacttacggcgtacagccagcaccttgctacatgaggccgggtacaatactgactggattgagaagagccttgcccatgaacaaaaaggggtacgagctgtttataacaaggctgaatatcgtgagcagagggctgagatgctacaagattgggcgaatatgattgatgaatggactcttaagtag

SEQ ID NO: 202002 - DNA, 630 bp, Klebsiella oxytoca
gtgcctgagttatctgtaattatacaatggatgaatcaataccctaagaccggctggctattgctgtgtatctatattgcactcggtgtagttcgtcacagagtaattaatgctgaatctggaagtatatttcgtggactactcaatcttaggaagcgccggctagagcaaatgctgacacagccatatttgaataaaaatgcggtccgtctggcaaagcgtgagcttcgtcagcgcagcctttatcggctcacaggcttgtataattatcggctgcaggatttggctgtaataatgtgtgatcgttatgggttgcgggctggttatctcaagccgtggcgtaactggctcgaagaacgggatggactgattgtgttcaacaggaaatggcatttttttcgctggcgtctttttcaggcaggtcagattgcaaacgcagttctactaatattattcattatgtatatagtttctcattcttcggccgaaatgatcgcaccgcttatgttactcttcatgcttgtatggtggtttccgtggctaatgatcacctcggtacctacccctaggtggactcgcgaaatggaagtctatcttgagaaatttaacgctgaacagactatggtttaa

SEQ ID NO: 202003 - DNA, 972 bp, Klebsiella oxytoca
atggttgacatgaaaattactatctgggaaggctgtgatctcacagttgcagctgcaattaaattatttgtagagcgtagttctccgtactccatattttcacggaggtatccaatactgcgtctcatacaggaagttattgatccagcagtagctgcttatgtaaattccctgccaccaagtcataaagactacatttctggagtaaatctaggatttagtgaagtacttaaaaaattgggtttaaacgtcgtagtacaggcacaaagacttcttttgcgtaatttcgttctgactttagatcaacaaacttctcttgataaatgctttaccgctactattgagtctcttattgagttagtcagtgagtgcgcatccaagcggccgaagaaatcctctcctgcaaaaggagtaactataaattcacagcgtaagctcggttattgcgagttctgcggtaatctaaccgaattttccaagttgatcagtgagatatcagaatttgttgctaacgataatgagttccccgttcatgaaaaacaggtccttagtcatcgatattgttctgaccataggcccaaactcaccaatggtctatggaatcccaaatacagacaaggaaagcggtctctcgaacagttcaataaagaactaataaggcttagacggcaatgcgctaaacctcataaagctaacgcaaacacaggggatatattgattgatacatattttcatgagtggatgcagggtcaaactttaaccccagcagatctagataaacttaggaatatcgccagacgaatggttgactccaaattcactgatactaagaaaaaaataatcatattaaaacaccaaggttttaaccagtttgaaaccgcacaggttttagaaaaaaatcactacacaactatgacaaagcaggctgtgtccaaggccttagcgtctgtgaggaaagaattttatatttaa

SEQ ID NO: 202004 - DNA, 231 bp, Klebsiella oxytoca
atgcaaacaaaggcacatagcacgctcattaacagaaaaacacttctggaaatgatcccattgtcagcccgcactatttataaccttgaacagcgaggcgagtttcctcgccgtatagcacttactagccgaaatgttgcatggcagttatccgaagtggaacagtggattgcggatcgtaaatcagcaatgtttaaagcggccagacccggtattgttttaggtaggtaa

SEQ ID NO: 202005 - DNA, 858 bp, Klebsiella oxytoca
atgtcattgaacataatggaagcatttgaagctaagccgcaaccaattgattatgtcttgcctaatttggctattggtactatcggagcgattgtttctccgggaggcgttggaaagtcaatgctggcattacaattggctgtgcagattacttgtggtgtagatcttttaaactttggtgaatatccgactgggttggtggcatatttacctgtggaggactctgaaaccatcgttcaccatcgtttatatgctttgggaaaatatctaacagcacgtcagcagcagattgtagccgataagctactggtcgaacctttggtagggaagtgtccaaatattttcttgccggattggagcaacttgatcaatgaagtttcaaaaggtagacgtttaataattttggatactcttcgccgtttccaccaggaggatgagaataatagcgcagcaatgtccaaagtcatcggaaaactagaaggtattgctgctgatactggatgttcgattatatttctacaccatttaaacaaaggcgctgccacgatgggtgttggtgatatacagcatgcaagcaggggtagtagcgtcctggttgataatatacggtggcaatcttatctggcgggcatgaccgccttggaagcgaagacgtatggtatttctgatgatgttcgaggtcaatttgttagatttggaataaataaagtaaattatggagaacgtgcgccagatcgttggttacagagacatgaggggggagtattaaaaataacggcgctcagctcgaagaataataaaaagcttactaaagaaagaacatctacctggagtggcgctgacaatgacaactggtaa

SEQ ID NO: 202006 - DNA, 783 bp, Klebsiella oxytoca
atgacaactggtaataaagtggcacccacaagtacagcttggcaagcccgagtaattctgtaccagccaagccagcgtcctaaggaggtgaagggacaatggatggagactagttttggtcgttgtcgtgttaccggacggctcggacagcgtcatgccgatatcgtagagacaatattatatgttgccgagcaacgtcgtgaaatttctgatggtggaatcgaattattagtagatccagcgaaagtacgccgaacgctatccgatgcacaatacagttatggtcgtatacagaaattgcttttagatctgcgcgtcgcaacagttgaaattataacgccagagctggagaaaagcggcgactgtataatagggggactgatcgatcatgtagtgccatcacctatgacgcgtccagatcctttgactgggggagaacgccgtttatggcgtgtccgtctgggtgttgcattagcgatgttactcaaaaaagatttgccattttattatcatcctggccccatcgctcggctacaacatggtattagccaggcagtcgctcgtcatgtcttaacccataggaataatcctttaggagggtggtatatggatacgttgatattagcagtgtgcggtgaaggaacgagtaatatgactttacgtaactatcgtcggagattgaaagaagattccgtgcaattgctggaaattggaattgatttgaacggttctaggataaaacgtgtcacaacggcccgatattgtgtcacaacggcccgatag

SEQ ID NO: 202007 - DNA, 795 bp, Klebsiella oxytoca
atgaatttaatgttccgagtggtttcattacaaagagggattttagccgctaaaaaagctttaatagttcctttcgtggcgtccgtcatggcattaccggttaaggccggaattcccgttattgatggcactaatgtggttcagaccacaatcagcgcagttaacaacgttcaggctgtgactaaacagatccagcagtaccagacgcagctgcagcagtatgaaaacatgctcaaaaataccgtcgcacctgcggcctatatctgggatcaggccaattcaaccatcaacaaattgttgcaggcgcaggacactcttaattactacaaaaatcaggccgggagtcttgattcatatctgaaacgttatcaggacgtgaattactaccgctcatcaccgtgctttaacagtaatgttgaatgtactgcagatgaaatcagcgcactgcgtaaagcagaacagaacagctctgaggcgcgtaaaaaggccaatgacgccgtttttaaggctcttgatgaacagcaagaaacactgcaaagcgatgctgataacctggcagatttgcaaactcaggcaaccggcgcacaagggcaaatggaagctattcaggcggcaaaccagcttgccagtgcacagacaaaccagttactgcaaatccgctctctcttggtagcccagcaaaacgctgcagcaacgctggcacagactcaggcagataaagaatcacaacagatagccgctgatgaaaaagcgttagctggagagaatacaccaagcccgaagcgaatttggtga

SEQ ID NO: 202008 - DNA, 1392 bp, Klebsiella oxytoca
atgaaaatagtaagtaagctcacctttttaggtatcatacttttcttttctataaatgcctatgctggtcaattagatagtagcgggctacttgattctttattagataagtttcaacaagtagccagtacatggacaacagtaattgctgactatgcaaattggctcttctgggggctggtattaataagtatggtttggacatttggtatgatggcgatgcaaggggaagggttgacaggcgtacttgctgaaatagttcgcttttttgccgtcattggttttttttattatcttttaatcaacggcccatccatatcgcaatccatcattaattcaatgagacaacttgcagcaaacgctttaggaataagtactggtatttcgccctcaagtatagttgatatggcgtttgcaatattaacaaaggtcagttcagccgcatcaatttggtcgccaatgatatccaccattatgataacagtcgcgataatcgttttggtagtgatgtcccttatagcggtaaatatgctaatcatgttggtttctgcatgggtgttatgttatgcaggagttatattgcttggatttggtggttcgaaatggacctctgatatagcaattaattacttacgaactgttttatcgattggccttcaattattcacgatgacattaattattgggattggacaatcatttatagatcaatatttttctcttattagagatgatgttcctgatcttaatagtcttatcgttttgcttctggcgtcaattatcctgttagtattaacgaataagctaccactgttgttatcaggtgttgtaggaggggcttctttacaagggattggtggatttggggcgggtatgattaccggcgctgccgctactgccatcagcggtgcaggagcaatggcaatgggggcatcagctcaactcagcggcggagcctctgcattaaaggcagcgttcgagtctgcgcaagctgccatggccgaagaatctggttcaggtggtggaggccgttccggtggaggatttggcggcggggaagataccggttctgtagatacttctggaggccaaacctcaggcggttacagtggttcgtctgcagggagcagttcaggtagcgccagtggaggaagtcaggggtttgcttcattctcgcgtgctggccgcatggcaagccatatgggaagcagcatggctaacggagctgctgagtaccagagaatgaagcgaagtagcagttcttctcgtgcccaacaaactattggagaggagttggcgactcagataagtaaacaaacagctactcgtcgggataaccgcgagcatgatgattttgccggtgatagcttatcgggtaataataaatcttga

SEQ ID NO: 202009 - DNA, 435 bp, Klebsiella oxytoca
atgtctaggactccctatacacggttacgcattgagggcttccgcaaagcagaggcttccctgagacttgaaggaatggaccccagtggtacgccactgtacgagtccgttaaggcacgtattatttcaggcgagctgacgtatgagcaggggcgttcagagattcttgcatactacacaaaagcagataccgccgggcctgtgacagtgggagaaattctgacagaagaatttttgaaaccgctgaacatgtctaatgatgaactggcggaagctatgggtagctgcaagcagtatattgacgatattctctgcggcttgcgtcgtcttacaaatgaagatgctcgcattcttgctgccatatttgggactgatgaagacttttggagtaacctgcaggagatgcaagttcaccgagagcaacagcataagtaa

SEQ ID NO: 202010 - DNA, 981 bp, Klebsiella oxytoca
atgaaatttgcatacgaagatctaagcgatggtcagttcgagaccttgatcgttcttctgtgccagcggttgcttggagccgccgtacagggatttgcaaagggccctgatggtgggcgcgatgccaagtttatgggaacagctgaactgcacccaagtaagaacgcgccatgggtaggtacaaccatagttcaggcaaagcacaccaatgggtataaccgaaatttctccgaatctgacttcttcagtgttacgtctgcgaacaccgtgctgggtaaagaaattcctcgaataaaaaaacttcgtgatgccaagcagttagatcattacatgctattcgctaatcgtcgcctatctggtaatgctgaaacggagatacgtgattacctctcgtctcaatgtaacatttccagttcatcactttatctttgtgggctagaacaactggagatctggcttaagcgtttccccgatgtagcgagggaagcagaccttgatccagttgattcgccgctgattgttagtcccgatgacttgtctgatgttgtacaggctctggctcaaaataaagagagcttggtcgaaatgcttgatgatccgccgactgcgcgagtgacatacgagcaaaaaaatacactcaacaatatgagtgttgagtatgccagggcacagcggaagagatacttgaaggaaacggctcaaattcgggctttcttggctgctccggaaaacctcgaattattacgtatgtacgagtcggtagtcgatgagttccaactcaagatcattgcaaagcgtaaggactatcaaacttttgatgaggtaatggaatatctggttgacatgttgttcagccgtgatcctatcttgcggcagcacgctcacaagcgcttgacgcgtgctgtactgttttacatgtactggaattgtgatattggggaggtagacgatgctacggccaacgaagcactctcatcctga

SEQ ID NO: 202011 - DNA, 249 bp, Klebsiella oxytoca; identical to SEQ ID NO: 93784

SEQ ID NO: 202012 - DNA, 1806 bp, Klebsiella oxytoca
atgtggggccaaatgaagttatctagactctattctaacaagcctgacttgttcgatcccgtggagtttgtccaaggcatgaatgtcgttatggctgaaatccgcttgccggagaacagaagtaaggacacgcataatctcggcaagactacgctagggcgcttgctcgactttggtttcttagccaaacgtgaccctaagttctttcttttcaagcactccgatttgttcaaagaatttatattcttccttgagattgagttggaagatgcatcgttcgtaacgattcggcgtagtgttaaagaagccactaaaattagttttaagcgtcatcaagcaggccatcaagacttgtcggggttagcactgactgagtgggatcatgtgaacatgcctttcgagcgtgcacgtgagttgttggatggggtattggattggcgagcaatcaaaccttgggcatatcgcaaaggcttaggatatctactacgctcgcaggacgatttccgagatgtattccatctacgcaaatttgcggcagcacattcagattggaagcctttcttggctcacgtccttggttttgacgctcaactcatcgttgaacattatgaaaaagaagagcaactctccaagaaacaagccatcgcacagactatcaaaaatgaattgggtggctctattgaggatatcagcaagatcgagggcattctgttacttaagcagaaagaggctgagaaaaagcagacattgcttgatgcctttgatttccgtactcaggataaggatagtactaagcagttggtcgatgacatcgacgtaaaaattgcgtctttaaatgctgaacgttactcatacaatcagaccaaaaagaaaataatatcctcgttggaagaagatcagattctctttaatcccgatgaggcgcagcgtctatttgaggaggctggagtcctgtttaaaggacagattaaaaaggatttccaacagctaatcgacttcaatcgggctattacagatgagcgtcgtggctatctgcaggaagagcgggaagaagtcgaagctgagctaaaacgcatcaatgcagaattgaatttcctaggaaaaaaacgctcggagatgctttcatttctaagtgaaactgacatttttggtaaatataaacaagtctcggacgagatggtgatattgcgtgctgatattacgtcgttagagcgtcagcgaggcttcttacatcgtttgcaggaacttcgaaaagaaattagggctttgacagaagagcgtggaaatctacaggcccagattgaagctaatgtcgagaagcaaaactctgatcaggacagcttattttctgcaataagagtgttctttaacgaaatagttgaagaggtcattgatcgcaaagctctgctgagcgtatcgcccaatcaactaggacatctagagtttaaggcagaaatacttgacgagtcaggtaatgctactagtgccgatcttgggcatacataccgcaaactgctttgtattgccttcgatttggctgtattgcgtgctcacttggacgaaaaatatcctcgttttgtttatcatgatggtgtgtttgagtctttggatgatcgtaagaaagaaaaccttttggctatcattcgtcgttatgcggagttggggctacagccaatcattactcttatagattcggacttgcctgtgcgtgctggtgatcagccagtattctcgtctgatgagattgtgattacgttacacgatgagggagagaaaggtcgaatcttcaaaatgagggcttggtaa

SEQ ID NO: 202013 - DNA, 2079 bp, Klebsiella oxytoca
atggtctttgatccaaaacgcgcgttacaacttcttcaaatcggctccggacgcggggatgcaagttttcgtgatggccaagaagatgccatacgtcatattgtcgaaggcaagggtcgtttgctggtcgtgcaaaagactggttggggtaagagctttgtctactttatcgcgactaaaatattgcgagaaaatggaaatggccctgcgttattgatttctccgctgttggctctcatgcgaaaccagatagctgctgcacagcggatgggtgttcgtgccgcgacaataaactctgataatatggatgaatgggctgtaattgaaggtgaattggccaagggtaaaatcgatatactactgatctcacctgagcgtttggcgaatgagcgcttcagaacacaggttctgtccagtatcgcagcacaaatttcgatgctggtcattgatgaagcacattgcatttcagactggggccacgactttcggccacactatcgcctgcttgagagaatcgtcaaaactctcccgccaaacctgcggttgctcgccaccactgctacggcgaacaaccgagtgatggaagatcttgcttctgtcctaggtccgaatctccatgtttcacgtggagacttaaacaggacctccctctccctgcaaactatccgcttaccaagtcaggccgagcgtctagcttggctggcagaacagctaggtacgctaaaaggtaatggcatcatttatacgttgactgtacgtgatgctaatcaagtggcgcaatggttgaaagctcaaggctacaatgttgaagcctatacaggtgaaaccggtgctcagcgcgagcagttggaagaggcgttgctcaacaatgaagtcaaagctctggttgcaacaactgcattaggtatgggttatgacaaaccagatttggcgtttgttattcacttccagatgccgggctcggttgtcgcctactatcagcaagtggggcgtgcagggcgagcaatggagtccgcttatggtatcctcctaagtggtcaggaagagtcagatatcactgactggtttatccgtagcgccttcccgacacggcatgaggttagagacgtattggaagcgcttgaagacgagcccgaggggttatcagttcccgagttgttgaaccgtatcaatctcagtaaagggcgtgtagataagacgattgcacttctttctcttgagtcaccggcccccattgcaaaacatggcagtaaatggcagctcaccgttgcaacgctgagcgaatcgttctgggagcgggctgaacgcctcacagcgctccgtcaggaagagcatcaacagatgcagcattacgcaagcctacagtacggtgatcatatgggattcctaattggagctctagatggcgatccatctagtgttacagcacctaccttacccccactgccctcaaccgttaatgaagcactggtcaaagcagccatagaatttctttgtcgcactagcttgcctattgaaccccgcaagaagtggcctgatggcggaatgcctaagtatgatgttagaggagtcatcgctcctgcatatcgagctaattcgggtaaagcactttgtgtatggggggatgctggttggggacgtattgtaagagaaaatcgctataaagatggatatttttctgaacaattggttcaggcatgtgctgagatgtttcatcaatgggggcccacaccagcccctgaatgggtcacagctatcccatctttgaagcatccagatattgttccgaattttgctaaaagacttgccgctgccgtagggctaccttttcatcaagtgcttgtaaaaactgaagataggccagagcaaaagactatggcgaactcatctcagcaggcacgtaaccttgatggctctcttgcattagccaatgagcctattcctagtggaccagtgttacttgttgatgacattgttaattctcgatggacgctaacagtggcagcatggctcctccgaaaggctgggagcggtgaggtttggccaatagctctttcacaaactgggcacgaggactga

SEQ ID NO: 202014 - DNA, 1392 bp, Klebsiella oxytoca
atgcaaaagatttcacctaatactcaagcgattctgctactgacggcaccactgattgcaggacgtgggatgccgtcagctgagcttttaactccgggagaatataagcgtcttgctcgtcatttgcgtgagattcaccgtcaaccagcagaccttttaaccccagacgctgatgagattttacgcgcttgtcaaacagtgattgatcagagtcgtatgcaacgtctattggctcgtggttttctattaagtcaggtgctggaacgctggcaagcgagagctatttgggttgtaagtcgtgcagatcctggatatccacgccgccttaaagctcggctgcgtgaagacgctccagcaatactttatggctgtggcgatattaggctacttgacgcaggtgggctagcagttgttggatcgcgcaatgtgagtgagccattaattgactataccatgtccattggacggttagccgcctgtgctggacgggccattgtgtctgggggggcaagaggcattgatcaagctgccatgcgtggtgcattggagtcaggcggaaagagtattggtgtgcttgctgaacaccttgaaaaggccgtaatgaatcgtgaagaaagaaatcgtttacgtgacggtaacctcacactagtttctgcctacgatccaaacgctggtttcaacattgggcatgctatgcagcgcaataagttgatttatgcattggcggatacatcgttggtggtgaattccgaccttaataaaggggggacatgggctggtgccattgaacaattggagacactaaggttcgtccctgtttttattcgatcgacgggcgaagcttccgaaggtttaaccggattacaaaaaaaaggcgcacttccttggcccaacccgcaaagcgttgaatccttcaaagacgtattcagtatagcgatgccaatgcctgcagcctctccacagttagatctttctctgtcgtcgaaagagggcacgttgttggctgacgtcaaaacagcagagcaagtctcatgcagaacggattcgcagaccgagattgagctgtcagaacctgctgacattcttcttgaagaacagccaacagctgaggcatcggaagaattatccccattaacaaaagagtctttagcatccacaaaggacattaaaaaatttgagcatgctgaagcaacgccggccgaggtgctcttcacagctgtacgcgcagcgatccagcaacttttgagcactccgatgaatgacgccgaagtagcggttgcgttgaatgtgtcgaacttacaggcaaaggcatggttacaacgtctgattgatgagggcgttttggagaagcagagtagacccttgcgttacgttgttaagaaaaaaggataa

SEQ ID NO: 202015 - DNA, 1026 bp, Klebsiella oxytoca
atgaaacgaatatttgctattattagcttactctttattagtctgcctgcagtggcagactgtaattacagtggaagtaatgcgtcagttaatgttacattcagcccagccaaaattttatcagacacaagcttggctgccggcagcgtactggcggtaagaactgtgggaggcgcagtcgctaacgctaaaacgttctacaactgtaaagccaatgatatttacgctattatcgcgacacccaacgtaaacctggctgctggtgtaactggagtgctcggcggaccagtttatgaaaccggaataccgggtattggttttgaaatttcggaggcaatagcgggtgccaacggtaggcctgtgccggcaacgttaggcacagtctcagcttacggccttgccgatcctggtgttcagcagctaactgtttggctgattaaaactaaggataatattgataccagtttctccggggcaaaagaaattgctgtgtcctatagggcaggaagcgttaatcaggtaaatgccaactcgacaacggccagactattgcaagcgaatcttaaatttgggccatttaactacagggaaacgtcctgtaatgtgaccccaaggggcggtagcaccattaatttatcgaatattgaagcttcacagctcaaagcaatttcccagggaggagcaacgggcaagcaaaaggactttacgctggatatcacctgccctgactcgtctgttggaacgaagtatacctactggtttaacccaataaccgaaaactcggcatcaaaagatggcgtactgcttaactctattcctgataccgccgggggggccaaagatgttgggtttatcattaaacagggatctagccctattgttttttttgattataaaaaatacaccatcaccagcgtaaaaaaaagtcaatctctgaatttcacagcagattactataaattctccaatagcttgacacctggcaacgtccgggccatatttgagattatacttcaggaagaataa

SEQ ID NO: 202016 - DNA, 366 bp, Klebsiella oxytoca
atgaaacaactaaccattttcgaaatggaggctatctccggtggttactcttgggacttttcctcactgcaatccagtattattactctagttaataacggtgctgaggcaatagcatctgcagcaacaatggggaccttaggtgctgtctttggcacctttgctggtggcacgcaggcaggggcaaatggtggattattgggaatcggtttaattggtaacttcttcggcttgatcgctggattcgcagggggagcaatcatcggtgcagcgggtggccttgctttcggatgggaaggtacaatgactgtaatcgaagccggcgcaaaagggctagttgatggcacctttgtcgtttggaagtaa

SEQ ID NO: 202017 - DNA, 861 bp, Klebsiella oxytoca
atgaatgactccattaatcctccccctacaaaggaggagagagatgcatacaaaaagaaacagcaagaaagaattggaaagtatattgttggtggaacggacttaggtggaaacaccataagtaaaatttattcacgcggtgatgaatatgtcatttatgaagtggcgaaccttccacctcatgagtctatgctagtgtatatagactcgatctatgaggaagatgagtctaagattgatagatatcatgcatctaaagagcattttgatgagttcattgcacactgttacaaatacaactgctcttcaatttataaaaaaagagcagcaaccgtcatgtcagcaacgatccttggaaaaaacgacttaaacaaaaataatttcaccgcgataaataaagatataaaaattgactatgaaaacacaatgctcggaaggaatttatatcaatcaggagcaatatcgctagctttgttatttattgcacttgcagtaatagtatatttagctagagataccaatttcataataaccaaccactttattccagtagtgctatacgcagcctcttttgcttccattggaggatttatctccgtatctctgaaaataaaaagtcttcatacagacagagaacttaaaaagaaaacctatttcttctatggcgcggaaaggatacttctttcaatgatggctggcgtacttgtatacttcatgctaaagggaaatataatttttggattcatgaataacagcagcgacatctcattttccatttatgtgatttgtgcactttctggattcagcgaaacattgatacctaacacactgagaaaccttgaaaccaagtcagaaatttaa

SEQ ID NO: 202018 - DNA, 468 bp, Klebsiella oxytoca
atgaaatgtgggcggtgcgccgtggctgagctgcaggaagttgacgcctggttagatgcgctgctggcggggctggagcctgcagcacgtaagcgcatgatgcgggagctggcgcagcagcttcgccgcagccagcagaaaaatatccggatgcagcgcaacccggacggcacgtcatacgaaccacgacgagtaacggcacgcacgaaaactggccgcatacgtcggcagatgtttgccaaactccgcaccgtaaaatacctgaaagccgttgccagcccggactctgccagtgtcgaatttgagggcagggtgcagcgtattgcccgcgttcatcattacggtctgcgtgaccgtgttagccgtagagggccattagtacgctactctgagagacggcttttaggtataaataatgaaggagttaaactcattcaagaaatgttatttagagagattgtaagttaa

SEQ ID NO: 202019 - DNA, 645 bp, Klebsiella oxytoca
atggtcgagctttataattacaacttcatgttaaatgctaatgagttgtatcttaaggcaagttacaatcctcaacaatatggttttttatatcaaaatggttccgctgataaaatcgaatttatacatgttataagtggcggcttatcatctgttgctcaagcaattaacaattctgggagtagcacattaagtgatggtgtcattctcgcgctgactggtgctttaagtgcatttgcttttaatttgattcaaaagttacttgacgcaaggtctgttcgtttgactaaatccggcgatgccatgttattacttataaaagagtttgaggaaataactgtgcggtattgggttagaggtcacgattcctccaaaaatgatgcggagagtaatatatatgaccaaataaatataaaggcgatgcttatgactcttgataaaaatgtaaatctgatgcttgagaatttaccatttaaaaataaatcccataacatacaaaaattaagcgcattctcttcggatgtatatgatttggcatcaggtgacgattttgaatctgcgataaggcctcccaataaaggaaaagcctttgcgatatcgaaaaaatgtagtgaggcaaaggctatcatcctcgggttgatttag

SEQ ID NO: 202020 - DNA, 405 bp, Klebsiella oxytoca
atgaaaaatttagaaattaacataggaaaagcgttttcttctactccctcagggcgtttttatactgatatgactgatagtagtggtgagcaatttagagaagaattattatggccaaaattgcaactacttgatgctaatcaaaaaattaaaatcatcttagatgatgatgttgaaggctatggatcttcttttctagttgaaggatttgcagggattgttaaatatggatacatgcccaaagaggctcttttagataaactagagctttttcatgttgatccagattttttattattcaagaaaaaaataattcagtatattaatgaagctgtatttaattccaaaccatatcaatcaactaagccagaatatttggaaaaattaaagaagcgtaaggagtaa

SEQ ID NO: 202021 - DNA, 1347 bp, Klebsiella oxytoca
atgatccaaaaaggatcgcaaggggccagagccgtcaatgctggcgggctttctggcctatcatgcacctgcatgaaaactactccacaaagcgggcaggcgtggcggggatacgagcgcgcgcttatccatttgcttattgacatgaacaatgtttgggttgcaaaatcactaaattccaaacaaaaagaagagcatatgaagaagctaactctgcggcagaggacgagggatgttaaacgctcaataatgtttcgtcgcgggcaaaccggaaaaaggacgaaaggtaaaagtttttattatgaagtaaaatggcggaagacaaactattggatcgatgagcaatcgaggaaaggattagatgtacaatttgttagtaaaaagaaaaaaggattaattcttacgttgccgcccgtaatggatttctcaaataattatgctgtaactgtccaacatattaacgcaattaggatgttatctgagaggaaaggcattcctagtgctggctatcagttagcttctgttaatttttgtaacttgaaaaaaatatcgacttctgctgctcttgtacttactgctgaattatctaaatgggatgatgcattaaggcagagattaactccaaaattagccggttgggatagagatatacttcgaaatttttatgagttaggtttttttgatttattcaaaaaaagtaaaaatttaaagttggactttgggaatgaatcgcctaacaataaagggaagaggtttgttaaatatctcaaaggcaagtgtggggaagtcgcgaaaactaaagttttaaaaggtgaaataattgatttggttggtgagtcaatagaaaagtggattttcctacatagcggtttgagtgaagccatcacaaatgtttcgcatcatgcttaccctgttgaatatggatataaagaatatgacaagaattggtatcttacaggatcatacaatattgaaagtaaggagcttaaaatagtattttacgaccaaggagttggtattccgaaaacccttcctgcttctaaagtatgggaaaaggcgttaacagtattagccaaaatttcatcactggagcggtatcgagatgaggaactgctgaaagcagccgttgaacttgacagaacgagtacagaagaagatgaccggggtaagggattgcaagatcttcttgagttcattaggcaacgtgaaaatggttacttatcaataatgagtctcagagggctttacaaacactctatgaatcaaggtattaccaaagtcaaaactgaaagttttgcttcaccaatttgtggtacacttataatctggagtgtatctctcgattga

SEQ ID NO: 202022 - DNA, 930 bp, Klebsiella oxytoca
atgaaatttaaagctaattccattagaacattagatcgttttttgaaatgttgtggtggtcaagaaaatataacattaggtatcaaattagatgatttaggacctgaaaagctagttgaaattggttttggcatttcgccagaagaaggcctatcgataataccaagtgttattggtaagtttactagtttcaatgctaatggaaaggaaatcctacgacctgatttgccaaaagaacaatacagcgtttcatatacaagcactacatacgactggcatagaaatcctcattatgggatgcgcacacgaacagctatgcggatagcaagagaacatattccagctcctgctataatgatctctgttgctaaaacaaaaaatgggacatacataacttcacctttactaaatttgtccgaagaaaattcagagttaaacatccacattataaacttaatgctcgaatgtttcgatgagatagaaattttagatacagaaaaagaaccattaataacaacaaaattcaaaaaagtgttatggactgtattacctaaagggaaatacccatgggacgaaatttcgaaaataatagcttctaacacccaaaaaacttcagcatcagatagcgatagagaggtcattgaatccagactcaagttaatcaatgtctacaaacctgatttcattgctactggtcatgcgggattcaacggatattttatctttggttttgaaagtaaaagtatatacgtacttgaaagcatttttcttgataacgcaacttacattttcaaaaaagattgggaaatattatctcaattaactaaagcagagatcattaatggtgaccttgaatatgagcgtatcgttcataataaagtttggaaacgagcaataagtgaccgcttatcaaaggccttaagaacttaa

SEQ ID NO: 202023 - DNA, 486 bp, Klebsiella oxytoca
atgaatatttcaggcattatttctggagcatttaggtgctcctatatttatctaatttcttatggtagatatatttatattggagaaactgggaatcatccagtattaagatggggttcacatttaagtaaaaatggctcttttatcaacaaactagatagaggtaatgaaagtttgcttactgatgatgatatattcttcattagtgtaagatgttctgagatagaaagtgagagtatttataaacgaaaaattgcaagaagagcaattgaggctgaacttcatagaaaatatctacttaacccaggggtttttggtcatgaatcaacactgatatcaaatcccccgggagatcctgtccgacacaatttttcttttgacccgagtgatatggcaaagaaaatttatcaaaatatatctgatagttatgtcgattggcttaaaaatgattgctataattcagaaattagatcatctatagattga

SEQ ID NO: 202024 - DNA, 1725 bp, Klebsiella oxytoca
atgaatgagttagatattggatttaatgccggaaggttatgtgaagccattgctcgtatcggatacgaaccagattccgccattatggatattgttgataactctgtttctgctaatgcacgaaatatccatgttgatatatttttaattgaagggaaaaatataaaatccaggaactctgtcaaaaaataccggattattgatgatggagatgggatggatgaaaaaggaataaaagaagctttttcgctaggcacattaagaaaatacgagaaggatagtttatctaagtatgggttgggacttaaatctgcaggtttatccttaggtactaaaattagtatcgtcagcaagaaaaataatgcattaatcggtcgctatatctttgacaaagagcagattgaaaaaaacaataaatttatattaataaaagaagaactaaaaggagacttattacttgaatatcaaacattattaccaggtgcgtctggaactatcgttgaaatagagggaagcgaaagtattaaccacgcctcgcctgagtcgacaagaaataaattgaaaaaaagattaggtgttgtatattattccttcttagagagaaaagtaaaaccattaaaattatttattcatgttggattttctgatgctgagaaaaaatatgaagaaatgaagccaaaggatatattatttacagatagcaattattttaaaaaacattggaaccctgaaatatttgattattatagcccatatttagcatttaatgaaccatggatattacatgacattcacggtaacaaattgccagatattaatattcaggctgttgtttttccacagaaagccttgtctcaaaaacattctcccttgtctcctgagcatagggcaatagtctctcaatatgaaatatcgagagaaaatagtggattcttcatttatagaaacggacgattaattcgttggggtgatgatcttgatggtcttttatccaaagatgatattaatatcagaattcgactcgatataaaatcagaacatgatgatgttttacatgttgatgttacaaaacaaaggctagaaattgacgatgaaaatagaaaaaaccttgaacaaataatgtctaaagctttaaaaacagctgcaactatacgggagttatgccaaaagtatattaaacaatcaaataccggtgatgagggtgagatttttacatcaagtgtcaatggaattgctgaggatgatcctgaagaaattacaggtgcaaagccatcagaagagattatagagaggaaaaaagaaagtgcagttaaaggtaaagaaaccattaagaaaatagctaaagaaaaagaggataaagcagaaattcaagagctagacaaagaaaatgaagaggtttttaggaaaataatttattcaaatagtgtttcttatggaaatgtatgggaaccgcattatgatgcagtagagggtgtgttcattacagttaataaacaccatccatattatagtgaatttttaaatcgcttccctgaaaatagtgtttcgcgagtatcacttgaagccttaatgttttctgttggattagctgaaaacaatgtaatacatggatatgaaagcattaagagagaagaactggaagccatcttcaaaaaattccataaaaatataagttcttggttagctgaatggtctgctgaaaacgttaacttaggcgaagagtga

SEQ ID NO: 202025 - DNA, 567 bp, Klebsiella oxytoca
gtggcaaaagggaatgcagtagtatcagcccatctgccaggtactgttgggttaggtatattgccaaagggggctctgataacagctgccatcggtggcggagccaatactgcaatacaatatgccacgactcgtgaagtgaattacacagatgcgttgatagcgacttgggttggagcagcaacctcaaaaactggttggttaggaactgtgggatggaatacggcaggtggagcgacatcaagttatattaaaggagatgaccccatagttggggctataacaagtagtgttggctcgggattaggatatggggttggtaagtatatcttgaagccctctgtaaattcagcgggaaagtggataacaggaggctgggatcccaagtttgatcacaactggctcaaatacgctgaaatcaaaggtcaacttggtttatctaaggaaatgttaccaagtagaataccaacctctactagtaatatgggttcatctattacatcagagatgacaggaactgaaatgaaaaaaattattgaagataaatactctaatggcgggaaatga

SEQ ID NO: 202026 - DNA, 1284 bp, Klebsiella oxytoca
gtgattctgattcggacagtgactcggatagcgacagcgactccgattctgacagcgactcggactccgacagcgactccgacagtgattcggactcggacagcgactctgactcggacagcgattccgactctgacagcgactcggactctgacagcgattccgattccgacagtgattctgatagcgacagcgattcggactctgacagtgattcggattcagacagtgactcggactccgacagcgactccgactccgacagtgattcggactctgacagtgattctgattcggacagtgactcggatagcgacagcgactctgactcggacagcgattccgactctgacagcgactcggattcggacagcgattcagactccgacagcgactctgatgctgacagcgattccgactccgacagtgattctgactccgacagtgactccgattccgacagtgattcagactctgacagcgactccgactcggacagcgattctgatagcgacagcgactccgactctgacagtgattcggactccgatagtgactcggattctgacagcgattccgattccgacagtgattcagattctgacagcgattcggactctgacagtgattcggattcagacagtgattcagattctgacagcgactccgattctgacagtgattcagattctgacagcgattcggattcagacagtgactcggactccgacagcgattccgactccgacagtgactctgattccgacagtgactccgattccgacagtgactcagattcggacagcgactcggactctgacagcgactctgactctgacagcgattccgattctgacagcgattcggactccgatagcgattcggactctgacagtgactcggattcagacagtgactcggattctgacagcgattccgattccgacagtgattcagattctgacagtgattcggattcagacagtgactcggactccgacagcgactctgatagcgacagcgattcggactctgacagtgattcggattcagacagcgattcggattcagacagtgactcggatagcgacagcgactcggatgctgacagcgattccgattccgacagtgattctgactctgacagtgattctgactctgacagcgattcggactctgacagtgactcggactccgacagcgactcggattccgatagcgattccgactcggacagcgactcggatattccgcaggccaacgcggataccaataccgcactga

SEQ ID NO: 202027 - DNA, 1230 bp, Klebsiella oxytoca
atgattaagaataaaattagtacggcgtccgttctcctcctcactgctagtgcggcattcgcggatcaagagaatatagggctgatggggcgagtcaagaatccatcaacatcagattttttcgcttcaggtatttatgctgcaaaggacacgttcggcatgagggctaacgcggttgtgcttgcggccagagctaatgctcctgataacaatgcctatccagttaatgggttcaactacacaaaggcactttcacggtatggaagtcgtgattctgttggtctttatgcagataactcttctataccattcaaaacctgggagaggatatcatcggcctcatacacaccaacttcagtcacgtcatctgatattgatgcctcgaaggtaaaagttggtatgattatggatacagactcgaatccaagctggtcaggatatgttgtgtcagtgaatggtaacaaaataataactaatgggtgggttaacaactctactaaacgtatgggtactccgccacaaaaaactggcctgattattaatccggcgacaaagatttgggcaacaaactttaatatctttcttaatgaaggtggtagagcaaaagccggggtaatacaggaaaatggcctaatcaacaactctgtaagcagtcctaatgagttaaatggcctggataccgtaatattgccggggtcaaagtttggaggcactgcagcttatttgtccaggtcagcaaggaatggaaataaacagcaatggcttcttggttttgcatcgcaaggtgcaaaaaatgcgaatttttatagcacggatgcctctccagataaatcgactaacgctggttatatggaaaattcttcagccgtatctggtatggtgttttcgggaaagaacaaagttagctcagttgaatggagaaataatgggaaggttactgcaagaatatcaccagatggtaaactgatgaaagtagtatacagtactaagttagttaatgattcgactaacattaatgatgcatactataaatatataataaatactaataaaaatatttcattaacacttccttcatcgtcaagtattactgacggatacactgttgaaatagataactttagtggtaataaaataactttctcatcagatgttaaaattaatatctcaaaaaatgaatcatcctcaatgcatgcaacctatgttgggggagagtggtttgtgatgtaa

SEQ ID NO: 202028 - DNA, 1254 bp, Klebsiella oxytoca
atgattaatattagacaatatagcgatttatcaaacgaaaaaatatctgagaataaagtaactgataagcttttggctttttttatttatgcaagtatagtgcttcctaccggctctatatttggcgtgaatattaaaattttatctatgctcatcttttttttaggtctgttgatatacaaaaaagattacgttttaacgagcgtgctggttaaaatgtcaccttttattgttttcataatattagaggttttttattctcttgtttttttaaactatgatgattcatatttggtttctcaatcaaaagatatttttgtttttttcttaatgttttatgtatgtgtcgtttatgctaaaaaaatatgcggttatgagcgtctcttagatataatagttaaagcggcatttcttgttggcgtaatgaagatagtaatactattgtattcctttgtttcaggggtgcctgtttcttatatcattcgtgccatgggtaaaatgttcggcacatcaataatgtctttcgatgttgaatcttcgtcaatttcaaggataaattttacttctgattcaattttatttatatgtatattctatcttttcatgaaaatattcagaggaggcgtaaggaaaattgattattgttttctttttgtaatatgcttctctgctctgttaactatgtcaagattccaatgggctgcttgcgcattttcatcattagctgcgatgctgattaacctaaaaaagaaaaaatcatttcttatattatgcttgttttcgattatctcgttagtatcattatcgttaccctctgtgcaggaaatgataaaaactaggtttgatgaaaggattgtttcatcatcagatattgaaaggaatttgcaaagagatgctatatatatagctatagagaaagcaccagttttggggagtggtgtcgggtattatatacctacgatgataagaagtactacagcaaaatattcatatgagttgcaaatccaggcacttgttatgcaatttgggattattggtacacttgttattatgagttttatactaataccacttattgattctagtagacgtatgtcaataataacatggggaagttttatatcggttattataatatggatatcaggtgcattttttaatcctgtgttattttcatcctctgctggggcatccatggctgctatttatgggattggtaatataagttggattaaaaaagtgaaacgtaagtaa

SEQ ID NO: 202029 - DNA, 1164 bp, Klebsiella oxytoca
atgaagaataaagttgtattgtacggtgcttatgatcgctataattatggcgataatttgatgcctattttgctggagcgttttttcaggacgaaacatccgcaaaaaacagaacgccttaatttcatttacgcctcgattgactcatcagatttaagtaagtattcttgtatgccaacagttgcgatgaagtcgcttttatcacttgacgaaaattcatctataattgttgttggaggagaagtcttaggtgcggatgtaggaactttatacacgcatgtacaggacaactactactatactcgttttctaaaagcagttcgtaggtatagtcccggcatgttaactaaaatagctaaattattttatccagctgtttggatatatccatacattccgcagaaatcaagtttcaaaaataaagtgaaagtaatttataatactgtagggggggggccggttcagtctcaggttaattatataaaagaagctgattatatttcttcccgtgatcaaagaacctttgatgaagtaaataaatggtcatccacagagttagtacctgactcagtactcattgcttctgaaatagttgatgatgctttttttagtaagcatgttcggaaggaaataactgactactgtcgcgataataaatatattaccgtacaggcctgtccttataaggtgcagtttacggcaaagcaaatggctcgtgaactcgattccgttaagaatgaaactgatcttgatgttatactgttacctattggatatgcaagtggacatgatgatgttctttttttgaaagaagttcagtcatttgccacaactaatttaaaagttcagtatgaattaaatgtttgggagattatgtatttattgtctcgctcacaatcattttatggcaccagtttacatggggtcattacagctatgtcctttggcatacctcatttttgtctaaatggaaaaatagataagataacttcctttgttaaaacctggagtgtggctccctttattaaacccatcactgttactgacattaaatctatggttatacaaatggagaaatttgataattctgagcttcttaatgccgtatctcgatctcagggtatcatttcggctagtcttaataaagttgcggacatgttgtga

SEQ ID NO: 202030 - DNA, 1314 bp, Klebsiella oxytoca
atggggaaacttggtgatacagttaagcataagtcatttattaatattatatggttatccgctgatagtttaatccgtatggggctaggttttttggtctccgtatggctagcgcgatatttagggccggaaaattttggcacatataactattgtcttgcaattataacaatttatgtttctgtagcttctctaggtatgaatggtgttgttgtaagagaattaattaaaaatgagacgaataccagtgttataatggggtcatcgatagtcttacaaatcttaggcagtatacttgctagtatatttgtcattataagcatatatattttgcgaccaaatgaatggggggttttcctagctgctcttgttatgattccttcagtgcttttccgtagtagtgatatatttaagtactggtttgaatctaaaattaactctaaatatactgttttctctcaaaatattgcttttttcatcagttcagcaataaaaatcgcaataatttcttttggtgggtcgtatttatatgtatgtgccactgtgtcagtagaggcaattgtagtatcacttttgttattgtttttttataaaaaacatggatacgtaaataaatgggaatacaattttgctgaagcaaaacgtttgctgtcattaagctggccattgattatctccggtgttgcatttatgctctacatgaggattgatcaaatcatgattggtaacatgattggtgattcagctgtcggtgtttattcagtagctgttaaaatggtggaggtatggtatttttttcctgttgccattgtaagctctctatttcctaaaataataaaattacgtgaagttgattctgtaaaatataatcaacggctccagtttttgtatgacttattggtggttattagtgtttgcattgcactaatagtaacatttttttctgattttataattaattttttttatacgacacaatataccgaagcgtcaaatctaattaaaatatattcatgggttagtgttttttattttttaagttcagctagcggtcggtggtatattaatgaaggccttcaaaaatatgcattaaacagaaatgttattgggctaatgatgggcattgttttaaattattttcttatacctctttatggatccttaggatctgtttatgccacattgatagcttatgcttgtgctggatatttatttgatattatttcaagtcatacacgcatagctttttttcagaaaactaaggcgctatggttacctggttcatttatacgtttagtcaaaggttttaggtga

SEQ ID NO: 202031 - DNA, 222 bp, Klebsiella oxytoca
atgttccactgtccaaaatgccactatgcagctcatgctcgtaccagccgttatttttctgacacgactaaagagcgctatcatcagtgtacgaacatcaattgcagttgtacgtttgtcaccactgagacggtcgaacgttttatcgtgtcaccaggtgaagtcgtgccagcgccaccgcacccgacaacgtcaggccagcagcaaattcattggatgtga

SEQ ID NO: 202032 - DNA, 1125 bp, Klebsiella oxytoca
atgagtgtctatcttgattgtaatgcaacgaccccagtgtcccccactgttgccgatctggtaacacactatatccgagcggagtttggtaattccggtagccgcacgcatgagtttggtttagtggccaagctggcagttgaaaaagcaaggggtcaggtcgctgcgctcgctgatgctgacaaaaacgaagtatttttcaccagcggtgcaactgaaagcaataatattgcgatattgggacttcaggctgaagcgctcaaaacgggaaaaaggcatattataaccacatctatagagcataaagcagttcttgagcctattgaatatctttctgaaaatggcttcgatgtgacttatttaaatatagatgaagatggagttcttgacccgaacgaattaaaaagtgcattacgacatgatacattattagtatctattatgcatataaataatgaaactggttcgatgcagcctattggtgcactgtgtaaaatccttgaggaacatgatgcatattttcatgttgatgcagcacaaggatatggtaaatatccagaagagcttattaactctcgcatcgatatgatgagcgtgagtggtcacaaactctatgctcccaaaggtattggtgcattaattgtacgcagaagaggtttttctaaaataccattgacaccattgatgtatggtggtggacaagaaaaggggctacgtcctggaactttacctgtcgcattaattgctggattaggtcaagcttgtgaagatgcgcaatataattatctcgcatggagagaaaaatgtgaaaagataaaattatctctgctagatacatttaattctttaggtgcaaaagttaatggcgagaatgtagctagtcatgtgctgaatgtttctataccaaatgttaactcagaggcggcaatggttgcattaaaaggaattgtggctatttcaaacggttctgcttgtacgtcacaaaactatacatcaagtcatgtgcttgaagctatgggacttgacgatcagagaattgatacggcaatccgcatatcatggtgctatatgactgaagaattacctttaaacatgatctataataaaattaaagggttaatgtga

SEQ ID NO: 202033 - DNA, 810 bp, Klebsiella oxytoca
gtgacaacaagaactattgttaaggcagctattgaggctttaactataattggtcagtctgcgtttgctgcggaaatatatgatgtcatttttgaaaatgacctttataaatttggtgcgaaagaaccagtgtctgttttacgaataacattggatcgacattgtataaataaatcctttaactccatgcaccaaaaacgtttttttaaaaaactaacggatggacgttatgaacttttatcgacaattaaatcatctcatattgcccttcaaaatttggcgcaagctagtgcggatgctgtagaaaactctatcagagagatatactcactggcatcaattcaacgtgagaaagttcgaaaggaaattcttcttaacttgagaaaacttacgtctgatcaattcgaggatttttgccgtatttttttgataaaatatggttttcttgaaatggagctaacaagaaaggggcgtgatggaggaatagatgttaaaggaagtcttaaagttgggcttgcaaatatgcgtgtagctgtccaatgtaaaaaatatgcagctgataacaaagttggaagaagagcaatatcagcatttcgaggtgatataacaggtgaattcgaacaagggatttttattacaacaagtagctataccaaggaagccactgatgtatcattcaaagcatcttgtgtacctgttgttcttattgatggtgagcagcttgctgattttatgatagataaaagaattggtgtccagacggaaataattgaaatatataattttgagcaggacctgttatggatttaa

SEQ ID NO: 202034 - DNA, 2163 bp, Klebsiella oxytoca
atgtcaccaattacaaataaaactgctaacaacgatgctgatgaaatagatttaggtcgcttagttggtgaactcatagatcatcgaaagttaattatatcggttacagcattatttacattatttgctctaatctatgctctattttcaacaccagtgtttcaagcagatgcgcttgttcaagttgaacagaagcagggtaatgcgatcttaaataacttaagtcaaatgcttcccgatagccaaccgcagtctgcaccagaaattgcactactacagtcaaggatgatcttaggtaaaactgtaacagacttaaatttacaggctagagtcaagcaaaaatatttccctatctttggaaaaggatgggctcgccttatgggaaaaacaccaggcgaaataagtatatctcgattatatcttccaacaaatggcgatgaagctccagagttgtccttagtagtaaaggataaaatacactacaccatattttatggggattatgaactcaaaggcatagttggtacccttctagaagataaagggatttctctaaagattgatagcattgatgcagaacctggaaccgaattttcgatatcctatgtctcaaagttgaaagcaatatcagacttacaagatgtattcactgtttcagatcaaggaaaagatacaggtatgttaactctatcattgaccggagaggatccagtgatgatagagaaaattgtagatagcatcagtaataattatttggctcaaaatatttcacgccaagctgctcaagatgctaaaagtctcgatttccttaatatacaactcccaaaagttagaggggatttggatattgctgaagataaactgaatctctataggaggcaaaatgactctgtagatttatcattagaagcaaaatccgttctcgaacaaatcgttaatgtcgataatcaacttaatgaattaacgtttcgtgagtcagaaatatctcaactttatactaaggaacatccaacatataaggcattaatggagaaacgcaaaacccttcaagatgaaaaattgaagttaaataagcgtgtgtcagcaatgccagagacgcagcaagaaatacttaggttaagcagagatgtcgaatctggccgtgcagtatacatgcaattattaaatcgtcagcaagagcttaatattgctaaatcaagtgcgataggtaatgtccgtattattgataatgcagtaacacaaactaagccagtgaagcccaagaaagcgttggttctattagtaggtatagttttggggggagtcgtttctattggtttagtcctattgcgagtatttttacgacgaggaatagaaagtccagagcagttggaagaaatcggcattaatgtttatgcaagtatacctgtatccgaagcttttgctaagaaaatgattcagaagcaaggttggcgaaaaaaacagcaaagcgagtatcaaggttttttagcaattgaaaacccagctgatttagcaatagaagctattcgaggtctacggacaagtctacatttcgcgatgatggaggcgcgaaataacgtactaatgatttcaggtgcaagtccaaatgcaggaaaaacctttgttagtacgaacttggctgctgttatttcgcaagcaggaaaaaaagtacttctgatagatactgacatgagaaaaggttatacccacaagcttttcaatgtttctaacgaaaatggactctcagatttcttatcaggcaaaaatgaattatctaagacagttagaaaaataacggaaataggatttgattttatacctcgcggtatggtcccaccaaatccagctgaattactaatgcatcgtcgtttcggtgagttaattgattgggctagtaaaaattatgatatcgttgtcctagatacaccacctatattggctgtgactgatgcggctatcatagggcattatgcagggaccactcttttggtagctcgttttgagttaaatactgctaaagaacttgatgttagctttaaaaggtttgaacagagtggggttgtagttaaaggctgcatacttaatggtgtcgttaaaaaagcaagtagctattatggttatggctacagtcactatgggtattcctataaagacgataaataa

SEQ ID NO: 202035 - DNA, 132 bp, Klebsiella oxytoca
atgctttttggccaatggctaaattgccgagagattcctgacccctatcgcaagagtgaagaagcgtttgagtcagtgtataaattgatcgagcaagccggcttatgctgggttgaaaaactaggcggataa

SEQ ID NO: 202036 - DNA, 855 bp, Klebsiella oxytoca
atgaaagtattgttaactggtgcaaatggtcaattaggccaatgctttcaagaccgggtacccaatgattgggatgtttgggccacagatacttctgagcttgatattacaaataaagatttagtattagctgctgtaagtaaatacaaacctgatgttattgttaatgctgcagcctatacagctgttgacaaagctgaaagtgatataactacagctcgtctagtaaacaagattggtcctgaaaatttggcaatcgcagctagcaaaaatgatgcaatgtttgttcacgtatccacagattatgtatttgatggtacggcatcgatcccttatgaggagagtgatgagaccaatccattaggagtctatggattaacaaaactcgaaggggagaatgctgtagaaaacgtattacctaatgccatcattttaaggacagcatgggtttttagcgagtacggcaataattttgtaaagactatgctaaagctagcgaaggatcgtgattctcttggtattgtttctgatcaacggggctgtccaacctacgcaggtgatattgcaaatgcaattatccgtttaattcagagcaatactaatggtggcatcttccatttctgtggtgatgaagaggtctcatggagcgaattcgcccaagctatttttgatacagcagtggaggctggtaagctaagcaaaccaccaataattaatggtataacaaccgaagagtatcctacacctgcaaagcggccagcttattcaacacttaattgttcgaagattgcaacttatggtatttcatcttctcaatggagaagggctttaacagagattatacaagtattttaa

SEQ ID NO: 202037 - DNA, 351 bp, Klebsiella oxytoca
atggctgagcacgttatcgataatgtgctgtacactgtcagcctgccgacgctcagctttttgccgttcatcctgctggttatcccgccggaatccccctgccgggatgacatatacccccatggggttgtaactgctttgccgcgaaacaggcgggatgcacgaattgtacatattcatcccctgtcgtccgtctgcatttgcctgcaaaccataatggttatcatagcgtccgtaggccaggttaataccgccgacaaacgcaacttcttcatcaacaatcacgcatttgccgcgccgtcgagcagacccgagggctcgctgtacggcagtcgcacgtcaaaccggtag

SEQ ID NO: 202038 - DNA, 369 bp, Klebsiella oxytoca
atgaagacgctcagttcccgtctggcgctcctgggatacacccgacagtgcgcggtatatcagaaccagtccgttcctgaggtggttgagcaggtgctgcgtaaacacggtctgaaaggtcctgattttgaattcagactggagcatacatatccgccgcgtgaaattatcacccagtggcgggaaacggacctggagtttatgcggcgcattctgtccgaggtggggatttactggcgcacggagatggacggcacccgtgagctggatacgtacatttttgccgacagccagcttaactaccggtttgacgtgcgactgccgtacagcgagccctcgggtctgctcgacggcgcggcaaatgcgtga

SEQ ID NO: 202039 - DNA, 888 bp, Klebsiella oxytoca
gtgcttgacggcgaggtcctgagtctgcccagtgtggatgcgaatgcctgtaatgcctccggcgaaacccttattccgttactgaaaacgatgggcagtacctggcacggcatgacctcggtcgagtgggcgctgatacaggcgatggccgtgaagagcggatactgtccgctcggggctgatgtgtacggcaaatcgccacgggatgcgacccagaccgggcgccgtatcgacggcaaagagccgggcgatatgtcgtcacagtctccgcgcatttataccggctccggtccggtctcctatcgtcaggataaaaaatacaatggtatcagcgaccttgccggaaacgtctgggagcgcacctacggcgcgcgcgtggtgggcggcgaaatccagctctacggcaccggcaatgaggccgcgctcgctacctctgcggtgttcggtgcacacggcgctgatgtgccgggctggtacgccattcatgcggtgaccggggcctttatcaccccgacacacaccgggaacacctccacggcggactatgtggccaccacgcccaacagcgtgcgggcggtgacaaagacctccgggctggctgacaacgagttttatcacccggcctggggcggaaccttcgtgcagccgcagaacacgctgccggaagcggtaaaaaatattctggagctgtatggtgtgtggccgtcccggaccgggaaggcgattatcccgccagggtccaccgtcaactacaacccgggcgcgacagtctgcatgcatccggtacggggcatgaatgatattttccagtttggctttgccaataataccgaaacggtaaacacccagatgggcctgcgcccggtgtattacgcgcccctgagttaa

SEQ ID NO: 202040 - DNA, 912 bp, Klebsiella oxytoca
atgaaagcaattacactggttgttatttataataaaaaaattgaagattcaaccactatcaaatcactacttctttctaattacacaggcgatctgtatatatttaacaatggtccatccgcaattagcgttagcgcgagttatttagagttattgcagggaaagtacagccttataaatataattgaagatgtaaacaatagaccattaagtactatttataatgatttcctcaatgctggagattacgattattattatttgtttgatgatgatacaacgattccttcaaattttttcgcggcagagcagcaaatcgagtatgatttatctcttcccataattgtctccgctaaaagtagtgatgttgtttatcccattgtaaataacaaagtttttcatgaaagagaattcccatttaatgaaagtgacgaggtaatatctattggttcaggattgatggttaataaatcactaatcctgaaatttgaaaaaattggattaaaaccttttgatgaacgttttgcattatatggtgttgattatagtttgtttaggcggttaccatttttgaagcgagcagggtatgctgtaagactgggaatttcaggtacgctgcatcattctctttctagtgaggagaatcatatttctgcatttagaaaacgcgaaaggctaatagatgttatgctcacgaaattacattattccaggaggaagggacccctgcagttattatcaattttgaagacattggccgagcatgctgtaaaaagtgattttcaaaatttcaaaatgttgcttggagtttgtttacatcgagaacaccccaggagtacgcaataccgaaatcgcttaaagaatcataataatattaaacttgataaacttgataaacttgataaagaataa

SEQ ID NO: 202041 - DNA, 228 bp, Klebsiella oxytoca; identical to SEQ ID NO: 197785

SEQ ID NO: 202042 - DNA, 258 bp, Klebsiella oxytoca
gtgtcagaatccgagtcactgtctgaatccgaatcgctgtcagagtcagaatcgctgtcggaatccgagtcgctgtccgaatccgagtcactgtcagaatccgaatcgctgtcggagtccgtatcgctgtctgaatcggaatcgctgtcggaatcagaatcgctgtcgctatccgagtcgctgtcagcatccgagtcactatcggagtccgaatcactgtccgcatctgagtcagtttctgaaatcgaagagtgctga

SEQ ID NO: 202043 - DNA, 1893 bp, Klebsiella oxytoca
ttgtctcaaacaaactttttcaaaattaatctcgaaggatgtattactaaaatacaagtcgaagaaaggattctcgctgatacgaaacttacagcaactgctttagtccttcatataaacgaaaggtccaaaacatacttttgttttatttttgaaagaattaatcctaaaatcgatgatgaagcgttaaattatattctacgtttatcatctgatttcaggttgaaaaaccaaaatatttattttatattctcatcagctaagaaaattgaacaactttcacattgttctgtaaaactagagagactaacacaactagaaaccagtacaattttgatcgatagatatgggaataataaacttacacaagaagatattttctatatctatgaactcacggaaggggtagtatctaaactagatcatgtaatgaacttcttaaatgattgttctgctgatgagttatcaacgattgaagatttgtttgatgatgtatattatgatgaaaatctatcaagaaccacccgtgaacagattgaatttctagcaaataatccaaaaagatctaacacatttttattgctcaaaattttagctgttcttaaaaacggtgaatctataaagacaattagaaaaacaaaaataggatctcatattaacccgaggaacactcaagaactaacgagtttggagctagctacatcagttactattgactctacaacaacaataataagattaaataccattgtcaaagattacgtattaaaaataacaccacttcaagaaacacatgaaatatcacgcgaattcttaccttttacgataattacaggtaaagaaaaaatagtattgagttcaataaatcgaaagacaatggaatatggtttaaagactgaagaagacaacgccgtgaccttgctgagaaataatattgaattggtaaaaaattctctaacatcagatttattaaatgaatctgaaaaaaatgcactgtccacgcagttaaatagattattgtatttgtcacgctcgtatgtgtatggcctattaaactcatcgagatttactgaagcagtaacagccatacatgctttgttaaaagatattgagagtatcagagataataatatctatatatattacgcatatttagcatggtctcaacgtatgctcggaaagcacgatattgcgtttgattatataaaaaaagcaaaagagctttgtcctactgaggataaagcgaccttgcgtgacataacaatagatgaactttatctacttgaaaaactgtcacttaacgaagctctttccctcgctaaaaaattaaagaatgagaacaaagccaactccgacttatatattatttccgacatcatattatcaaactctctaccagtaaaagaaaaaattgaaaagttaaaattcaatgaaaagaaagcaaggagattgaaatattttacaacggcaaacaacatacttctgatattaaatcgttatttaaaaaaccatgaaaaattaacttcaataaacactgtattatcttccgaaaaatccacctataatacctgtagagccaaaataataaaatatgaaattttgcttgaaagtggacaagttgataaaataacagaaaaatcaatagatgaacttaaagatatttataattatttattctttcaaggtcttgaaagtctatttaatcggtgccatgaattactatgggaaattgcagtgcatcgtaaaattaatgatttaattgaaaatatatttttccaaggcattctaatatggcgtttgaacaatgatttaaaatcagaagagaaatatgaacgtttatacaatgaacgtgtcgcagctataacaattgaaggcgtttctcttctagaatag

SEQ ID NO: 202044 - DNA, 318 bp, Klebsiella oxytoca; identical to SEQ ID NO: 197345

SEQ ID NO: 202045 - DNA, 717 bp, Klebsiella oxytoca
atggctcaatcacatttactggcagaaagaatttcccggctcagcgccgctctggaaaaaggactcttcgaacgcagccacgccattcgcctttgcctgcttgccgcactcagcggcgagagcgtttttctgctgggtccaccgggcatcgccaaaagtctgatcgcccgacgcctaaaattcgccttccagcaggctcgcgcatttgagtacctgatgacgcgtttttccacgccggaagaagtttttggcccgctctccattcaggcgctaaaagatgaaggacgctacgagcgtttgaccgcgggttatcttccggaagccgaaattgttttcctcgatgagatctggaaagctggcccggcgatcctcaatacgctgctgacggcaataaacgaacgccatttccgcaacggggcaaccgaagaaaaaatccctatgcgcctgctggtggcggcgtcgaacgaactccccgaagcagacaacagcctggaggcgctatacgatcggatgcttatccgtttatggctggataaggttcaggataaaaccaacttccgctcaatgctgataagccagcaggacgagaacagtaaccccgtcccggcgaatctacaggtcagcgacgaggagtttcagcaatggcagcaggatatcggcagcgttaagctgccggacagcgttttgaacttattttccagctgcgccagcagttag

SEQ ID NO: 202046 - DNA, 183 bp, Klebsiella oxytoca
atgaaaattaacgtaactccagcccaacttgaggcgattaagcggcttaccgatgattgcgcttcgatgattggctgcggaaattatgaagcagataaagcgtggtctcgtaacgtcgaactgattgacaggatgctcgaaagtaatgggctgtcccgggacttcaaggtggaggctgagtga

SEQ ID NO: 202047 - DNA, 435 bp, Klebsiella oxytoca
atgactgagatcaccaagttagttaagaatctgcgccattgggcaagtatggcctcactgaccagcgaacaagtgtcctgcttaagcgttcagcaactcgaaactattgcgaatgagcttgattcagcccaccagctgatcgccgaacttgagtcatttcgtaccgcctacatggaatggagcgataaaactgattggattcagacggacagacgatttgacatagtgaagccgctaggcaaacaccgcgctgatgtgctgaagacgtatatcgatcatttggaatctcgcgccgtgaaactgtcgaagcgtaccgttggtgaagtaatgcatatgagcggatttagccgcgactacgccgagggttggtgctcaggcaatgataacgccattcatgaaatgcgtgccgctggcatcaaggttgagggggagtga

SEQ ID NO: 202048 - DNA, 825 bp, Klebsiella oxytoca
atgactaaccacgtcatgggtgctgctgcatccaaaaaacaccattttttcgctattaatggcgtctctatccgtcaggatttagacgggcgtttctgtctgaatgatttacatcgcgctgctggtggggaagaacgacatagtcccaatcgctggtatcgttcggggatggctgctgaattgatttccgtgctaacgccagatttggcgtttgccccggtagaggtggttcgcggcggtagcaacccgggaaccttcgtatgcaaagagctggtatacgcctacgcgatgtggatcagtgcggcttttaatctgaaggtcatcagaacgtttgacgccctccagactgccgggtctgctaccgttaataccgatcgcatccaggccggtgtaatcctcctggaatctgccgccaaaatgctcaatctctccaattcatcaaagctcggcgcttatcaaaagttacagcaggttgctggtttgccagacctgatgccctcatacgccattgatgcgcctgcaggcgcgcaggatggatccagcagaccaacactatctcttagcgctttgcttaaagctaacaacatcagaatgaccgcaaaccaggcttatcaccttatggctggtcatggcatcgtcgaacagaaggagcgccgcagccggacgggcatcaacggtgtgaaaagattctggtcagttacggcaagaggttgtctgtacgggaaaaacataaccagtccggcgaaccctcgggagactcaaccacatttttttgaatccaagttccctgagcttatgaagctgctcggcatggttacgcagtaa

SEQ ID NO: 202049 - DNA, 237 bp, Klebsiella oxytoca
atgcggctgactgttctcgacgacgatccgggcgaacgcatcgaacccggtcgcgaacgtatcacggtttatctcaatggcgttgaggtaaaggatgtcttttctgctgatgatgataaaggcgaattgattgttgcagcgcgcgataatcgtggtcatttaactgcagaaaagggcgagattaagcggcagacgctgttcggtcaggtgaggatcgtacgcccatccaagcaatag

SEQ ID NO: 202050 - DNA, 162 bp, Klebsiella oxytoca
atgttaagagataacgaaaaagccagcgaaccgctgtcgctggcttcccctatcgtaagcgaatacgaaaaacttggcggttgtgagtatacgcttaccttaggttttgtcaacagcgaaactttaaaggtatcaatacatgagtatcacaaacgccagtaa

SEQ ID NO: 202051 - DNA, 537 bp, Klebsiella oxytoca
atgacgattgcgaaacgagaacttggccatcgcgtttcacctctcagcaatgacatgattaaatcttatgcgcagcgtttgagggatgttcttcagatatcgaatcatacatatctgagactggatgtattgctagaaggtcttatggcttcagaaagcatcgaccttgaaattgtggaagatcacgaattgcctaagcggtacgcagtgacttatccagacaaaaacaagattgttttgcaacagtctgtttatgatgcactctgtagcggagaaaatcatgcgagatttactgttgcacacgaattaggccatctgattatgcaccgcaatcaaggagcatacgctcgcagcaaaagcaatggcggacacaaaatttatgaggatagtgagtggcaagcagacgtctttgctagccatttccttatagatgcaagattagtctctccagcgatgaatgccgaagacgttagcaaaatttttggagttagcttacaggcagctgaaacatggatgagaaaaaatgttaagagataa

SEQ ID NO: 202052 - DNA, 351 bp, Klebsiella oxytoca
atggtaactagctttggtaaagctctcagaaaactgaggatagaccgaggtatggtactcaagaatatggctgatatgttgggggtgagctcagcttacctgtcagccattgaattaggtaagcgagccatacctgactcattagtaaattcagtagctgccgtattcggattaagtggtcaagaagccaacgacctaaggaaacaggctgagatttctcaaccatcactgaaagttgatatgtccgatgcagaggatcagaataaagaattgatgcttgtctttgcccgtaagttcaaagatctgagtcctgaacagcttgataaactcaacaaaatgttaaaggactag

SEQ ID NO: 202053 - DNA, 762 bp, Klebsiella oxytoca
gtgcagaaaaatttgttacagctttgttatgaaggggagtgtggggaaaattacatccgtagtatgaacgaaaaagggcaactttttgtttcactctcagacgttttaaagactctttcagcagaaaaccggaaacttgatggtaaagcatcccaaagtcttataactgttctcaaagctgtgattaagacactggaccccgatgaattcagaaaccttcctcttgttgtagatggtgagacaatttctgaaactttcctgactgagcctggtttgtacagagtccttgctcaggatacgacagcagcaggtaaaaaatttcaacgctggctttttcatagtgttcttccctcaattcgcgagtttggtgtttatccgccccctcctaagcaggaacgttcagaattaagtgctttcgctaatagtcttcagcaaacagttcaagctttagtcatggagattgaaaggcgcgaagaacttgagagccgagtcaaccaagttgaattaaaagttaactctttagaaagcttgagggatttgtcaaaattcagaagtgttccgcagcgtctgttagaacttgagcttgaggggtactcagtagatgagatttggcaatggtgtgagaaactacgtagcgaaaaaggggcagaaaagatcaaatgcccttctggtattaatatcaacacctgctatccattagctctggtcgatgaagcaatcacactgtaccaaaaagttattgaggcaagagttcggccttag

SEQ ID NO: 202054 - DNA, 285 bp, Klebsiella oxytoca; identical to SEQ ID NO: 102270

SEQ ID NO: 202055 - DNA, 279 bp, Klebsiella oxytoca; identical to SEQ ID NO: 101025

SEQ ID NO: 202056 - DNA, 1269 bp, Klebsiella oxytoca
atgagcagtgatgtcctttttaccccgatgaccgaaaccaccgactgccgggttaacggcgagcgtctgtgggagtcgctgatggcgctggcggaaatcggcgccacgccgaagggcggctgctgtcgtctgacgctcaccgatctcgatcgccaggggcgggatttggtgattagctgggcgcaggcggcggggatgcgcgtcaccgtcgataaaatcggcaacgtctttatgcgccgggaagggcgtaatccggcgctgccgccgattgtctccggcagccatattgatacccagcccaccggcggcaaatttgatggcaactacggcgtgctggcggcgctggaggtggtgcgcaccctgaacgatcggcatatcgaaaccgaagcgccgattgaagtggtgttctggaccaacgaagagggctcgcgctttgtgccggtgatgatgggctccggggtgtttgccggggtattcccgctagaaacagtctatgccgcgcaggatgcggacggtaaaaccgtgggcgaggagctggcgcgcatcggctatatcggcagccagacgccgggcgatcatccgattggcgcctactttgaagcgcatattgaacaggggccgattctggaggatgaagcgaaaattatcggtatcgtgcagggcgtgctggggatccgctggtatgactgcgtggtgaccggccaggagtcccacgccggaccgacgccgatgcgcctgcgtcaggatgcgctgcaggcggcgacccgcattatgcaggaggtcgtggcgatcgccgggcgcagcgacgaggggcgcggtacggtagggagggtgcaggtctatccgaacagccgcaacgtggtgccgggagaggtcactttttcgattgatatgcgtaatctcagcgatgcgctggtggatgagatggaccgccagctgcgggcgtttatcgccggggttgagcgggagagcggcctgaaggtggcgctgaaagaggtgagccactatccggcggcgccgttccacccggagtgccaggcggcaatcgccgacgccgcgcagcggctgggctatccggcgcgggagattgtctccggcgccgggcacgacgcggtgtatatgagctatctggcgccgaccgggatgatttttatcccctgcaaggacgggatcagccacaacgaaattgagtatgcgtcgccggagcacgttgaggccggtgcgaacgtgctgctgcaggtgatgctgcagtacgcgcgggtggtataa

SEQ ID NO: 202057 - DNA, 510 bp, Klebsiella oxytoca
gtggatgcgctgaaatcgctgcgtaataacgccttgtttaccctgtccgaggagaaggtggttgcccctggcgacacgctattagcggatagccaggttcagggccaggtgtatgaaatcgaggcggagctgcagccaggcagcgcgagcgaagcgggctttaaggttcgcacggggagccacggcgaggagacgctggtcggctatgatgccgcggccggcgaagtgtttatcgatcgtacaaaatcgggaacgaatgcgtttaattctggatttgcggcccgccatagcgctccgctgccgttgtcggataacgcctcggtagcgctgcgtattattgtcgatacttcatctgttaccgtcttctcagggaaaggcgaagtcgtgctgacggatcagattttcccggagccgaccagtcaaggcattgagatatacagtaaaggtggagatataaacgtaaaatcgttgactatctggcctctgaaatcaatctgggcagataaataa

SEQ ID NO: 202058 - DNA, 363 bp, Klebsiella oxytoca
atgcaagaattttggaaactctttggcagcgaacctttcgtagctatcgcttggatctgtaccgttgccagttgcatatatgcctttgtacaaaaaagcaacgtgaccaagattgaacagaaattcagggacctacacattacacatagtgacctaaaaattcaaaataatactcttaaacagaaagttgagactctagaaatctctaacaatgaattaaatgttcagaatacaattctgcaacagaaaataataaataccgaaaaaaatgatattcatgataattatcaagaagtacatcaacacggaaaaaataactttaaccaaggtgtaattaaaggcgactttatttacaataaataa

SEQ ID NO: 202059 - DNA, 552 bp, Klebsiella oxytoca
atgtatgaaacacgatttgacattcataacattgaaggtgacttctacaatgtggaagctccagaaaataatgttgattctattatcaatgttataattggcgatattgcatcagctaaagttaatatcgaccgcagtgatcgttctttccctgctaatgttgctaaaaaaatagaacacaatatgcttaatagcaagcgccgtatagtcttgcaatacaaatcatactcctctcatattgaaagagcctacactcttgcagaaaaaaatataataaatggtaaacaatcagctatggagttattaaatggaatgtactgtaattcattagataagtatgagatcgattcttttgaaccagacataaaaaaagtacgacagcatgctgacgacataatcagtgatgtaattaaacaactgaggaaattcgtttatagttcagcaaatgtcactcaatacaaagagcaagtggaaattggcttaaatgttgtcgttgcacatgcctttgtagagtgctgtgtcttggagaatccaaataatgctaccaactaa

SEQ ID NO: 202060 - DNA, 237 bp, Klebsiella oxytoca
atgctaccaactaaaggatctcatccagagatgaacgtgctctacatcggtggattcattctgaagcagctacaagagtgcaaaagagggcgtataaagatcactcaactaatgaaaactggggaaaaagagctttctgtttctgtagaccatataattttagcgctggactggctgtatataatttcagctattagctacgatcggaatgaggtttttattaatgaagttacttag

SEQ ID NO: 202061 - DNA, 168 bp, Klebsiella oxytoca
atgatcctggtaatagtgttggtaagtctacgttgggaagggttctggactatttgtttgatggctcaattaagcctatctatattgatgaagagtttcaaacacctaaaaaagaaattgaacaacttttcactagaaatgaagtgcacgtatcattggaatatttag

SEQ ID NO: 202062 - DNA, 660 bp, Klebsiella oxytoca
gtgccggacaactattcgctgggcgatgcggtcgaagcgattcttggcgccgagcaggcgctggaattcccgagcgatatccgtacccagttccagggcagctctctggccttccagtcggcgctcggcagcaccgtctggctggtggttgccgcggtggtggcgatgtatatcgtcctcggggtgctgtatgaaagctttattcatccgataacgattctctccaccctgccgacggcgggcgtcggcgcgctgctggcgctatggctggcggggagcgaactggacgttatcgcgattatcggcatcattctgctgatcggcatcgtcaagaaaaacgccatcatgatgatcgacttcgcgctggccgccgaacgcgagcagggcatgccgccgcgcgaggcgatctaccaggcctgcctgctgcgcttccgcccgatcctgatgaccaccctcgccgccctgctgggcgcactgccgctgatgctcagtaccggcgtcggcgcggagctgcggcgtccgctggggattggcatggtcggcggtctgatgctcagccaggtgctgacgctgttcacgactccggttatctatctgctgttcgaccggctgtcgctgtatataaagagccggttcccgcggcgtgaggaggaggcgtag

SEQ ID NO: 202063 - DNA, 2511 bp, Klebsiella oxytoca
atggctggatttgacccggcgctgggcagtaatgccccggcggtactgctggataatgccaaacggctggatgaactggtgaactcggacgctctcaccgtgcctgaccgcgcgggtattgatctggatacctggcgcggattcatggcgaaaaatgatgaggtccggcagaacatcattccgctcggcaagcaatacgttgatttgcctacagcgcaggcggatatcgcaaacatacctacaggcagcttcgtgtttgtgagaagcgcggaagactcacgaatagccaacgagtaccagaatgtggcgggtgcgctgacggccaccggtaagtttttcatgtcgggggaaggagtattacaagcgatgtcccccgctgtgaaatcagccggttatgcggcattgagggcaaacgccgctgcgctgaaaaataccgcgccagaaatgcagacccgccttcgtgtttccagcgacttcactcaaatcctcggcacgaagaactttgacgggactgtcgatgtcgctttttctgctgattattccgacccggtgatgctgaagctgggtcatgctgcctggtcgagcacgttctccaactgcacgctgacggtgacgggtaacgggcgaaaactgtttgagcgtgtatttttcggcggtgagtccatggaaaacggcgttctgactacgccataccgggagtttgcgctctctgcgttcactgtagcctcatcagctaaacaaaccaacggctggactctctatttgaccggcacgctgcctggttcattgccagcggacacgaaccgtattatccgtgatcgatcgttaaccgtggcctctctcctacctggtggcggtaacactgctaccactgacggggtgagctataacgctactacatcgagacttgaattcaccgtcatgtcagcaagcattactgctgccgggtttgacgacaccgctgccggtgccgaggcgtatatgtggtctctgtatgccgggcttatcttgagccagcagacgtccgccacgcagactcgcccggagtacttcgtgtttttctccgacgctggcacggtaacagtgacggcaaccgacaaaatcagtacgtcttttactgtgtggaaaaagccggttaccgcaccgtctgaatcccgttcagtgaaaaacgccgcagacatcagcgcaacccgtgatgacctgattaaaaccctcatccgcgagaacaacgaaaaaatgaataccttcagcgctcaccagggcgcttatcgcatcaccggagctgtcgcggcatactcggcattgattccatttaacagcgtacttaatctgtccggattatttatcgccactaacttttatcgcagcgtaatcagcatttcagacagcaccggggcggtgaaagaaatcactattctggatggagaagaaatcaccgcgggtgccatatcaacgccgtatcaggatttcactatcgctccaacggtagcctcatcgctcaccactatcggtaacggcgtggcagtgggttttaaggtttcgctcccgggcgccctgccaactgacacgacccgcattatccgtacccgcgatgggtcactgagcggggcgcatattgatctgattaacagcgccactacagacagcgtgacgtacaaagcgtcaacgggtgaactgctgattctggcgatgagcacgaacatcactgctgctggcatgacggtaacgctggaaaacgcgctggcttacgtgcttgataaataccgcaacacggtattcagccagaaaacggccactgctgtcagcaagccgatggtcacgcagttcgccgtcaatccaggaacactgactgtcacatccaccgacagcgtgaatatttacctttcattcgacctgtttgcacggccgggagagtctgccgcgtcgtctgcctacaaacgtttttccacggtggtaaaaaataacctcccggtagccctgacgaatgtcccgattgaactgaaatgtagctttgcgcctggtgaggctgtctcagaccagtacattgtggttgaagatgaaaacggcaatgcgttcctgccgcagtggtctgatgcgccggatttcaaccgccgccgcaatggctccctgggttactggggcgatggctccctgcgggctggttcgctcgttattatggactcactggcggcaggggtctctaaaaaatacaacatccgggtttacacggtgcgccagcgatacagcatctattcccgcgcagtacgggagtcctctacctccctgcgtgtcagtgcagatgatggcaccacactgacattcgacagctatcgcaactggctaccgtacaagctggggtcaggaggaaaagactacacctcgatcgcggaatttgttctgacgcgacgcgcgggggctggcggggctgcgaccgatttctcggcgatggccactaacgacccgaccgcatcctatcgcatcgtttctgatggcccggtgtttgcctcgtag

SEQ ID NO: 202064 - DNA, 1908 bp, Klebsiella oxytoca
atgctcagaaggttccggttagagcggaagtctgactacgaaaagctggtgatagctcaacttctggcggacatgcttgagaaattcttaagtggaaggctgtcgcctctgtcgattggtgctgaacaaggtggcattgacgagtgggacgatgtggtaattatgcacaccacagaccactatgagcatttacagatcaaacgccagtcaactgacttttgtaccaaagatcctgataaagctgtacaactcgctaaaaaacccagaaagggttcctcacccacctctccagctaattccgttttagactcggcgttttccagtcttgccagaatcgcgaaagcgggaaaacttgatgaatctcccaaccgtgagttcagactcaccctcgtgggtctgcaccttcagataaaagataattttacagttaatcatttagaagaagtctctgatctttgtcgccaaacaggactcagtgtagaggagttagctaagcgtcaggatggcccaaccacgagggcttatcaatggctaacaacctggtgcggattcgaagactggaaccaaatacgaaatgtccttcgccgggttcaaatcagttgtatcggtaacgatgcggcattaaaagatcggacaattcacacgcttggccgttacttcagcgatccgaatcgtacactggaccgtttaattacctatatcgcggcagaaacatctgacgtagcagccttgggatgccatgacgtcgtccaggaactgcgaagtgaactgcgccctgattttgaaacttgggtgcagtatcagttaagcgatggttctactatgactagtaaaacttggtcattagccggaacgcttgatcttgccggtccaacagaaaggtccgcaaaaggagtcgttgagcacatgtggagccgtgagcccggtaaccgcaagctcagagtgtatgccaattactcccccccagcaggcgataatctgactcttctttctgccattgtgcgtatggctttgcatttaccccaaggcagtcaggggctgatgttaggtgaaccagcgtggcgcagtagcgttggtcatgaaattggacacacacttggctgtgcagaacatgacttcagtgacctgccttggcttgaaaatgccgaacgcctatcgtgtgcacaggattatgaattcaagacattaagtgctgctcgaggtgaagctgaagcgcttgctaaagccatggacgacgtgctgtggcaacgccttctccaaggggtttcagaaaaacttggcttaatctcagatttggcgctagcagatgcgatggagacggtttggcagtcatggctgagcgggttctcagctgcacctgaaaaccgccgaaaattcatggagcagcttctctatccgaaaactgagagaaaaaatgaaaagcatgcgcttcgcctgggccttcgtactttaaatcttcttgttaccgctgttgaaaccttattactggttgcagtgggtttgcctgagggcagtaataactgggaatcttttcaggaaggtggcccagtattgagcattgctcttaagtactggtctggtcctgcgggtggtttttcgggagtacgtgagctttctgatgatccgttaatagacgttattggccctaatccggatcccatcgttatcttatcgggtgtgagtacatccccatcagaattattgaatataggaatggctgacgacgcagagaccgcgaccagtatggccgcggagcgtcaacctcacctgctcatcacgcggtctggtatgtttcgtcatttacataacggaacacttgactccgtacgccaacatttcactaagcagtggcaagatcgaaagctcgctcgtgatttggccattgagaagaatgcgaagggatcctga

SEQ ID NO: 202065 - DNA, 600 bp, Klebsiella oxytoca
atgccgacaatccaagaactcgttactgctataaccgagcgtgctaagggccgctataaagttcattttccagatgtggacgaaatggtttcaccctcaattgatatcggcatgactgtaatacaactcaggcgcattaatcgggaaaatgctggatggcgaacagtactgatcacagcatttcctagtaacgtggataatatccagagtgctttccggtgggccgctgatatccgggacatacttgcagagccgcagacagcagacctttacatgtttatgctcatcgatggagttgagtcagaagatgctgcccgttttgaaacggacgatcgattttgcaggaaggtggtactcagaaagcaggaagatattgactccttccttgatcgaagttttctggcgtctttaacacctgcgagaggtgggaatgatatcagcgatcctctgctagcgtctctgaactcgatgagtcaagcacattcctgggtagaacctcacctcgaaacatggcgtgaattgttgctctctgagaaatctggcgatgaaattgttaatgcgctgagggatatgatgtttggagaacgggactttcaatga

SEQ ID NO: 202066 - DNA, 2985 bp, Klebsiella oxytoca
atgaaacaacttaaatctatcacgctctcaaacgtccgccgatacggtaccgacaccaaaattgagctcagtggcggtgcaaccattttactggcccctaacggtacggggaaaacggccttcttcgaagcgatcgaatttagcctcacgggtaatatttctcgtctaggcgagaatctctcacccattatcagggacagccagacagtcgctaaggtggtcttggattttggggatgtacaagcctctgcgcaggtgagcaacggaggtaacgtcgaaaggactggtgatttaagctctctttttccggatacgaagtcggaggacatcccctttttattaagacttacccacttactggatcagcgcgagggacaatggctggtcaaagcggatgcaaaagttgcgggcgctcaactggctcgcttgccaatcggtaaagatggaaccctcgttagtaatgctcttggcggcattcgccgcgttctcactgagaagctgaagcatgcaaagggagcccttgaggcgctggaagctgagtttgcggaatggcaaagtctgattcttgatcgggaccaggccgcatcacaatctcagggggccctgcgcagtaaagaaaacatcgcagaatcaatctcagacatcgctcgcaatactcagagtgcagaacaattgccagtaggtttattagttccgccagtgggtatcagcaatctggaaactatgcacgatgcattagagcaaacagtacaagcaaaactgagccgacttcgcgaacagatttcagcgcttatggaagtggatggactaattggccggttcgtttctgagcaagcgcgttctgagcagcttggtaatgcgcttataactgctaaagaggagctgatacaaaaacaacaggtacgatctcagctagttgataaaaaagataaactccagaaggaactcgtcacagctgaagcagaacgtgatgtaattatacagcagcttaaccggctcaatagtgaggcgcgaaccaaagaggccttcgaacaacgtaagcttgacttggcgtcagctgacaaagcgttggtcgacgcccagtctcaagcatcagccttgaggcacgtacatgaggggaacgaacagctccgtattgagcatgaacttataaataaacagcgtaagtctctgcagcttgtagatagtgaagtacttactgctcatcaacttatcaagcgctgggaagacattcttcaacatattgcgacaattaccgacttggttagcaatgaggaaattcaggagcgtgtacttcaggagcatctccataccgcgaactcgttaaaggtatcagctgaaacagatgagctttcagcgaagcagttccatgagatgctcacgtctactgctgactctataaggcaatccgtagccaccattgccgcacatttaccagaggatcgaggggactgccctttatgtggagtggagcacggcgctgccgttcttcatgaacgcgttactagatcattagaggctatagaccccaaagtcatcgaagcagaacagcgcgttaaaatagcatccgatcacttgcggaaatgcacagaaacagtgacgcataccgaaacagaattgaaaacgtgccagagtaaaattgttgaactgcgaggcgatatcgttcgctcagtagcggagatcaatcaactcaaaacaaacatccttcttgacggagatacggtacaactagcgaaagcatctatccaacgtcgcgaagaatcaaatgcttcagctaaacagcagcttgacgaaaaacagcttaaccttgcccccttaccgacacctgaaatattggaagcgtctaaaaacgcataccaatcgtcgactcgcgaactggatactgcgcggcagaatcgggccgaagtcttggctagccttgaacaaacaaccgctgcattagctgcaataacagcaggggcactcccttcaaaaacgttggctgatttatccactgaacaaaacaaaaatacaattcaactagctgaattaaaatcaaaaattgaggctgagcaatctgcattggatagacagaatatccctttagctgaagttaataataagataaatggcctcgaaaagcagatcactgacgctcaggttcagttagcctcaatccggtattcatggagacaactgtcctttcccggcgatcccgctctcgaagtggcgagcagtaaagagattcaactgcagtcatccgttgctgacctgtcccgacattcagaacagttacaaacactcaaaattgagattggtacttggagcaagctggaacagactcgtttggcacaagggcttatagatcgtcgccgaggaacatcatcggagcaggaattcgctacaagtcttagccagcgaattgataacgagagaacaaatcagatgcagttgctgcaattatctgaagcgatggagacgctcaatcgttgcctatctactgagatctcgaatgtacaaaaacatgtgctctctgtcgttccaaggtggcaggctttgctcaaacgcgtagtcagagaacagcgctttactggcaccagtttgggttttcgcagtatctacagaaaggaacatgctgaagtatctgttccgttacatggggagtcagtaccggttccggcgatagccagcgaagctcagctaactgatctacagcttaccttcttgctctccatggcattggaacaccagtggtcctcatggcgctgcctgcttctggatgacccaacacagcatcatgacttggtccacgcagcgtccgtattcgatttactgcgtgattacatagttgatcatggcttccaggttgtaattgcaacacatgatgcccttcaggcgcgttatttcatgcgcaaactgcaaaatgatggcattgatgcacgcttgtggtcactcgttccaacacctgaaggggtgacggcatctgagatgcggataaccaggtaa

SEQ ID NO: 202067 - DNA, 918 bp, Klebsiella oxytoca
atggaatctgctcgtgacaaacgcaccggagaaaaagtggatgctgaagagctctggttgttggatatcgttgataccagtggttatgtctgctggggatgcggaatcgaaatgtatccttccgcttggcaaaaaggcagtaagaaaagaccgtcgtttaataaaatgccaggaaaagaacacattaactgcgatgctgatgctgagagcactgttgctaagcagggccagaagaaaagcgtccgccatctcttggacagcgcaccgggtttgatgccagcagggttaaagttgattgaaaaacgtccagttgttgatcctgactcaacgggtggtgaaaacaattcgagcacaacacgttctgcatcatcaacatccagtaaaggcaataccccaactcggcaatcgcgtcgtccggttaatgctattcgtcagatttgtagagcgtttattcgcttcccgtatgatcgaggtatgtcactacatataccggatattgatgccgatacttacatgactgtctttaaaaaacttaaagatccgattcagccctatccggaaccgcgagttttctactcacagttgttgtggcagaaatttgagcaagatgagaatcggattgtcattcctctttcgggagaatgggttaaagatgaatccggaaagctcaggccttctcgaagttacaaactccatgtggaatggagcggctggtcccaagctaaacgcacagcacttcgaaacgagttggaggccgtccaagaagaagcgaaggatgcggggaagaaaaagctaaaagacagggctcagattttcttcatcggtgagcaaagtactgaggaccatgaggtcttctatgtagccgattacaggctgatttgtgcgatcctaggacatatcacttatccgagaatttaa

SEQ ID NO: 202068 - DNA, 1785 bp, Klebsiella oxytoca
atgtggtcagataaggaatcatcagaggattacctaaattttggtgaagtatctcagctagcagtagatgtgcttactaccgaaaatatgttgccagtatcaataggcatttttggtaactggggggctggcaaatcttcacttttgaaactgatagagcaaaaacttgagcaagatgacaaagattggatagtaattaattttgactcttggctttatcagggctacgacgatgctcgtgctgccctacttgaagtcatcgctacagcattgacaaaagctgcgggtggaaatacgactcttatctcaaaagcaaagagacttctgagccgggttgatggatttagagcaatggggtttctggcggaaggagctgctttatttgctggagtccctactggcggtttactttctaggggaattggcgcgtttaggaatgctaccgacggtatccagagccaggaagaatatgaggctttgggcaatctggctaaagaaggcaaagagaaggctggtggtttgattaaacctgaggctaaaaaaagccctcctcagcagattgatgcatttcgtcaggaatatggggaaattttagaagagcttggtaagccactcatcgtggtaattgataacctcgatcgctgcctaccggctaatgctatccatacacttgaagcaatcaggctattccttttcttaactaatacagcctttatcattgcagcagatgaggacatgattcgttcttctgtagctgattacttcaagggggcatcacagcgccatcaaatagactatctcgataagctcatccaggttcctattcgggtgccaaaagctggggtgcgtgagattcgttcatatctgttcatgctttatgccattgagcatggcttaaaaggcgaaaaacttactaagctccgtgacggcctagaaaaggcattacaacaatcttggaaagatgaacctatcacacgccaggacgctctaaaaatgactggtgaatctgaggatagtaacctcgctttggcatttgctcgtgcggaccgtattgctcctgtattagccaattcgccaattatccatggcaatcctaggatcgttaagcgtttgttgaatgttgtcaaaatgcgatctcaaattgctaagcgacgagcaatgcctttggatgaagcaatcatcactaagttagtaatctttgagcgctgtgttggagtagatggtaccgctgacttatatcacctagtggatattgaacaaggtatgccccaattgcttaaacagcttgaggaagctgacggtcaaatacctactgaagcgccaaagacatggactgataatccaacaactaaagctttcattgctcaatgggctcagcttgaaccgcgccttggtggaatcgatttgagagccgccatatatctgtccagagaaactatgccaataggtgcatatgtggttggtttatcgccgtatggacgggaagcactgaatgcactcattgaaatgaaaaataccagctctcccgcagcagaagctcttttggaaacgcttcctcgtgaggaacaagtgcctgtaatggaaggtctaattagccagttaaggcaagcatcggattggactcgtagacctaagggtttttctggtgcatgcctcttggctcgccactcggcagatgctgccagtatattaattcgttacttgcaggaattgcagcagggaacgaagccaccggtatggatggctgcagcactcaaagatgagcaatggaataaggacgcttaa

SEQ ID NO: 202069 - DNA, 753 bp, Klebsiella oxytoca
atgggaacttcacaatcaagtacagggccaggtggtggttcgccactggttccaccttgggctgatgatcagccacagcaacccttacccccaccacaagaaagaaggttcgcgccgttccgggaatctttggggaatgcggtttcaaacggtaatagagcagacttcagaaaagccatagggcattacgcgcgaaaggcctctggaggtagcagtagtgcagctcgacgattagggagtgtcacacaggcaggggggggattgtttggggctttggcgggagtaccttcggctccaggagaaccaagcattgatttgggcagtttagctggccttccatgcgaaatggcaatatcagctattgctcaagctttaacatcgcaggatggtgattcagagaagatttgtgcagccatgaaccatgccttagtggaagccctcgatggtgtagcaattttcgatctccaacaaataacagatggtgtgatcgttgacacaatgatttgttatcttgctgaaagcatttttttgcaaatggttatggattctaacaaggcatggaataaagcggatactccttcaaaagccatccatgcagaaactgaacttcgagagttgatcaaagttgttgttgataagcatatggctccaaaacttgttggcaacatcagaactttttctaaaaatcaaatggttaaaattgagcgtcaggtaatcattgaggcttggcaagaatgggaggcctaccaatga

SEQ ID NO: 202070 - DNA, 1305 bp, Klebsiella oxytoca
atgacacaattagttttccatcatgatcatcgtctcttaccgccagcaggtgagaacttgttgcccgtacagctttatggattaagtgggcaggggcggggtgatatatctattattgggaatcctgcgattgagcgaattaagcgcttgggagtcaaaattccagctcaggtcatggattttttgagcattgcactagcggttacagcggctgataccttcgttcagcgtgaaagctctgaggatggttggactcgtcaattctcgctacgacttccccttcatgagccatctcgatggattgccctaaagaaggaacttgaaagcgctttgcatttccttagtggagacatctgggatttcgagttttgcactggtggttatgcaccgccagaaccatatagtcaacattcaaggtttcacctgattaagctcaaagaacttgattgtgtcagcttattttcaggaggattggattcggctattggcgcaatagatcttctgacagtggggcgtgctccgcttttggttagtcatgcttataaaggagataagtcacgacaagatcaaattgctgaaagattgaatggtcgatactcgcggtttgaaattaatgctgatccgcatcactatcaaggggtgactgatattacgatgcgaacgcggagcctcaattttcttgcttttgcggcagtgggcgcttgtgctgtacaagaagtatctcaacaagaaaagatcgatctttttgtgcctgaaaatgggtttatctcgttaaatgcaccactaaccccacgccggatcggtacgttgagtacacgaacaacacatccatattttatttccagcatacaacaactctttgatgcggttggaattccttgccaaataatcaatctatatcagttcaaaacaaaggggcaaatggctcatcaatgtttgaataagccactcttaactgaaattgtagaaagtacagtatcttgcagtcattggaaacgcacgaatcaacaatgcggggtatgtgtaccgtgcatcattcgacgggcatcgcttcatgctggggggattagtagagatgcagattacactttccagtctctggctaaagtaatgaatgaaattgatcgcagggatgaccttatcgctcttaggattgcaatagcacagaaatccactttgaaaataggagcatgggtcgccaagagcggtcccttgcctgtggctgctttcaataatttcaagcaggtgtttatggaagggctaaatgaggtcgaaaactacttactgagtgagggtattgtttga

SEQ ID NO: 202071 - DNA, 714 bp, Klebsiella oxytoca
atgcactgtcaccttgacttatatcctaagccagaacaggtggctgaggagtgcaagcgtcgagggacttatatactgtcggtaacaacgacccccagagcatggcatgggacctcttcgctggctaaaggaagccaacgaatccgaactgctcttgggctccatccccaaattgcacatcaaagatcgcatgagttagagctgtttgattcactactttcggagacgaggtatgttggcgaaatagggcttgatggtggtaagggatttaaagagcattgggatgtccaactgaaggtatttcgacacatactcaatagtgtgcatcgtgctggaggtaagattatgactattcatagtcggggaagtgcatcagctaccattgatgaaattaaaaatattgatgggatagcgatattacattggttcactgggacacccaagcagctagaaagagcaatcgatttagggtgttggttctctgtggggcctgctatgctcaatacaattaaggggaaggccttggctttaacaattcctaaatcacgcattcttacagaaaccgatgggccatttggtaagtttcgtaatgatccactaatgccatgggatagtgagattgctgagacccagttagccaaattatggggggtgagtctgatagatgttaaagttcagctttctgataatctaagaagaatatgtagctattaa

SEQ ID NO: 202072 - DNA, 132 bp, Klebsiella oxytoca
atgaaatacgtagtggtgcatattgcgccagcactaataaaaaagctagaagcgctatctaagctgtacggcctgagccgtcagaagaccttagaaattatcgtgaaagaggagttaaacaatgccggataa

SEQ ID NO: 202073 - DNA, 168 bp, Klebsiella oxytoca
atgccggataagaaacaggcttcagtagtcaatatgccagtcaagacgcttgaactattgagtcaattaggtgaaaaatatgatttaacacgacagcagaccttagcggtgttgctcaataagaaaatgaatgagattagtggttgtgataaaataatagttgtgtga

SEQ ID NO: 202074 - DNA, 837 bp, Klebsiella oxytoca
atgaaagctgtggatttaataaagaaaatggaattgtatgttcattccgcactttacgcttgtgagttggccgtcgctgctaattcggcaatgtcattttcggaggagaaatggtctactggcccaagtttacatagtgcagcaaaccgtccaagattggataaaacaatcctcccattagccctgaagacatccgaactattccagcttgcaatacatgttattaatgactttaaaactccagaaaaaggaaaaggtggggggcgaaagttcattaatattcatgaaatgactaagcctgaagaaattatgtcggcgcaaacaattctttacttgttttgcctgctggaagaatatgaattctatgtctacgaaaaggaattgtcctcaaatttacagaggatttgtaatgatgataaatacaccttgaaagatgtagaagagtatggcatagaaggcattagaagaaaaagcattgacaggcatatggcagagtatcaattctcctcatgtcgtaaaagaattaaacggtgggggaggttgggtgtaaaagagttatctgaaaatcagatttctctttatgaagtcatctcaaaaagacgaaatgaacttacccatttatcatcacctgaaccagcttcaagacttgaggcattgaactactatttagtttgccgaaatattgtccggtatatatcgatatgcttcggtgataaaagtatcgatgaagttgatgttgactgggaagtttggtctgagctagagcatagcattcaaaatgatagttcagttaatgatttggcaaaaatggttcgagatggtggcgccagagagtaa

SEQ ID NO: 202075 - DNA, 879 bp, Klebsiella oxytoca
atgaaatcaaattttctacactttaatgatttggatggcggggcaggaattactagggggatatttaacttactggaagggtataatcttaacgaggatgttactcgctccatttatgtgtgtggaactgaaataataatgaacgtattgtgccatgcatatcctgaaaattacaaattaaaaagcaaacatgccttgtcattttatattaatgttggcgaggactatcttgatataatctttcaagattacggtgcaacgatcccagttactgttttaaacaaaattccaagtttagcagcatcttttaattcatcaacagttctaaaaatgacagttagtggtgagattgaattagaaggtcatcgtggaaaaggtctgccttctttactaaaagaagtaagtggttgtaccataagtaaattaactatcatttcaggtgaagctttcctcaaagtaacaaaagacgagcttctaatatttaatgagaacatccccaaatctgtagggacgaaaataatattatccatagaaaaaccaattttagatgagggagttaaatcaacattgattaatattaaagacgcaattggccgttatccatttggtagatataaaaatgaaggcccaggtagtgctgaggagttacgtgacgactttttgatacctgcactaaataaatatgatcttgttaatattgaattagatggagttatggggtatggagcatcctttttagaggaagtattcggtggattggttaggagcggttttaatgatggagatttaatttaccgaataaatattgttactgaacaaaaattttacattagcgaaattaatggttatattgaggcggctctaaatggaaatcgataa

SEQ ID NO: 202076 - DNA, 675 bp, Klebsiella oxytoca
atgcaggatattactgttgagccagttgcacgtttaatcgtagattatctttcatgcctctatggaaagcgtgaacccaaggcttggatccgtctgatgaatcagctgattccttttgctgatgaagaagtacagtcctgtgcgcgaaaggaccttgatcgtttgttaaaaaaacagcgcaaagaagcaactagtgctgaacagcttgattcacctttttcttgttggtggaagtttgtaaaggagtttttaaaacatattggcactgatacaatcgtagccctatcacctgattacgaatcacacaagcgtctacaggaagtttttcgtgataccaaagcaaggattgaagagttgcttgaaattgaatcagatttgccacaagctcttagacggtttacggatgaccaagcagtcagaattttaaccattcacaaaagcaaagggcttgagttcgattctgtaattataatggcggtggaaaacgagattttctttggtaaccaagatgagaatcgatgtgcattcttcgttggtgtttcacggacgaagagacgattatttttaactcatgctgcacagcgtgaacggcctgctaatgccaaacgttgggaagtccatcgaactgttcaatccgaatatattggttatgttacaccatttattaaacggtaa

SEQ ID NO: 202077 - DNA, 918 bp, Klebsiella oxytoca
atgctgacattacgccaggttcgttattttgttgccaccgccgaaatggggcagatctcgctggcggccttgcatctcaatatttctcagtcggcggtcaccggggcgattcaggagctggagcaactattgggcaagaagctgtttacccgctcggtgcacggcatgatgatgaccgactacgggaaccattttcttaaccatgcctataccgtgttacagaccgtggataatgccgtgcgtagtatgccggttaatgacacgggtgtgcgaggcacgctgcgcctggcggcaagttacacggtgattggctattttctgccgttccatctgcaacggctggcgcaggattacccgcacattgatatccagttgtttgagtatgagcggcaggatattgaacaaggattggttgaccagaagctggatatggcactggtgctgactggcaatttacgccatcagtcgatttatgccgaaaccctgtttaattctacgcgccgcttgtggctgccatcgcggcatccgttatgtgaaaaatcgcacgtgacgctggaggatgtggccggggaacctttcattatgctcacggtggatgaagccgcagacagtgccatgcgctactgggaagaggccggagccagcccgagcgtcatcctgcgcaccagttcggtcgaggcggtgcgcagcatggtggctaatggttcggggattgctatcttatcggacctggtttatcgcccgtggtcgctggaagggcggcgcattgagacccgttcgctggtgaaccatgtgcacccgatgagcgtcggcctggcatggcgtcatgacgcccacttcaccccggcgatggcggcgctgcgcgagtatttccgcagcgcattcgtgacgcagcaaatcaatatggtgcgacgttaa

SEQ ID NO: 202078 - DNA, 768 bp, Klebsiella oxytoca
atgatgaaaacggtcgatatcaactccgatataggagaaagttttggctcatggataattggcgatgatgttgataatgaacttatgacgataatcagctccgccaatattgccaccgggtttcacgctggtgatcccagtattatgcgaaaaactgtcgagtcggccagaaaaaatggcgtagccattggcgcacatccgggatttaatgatttacaaggatttggtcgccgccatttatctattccgatggacgaactggttaacgacattatttaccaactgggtgcattgcgggaattcgcacgtttatactccttgccattgcagcatattaaaccgcacggcgcgttatatatgcacctggcgcgggatgaaacggcagcgcaatgttttgttgccgccctgcatcaactcgacgccggcctctatctttactgcatggcgggctccgccgtctggcaggcagcgcagcggctggagcatccggtagtcaccgagttttacgccgacagagagtatgacgatcaagggcttattgtcttcacccgcagtaccggacgtcttaatgtgcaggcgatcaccgagaaagtgttaatggcctgtctggaggggaaagtcaaaaccgttaccggcaataccatcccgattcgtttcgattctatttgtatccacagtgatacgcccggcgcactggaaattatcagctcggtaaaaatggcgctcattaatgcaggtataaacgtctgctcaccgggtatggtttaa

SEQ ID NO: 202079 - DNA, 252 bp, Klebsiella oxytoca; identical to SEQ ID NO: 130785

SEQ ID NO: 202080 - DNA, 1398 bp, Klebsiella oxytoca
atgacggggaaaataaaaaaattattggtcgctaaccgtggggaaatagcggtgcgtattattcgtgctgcgcaaacactggggatcccaacggtggcggcatgcagcgaggcggacagcgaaagccttgcggcaaaactggccgatgaggtgtgcattatcggcccggcacctgccgcgcgcagttatctcaacattaatgccttactggatgccgccgcgcaaaccggtgcaaatgcgatccaccctggctacggttttctgtcggaaaatgcccagttcgccgagcgggttgaacaggccgggtatattttcgtcggccccgacgcgcaaaccattcgcgtgatgggcgataaagccgcagcccgccgcacagcagcagaagccggtgtgccggtcgttcccggctcccgggtgctggaaacggtacaggcagcgcaagttcgcgccagccagatcggttatccctgcctgattaaagccgcagccggtggcggtggtcgtggtatccgcgtggtagaaaatgatgaggcactggcgcgggaattccccgttgcccagagcgaatcgaaagccgcttttggctcaagcgcagtctatctcgagcgttttatcgcccgcgcccgtcatgttgaagtgcaaatcctcggcgatggcgagcgggtgatccacctgttcgaccgcgagtgctcgttacagcgccgtcggcagaaaatctttgaggaagcgccctcgcctgccctgagtcctgtccagcgggccgcgctctgcgacagcgcagtgcaactggcgcggcacctacgctaccgcggggcaggcacgctggaatacctgtttgatgaaacgcgcggcgagttctggttcattgaaatgaatacccgtatccaggtggaacacccggtaaccgagatggtaacgggcatcgatctggtgcagtggatgttacgcattgccaacggtgaaccgctaacgttggcgcagtcggatgtgcacctgagcggcagcgcttgcgaaatgcgcattaacgccgaagaccccgacaagaacttcttcccttgccctggccggatagacgcagtggtgtggccgggtggcgaagggatccgtgtcgacagccatgtcttcagcggttacagcgttcccccgtggtatgactccttgctggcgaaggtaattgcctggggccccgatcgcgccgacgcgctggcccgcgcccgccaggcactcggcgggcttgaactacgtggcatcaaaaccaccgccccgctgcatcaatggctgctgcaacacccgcaattgcaggcgggagaatttaccaccaccacccttgagcagtggctggcggagcgcgacagtgcagccacgccgccgctacaggagaggcgctatggccaataa

SEQ ID NO: 202081 - DNA, 891 bp, Klebsiella oxytoca; identical to SEQ ID NO: 130783

SEQ ID NO: 202082 - DNA, 828 bp, Klebsiella oxytoca
atgaccatcaatgtgattaagcctggccttgccaccacggtacaggatgcagggcgtgaaggctattaccacctgggcattcccccctccggcgcattggatccgtattcaatgcagatggcgaacctgctggtgggtaacgcagccgatgatgcggtgctggagatgacgctgctcggcccggagttacatttttccaccgatgcgctgatcgcggtgtgcggcgcggcgatgacgccgatcgttgacaatcaacctgctgctgcgcacagcgcgctgtatatccacgccgggcaacatctgcgctttgccccggcccgccagggatgccgtggctatctggcgattgctggcggccttgatgtgccgcgcgtcctgggaagcggctcgacctatacgctgggggcgctggggggctttcaggggcggcgactggcagcggatgatgtgttgaacgtgcatccagtaaacgcagatcgcttccgccgcgaggggaacactgttcctgaggcattactgccggtgctggagaaatccgtcactctgcgactggtaccgggcctctatatccaccgactgacggatgccgcggtcgataccttctttgccgacgactggtatgtcagtaccgaagccgaccgcacgggctaccgtctgaaaggcgggcagccgctggcgtttaacccacggacgccaacgtttggcgcaggctctgatccctccaatattgtcgatgcctgctaccccattggttccgttcaggcaccgggtgggcttgagccaattgtcctgctgcgcgatgcggtgggcattgcattcactgcctga

SEQ ID NO: 202083 - DNA, 675 bp, Klebsiella oxytoca; identical to SEQ ID NO: 130781

SEQ ID NO: 202084 - DNA, 1245 bp, Klebsiella oxytoca
atgaatactcaaagtagtcagtccggaaaagagcaggctaatacgaatgcggccaatgtaaaagttgccagcccggaaaaaaaacactgggcacaaccgagtttctttaacgacaacgtgctgctcgatgcgctgatcaagcacatcctgggcctgatgccctatggcatgaccgacttcggcgaggtcatggacgtggtgcaccagctcaggggcagcgacgaagagacctgggtcagtgcctgggccgcgctggcgacccggctgcaagacagggccgaagatgcggacagaaataacaggtctgtcaccgcggccagtgcctaccttcgcgcttcgacgtactggcgctgcgcgttgctttatttcagcgacttcggggacaagcgtatgaaggagtacgcagtcgccagcgcatcgtgctacgagcgacacatctctctgtccggctatcccgccgaacgcatcgaaatcccctacgaaggcagcttccttcccggctatttctacagatcacctcatgctgacgagaaagccccgctactcatcgtcacaccgggccgggatacctgggccgaggacacccggtgggtttgcgaaggtgcgcttcagcggggcattcactgcctgacctacgatggccctggccaggggttcgcgctgcgtctgaacaacctgaccttccgccccgactgggagaaggttgtcagcccgctgattgacttcgcgctggagaagtttacggagatagacgcctccaatatcgcgctgatgggcctgagcttcggcggctatctggtgcctcgcgtggctgcgttcgacaaacgtatcaagctctgcatcactgatccgggcaacatcagttggggacgtcaaatcatcgcgcagctggagcgtttcgccgaccggccgctggccgagcttcctgatcagttacggaatctggtgagtgattacgcctggaagcatggcgtgcccaactcgatcaaagatgtagtgcaggccctccagccctatgacaactcagccatcctggaccaggtgacctgtgaaacgctggtgctggatggaaccggcgaggtcttccacggtgccaggccgttcttcgacgtcttgaattgccccaaggagtatctgttgttcgatgagtcttctacggcgcagtcgcactgccagataggaggctatgccacggccaccgaattcatcttcgaccggattgcagaccggcttgggcgcgggtaa

SEQ ID NO: 202085 - DNA, 1350 bp, Klebsiella oxytoca; identical to SEQ ID NO: 130778

SEQ ID NO: 202086 - DNA, 930 bp, Klebsiella oxytoca; identical to SEQ ID NO: 130777

SEQ ID NO: 202087 - DNA, 609 bp, Klebsiella oxytoca; identical to SEQ ID NO: 130776

SEQ ID NO: 202088 - DNA, 1437 bp, Klebsiella oxytoca; identical to SEQ ID NO: 130775

SEQ ID NO: 202089 - DNA, 618 bp, Klebsiella oxytoca
atgaaaagttaccgtttttctgggcttctcgtgccggtcttctttctgaatgcctgcgcgtctccgccagtacattactactcacttctcgcaccgtccggggaaacaataacgacgaagccaccggcccccttcatggttgatgtattgccggtcggtatcccgtcacagaacgatcagtcacaactggtcgtacgacagggcgccgctggtgccgttgtccttgataacgagcgctggactggcccgctggatgacgaaattcgtagtgccttatcgtcagtactgacgcatgagttggccacccaggatgtggccgggctgccacagacctctgccaggcctgtactcagaatcaaactccagttgcgtcggtttgatgcctggcccggacaacgggttcagcttgatgccgactggagtttgggattcgcgaatgaggcgggaaagccacggctggtctgccggggctatctggatgagcccgcgccaggaggctatccggaaatggttcaggcccaacaacgactggtcgctgcgttagccaggaggatagcgacagatgcacgagcctgggcacattctcgtcaggcagcttgcgtggacccacaggagtaa

SEQ ID NO: 202090 - DNA, 1041 bp, Klebsiella oxytoca; identical to SEQ ID NO: 130768

SEQ ID NO: 202091 - DNA, 963 bp, Klebsiella oxytoca
atggcaattttcggcaaatccagacgtttcaggaatcttgacgggagcgaagctcccggcaccgtggtgccggcatttcggatgctggtcgtcgatagtcttgcaggccggggccgtggtgtaccgagaaaggcttcggtgccgtgtgtggtgcccgatctcgtcgcgatcgccactccaccgggcacgggtgaaggcgcgcgcctgacctggatcgggcatgcgagctggctggtgcagatcgaagggaagtcgttcctcgtcgatccgatcttcggtgagcttgccctggggccaggggggcggaatgttccggctggcctgcgccccgaggatctgccatccatcgacgcggtgctgatcagtcacaaccactacgaccatctcgaccttccatccgtgaagagcgtcgatgcgccggtgatcgccggcctgggcatggcgtcgttcctcgcaaaaaaagggatttccgcaagcgagttggactggtggcagtccatcgacatcggccccgtgagggtgactttcgtgcccgcccagcactacagccgtcgcggcttgaccgacgtaaacgaaacgctgtggggcggattcattctcgagggagcttccgcctgcatctaccattcgggcgatacgggctactttgacgggttccgggaaatcggccgccgtttcccggtgatcgatgctgcacttttgcccatcggcgcctatgagccgtcctggttcatgcgccgccagcacatgaaccccgaggaggctgcccgggcctacagggatcttggtgccgggtgcttcttcgccatgcactgggggactttcaagctgacctacgagccgctagacgaaccgccggttcgcctggcagcagagtgggagcgccttggacttcccgcatcggaaaagcgggttcttgccgttggcgaaaccgcggacgtgtggcgttatccgaatgactaa

SEQ ID NO: 202092 - DNA, 693 bp, Klebsiella oxytoca
atgcccgaagccggacgcagtgaaccgacgtgggggattggcgttgccggtggcatacagtaccgcgtctaccgcgacttcgacgaccgcgttcgaggcttgccaatgattacctatgagaacaaatggattcaggtggccgggcctgtcctggacgtcaagcttccgtcggtcgggccggtgtcattcaggctgcgtggtcggtacatcggggaaggcttcgattcgggcgattccccatatttcgcgggcatgcgcgatcgagactccagtttctggctcggcgccgccgccatctggcgtaccggcattgccaatttctctgctgaagtgctcacggatgccatgagcaacagcggggggatgcggacgacgctgcagatcgacaggcgatttaccgcaggcacaatcgggctggccccgcggctggcggccgagtgggtggatggcgagtacgtggactattactacggcgtaaggtcagacgaggcacggagctggcgcccggcctacggcggtagttccgcgctcaataccgaaatcgggcttcgcgtggactggcagcccgtgtccagtcacaccatgttcctcgacatgggcgccaagcacatgggcagctcgatccgcaacagcccgctggtggaaaagagcacgcagtatggccttggtctcggctacctctatcggttctga

SEQ ID NO: 202093 - DNA, 1131 bp, Klebsiella oxytoca
atgagtcaggaacaagaacaccgtaaccagcccacccggggacacctccggcggcaccggatcgcgtatttcgtggggggagtggccctcgttgtgacggcgctggcgatagtcgtcggcaggggcgatacgacgctggaggaagcgactgccgcggcgacgccggcgctgaccgtcacatgcaccatcccccgggaagtctcgtggcccatagagatcagggcttcgggtgcgattgccgcatgggaagaagccagcatcggtgctcagattggtggttatcagctcatcgatgttcgcgtcaatgtcggcgatatcgtcaggaagggacagattatcgctcgttttgacccggatctgttgctggcggaacgcgcggaactgaaagcgaatgccgatcaggctgccgccaaccggcagcgcgcgctcgcgttgcaaagcagccgcgcgatgagtgaacaggacgtgctccagctggtgactcaatccaggaccgcggatgcgctgctcgctgccaatcagttgcggctgcgttacaccgacgtcactgcgccggacgatggtgtcatcagccacaggactgcaacgctcggcagcgtcgttacggtgggccaggaactgtttcgcatgattcgccgggggcgcctggagtggcgtggcgaactgaccgccgagcaactcgctcaggtcgagatcgggcagcaggtaacattagaccttcccgacggcaagacagcgaaggcgacggttcgccagacctcgccgattctggatagcacctctcgcctggccactgtttacgccgacatccaccctggaagcacggcacgggctggtatgtacgccaacggcaggctcggactcgggacagagccggcgctggtcgtgcccgccgagagcgttgtcatccgcgatgggcgcagccacgtcctggtgctggccgacaccagtgccacgtcccgcgtgtcgctgcgaagcgtcagcgtcggccggcgtaatggccgtgaggtcgaggtcaccgaggggcttggcaaggacgagcgtgttgttgttcggggagccggcttcctcaaggatcgcgatctggtccgggtttcgcaggggcagcctgctggggcgggcagaccatga

SEQ ID NO: 202094 - DNA, 591 bp, Klebsiella oxytoca; identical to SEQ ID NO: 130763

SEQ ID NO: 202095 - DNA, 1353 bp, Klebsiella oxytoca
atgacacaacaacgccatgaattatcagccgatcatgaggcgcatatcgcttctgcgattggcaaattcttccgccgcattatcccgatgctggcgctgatgcttattattaaccagattgatcgcgccaacattggcttcgtcaaagcccagctgcaaaccgatgccggaatcagcgcggcggccttcggcttaggcgcaggactgttctttatcggctatgcgttgtttgaagtgcccagcaatatgatgctgaagaagttcggcgcaagggtgtggctcacgcgcattatgatcacctggggaacggtggtggtacttaccggtttcgtcagcacgccaatgcatttttatatgctgcgtttcctgcttggcgtggcggaggcgggcttcttccctggcgtgctgttctattttcgtcagtgggtgcccaatgcctggcgaggccgcgcaaccgcaatggtattgagtgcaaccgcaagcgcgtttctattctctggcccgctcaccggcgcaatcctgatgatgcacgatgtcggcggacttgcgggttggaaatgggtcatgtttctggaaggcggcggatcgatagtgatcggcctgctggcggcgtttgtactggtatcgaagccagaaggggcgaaatggctcagcgacgcggaaaaacaggcgctcgcgcagcaactggcaattgaagacgcgacgcgtgacgagcgtgccgtcacacagggacgctggggattgatcaccgatcgcagccttatattctactgcctgatcttcttcaccatgaccatgaccggttacacgctggtgttctggttgccgcaaattatccagcgtattcaggggttcaacagtttcgaatccggactgctgaccgccatcccgtggctcttcgccattgttgcgctgtttctgctgggcaaagccaccgaccgttatcgcgataagctggagaaagggctgggcatcgccatgctgatcgccgcatgcggcacctttatggccacgcttggcacgccgtggtttggctttgtggcgatgattgtggcttgcatcggttccaaagtcagcgccgcgttcttctggccgatgccgcaaagcgaactgcccgtctcgatagcggcaccgggcattgcgatgatcaactctgtcggcaaccttggcggattcttcgcacccacggtgtttggctatctggagatgcacaccggcagcaccaccggcggcctctacgcgctgaccagcgtgtccgtggtgaccggcctgtggctgttgctgcgcaccaaacctgttccccccgctttaggtcacaaggagagacttcatgtcagacagtccagtcattaa

SEQ ID NO: 202096 - DNA, 1344 bp, Klebsiella oxytoca
atgtcagacagtccagtcattaataccatgcgcatcgtcccagttgctggttatgacagcatgcttttgaatatcggcggtgcccataactgcttcttcacgcgcattatcgtgatcctcaccgattctgccgggcataccggggtgggcgaaactccctgtcatgcctcgacgttgcagttgctggagcagtttcgcccgctgattgtaggcagctcgctgctgcgcctgaatgccacgctgagccagcttttcaacagtgaggcgcgtcagaagcacacttcacacaccaacgacatccacattccgcagatgaatccggagaagttttataacgctgcggcggcgattgaggccgcgctactagacctgcaaggcaagctgtttaacctgccggtcgccgatctgcttgccagcggcaaacagcgtgagcgtattccggtgctgggttatctgttctatatcgccgatcgcaagcgcaccacaatgcagtaccgctcgggcgataacgcggcggatggctggttccgtctgcgtcatgaggcggcaatggacagcgctggcgttcaacggctggcggaagcggcagtggagcagtacggctttcgtgacttcaagctaaaaggcggcgtgctggcaggcgaagcggaagtggaaacggttgaagcgctactggcgcggtttcccggcgcgcgcgtcactgtcgaccccaatgccagctggtcgctggatgaggcgattcgctttggtaaacagttggcaggaaaggtgccctatctggaagatccctgtggtgctgagcaagggtattcagggcgggaaacgcttgccgaattccgtcgcgccacgggcgtggcggtcgcgaccaatatgattgctaacgactggcgccaattacatcatgcgctgcaacttaacgccatcgacattccgcttgccgatccgcacttctggacgatgcgcaatgccaacgtgatagcgcaattgtgcaacgaatgggggctgaccaccggctgccactccaataatcattttgatatctcactggcaatggtggcgcacctgggcgcagcggcgcctggcgatcgtcagaccgcctttgatactcactggatttggcaggatggccagcaactgacgcatcaaccgccgcagatccgcgatggctatctggaattaccgccaggcccgggttttggcatcgaattgaatatggaacgcgtcgaggaggcgcatgcgctttacaacgcgctgccggataagaaccgaaacgatgcgctggggatgcaatttttaattgataactggcgctatgatgccaaacgtccgtcaatggttcgctaa

SEQ ID NO: 202097 - DNA, 132 bp, Klebsiella oxytoca; identical to SEQ ID NO: 130759

SEQ ID NO: 202098 - DNA, 522 bp, Klebsiella oxytoca
atgtcgccatccggtaggcatgaaaaatttaagccagctgcaccccggctcgcgctgcgctcagccgggctacgggtttatcgtcgtctgcggacaagtagcccggataagacgtttacgtcgccatccgggaataatgaaaagcttaagccagctgcaccccggctcgcgctgcgcttagccgggctacgggtttaccgtcgtctgcggacaagtagcccgggtaagacgtttatgtcgccatccgggaataatgaaaagcttaagccagctgcaccccggctcgcgctgcgctcagccgggctacgggtttatcgtcgtctgcggacaagtagcccggataagacgtttacgtcgccatccgggaggcatgaaaaatttaagccagctgcttcgtctctgcatctttgctgctgttcagcgccagcgagaccgccagcgtctgggccaggcacagcgaggccacctgcgagcggaaaccatcaacctgcgcctcgcgcaccacaaagcagacgtcgctga

SEQ ID NO: 202099 - DNA, 879 bp, Klebsiella oxytoca
atggttaagttaacgggcaatgaccggagtaggatacagcatctggagaaacgactacgggaggcattagataagaatttttatcatcctcctgccggggcaagtgaaaacgactatcgttcatatcagcaaaaagtcattatttatcttcggagtattaacacacacgaaaataatattaacgcctttctttctgaaacagatcgcctttattcagggatatttccatctgaaattgatacagagtggtatcgaaatgatccacgggcgagcttatggctggtttgtgaactctatgaggaactgaagaaaaataaagttgagcataatgccgattttttatcaccggaattattacagccaagccataatgtaagagttgatgccatgcgtagatgtattaatgactggcctttgtttttcaccacacaaaatgatttcatcaaagacagaggcattgaatgggctaaccttctggatggtcatgatttattcagagatgtaagatcaagtaaagtagatgttggttcatggctgaaagattatcttaaaaataatacatcaataggtttaaatcgaatttgcggtgagtctccagaagaagtcatggcctggtgctataccagttatttcatttggagaaaaaacaacctgcacttacctgattcagttgagttgtttgacaggaaatttaagggcgcgtgggcaacccagaaaaacagaaacaagaagaaagttgagctaaacctgatagctctgaatgtaaatataactcaaaaatcacgcgatattttagctgattactgcacatgcaaaggtgtatcaagagactcggctattgagcatgcaattaaaacggcactcagtaaatttaaatag

SEQ ID NO: 202100 - DNA, 1701 bp, Klebsiella oxytoca
ttggaaatatcatctctgagacttaaaggttttagaaactttaaagatgcacacataaattttaactcaaatactctggtcatcggtgctaatgatgttggcaaaagtaatatgttgcattcgctaagaatgctattagataaaagtgtatcagattcagaaattgaaccaaatgaacttgactttcatttagaaaatgggaagtcatgtgaagaaattgaaattatcattcattttaaagatatcaatgaagatgcagtactttcaattttgaaagggaatgtcagtgactcaggggaatcattcattaagtatattgcacaaaaatccgatctcagctataaactttttattggtgaatctttagagtctttacaagaaatcaactctcgctattatcttaaattcgttaatttaaaatatattcaatcacaacgagatttagagaggtttattcgtaaagaaaaaagacaactattaaaaatcgcacagcaatcattgagctcagaagaaagagaagaagatgacgatttgttaggagagataagtatagatttacattctattaatgataaaatatctcaacttatatatgtagaaagagctacaaaagatgtcaacgatgagctaaaaaaacttgcgcatcattactcagagtattctgtgcaactagatactggggcgattggaataaatgactttattgacaacctacaacttggagctaatacaaatggttctaatgttatgcttggaggagacgggcgaaacaatcaaatattattagcattatggaaagcgaaaagtattaaggaacatgatatcgagaacgaggttatcttctatgttatcgaagaacctgaagcacacctacatcctcaccaacaaagaaaactggctgaatatttgatatcagaacttccaggtcaaacgatcatttcatcccactcaccacaaatagctgtaaactttgaaccaggctcagtaataaggttgcttgaccgtgctggacacacagtagccgcaagcgaagggtgttctaaagatatttcagatggctgggaaggaatgagctatcggatgagtatattgccagcagaatcgtttttttcaaatggagttttcttaatcgaaggaccatcagaagttttattctaccattctttagccgaaaatttaaacattgatcttgattatttaaatatttcattggtttcagtggacggaatatcatttaaaatttacgtagctatactagatgctttagagatcccatgggtaatgcgaacggataacgatatatctaaacttaaagatcaagacaagtggcaatattcaggtataaaccgatgtttagatatagccggtttggaaaagtttgaacatagcgacatacaaatagtatctatagatactctgaccagcggtgattggcaaagagtttctgaagaaataaataaacgcggggtatatttatccaaagttgatttagaaactgatctggtaggagaattaagcgcaccaattttaaacgctttaggtaagaaaaatgaccaaggtgcgatagagtacttacaaaagaaaaaagcattaagaatgcgtgaacttcttaaagatataaaaaaagaccttcacaaacttaatgccggtgaattagttagaccgttaaaccatcttgtaaaaataattagaggtgaatga

SEQ ID NO: 202101 - DNA, 1626 bp, Klebsiella oxytoca
atgagtactttctcaccaacacctcagcaaacattagccatagactacactggaagcatggtaataacagcatgtccgggaagcggtaagactacggttataaaagaaaaaatcagaaatattaccgactgccttccagagcataaaggggtcattgcaattacattcacaaagaaagcaagttccgaactggaacgtagatgcaacgctgaagggcacaatgtaaaacatagtttctttggtactattgatagtttttgcttaaaggaaataattattccatttctttcaagggtatggggaggaacaccaacagaatgcaaagtcttaaagaaattggaatctccatataaccatttcatagaaagaaatttttctggcacaccatcagttattaatatcaatgaggaccctggatataaaaaactatacgatgagggaatactttggatggggtcattctcggctttagcattaaaaataattaatgaatcatctgctgcgaagcggtatatcaaagcaagatatagccatatattcatagatgagtatcaagattcatctttaactcagcatgagctatttctaaaaataaacgaacttggcttatgctccattgctgttggtgatgtttggcaatcaatctatgaatttagaggagggaattcggagcttcttttagaattggtaagtaatacagaatgctttaagcattttgagataaatttcaatcatagatgccacccatcaataagcaattatgcttcaagattgcttgagccatcctatattctactacctgcgaatgagataagagtatttaggagacgacttaatggaaatcttaaagatgctgctgttacgatttcctcttggatttcaggatggctgagtagtggcacatggaagttagaaaaagcaaatcaaatagccattttagcaagaaaagaaaaatcactaacattattctgctctggattaaacttaaacttcaggctttatgttgacacacctctagataaaattggtactgattgctcagatctatacaaagatctgttagcatacaagtacggctctataagtacagcacaagagtttattaacaaagtttttgatggggttatagtagatgataacactctgctcttactaagaaaaaaaataaaaacaattagaaatgaattaaaaaatgaagatttaatacacaagtttcatgacattgcatatattttagggataaattcaacagaacatactgatggagctgtaataagaacaatctctgacgatattttagtcaaacaattcaaaccactagatgataatgagatacaagtaatgacccttcataaatctaaaggactggaattcaaattagtatttcacctagatttagatgaatggtctttcccatttagagaatataacagcgaagacagatacacacctctatacccgacgcttcaacaagaacttaacctccactacgttggtataaccagagctgagaattgttgcatccttattaactcatctctcagagaaaatgcatctggggcctttaaaaacacagatgaatcatatttcttcaaattaccgcagttaaataacctgtatagttga

SEQ ID NO: 202102 - DNA, 567 bp, Klebsiella oxytoca
atgaaggaaattggtaaactagataaagaattagccaagctgacagccataattgacaaaaaagatgatattgattcaaagttggctatagaaaggcaaagcttaactgaattatcagggctgctggaagctgaacttactagcgtaacctctttcgaagataaattcatagataatttcaaagaatacactcgtagtttttatggtgttgagtacaaattcagtctcaatttagatcaagaaaagggcgaatgtaccccacatgtagatgatgtggagtcaaataacgaaggtgggttaaagagacttgaggttgttaccttcgatctagcatatatcaagaccgtttgtgataaaaaagctttgagacctaactttgtactacacgattctattgatgaaatcgatattcaacacgttcgcaaaatttttgatgagtcgattaaattgtcagggcaacatattgtatctatgctgtctgataaattaataaaagaagattaccagaaatataatcgttatattattcttgaattatctcaagataataaattttttaagctttaa

SEQ ID NO: 202103 - DNA, 1056 bp, Klebsiella oxytoca
atgaaagagagtctgtcgaatcgcctcacaccgctgccctttcctgccctcacgcccgacacctgtcgggatgagctgacggcgtgcgcgcggcgcatcgcgcgtaacatgggtctgtacggcgagaaattcccctcagcctgcacgatccataatcgctacgttctgcaagagaataacgactggaccaacggattctggaccgggatgcaggcaatggcctgggagttcagcggcgatcgcgcctacctggacggcgttgaacgcaacgtggcgagttttaaagcccgcctggcggcgcaccacgttctcgatcaccacgatatcggcttcctttatagcctgtcggcagtcgcgtactggaaactgacggagcgcgaagcgctaaccccgcttattctggcggcggccgatctgctggtaaaccgttttcaccacagcgccggttttatccaggcctgggggacgcttaacgacccgcaggagtaccggcttattatcgattcattgattaaccttcccctgctccacgtggcggcaaagatcagcggtgcgccttcgtacgggaaaacctttcagggctacagcgataactcctgctgggcccgcggccaggcgtgggccattctcggcatcccgcttcactggtcggccaccggcgaaaccgaccactacgaacggtggcagcaggcctgcgagtatttcttccgctacctgccggaggacggcgttcccgcctgggatctgctgctggctgcagatccggacgccccgaaagacagctccgcgctggcgattgcgatctgcggcctgctggaagcgcataagcactttccggatgccggttaccagaaactggcgcgtcaatgtctgctggcattaatgcgcggcgcgtctgcccgcgatgatgatgtctgcgaaggcttacttaaacacggtgtttacgcctatgccctcggtaaaggcatcgatgaatgtaatctctggggagattacttctatatggaagcgttataccgagtctaccaaccacaatggtcaggatactggttatga

SEQ ID NO: 202104 - DNA, 978 bp, Klebsiella oxytoca
atgaagctgtacataactggaaacgggtttgatttacaccatggtcttgataccagctatttttcttttgcctattttctgcgttcgcgccagagggattcgtacaacaacttagttgagtttgttggtttcacggacctgcctgaaaatatggataaactgaataaggatgaacatcctctgtggtgtgaatttgaaagtaatctggcagggttagattctcaggccgtactggatgcatttaccgattatctcccaaatctgggtgacccagattttcgtgatagagactggcatgcatttgatattgaaatgcagcgaatccttgaaaatttgactgatggtcttttcacccagtttacgtcgtttatttcccaagtgaaatatccagagcttaccgctgataaaacactgcaactatgcaacaacgccctatttataaattttaattataccagaactattgagtactattatggcataaaaagtagccagattctttacatccacggcaatgcatccttacctggagataggcttattcttggacatggtattgatccagaaaatttcaaagaacatcctcaagaaccgcccacggacgtaacggatgaggagctggaacagtggtatcagcacatgtctgataattacgattttgcatatgaaagcggaaaacagactctgaatcggtactttacacattcattcaaaaatacagaggaagtgatgtatgcaggccaagcatttttctctcaactcaacgcggtaaacgaggtgatcattgttggacactctttatcggcggtcgacatgccttacttcgctgccattaaacaacacgtgcagcccaattcgacctggacagcgacatggttccttgaaaaagaacgtgaacaacacctacatgcgttgcagagcataggcattgaacatcccctaattgtgccagtctgtagcctgctggtacgatcgtga

SEQ ID NO: 202105 - DNA, 717 bp, Klebsiella oxytoca
atgggtattataattacttgtccaagatgcaacacattaagttggctcaaacttccagaaaacagaacgggttgggatgatgaaattttattagcctgtccgtccgcttgcggttatggtgggttcgtcgatacattcaaacccaaggccactaaacgagatgatgcgggggatttcgatatagatactatatgcaaaaaatataaaacaccttacgctttcaatggttatgtacacagatgccctgtttgttatatcgaaaaccctagagaaatattggaatttattgtatgcaaagctgaaaaagccattaaagaaaatcattcgcgagacgaattaatacaattattatctaatattgtcagcgctttcgatggtgtaatgaggcggtgttatgagattcatatggccaataaaaacattgtcaactataaaacaccatcttttcagaatataaccagtgtaaaagataaattggctgatttaattagaattgagagtacagttgatgattggcacaagtttgtaaaggtttttcaaaaaagacatctatttgtccattctttaggggttgttgaccaaaagtatattgataaaaccggagatacaactgtttcagttggaaaacaggtgtccttgaattcagaagaggtgctttttttggcaaaaaacactttaaaaatcgtagtcgttttttttgcacaccacttatcttaa

SEQ ID NO: 202106 - DNA, 828 bp, Klebsiella oxytoca
atgggaagcacaaaagattactggttcgatcaaatggaaaaccgcaggagtaaaagactagcaaatttattgggtattaccgaagaagaacttgagcttctctcttatgaaatagaaagtgatcaaagtaatgatggcttcgaattcggatacattgttaaattcgacgaagataatgacccgtcaataatggagaaaataaatgggttatctacaggctcatatataagcttatctctatgggagctagaagaacctgaaaaagatgagcttgagtgggatgttcagaattctgctcagcttgagacattcaataaacatttagctccaatatcaaaaattcttgatgttaatgttgaaaatgaagttcagtttagtcttttggttatgcttcatgctcatatagtttctgctctagagggatttctagcctcaacgttcatttataatgtcacaaactctgatttcttaacaagaaagcttattgaaacagaccctgaatttggtattcgtaaatttacaattaatgagatttatgcccagcatagcaatataaaagccacggtgggccaatacttaaagaacattattttccacgacatgaaaaaggttaaaccaatgtatacaaaagtgctctcatatgattttggtgaaatagcatggcttttcaaagctatcatcacaaggcacgattgcgttcatagggctggttacgataaagaaggaaatgcagtacctgtatcaattgaaagtgttaatgaacttattaaaagctgtcgaaacttggctgaagccgttgatgctcatgtacagaaaatatgtagctaa

SEQ ID NO: 202107 - DNA, 534 bp, Klebsiella oxytoca
atggaacaggatacggaatttagctaccccaatataatcgatttctttggtacaactctttttcacctttgtcacttcacaaaaatagaccttcataattatgccgcatacaataaatatgctgaaaataatattgcacaaagtaatatgaaagttagtgaagaagttcaaaaaaagttagatcgtaatgacataaatcttcacgaagacattatcgacagttacagtcaggtgtttcaggaattcggtgatatttacccatccatgcaccgtaaggcaatggtgataacactgtataatttttcagaacatcagatcaaaacattgtgcacagaaattaataaattattacctaaagacatgagtgatgagtattctttcaaagaaataagcattaaaaatcatcgtaaatttctaaggccagaagctggattttatattaaccaaggtaacatactttggagactctgggaagatatgctgaaagtggaacaaatcagacatgttctggttcactccgaagggaagatataa

SEQ ID NO: 202108 - DNA, 2679 bp, Klebsiella oxytoca
gtgaaaggctcacagtggaataaatgggatttacacatccacagtccgatgacttggctggccaataattttacttctgacgatattgaaggatatgttcgtaaactcggggagcaacagttatccctagttgccgttacgaactatttttacttcaagcagaacgaactggaaaccatccgggatgaaatctccaggcagggtttggagatcacggttctcgggaatgttgaatttaggattgaccagcagaacaagaataacgaatggataaacgttcatatcctattttcagacaaactgagtacagaacgcattaatgacaccctgtcacgtttagctcttaagctgacggatggtgacaggaaaaccatttactgctgcgagcgaagcgtgaaagaaagtggtcatggtgttgataccattatggtcgattttagccagctacttgaccatctgaactcaacccttagcccctgtcaggattaccttgtcgctgtctgcccgaacggatatggtggatatcgcccagatgcaagcggacgttcccaggcagccgcaaccgaaatagatcgccacgggcagatcatttttggcggattacgtgaccgggattatttcctgaaaacagatcgttacgacggagcaagcatccggcctgtgttccagtgttctgacgcacattgtacggaacacattggacggggttctagctgggtgaaggctttaccaacatttgaagggctgcgccaagccatactggagcctgaaggacgcttggcgttagatattatatcgcctgctatgcaactaccgaaagtgcacttcagccgccttgaagtggaaggccctatttttaacggccagagtatttgtttcagaaaatcgtctattccccttaatccggatatggtggccattattggcggccgcggaacgggaaaaagtctcttactggacgctgtacgttcgcagtttgtcggtgcggccagccgtggcagtgagatccgtgatgttcatgttcagcatctagctgtagagcttgataaagctaacggtgaaaagatgctgtttgaaagtagaaacgagggatacgaatatctccatgtctcacagggtgagataaagcttatctgtcagcatccagggctgatcagcgatgaaatcaagaaaatgttacgtctatctgtggaagatattccagaggagctcagaaaagatctagttgctaatctgggcgagtatcgtgcatttcgcgaataccacagcttccgtgatgagcaacaacaacccgtaaataccgagagttatcatcttgggacgataaaggctgctcaggacaaaatctctaccctgactagcgctaagaacaagctcttgatcgagcaatttcaagccaacagtgcccgtggtacggctctgaccaaggcactcgcaagcgcaagaaccctgcttcgtgagtcagcagaagcggagaatagtctgaatacgcggattcaggaggtgaatgccgccagtatgaacactattaccatcccaccacttgatttatcctcacacaaaacctacgtttcggcccatatcgctgtgctggagaaacaaaatggacagcttgaggaggaaaataaaggcattgttattgccttccgggaacaagggatcgaacaggatatttcaggtgttctggaaaagattcgcggttaccaagaacagattcagcttgccaccctgcgtcagggagaaattcaacagcgtgtacagcaggctaaactaggaacagaattgagagcaaagctgtcaacagactttgtacgccatctattgggcaaaaaagaacgaatcgatagtacctttgcgtccctgacagataaaacgcatctgacgcttacccagcaggcgctaatacgagaaatactaacgaatatccgcatcttcgggcagcctcattttgacatacccgctttttacagcgggatacttgaacgccttaaccggggaaagttccgtgtttctggcgagttatctgccgaggaaaaactccggacggtctttggtgtttcaagtattacggattttcaggcccttattgccgggcaggaaatgattacattacccgagaaaccggacgaaaaaatcaccatcgaaacatttttgtggaaaagtgagtatttcaattcccaagggccttttgcactacttgcgtttctcttcaacccagagcatatttcaaaatatctgacggtaagggctgaatttgaatacaaagggaaaacggtcgaaaagctatccgctgggcaacggggaacgttttacgtttgcctcaagctggctactgatgcgttcggttctccctttgttttcgaccagcctgaggatgacctcgataatgacttcataatgcacaatctcgtacctttgttccgcaagataaaacagtatcgtcaggtgatcattgttactcataatgccaatctggtagttaactgcgatgcagagcaggtgattatcgccagtaacactaatgaggtgatcagttatcgttgcggagcgctagaatatggcgatcatggggaggcaaacagtatgcgaaaagctatatgtgatgttcttgagggggggcgggccgcatttgaggctcgtgagcagaaatacggcatgtcgtggctgagccctatctga

SEQ ID NO: 202109 - DNA, 1005 bp, Klebsiella oxytoca
atgtatgacattttgactcatggtgactaccttgacgtactgcgcagtatgcccggcaactctgcggacagcatcgtgaccgacccgccctatggtattgaattcatggggaaaacatgggactatgatgttccctcacaagccatctgggaagaatgtctgcgagtactcaagcctggtggtcatctgctgtccttcgcgggatcccgtactcaacaccggatggcagcgcgtattgaagatgcgggatttgaaatacgtgacatgatcgtatttctttacgagaccagtaatgctgccagggtactcattgaaagtttatcgccggagcagctcaaattgctggacgcgacatttggaaatgacggaatgctgggctggatatacggttcgggttttcctaaatctcaccacgcgttaaagcccgcactggagccgattacccttgcccgtaagccattcatggggtctaaagcttcgaacgtatgcgtgtatggtaccggcgcactgaacatcagcgaatgccggatccctctggcagaaggggaatcaccctatgattatccaaatgggccgggtggctctgagcccaaccatatgtggcgaggcagaagtaaaggtgatggaagtatcgccagacaaggaaatccaaatggtcgctggcctgccaatctgatccatgatggcagtgatgcagtatttgcgatgttcccgtatacccttcagcaggtggaaattaatagcgccagtcggttcttttattgtgcgaaagccagcaaaaaggaccgtgatgagggtaacaatcatatgtgtgtaaagcccacagcactgatgcgttacctctgccgtctggttactcccacgggcggcactgtacttgatccctttatggggagtggaagtaccggcaaagctgcggcgatggaaggattctgttttatcggtattgctcgcaggcgtattgcggcagcacgtagtacaatgattcgctctgatgatgcataa

SEQ ID NO: 202110 - DNA, 804 bp, Klebsiella oxytoca
atgcttattcataatgttgctgaaagaaatgaagccgcgaatcggagaatgcgggcattgctgtatttcctcaaggaagaaacgttctctgatttccagaccttaaaaagagttgtcgactataaagggaaacataaccatgcgatgtataaactgctcaataaagcggttgagatgggcctcctgattaaacacgaatatccggtattgaccggtaaaaaatcattgtgggggatcaccatgcagggactggcaatggtggttagcgttaatgacaaggttttccctgcctattttgagccgggcaaactcaaaaactcgacgctggaacatcgcctgttaaaccagcgggtcaggatcgcccttgaagaaaaaggcggcacaggctggcttaatggcgaccggggagagtttatggcgcggtacccaggtatccggcaccgaccggacggcattattaccttaatcagcggtgccatcgttgcagtggaaacagagcgctcaatgaaaacccgcgcccgttacatcagcattattaacagtcatcttgctgccagcgatgccggacgctggcactatgcgatgtatgttatgccggatgataaaaccaaagaatcactggtcaggctgtttgacagcatcaggacggtgatgagaaacagtgttcccgtttcgtttgacgcgaagaaccgcgagatgtttctcttccgcacccttgatgaactggaaaatagtgtcagtgataaacagggtggcccctcttcatcagttgctgacgatgacgggagggaacgccatgtatga

SEQ ID NO: 202111 - DNA, 801 bp, Klebsiella oxytoca
atgtttgctcgctctctccgagagactgagcttttcgaccatgcagatacacttgggattaacgttggtgaagccttcaatgaggcatttgccttactcagacaaacaggcttgcggaatgagtatgtttatcgttctgcactcacacacaatcttttgcttgggaaacattcattaagaactgcctgtatgcttaatgaattcagaatcggctcttgcaaagctgatctcatcattctgaacggaactggaacggtttacgaaataaaatccgaaagggattccttaagccgtctacataaccaaataacaaactaccgtaaagcatttgggaaaatctatgtgatagcaggttcagaacatatagatgatgtgctgaaaacaactgaatctaccattggggtattgagtttaacccgatggaatcgaatttctactataagagaagctgaagaagtcttagactttttatgccctgtaacaatctttgagtcattaagaattaatgaagcgaaaattattgctgccgagttaggtataaaaatccctgacttaccgaatacccaaatgcatggtttcttaaaagaagaatttagtggtctaccacctgtttctgtatataatttaatgctaaaaactttaaaggaaagcagaagtttactttctttaagagagttgattcttaacttaccaaagtctttacaaccagcggcactttctattcagcttcgctctaaggatcatgagcgattaattaatactatgcagcttcctcttaatgaggcattgttatgggagtga

SEQ ID NO: 202112 - DNA, 933 bp, Klebsiella oxytoca
atgtattatccttattttcgtgggaaacaatttgaactgttagctattagagacactgctaatgtaatggctgaagcaggttttactccaattatagagcctgtgagagaggctctcaatggtcttgagcgaacactgaaaacaataaaagaaaatgatggtaaggctattgtcatcattaatccggcatgtggtgatcactcttctgatggacaaagtatagctcaattattaaaaaatgaatttagtaattataaaaagatttctgtaggaatactccttgataagagtatgactattgctaaggttgataatctccttcattcagatctcgttcatgaagtcacctttatccatgctgggtttgatgagccaaaagctttacatgaaagatttggggatggatacaaacatgtatttatttcaaactattgttctaaagcttatcgaaaacatttttcgggttcagaaagaattttaattaaagatggctttgaaaaaagacgaaatgctgaccatcccgattctgagttcttttcagatcttcatcttaactatgaagaagagggtatgaatggttttggtgatttcttaattgttggtgatgagtttagtgagtccggtggccctgcgtatgctgttgctattcatctaacttacattaatacgaagcatgaagatgaaatgtacatctatcattttgtttcgacaacacgtgatacaccgacagacccagcaggtaagttcgcacagtcccttgataaattaatggctgctttaaattcaggaaaatccatgttgcttgaaacgtcggctatcaaagaatttagacgattacataatccgagccacttccctggtttaggcacagttaaaaaattgtctatgattcaccatatagaaaccctagccaatttcatggatggtaaataa

SEQ ID NO: 202113 - DNA, 1026 bp, Klebsiella oxytoca
atggacaagtactgctgtgcgagctgttttggggataatggtttaaagaaaaatatcataccttcactttccccagattttggcgattgttcgtattgtggtaccaaaggtattgagattattgaacctcatgctttattcgaacactttagttcattgataaatatctatgaaaatcatccggatggtaagagtctagttgcacatttgaaagaggattggaagctattttcacatcctcttttagatgaggctcatgccaaagagttattaggtgatatacttgatgatgggaatattgttagaaaaaccttcgtgctttctgatgattataagagtgaatctctcgcattatgggatcatctttgtcaggaactcatgtatgaaaatagatattttctcaataaatcacttgatacagataggcttggcgagttattaagtttccttgctttagatgatttttctaaaacttggtatcgagcccgtatttatgcagatgatgctgcttttacaatagaccaaatgggggctccccccaagagatcagttagtcatgggagagcaaatccgacaggtataccgtatttatatcttggatctaaaccagatacagctttgtctgaaattcgacctcatacaggtgacagagcttgtgtcgcagagtttactctaaaagataacctgactctaatcgacctaagaaaccctcgtgaaaccgtttcaccgtttttattaaccgatccaggtgaaatgggtaaaatgcttgcagatataccttttcttgaacgacttggttatgaactaacaagacctgtattacctaaaagtgcagcccttgattatattccaagtcaatatatatgcgaatttattaagaaaacaggttttcatggagtactttatagaagttctgtaagtgaaggaatcaatcttgctctttttgatccggtaaatgcgactggaggcaatgtaagcatttatgatatagataaagtcgaggttagtgtaagcaaacaagattaa

SEQ ID NO: 202114 - DNA, 426 bp, Klebsiella oxytoca
atggacaaaaaaatcatcaatctagagtttactcttgaagagcaacttatcattataattgataaatatatatcaaaacgaaatcagccgaacgataaaagtttttctcaccaattatatttggtgttcgttggttatcatttaaagtatttctatcctaaacaaaaatatactcgttctaatagaaatatagacaacattatgacgatgttcagtaccgtatacaaatgtcttacaagtaccttgttacagcgattaaacaataaggaggctgttatcagggagctaaattctctcgttaactatattgataacaatcaagaaaaagctgaagaaatctatgctactgtcagagcacaatatgaaatgaaagtaattgagggagagttaacccatgaagttcgcgtaagagccgtcaggttatag

SEQ ID NO: 202115 - DNA, 1176 bp, Klebsiella oxytoca
atgaagggtatgcagaagatcaaaaggggtaagagcttcgctggtgttgttcgttatgtattgcaaccgggagcatatcataaaagcgatccagtcgtaatcgggggcaatatgctgggtggctccgctcttgaactgattgctgaatttgatggcaccaaacagcttcggccagatgtccagaaaccggtatggcacaactcgcttcgcttacctgatactgaatcattatcgaatgaccaatgggtaaccatagctgacgactacatgaagaggatggggttcagtgatactcatctccgttgctatgtcttacatgacgacgaaggccagcacatacacattatcgccagcagaatcgacatagccggtgggaagctctacttgggtaggaacgaaaaccttataagcacacggatcattagtgaactcgaaatcgctcatggtctgacagtgaccaagacagcaccatccctctcaaatacacaaccgaagcggaagagaatctctcgaaacgaacagaagctatcagaacggactggtgttccctgtcccaagaaatcccttcaacagatcattgataaaagtttggctgataagcctgaccttttaacttttatcaagaggctggaagaagctgaagtatcctggaaggccaatattgcctctactggtaaaatgaacggcttttctttcgaatacacaggaatagctttcaaagcttcgcaattgggtaagagctacagttgggcaaatcttagtaaccgactcaactacaaccccgaccacttaggagctttacgaaccaacacaccggcaaaagaccaccctgctcctgctcctgctcctgctcctgctcctgctcctgctcctgctcctgctcctgcaaccattttaaaaaccactgagagaaaggaaagtatcagtgaaaaaattgctaaactcgaactgcgactcagaaaagacagacgaaacgagatcgttgagaagattctccaaaagaatgcggttaaccagcaaaagcatctcaggcttatcggctggcttccatttcttagaaggcttgtagagcttctccgaagctatggtaagagcattcttcacaagcccctccctggattctcaaatctctatgtaacccgacctttacataaagaaaggaaaattcatttataa

SEQ ID NO: 202116 - DNA, 369 bp, Klebsiella oxytoca
atgattaaacagaagaaattattgagaacttactgtgtcagtgttcgtcttaacgatgatgaattgactaagcttaaccatttaaggaaaaatcattcaaaaggggaatggcttcgcatgtcttcccttcaaaagttgcctcctgttataccagcgattaataccgaagcatggaaagccttaactatcatttcgcaaaagctaaatcgaattgcaacccatatagattgtaaaagcaaagatagccagcttactcatacagagcttttcgccgtgaaacgacaactaaaagagcttcgccagcatctgctgaatgctgacatatggagcaaaccctatgaagggtatgcagaagatcaaaaggggtaa

SEQ ID NO: 202117 - DNA, 873 bp, Klebsiella oxytoca
atgaaaataaaaaaaccaaatgatgttgtttttgttgataatataactcaaagaacacttcttgaagcagtatgctcgaacagaagtggtgcattaaaaactttcttttcgcaaaataaagacatcttcctcgacgacaatgatagattttatacagaattttctaattctaacttttacggaaacagtcaattagattataaaacagtacaaaaatcacttaataatttatataaaagtgcagcaggtgataacgagcgtgaatatataggaaagatgagaagactgcatcgtcaattgttatgcccatattgcttacgttcaaattgtagaacactagaccattactttgacaaggtttcctattcagaattatccctaaacatatggaacttagtacctacatgtggtgattgtaactttaaaaaacttagtactcgtattaccagttcttctcaaaggtttatccatccttattttgatgaattttatgataaaaatgatagctattttttaaaattaataaccactgagactgataatgcaattttggttaattttgacttcaccgccaatcccaggttggctaacccaagtgttagaagtgttataaactggcacattcaggaacttgaaatcaccattgataatgcagatatgtttagaaaagatttcgagtattacattaataaaacaaggaaaaagaatctgcaaaataatcaagaaattcaagatttcatcaatgaagaaatgggttatgaacgcgaattttcatggcgaggagttatgctaaattcgctaagtagtgaccaagaaaattttcgaatttttatcgagctagtttacagtgcaaaatacattttaaatgtttag

SEQ ID NO: 202118 - DNA, 384 bp, Klebsiella oxytoca
atgaacgacgatgaaattgatgtgtatgttgtaagcgcttttagcgccaaagcgataaaagaagccgtgtcagatgagaacctactcgatgctgcaaaagagatttttagcgggctcattgatggcaacctttcaggtagcttggtcaaaaagcgcatccccagcggtaaaaggaatactgggaaaagtgatgggaatcgagcgattgtttcgataaaaagaggtaagaaattgttttacctgtacattttttccaagaaagaaaaagacaacataacaaagaaagagttgaaagccttgaaggagttcgggaatttgatgttctcgttctcagatgagaaactccaagaaatggtatccagcggggtactaaggaagttgtaa

SEQ ID NO: 202119 - DNA, 303 bp, Klebsiella oxytoca
atgagtgaaatactatcttcaatacatagcaatgtagcactaatgcacgaacatggatttgttgatagtgtgacgatgcgtcagtttgatgcatcgtgccttgagccggtaaaaacctatgaacctagtgatattagagctctgagagagaaagctaaggttagtcagtctgtgtttgctgtttatctgaacgtatcgactaaagctgttcaaaagtgggagcgaggcgattctgcacccaattcttcggcgatgaaactgttgtatcttgtggagaaaaagggactggcaatattaagttag

SEQ ID NO: 202120 - DNA, 390 bp, Klebsiella oxytoca
gtggttttgccgcccttgaccgtcagcgtctcgccgagctttttggtcaccgtgccggtattaccggcaaaggtcagcggggtgttagccaggttcgtgatgttggtggtgttggtcgccacgttctggttggtggcgtacagctggctgccgttgactccgtcggtgctggtgctgctcaacgtccccgccgccacgttggtgactttcttgctgcccgcgttcacgccagtggtggtcacgcttggcccgccggtaatagtcagtccggaactgttaatagtggtggtgccgccgataatcgccgaggtaaaaaccggattctccgccatctgtacgaccagattaccgttcgcgtctactaccgtgttcaggttagcgtccgagtag

SEQ ID NO: 202121 - DNA, 2418 bp, Klebsiella oxytoca
atgtccacaatgaaacctgatgtagtctggtatcctccgcagtttccaggtaacggacgattacccacacaagcggcgctagtcggacaaaactgtaagcagcaggacagccatgaactggcttaccgcaatgaactttgccaggcggcgggtcgactggtggaaccgccgtgctgtaagacgctgcatatcagcctgtttttcgacgggaccggtaataatctgaacaacgatctttatatcgacgttcctaaacatcccaccaatattgcccgtctttttcgcgcaaccattggccagggttacgccggtggcgtccagggacatgccggggaactggtggatatggaagggacgtcgggtaataaatattacaagtactacatccctggcgtcggcaccccctttccggaagtgtcggatctgaattacagcacgcccggcatggcctttgccacctatggcgaagaacgaattaactgggcgcttattcgcattatcgatgccttaagacgcacgctgggcaaacctgctttatccgataatgaaagctggaaagcggtgaaagacatgacctctcgtacagaagatttcgggacttcaggtcaataccgacgtcaaatagtattccggcggcttttaaaagatctggaacccgacctgaagctggcgctgaatcagcctgaacccggtaaaccgaaactgctggggattaagctgtatgtatacggtttttcacgcggagcggcggcggcaagggcttttgtcaactggctggttgaactgctgcccaattctttcagaaaaggaacgaagccggatctctgtctgacgctggaaggcgctaactggaaggtgccgctgagcgtcgaatttctgggattgctggatacggtggcctctgttggcgtggcgcatatcgcccctcttgcggaaggacatatgggctgggccgataatgcaatggagctgcccgataacggcctgattaaaaattgcgtgcatctggtttctgcccacgagcagcggctctgttttcctctggattcgatttgccgccatgacggaatctatccgtcctatgccagagagatggtgtatcccggtatgcattcggatattggtggtggttatatgcccggtgaacaggggaaagcaacggcggatgacgacggctatttattatcgcagattgccttgcatgatttatatgctacagcatttgatgctggtgctcctctgaaagttcctgaagattcacttccctcaacaatatcttcagataattggcgtgttatgccaggtaacttaatttcagaatttatggttgctgatacattgataaatagtttcaacgcctggcgtgaattaacattaaaccttccctcatctctggaaaaaataaatgatgagaatgctgccagatacgaacctgtacgtgcatcagtcaacgttattaccgcgctggaagttcaaatcacctggataaccgcctggcgtatcggtcgctatgcgagtggcaactatacaaaacagcggttttatattgatgcagccgcaaacggcatggataaagacagcgaccccaaaataagagaggcttccgaacaggtgcgcgatataaaacaacggaaagtagagaaaacacggcgtaaaatgcaggagtctgctgaaaaagatacctatatcccctatccgccggggccgaaagattttgatcccgcgttggggcagacgcagttgcgccaggctgcggaagaatttcgcgaggactatcagctaaaacagcgtgccgtaaccggaaactggatatataagggaatggataaactgagtaacctggtttataccttcagcgatgatgatgtaagtggcgaatatataaagataaaaaaagaggccaatgaaaaatattcaatgctctttcctcctcagggggaaagcagcaacgagcaacaacccggagggctggtcagagcattatttgacgatcaggttcatgattccagggcctggtttatgcaggcgacgcttgatgccagggaaccgtggggaagttactttttataccggatgatctatttcggtgagctgatgagtaaaaatattacacctcttgtgaaatacgggcgctttattgaggggagatttaaagatacggttcctggcgttgattttattatcgagcgagctgagaaaggaggggctattatgggtgaaaactccccgcctgaaataaaacaaaaaatatccgtggtaaacagctctgcggatattccccttaccatgttgtccgatcttccccttcaacctgcgctgacaaacgagccagcggaattaatcgcctggcagcaacaatcgcgggaagcggaaaaactggccagtacgaaagcggcgatagcctcactgtggccataa

SEQ ID NO: 202122 - DNA, 228 bp, Klebsiella oxytoca
atgcaggatccttcattgcgaacgtatcggatcgcatttctgggaagcaatgccagcggcaatctgccgatgtttacccgggtgcaggccacgaccggaaaacgggcgataaaagcgtttattgaacgctgtgaacccgtcaaaggctggtttctgggcgcacctgaagacattaccgatcaagttaagaaggaggaagaagaggcgggaagcaaaccgcaggtatga

SEQ ID NO: 202123 - DNA, 231 bp, Klebsiella oxytoca; identical to SEQ ID NO: 98230

SEQ ID NO: 202124 - DNA, 408 bp, Klebsiella oxytoca; identical to SEQ ID NO: 198086

SEQ ID NO: 202125 - DNA, 891 bp, Klebsiella oxytoca
atgaaaaattcatttaaaatctatgctttgatgactgttaaaaatgaagcagatatagttattgaagcattagaacatgcatctttatgggccgataagatctttgttatagacaataatagttcggatagtacattttcccttatcagagaatatgcaaatgtcaatccaaagattattatttgggggcaatatggtggtgctttttatctgggcttgcgtcaggttttattcaaagattatagagaaatcgcgaaagagggggattggtggtgtcgtcttgatggggatgagttttatattgatgatccacgagattttctctccgctattccaggcaattttgatcatgtctataatgcttcatttcaatattatttcacctacgatgattatataaatgaaaaaaatagtttatcatcggaaatcagtgtcttaaaaaggctggaatggtataaatgcaatcattctgagataaggtttgttaagcataccaatctcatttgctggcctcaattacttgagtggccctgtaatttaagatatccatattcaaaaagaatacgtttgaaacactatcaatacagaagcattaatcaaattgatgcaagacttgctttgagaaatgcccctgattcaggaacttctttcacacatgaaaaggtatctgttgaacagtggtactctaaaagaaaatttactgctcctgattctgaagaattaaagttatatcgagtagtaaataatgatgacttaacaaatagcagtgattttaaatataatgatgaagagcttcctcctgttaggccttataattataagaaaaaaatacgaaattttatgattaacttttatatgagttttatgaataagtatttcttcaaaatttag

SEQ ID NO: 202126 - DNA, 1356 bp, Klebsiella oxytoca
gtgtggggttctctctgcattgagggtgatggtgaagatttctctaaactcatccagaaagcgggagcgactggcgatgcggttataatccagcacctgcaggatgtgaacgacaccgtccagttttcggggttttctgtcgagaccgagaaacgcttcatcctgaataacacagcgattatcgttgatggcacggcgctcataccgtcagtgggtgggcaaattccacggcgcacaaaggggcggggcattttccgcaatctgcgcgtgtgcggtacggctgaaaaccgaagtgaaaatatcgggttcggcgtggggttcgatttgcgttcgctcggctggtacgatatggagagcatcaacgtaaatggctgtgcagaactcggtacggaatataaatcgctcggtattggccttctccagcgcggcggtggttggccagtagaaattaatcagagccgactccggttttataacctcgaatatgcctggtactgccctgactatgttgaaggtctgtttctggataaataccagtttgtgaatgtccgtaacggcattgtcggcggggtgcatgatgatgtctggtcgctcgacccggcgggtaagctgggtatgtatcagccctttatcgggccgggacacattaacgcgtccgatgtggcaatctacatcaataacgtcagttacggcacggtaacggacgtgtttgccatgatgaacgataaaggcgtggcgacgtcagtgaatgccgcgcatctgcgcggtggtatcagaaacagtgtacataacctgaatatcctgcactacagcacgaacaccgggttaagtcgtaagtcactcattctgaataatatctctgacagtttcatctcgaatatgaactcagaaaccaaaagcgatgagtacgaaaagcatgatgttgcgattcagtttgtgagttcaagtttccgcaaccaggtggacgggctgaaagttgcccgggcaaataccgccgtactgaacggcgaggggtgtggcaataacgtcatcaacggctaccgcgctgatggtgtcgccatcccggttatggataacgccggggatatggtcagggggaatacagaggggcggaatgtggtgttcagtcctgcaggcgcggcggaatatgtcattactgtcacaccacgtcagtatctgagtcgtcgccccctgggcgtgtcttacgatgttatccggcccacaacggtaccaatgaatattttttatgaccgtgattcgtcatcgccgtcagccattgtactgaaagtgagacccatcaccacaccggcattgcccactattgagtgtgaaatcagccttattattcatgattaa

SEQ ID NO: 202127 - DNA, 1053 bp, Klebsiella oxytoca
gtggctcgccgagtaggcgttctgcgacggatcccactgcagcgcatcctgctgcaggcccgacacgtcaccggagatgttctccaccgccgtgttggtggcgtacagctgcgagccgttcaccgcgtcggtgctggtcgccgacagacggcctgccgccacgttggtcacggtgcgttcgctgcccacatcccccacgctgaccgtgctgatcgggttcgccccggcaaacgcatagtcggtcccgcgcagggtgaccccggccgttcccaccgtcgccgccgttttcgagttcgcccccagcgccacatcgttctggttgccggcaatggcgcccatcccgatcgcgacggaatccagccccagcgccgacgagtcggtcccggtggagttggcgtggaagtatttggtgccggtggtatagatgttctccaccgagtcacccaggttattgatactggtggtgttaccctccacctgctgattggtcgcatacagctgcgaaccgttcaccgcatcggtgctgtctgtcgacagctcgcccgccgccacgttggtgatcctgttcaccgtcgtgtcaccgtggctcgccgagtaggcgttctgcgacggatcccactgcagcgcatcctgctgcaggcccgacacgtcaccggagatgttctccactgccgtgttggtggcgtgcagctgcgagccgttcaccgcatcggtgctggtctcagacaaacgacccgccgccacgttggtcacggtacgttcactgcccacatcccccacgctgaccgtgctgatcgggttcgccccggcaaacgcatagtcggtcccgcgcagggtgaccccggccgttcccaccgtcgccgccgttttcgagttcgctcccagcgccacatcattctggttgccggcaatggcacccatcccgatcgcgacggaatccagccccagcgccgacgagtcggtcccggtggagttggcatggaagtacttcgtcccggtggtgtagatgttctccaccgaatcacccagattattaatattggtggtgtttga

SEQ ID NO: 202128 - DNA, 678 bp, Klebsiella oxytoca
gtggaagtacttggtcccggtgttatagatgttctccaccgtatcgcccagatcgctgatgttctgcgtgttctgcgcaatattcgtggtgttaccctccacctgctggttggtcgcatacagctgcgagccgttcaccgcgtcggtgctgtctgtcgacagctcgcccgccgccacgttggtgatcctgttcaccgtcgtgtcaccgtggctcgccgagtaggcgttctgcgacggatcccactgcagcgcatcctgctgcaggcccgacacgtcaccggagatgttctccaccgccgtgttggtggcgtacagctgcgagccgttcaccgcatcggtgctggtcgccgacagacggcctgccgccacgttggtcacagtgcgttcgctgcccacatcccccacgctgaccgtgctgatcgggttcgccccggcaaacgcatagtcggtcccgcgcagggtgaccccggccgttcccaccgtcgccgccgttttcgagttcgcccccagcgccacatcgttctggttgccggcaatggcgcccatcccgatcgcgacggaatccagccccagcgccgacgagtcggtcccggtggagttggcgtggaaatacttcgttccgttggcgtagatgttctccaccgtatcgcccagattattaatattggtggtgtttga

SEQ ID NO: 202129 - DNA, 135 bp, Klebsiella oxytoca; identical to SEQ ID NO: 103874

SEQ ID NO: 202130 - DNA, 144 bp, Klebsiella oxytoca; identical to SEQ ID NO: 103870

SEQ ID NO: 202131 - DNA, 561 bp, Klebsiella oxytoca
atgaataacgaaaacgaactcacagcagcactgttaactatcgagaaatgtcgcgagctttcaggctgcccggctggcgtagacctgcaggactgggtgaagcagctggcggcggagaatgtggggctgaagaatgtatttatccagaaggaaatcccatccgaagcagtcgatgcattcatggaaaccgcagtaatggatcatgactggaatgaaacctccgagtggtcatgggttgaaaacgaaacagaggttatccacgccgttctggacgcacttaagccagaaaccaccgccaccgatcgcatcgtagccgggattaaggctgatggtcgagcagagggtatcaactttgctgcaagccgccttgctgcggctttcaatcacggacacgttgataaaccaatggctgaggttgtcgacgtggtacgcatgatcctcaccgcaaaagaggatttggcaaacgatccagcgtttccagaagatggcctgtcgggggaatacgcagagaaatccctggctgaatgggaaactgaactgcgcgaggggaccgacaaatga

SEQ ID NO: 202132 - DNA, 426 bp, Klebsiella oxytoca; identical to SEQ ID NO: 103863

SEQ ID NO: 202133 - DNA, 282 bp, Klebsiella oxytoca; identical to SEQ ID NO: 103862

SEQ ID NO: 202134 - DNA, 156 bp, Klebsiella oxytoca
atgactgagcgtcagaaatttatggcagcgattgaaagcctgtgcggcgggcggaatgccagatttgttatgcacgactgggaattgtatttccgccttggctatcgggcgcacaatgcaggtgaggcgttcagggaggcaattcaatgcgagtaa

SEQ ID NO: 202135 - DNA, 654 bp, Klebsiella oxytoca
atggtaagtaaaatatattttatccccttggtatttttattatcaagctgtgctttatctcctactgaggctatccaataccaaaaggagcatggctttgataagcaaaaattcaaaacaaattcaggtggtactcaggctgtagacgatctaagagagatatataaaaacgtgactggattaaaccttcctgagcaaaacacaagcgaatgccttaaagataacgtctgctactacaataaatatgccaatgtcttcgattccatgatggataaaaaaagagaaaaagaaagaaaagaaaacgaagcatttgcagcacagaaagaagctgagtgtcaggctagtaaggagtgtatggccaagcgtgagattgatgctgcgtcttacactttaaataatgtctactattctctaatggcccgatacccataccagcaggctgattctgacgccggggtaaggcatatgtgccgggtggcgggggcagcccaaagggaaggcgtgacccttgagtttatgaaacagcacattagcttaacagaaggaattggccctgaaatgagataccaaataatccaggttgctgaggcctgttggaaaatgagcaagtacggcgttccggacggtaccacgcagatcaagtcgatgtactag

SEQ ID NO: 202136 - DNA, 354 bp, Klebsiella oxytoca
atgagtagagaagatccgcaactgagaatcaggctaccaagtgaacttaaagataaaattgaagcctctgcgaaagctaataaccgctcaatgaatgctgaaataatattcaggataaacctgagttatcttcttgatgaagacaaaagcatgttcactaccgtcgccgaacccaacagctatgttgggcatgctgaaagggttcttaaatctcgagtcgaagaatccttgccatccttccttgaacttatggcgaaaaaaatcatgacggatgaattcagggacgaactcaagagaaaagcaagggagcaagccgaaaaagaatgggatgagatgcacaaaaagcccacctga

SEQ ID NO: 202137 - DNA, 168 bp, Klebsiella oxytoca; identical to SEQ ID NO: 96561

SEQ ID NO: 202138 - DNA, 873 bp, Klebsiella oxytoca
atgtcaattaacaatttaagtttaacttcatttaagatagaaatgtgtagagagaatgctgacagcgatgagttaacgattctgagtacagccactgcatttttttattgttttaatgagaagatctatttaataacaaactggcataacgttacaggaagaaactccttaaccggaaagccattagataccatcaatttatcagttcctaacctcatggctctttatcttcctaaaagaatagaggctgtaggtaactctttttatttatcatggggaaatgttcttaaacttaatttatacgaggaggacaatggtgaatatgctcctatatggtttgaacatccaaaccatgagaacaaggtcgatataattgcaatacctgttaacgacactatgaaaaccttaaaagaaaatgggtttgctatttttcctgttaattcagatgagctgaatttggaagattttgatattaaagctggtatggatgcattcctcatcggttatcctctaggtatggttgccggggggaatctaccaatatggaaaagaggtagtgtagcttctgaacatgatgtaaatattgacaaactacctaagtattttattgatacagccacaactaaaactggcatgtcaggctctgctgtatttataaaatcaaatggatttactttgccaaaaggaaaggaaaatattgacgatatgattatgtcacaatgctatacctttggaggagtctattcaggacgctctcaattaatacactccggaagtagtatttatcccgacctagcaattgtttggaaagaatcagcgataattgaaattattgaaggtaagcacaaatcaaaacatgtatattacggatga

SEQ ID NO: 202139 - DNA, 750 bp, Klebsiella oxytoca
atgaaaaaaataaatcttagtttttcagagtggctaggtttagtaacatctgtgtcagctgtatattcttatatctattactttagattttggaggtttttcgggattaatgcctatgattacttcagctatattgatgctttgcaacattcgataccatcaattatcatggcgttaattcttattttagtgttaactttgagttttgcgtattatattttttttgacaggaagacaatcatttcattttataggtactcattttatctcgcaaaaacaacccactatcataatacacttaaaatttctatatctttatttgctttaataattgcttttgacttttttttagggtggtttttaaattatggattgttttcatcgaatatatcttatttgatagcggtctctttgtcggttattttaattgcttgtggttcattatcattctcttatttttttatgcttaccagtattaggaatggcgcaggaattaaaaagaacttggttgttttttatttctttcaaatccctctggtgatgtttttttcttcgtttaaccttcccatggttaatgcgttctattttgagacacatgataatgctcaagtagtattcaaagatgatgggatattaaaaacacaaagattattgggtataactaaggattattttattcttatggacggagggagaggggttgttagaaaaacagatactttgcagtatattatttataaagggaattaa

SEQ ID NO: 202140 - DNA, 222 bp, Klebsiella oxytoca
atgaaaaagccagcgttgaaattttttacctgctgctgtcgtatcctgagcaaggactctgtacaaaccaggctcagtcaggaaagtttcagaaattgtctcaccatctacaacaagaggaaggtttctgaattcatcggggtccagtgtcttaatcacagctttgagaacagttataagactttgggatgctttaccatcaagtttccggttttctgctga

SEQ ID NO: 202141 - DNA, 210 bp, Klebsiella oxytoca
atgacatcagagcaatttgcatattggcttcagggattcgtcgagctgggcggtcagatcccaacggaagcacagtgggatagcattaaagatcacctgaaaacggtgtttgaaaaagtgaccccgcctgttcagacgtctagtatcggcgtactggcgtcaatgcgtggtggccccattggtcaaagcatcacatctttatcttgctaa

SEQ ID NO: 202142 - DNA, 246 bp, Klebsiella oxytoca
gtgaaagaccagcacactaaaatcaaaggctatcgtgatctgtcggccgaagagatcgcgctgatgaacgagggaaaagacctggctcagaaggtaggcgcctttatcgaaaagctagaagccgcggagttcgcacaaaccagcgatcaaactccagacaaacgctggctggccatcggcaaaactgacctgcagaaaggctttatggccgtaattcgcagcatcgcaaaaccgaccactttttga

SEQ ID NO: 202143 - DNA, 522 bp, Klebsiella oxytoca
atgacaaaagttaaattaccgcagtaccaaagcattaaaatcgtggaagcggctgagattgcgaaaatcgaggggcagacaatgctgttatccttccgcaagcatgtggcaaaagtcgaagtagatcagacttatctcgacaagcatcagcctcaagttggtggatatttcgtccgctatgaaaacggttatgagtcctactcgccaaaagggccgtttgaatcgggctatttgtcagtcgaaaccactattcacgccgccagggtaggtgcatcttttggcatcgcaattgagatgctgaaagacggccatcgcgtcgctcgcaaaggctggaacggcaaaggtatgttcttgcgcatggtgtcaggcaaacagtacgacgtcgcttgcggcattgctcgtgatctggagctggcgccctggattggcatgaaaacagctgacgggaaatttgtgccatggctggcatcccagactgacatgctggccgaggattgggtaattgtggagatggtgccgtga

SEQ ID NO: 202144 - DNA, 312 bp, Klebsiella oxytoca
atgaagaaagtaggcattctcgttttagcacttatggcaagtttcggtgcttcagctaaacctcttacggaagccggtttgaaaaaacatgctgagaacgtttgtggaatgagagatacattggatctaaaagtacctttcgataacaaagctccaactgagccattgaacactgtaaaccgtggtgttgttcatgctgccagagatgctgctcaagtaaacaaaaaggtcattaacgggagtctttctgactgccaggacatcgttgcaaagcaatacagttctgacgagaaaaaatacgccgctgattga

SEQ ID NO: 202145 - DNA, 396 bp, Klebsiella oxytoca
atgaaaagagaatacgccgacaaaattaactcactgctgcaatgcttccatttcaataaagagtttctggaatggaaccacgattattcacatcaacttttacgccacggcgtgtcccacctttatcacttcgccatgctccagggcgaaaatgatgaagccacgctggaagaactccgcaacattattatctcgatcaccaatggcgatatccctaagccgtacgacctatcatcaatcgacgatgatcagccaaaaccagaaggtaagaccctgatgtttattcggcctgcggccgtatccatcgaggcgacaccagaaatgattcaccagcttaagcaggcgatggcagctgtcccggcaagattaaagagctcatccctctacagccgataa

SEQ ID NO: 202146 - DNA, 186 bp, Klebsiella oxytoca
atgtcgatcacgtcaataaaactggatggcggaattagcgatccagagtttgtggaaataagcgccaatgcacggaaacgcgagcgcgctcacctgctgggcctgctgcgcatttttgtcggccagctgaaaaaaggaaagtgccaccccggaagagatttattcatcaatcgaacagtgggctga

SEQ ID NO: 202147 - DNA, 189 bp, Klebsiella oxytoca
atgggcaagttggtgtatgaaggggagggccatatagacttttcccggccgggaacacctagggacaatgccacagtggagtcgttcaatggcagtctgcagtctgagacaggaatgactgaacaaggactggtacatgtctctggaggttgcatggtgcagaatcgaggcctggcgcatacactataa

SEQ ID NO: 202148 - DNA, 144 bp, Klebsiella oxytoca
atgtctctggaggttgcatggtgcagaatcgaggcctggcgcatacactataaccagaggcgtccgtattatatacccggttggatgacgccatccaaattcgcagagaagtctgcctgttggcagaatatgcagtcaacatga

SEQ ID NO: 202149 - DNA, 432 bp, Klebsiella oxytoca; identical to SEQ ID NO: 177727

SEQ ID NO: 202150 - DNA, 573 bp, Klebsiella oxytoca; identical to SEQ ID NO: 177960

SEQ ID NO: 202151 - DNA, 468 bp, Klebsiella oxytoca
atgctgaagatagacaccctccgtgccgccattgagaaagcaaacacctggtgtcgggcgaacccggaagcctggacggtgtttgttgaagagggtggcattgaaaccaccggtgaaacgccgtctttcatgtatcgatattctctggtgctgttcgtcatgaactacgccgggagcattgacgacttcacgctgccgctgatggcctggctctggtttaatcaacccgatctgctgctgaacccggataaaaaccagcagattaaattcaccacgctgattaacaacgatgacaccgccgatctgatgtttgagctgccggtgagtcagcgggtactggttcagctggatgaaaacggcgtgccgtgcgccgagcatttgccggagcctcgcccgcgcgtgctggcccctcatgccgcaggctgggggctggtatttgaaggcatgcttcaggagggcggagcgtga

SEQ ID NO: 202152 - DNA, 192 bp, Klebsiella oxytoca
atgttctttcgcggcaaacggttcaataaaaatgagcatcagagcaagttggaaggcacttttgagtacttgataggagactttaaaatgataattacaattgagttaaaaggggcattgatggccaaaaatcactcagagtataaggttttgtttgagggtaaatatctcgcggtaatatggatactatag

SEQ ID NO: 202153 - DNA, 441 bp, Klebsiella oxytoca
atgagcaaatacctgattacatttgaccttgatacaacaaagttaaaaaccttgtatcacggcaagaactacaataatgcttattacgatattcgaagcacgttgagccgacgcggctttgaaaacatacaaggtagcgtttatttaggtcaggaaggtataagtgaggctcacggaaccattgcaattcaagagctaacagctaaatacagctggttctatgaatgcgtatctaacataaaattctatcgtatagaatctgatttaaacgcacagtttatcgctgatggcgttaacgaagcgagaaaaagattctatacccaacttgaagatatgcgcaaaagtttactatccgttggtttaacagtagaacaagtaaacgaaataataggtcagcaacaattcaaattagaaagcacgataagccctgataaaatgtga

SEQ ID NO: 202154 - DNA, 471 bp, Klebsiella oxytoca
gtgctcgacgtgcgcgcctatggtccggagacgcacgatcaggaggggcgcgttttcctctatgtgctgtcacgcactggagatgggaccgccccgcaggctctgctcgataaagtcctggcagcagttaacccggaggacgtgcgcccgataacggattatgtggctgattatgtccgttccgccgtgattgtgaattatcaggtggttgctgacatttacgtcccttacggcgtggacaccgccacggtgctggaaaaagccaccgcagcactgaacgaatacaccgcctctgtgcatcttatcaacgcaaccgctgcacggtcaggcatcgacggggcgctgcatcaggacggcgttgtcaccgtcgatttgcattcaccggccgccgacgtcgttgcgacgatgggcgaagcgcctcattgcacctctgtgaaaatcaatcttgtggtaatggactatgaccgctaa

SEQ ID NO: 202155 - DNA, 1035 bp, Klebsiella oxytoca
atggaaaaccagacccgcgaactatttgatcattacattgtgcggcaggcgcagctgaacggcgtttcaccatctgccgttgcgaaccgctttagcgtcgatccgacaatccagcaaaaactggagcaggccgccatggagtcggatgacttcatgaggcaggttaaccacttcggggttaaagagcaggaagggcagaaagtaaaaattggcagtaaggggccgatggcgagcaccaataacagctcggacggtaccaaccgccgcaacccggcaccgaaccataacaaagagccgcagaactaccactgccgcaaaaccaactatgactatgcgctttcgtatgcggagctggatgcgtgggccggtcaccctgaatttcagtcattaatcagtaatgcgatggctcgtcagctggggctggatcgtcagatgattggctttaatggcacgcattactctgaaaactccgaccgcacgacctatccgttattgcaggattgcggcgttggctggctgcaaaaaatccgcaatgaagcgccgcagcgaattatgccgggtatcacgctgacctcccgcgatgagaataacgcggtaattgcgtcaggcacctacggcaatattgacgccgccgtgcttgatgcgcgtcacagccttatggatccctggttccgccgcgctcccggtctggtcactgtgctctcgtccgatctgctgctgaaagtgaacctgccgaaagtgaacgcgctcagccagaccaatccgaataccgaactgctggccgcgcagctcattgtcagccaggaaaagatcggcggcctgccgacggtctttgtcccgggtattcctgaagacgtcgtgctcatcaccaacctgaaaaacctctctgtgtattaccagaaaggctccctgcgtcgctctatccgcgaagagccgcattacaaccgcgtggcgacttatcagtccagcaatgacgactatgtcattgaagagtacggcatgattgccatgatcgacggcgtgacattcgcctga

SEQ ID NO: 202156 - DNA, 327 bp, Klebsiella oxytoca
gtggtcgagctggcggcccagcgcagcgaggagggagccaactggtttaaccgcatgatgggcattctcaataaaggccagaaaaccgacgatcagcgtttcagtcagctgcatcaggttgttgaagccgttgcgcaatctcaggccgatcagattgaccgattcagtgctctggagcaggaacgccagcaggacaacgccaccattcagcaactgaccagcgaacttaacgcgctgcgcggtcagcttcagctccagcccgcagaaaattacagcgcacgaccggcggcaaccggcaacagcagcgcgcagcttgcagacttctaa

SEQ ID NO: 202157 - DNA, 348 bp, Klebsiella oxytoca
gtgcagctcaatactggaatagactttcttcccttcatcggtgagctgcttcatgcgggccgacgcgtcgatctcggcatagagcgccgtgcgaccggccagcggcccttcggtgatatcttccgcgctcagcgcggcaacatctcccatggcgccaaaattgctgtcagggagcatggagagatagtgctccacgttgacgcgggcgccgtaaacgtccgggttgtagctcgccgccgcatcgcggaggtgctgcggctggatctcgcgcccgtcaacggtggcgccggaaaccgcaacgcgaaactttttgcgggcgggtttagtcgtgctggccatgttgtttaa

SEQ ID NO: 202158 - DNA, 234 bp, Klebsiella oxytoca
gtgaatagcatgaaatacgcctccttctttttcgtgagctttttttattatttcagtttcatgattgtcatagtcgtgctttttactggcttcaattccattatttacaacacgaaacttgaatttaagcgaatcatagttctctccataaacctcagaaaaaatagcatggaactttacccatttattttttggaattacagagccacaacttttataattttttttgtttga

SEQ ID NO: 202159 - DNA, 204 bp, Klebsiella oxytoca
ttgctcgatgcgccgcagaacgccgtcacccgcatgcagctgatgggcgccgccgctatcgcgctggcgcagtgggagccgcggatcagcctgaccaccgtcaacgtggtgttttcagaaacaggcgcagtgaccgccgagctgagcgggaccatcacggaaaccatgacagaaaccagcaacaccatcaggttaaggagctag

SEQ ID NO: 202160 - DNA, 381 bp, Klebsiella oxytoca
atgttcgcaaatgcaatgatgaacccgcagatagcgcgatactatgaaacggagccatcaatccatccagacactttggcgagggtggatttgttctttctgacaaatcttgataaccatcacacataccgcttaaaactccccaccgccagcgacgccattacgcccatccacacagccgctggcaacaggatcgcagtaggtgggatggacgtatcgttccggcgaactcgcgatgacgacactggccggttctgcataccgctgtcgctgctggtgatacagcgactggcggtcgcagtacttgctgaccagcacctgcgccaccagaccggcttcagggatactcttagggataatctgcgcgggcagacggcctga

SEQ ID NO: 202161 - DNA, 294 bp, Klebsiella oxytoca
atgatccgcgtctataacaaccccaaatacgcaggcgagcgcattatgctgctgttcactaacccaacggacgttgaacgcgtggttgaaggcggtgtgaaaatcaccagcgtcaacatcggcggcatggctttccgccagggtaaaacgcaggtgaacaacgccatttcggtcgatgagaaagatatcgaagcgttcaaaaagctgaatgcccgcggtatcgaactggaggcccgcaaagtttccaccgaccagaaactgaaaatgatggatctgatcgccaaggtgaaataa

SEQ ID NO: 202162 - DNA, 3417 bp, Klebsiella oxytoca; identical to SEQ ID NO: 186568

SEQ ID NO: 202163 - DNA, 954 bp, Klebsiella oxytoca
atggcattgcataaaaccgtcgcattaagcgccgtggccgcagggatcatgttaagcctgggggccgcacaggccacaccgttgcttggcgcaacggaagcgacaaccatcaaggcgagtgacctggccgcgaaagaaaaagccttaaccgactttccgctcatggcgtcggtaaaatcatcgattcaaacgctgccgaatagcgaggttgaaaaaatcgagccaggtctggcgaccaacccggcaaacgtgaagcgtgtggaaagcatcttgtccgaaaaggattgggagtatctgttcccgatgcgtgcggcagaatatacctactctaactttctgaaagctattggtaaattccctgcggtttgcgggacctataccgacggacgcgatagcgatgccatatgccgtaaatctctggcaaccatgtttgctcactttgctcaggaaaccggcggccacgaaagctggcgcgatattcccgagtggcgccaggcgctggtttatctccgtgaagtgggctgggttgaaggtcagaaaggcggctacaacggggagtgtaacccggatatctggcaggggcagacctggccctgcggtaaagataaagacggcgactacctgagctattttggccgcggtgcaaaacagctctcctataactacaactacggcccgttctccgatgccatgtacgatggcgacgttcgtccactgctggataaaccggagcgggtggcggatacctggatgaacctggcgagcgcggtgttcttcttcgtttacccgcagccgccgaagccctctatgctgcacgtcatcgacggaacctgggtaccaaacgatcatgataaagcgaatggtctggttgaaggctttggggtcaccattcaaatactacggcccgttctccgatgccatgtacgatggcgacgttcgtccactgctggataa

SEQ ID NO: 202164 - DNA, 891 bp, Klebsiella oxytoca
atggaaaacctcacatttatcacgcggcggcgcctgctgaccgcaatggcgctgtcgccgctactgtggcagatgcgcggcgcgcgggcggcggaagtggatccgcagcgtattgtcgcgctcgaatggctgccggtagagctaatgctggcgctgggcgtcacgccctacggcgttgccgatatccctaactaccggctgtgggtcaatgaaccggcgctacctgattcggtaattgacgtcgggctgcgtaccgagcccaatctggagctgctgacgcagatgaagccgtcgtttctggtctggtcggcggggtacggcccgtcggcggaaaagctggcgcgtattgcgcccggacgaggattcaccttcagcgacggcaagcgtccgctgatgatggctcagcagtcgcttagcgaaatggctgagctgatcggcaggcagcaggaagcgaagcgccatctggcggaatttgacgcgctgatggagagcctgcgaccgcgctttgcccgccgcggcgatcgtccgctgctgatgattactctgcttgatagccgtcacgtgctggtttttgcgcaaaactgcctgttccaggaggtgctcgaccgctttgccatcaaaaatgcctggcagggcgaaaccaccttctggggcagcgtcaccgttggcattgaccggctggcggcctacagagacgccgacgttatctgcttcgaccacggcaatgcgcgggagatggcgcagcttatggcgacgccgctgtggcgagcgatgccgtttgttcgcgcagggcgttttcaacgcgtcccggcggtgtggttctatggcgcgacgctatcggcgatgcattttgcccgcgtgctggccgacgctcagggaggcccggcgtga

SEQ ID NO: 202165 - DNA, 210 bp, Klebsiella oxytoca
atgattcagctaaagggcgaaaaaatgaacgaacatcataaaaagcagatcgaagttattagagagattgaagcgcaggggttcaccgcgcaggaggcggcggccttgttactggctggcgaattatcccggctaaatgacagcatggactacctgaaacgagccgccgggaatattgacaacacgttatcaagaatggagggcgcttaa

SEQ ID NO: 202166 - DNA, 180 bp, Klebsiella oxytoca
atgcgtaattactttcgtgttactggctacgccgtcaataagcgcggcctgaccgttggcattcattatgaaatcaccgcgagccgtgccagagaggccatgagtcacgccatgctacaggcgcagcgtgaggggctttctcacgtccgtattacccgcactcagggggtggcagcatga

SEQ ID NO: 202167 - DNA, 705 bp, Klebsiella oxytoca
atgaccgccatccagaaagatgcctttcccgtggctggcctgatgtatgccaatgttaacgctttcgacaaggcaaagcctgaccaccagaagccagaagcagggaatgattttcctcctatcaatggaatacgggagtttattgctaccgctgaaagccgcgccgcgtgggatttagtgaccagtaagcgcggagggcgtgactggttcgaccaccagcacagggaagcgtgctatattccatttgttgcggcaaaatccgcagccgggcgtggaaacccgaaaacatcaacggcgacacagacgccgaaagcgtctttttttgtgtccaatcactacgcacatccaatcagcggcatagcccgtactgtatcaatggtggcgttagtggggctacgttcgcgtaggccggttcccgttgtgtccggtatttccacccccattaacgtcaccgccatttcagagcgtggaaactctagcggtgactccttaaacacaacggaggctgccactatggctactatccccacccaaaaaccgtcattcgtctggcttatcggcgcagttcgccgcgattgcccgacaatcaccgcaaaaatccaccatatcgccgcagaatccgagcaggaagcccgccgtacactggcgcgggatcacgtctgtttctttgcgggccgtatccgtcaggaggtggctcatgcgtaa

SEQ ID NO: 202168 - DNA, 1620 bp, Klebsiella oxytoca
atgctcagcagaatccggaccctgaggtctctgttttcaaaaggcgaaccagaagcagtacatcatatatccacagtcacgcctgtcggctaccacgccccacgtggtgccggtatgctgtgcgccagcccgctacgaaaaacctgcctgcagcagatatgggagaactgctctctgcccgcagacatctatcagcgtctctatttagcgcctcttaatggtttattagccagggtacagaatgtgccggccacgcagaagggaaggtggtcacagtcagacggcttcggcgatcttacgctgcagttcacgacctgtgcggtcaggctggcaaaagggtatatgtttccacccggcgcggcaccagaagagcaggcagaacagaatgtgatgtggaatgcggtgattttctggtcggcgctgttctggcacctgcctcttcttgcgactctggagggggagttgcttgacggtaaaagctggcttccgggaatgaccattccggactcaccttaccgttttcggttccgggaggctgagaacgcatcagcgtttgctgcccttgccgccgggcaacttatgccgacagaggcgacgggctggctggcagagaatcccgaagcactgtgcaaccttgccggcgcactctggaatcagcatccgggcatgccattgatacgcggcctgatgaagcaagccgctgaaaaagtggaattgccttcgctggggatatcaggggcaaatgagaaagttgatactctcgcagagccggccctttcagtttcgcgaacgtcgtctgatcgagagaccgaattacaaccctcatcagaagcaaaacttaaaacggcattgccagaaattgcagatttgcagggaactctacttgcatcttctattgcaccggtgccgatggctgatgacggcaatctcgtcagcaatgaaaaggcaggcgagattacggaatgtgatccaaatgaaacagaaatggctgatacagagatgctgctaagccttttcagtgcaatatcagtgcctgatatgaccgggactgaagcatgtgatgaagattcttcagtcaatgccagagcagaaaatgagccagaattttccccccttaatgaaatatcccctgaagctgataagcatgagataaatcagacagcagcagaaaactctttccccgaacctgatactgaggataacatcccattacactctgttaacattgatatgcaaaaaacagtgaaaaaagaacaggctggcactgaatttctcaggtggctttctgaggggatcaagagcaagcgaatcgatattaatcagcctgattcgagagcgcatgcagttgcagggttcatctttctccgggtaccggacatattttatctttacatcagagaaagcggatcagagctgagcagggattccctacagcaggaatttgagaagctgcatattcacagggtgcgccggggagagcgttttattaaagcaaaactgtaccattcgcccggtaaagaaggcacgtttagacctgtaagtggatatcttgtcaagactacacaccttttcagaggggcgtcttcccctgaagacagcgggcttctgtctttcctttga

SEQ ID NO: 202169 - DNA, 1701 bp, Klebsiella oxytoca; identical to SEQ ID NO: 187187

SEQ ID NO: 202170 - DNA, 924 bp, Klebsiella oxytoca
atgaataaaatccccctgatggccgatcacgacccggtggcgctgctgccggatagcgaagaagacgaggcgaaaattgttaaatcgcggcggctgattctcctgctggccgttatgctgctggtgggcggcgtctgggcatggttcgcggtactggacgaagtctctaccggtaccgggaaagtgatccccagctcgcgggagcaggtgatacaaaccctcgacggcggtattttaaccgagctgaacgtacgggaaggcagcaaggtacaagccggacaggttgtggcgcgcctcgatcccacccgcagcgaatctaacgtcggcgaaagccaggcgaaatatcgcgcctcgctggcggcgagcattcgcttaaccgccgaggtgaacaatcagccgctggcgtttcccgactccctgaaagcctggcccgcgctgctggcggaggagacgcgtctgtaccatagccgcaaagagcagctaagcaaatcgacgcgccagctggacgagtcgttaaaactggtgaatagcgaactggccatcaccgaaaggctggcgaaaaccggggcggcgagcaatgtcgaagtgctgcgtcttcgccagcaggtcgcggatattagttttaaaaagatcgatctcaatacccgctattttgttgacgcgcgtgaacagctgtcaaaagccaatgccgacgtggccagcctggcggaagtgataaaggggcgcgccgattcggtcacgcgcttaaccgtccgttcgccggtgcaggggatcgttaaaaatattaaggtcaatacgattggtggggttattgcgcccaacggcgagctgatggaaattgttccggtcgatggccggttattaatcgaagcgcggatttcacctcgtgatatcgcattcatcctgaccagcaggcgctggtga

SEQ ID NO: 202171 - DNA, 759 bp, Klebsiella oxytoca
gtgattcggattctgacagtgattcggattctgacagcgattccgactccgacagtgattcggattctgacagtgattcggattctgacagtgattcggattccgacagcgactcggactctgacagtgattcggattctgacagcgattccgactctgacagcgactcggactccgacagcgattcggattctgacagcgattccgactccgacagcgactcggattcagacagcgactcggattccgacagcgatgctgactctgacagcgacagtgattccgactctgacagcgattccgactccgacagtgactccgattcagacagcgactcggactctgactccgacagcgactctgactctgacagcgactccgattccgacagcgattcggattctgacagtgattcggattctgacagcgattcggattctgacagcgattccgactccgacagtgattcggattctgacagcgactcggactctgacagtgattcggattccgacagcgattccgactccgacagtgattcggattccgacagcgactccgattccgacagcgattcggactctgacagtgattctgactccgacagtgactcggactctgacagcgattctgattctgacagcgattctgactccgacagtgactcggattcggacagcgattcggattcggacagcgatatcgaggccatccccgatagcaacagcccggacgttgtcgcgctggaaggtaacctga

SEQ ID NO: 202172 - DNA, 489 bp, Klebsiella oxytoca
  misc_feature (434)..(443): n is a, c, g, or t
atggctctttctatcaagaaatcaaacttaagttatgcactaataattgcttttattgtgattatcttacctcaggtaatcttgaaaccaataggcggtgatttatctattgtagatattggagctcctttaataatcgcgtattgcgtttttcgttctcagttaaaattacctccaccacaaaaatatctattggtttttatattttatttattggtttcttatttgataatgatgttatttggtggggttgaatatcaggagtcaagtccttatttaatcaggatgctgtctttatatgcaccaatttttttggtgccatacttaggtaatgatgaaaaacagtttgttaaatttggtagagtctttgtagtaatatctttaatagcaactgttgttattattcttctgtatatatccggatggactggggnnnnnnnnnnactggggttagtgctcatcaaaccacagaaggcgatgatggtttga

SEQ ID NO: 202173 - DNA, 588 bp, Klebsiella oxytoca
atgaaatcaccaccgaacactgccagtcactggcgctcgaaagcgatcagaaacgccaggtggaagtgctggaatccgcccgcaaacggtcctggaataatgaagtatcagtgtcctcgatccgtaacctcattacctcagaagaggtctccacaaacggcgacaaattccgctttgtgggagaggccgcattcagtccggaagaaatccgggttgatctcttcagcagcgaaaacggcggctatgtcaaaagtgcttctctcgataccgccctgctggaaaaactgcagagtatcgcggaacaccttcgcgaagcagaaggctggtcatggtgcgatggccgccttgaaccgatttctcactacgggaaggatactaaaatctggcgtctgcatgctgtcccgcctgtggcatataccgaagccgaatcggaacgacttgccttccttgcacaacgcgaagaagaactcgaagtacaaaataccggggatgacggggagcgtgttgcaggtgaactcaatgaggtctggcatgaacagcagaccattgagtttcgcgctgaacaccggacatggcccgatgaaatga

SEQ ID NO: 202174 - DNA, 249 bp, Klebsiella oxytoca; identical to SEQ ID NO: 181172

SEQ ID NO: 202175 - DNA, 801 bp, Klebsiella oxytoca
atgcagcatgatacaacagaaatcataaaaaaacattttaagaacaaagaaaaatttatagatattaagaaagttagtacacgaacggaaactttctttggtaaagagttcactacaatcattatgcaaaaaaatgaattaggaaaggaaaaatctaaaaacaacggaccttacgtctgcatagttgaaaacgaaagcggaatagttcattcttcaaggaagatttatgtacgccaattaataaacaaaaaaatatttaatattttctttattccctttttgctaattttatttttgatatgccttgggtattacagcattgtcttttttgcaatattatcatatcttttacccatattatttggatatatgatttattctatgacatatgaccaaatgggtgattacttaaagaaaatggctgactttgttgtaatatttaccggagccattggcgcaaccgtattgattctagaatttattgatataaatatatttaaagaaaatgtttttatttttgaagtaataactttctcccaagcaaaaataaatcacctaaaagctttccgtgtacttgccgttgaaatatttattttcttctacacaataaaattatttatttccttcactgaatttagagttgcaaggaaagagtggatttcaaaaggaactataaattcaatttttgtaacaaactctccaaaaaaaattttgcgttccaaactcaaaaccctagtaaagaaagccacttacaagattataaatttatatctagaagttaaacataaaatttttcagtaa

SEQ ID NO: 202176 - DNA, 168 bp, Klebsiella oxytoca
atgcgtaaaatgctttttttcaatacactaagtcttttggttcttataattattggggagcctaaaacattattaggtgagtatctttattatgctgccttttttaccatttcaggcagcatacttctctcaccattaatatacgttatgacaagaaaatcttactga

SEQ ID NO: 202177 - DNA, 252 bp, Klebsiella oxytoca; identical to SEQ ID NO: 31793

SEQ ID NO: 202178 - DNA, 576 bp, Klebsiella oxytoca; identical to SEQ ID NO: 149213

SEQ ID NO: 202179 - DNA, 1248 bp, Klebsiella oxytoca; identical to SEQ ID NO: 149210

SEQ ID NO: 202180 - DNA, 255 bp, Klebsiella oxytoca; identical to SEQ ID NO: 149211

SEQ ID NO: 202181 - DNA, 411 bp, Klebsiella oxytoca; identical to SEQ ID NO: 149212

SEQ ID NO: 202182 - DNA, 519 bp, Klebsiella oxytoca
atgaaagatttcaatcaccttagtttagcttttgatataagaactatttttgaaagggagcatgagatgctgaatgatctatcattcccctttttttatcaatttccaaaagactgttgtcagagtgcgtctatatttttaggcgtatgtctcaaacaattttttccagatgcagaagttaaaattgttcgaggcacaacaagaggtgatgatgaatatcatcactattgggttgaggtggataaaagaatctatgaccttacacttgatcagtttgagaaatggttagagcctaagttttcaagagtatccagaccgatctattctgaaaaaagacatccacttgctaagtattatttttataaaaagaaggaaaacataacagatgctttcgttgattttataaccggatatgcaaatcttaatgaggttttgaacgcctttaattattgttatattgaattaagaaaactagggtggctttctgattttaaaaatttaaaacgagatttgtattaa

SEQ ID NO: 202183 - DNA, 609 bp, Klebsiella oxytoca
atggcaccgactaccgcacagatcatgacggaaaataccgtcagccagacttaccgggcaacctattcacccgatgataataaattgcgactttacgcatcattacggctcgatgaagaaacgtattccctgatcaacaaagcaggctttcgctgggcgcccaaacaggaactttttgtggcgccagcctggacgccggggcgggaggatgtcctgctttccctcgccggtgatatcgaggacgaggacagcaccctgtttgatcgccaggagcagcgcgccgggcggttcagtgactacagtgaccggcgggcggttgaatcggagcaggcgcttgcgcatgttgattcgctggcatcggctgtccccctgggacagccgatcctggtaggccaccacagcgagcgccgcgcgcgccggcatgcgcagaaaattgagaacggcatgaaacgtgcggtgatgctgttcgagcgcgccgaatactgggaacagcgcgcaggcctctctgcggcacgcgaaatacaaggagcgtccggatgtgcgttaccgccgtatcaaaaaaatcgaggcggaattacgcaagtcccaaaagcacattgcccggtctga

SEQ ID NO: 202184 - DNA, 792 bp, Klebsiella oxytoca; identical to SEQ ID NO: 149245

SEQ ID NO: 202185 - DNA, 252 bp, Klebsiella oxytoca; identical to SEQ ID NO: 30842

SEQ ID NO: 202186 - DNA, 150 bp, Klebsiella oxytoca
atgaccttccgtaacgttaattttcagtacggcgacctgatgcgcgtccctcgtggtgtgcaggctgttcgcaaccctaaatcattcgttcgcttctggcggcagagctggctgtacaggcttcttacccagaaaggcgatccttgctga

SEQ ID NO: 202187 - DNA, 648 bp, Klebsiella oxytoca
atgaaagatagaatccgtgcccgtagggttcagcttgataccacacaacaaaccctcgcgaaaaagttgggagttagtagggtatcagtaacaaaatgggaaaacggaacaacaaagccagacggggaaaacctccaccagctggcaattgcacttcaagttacaccagagtggattctctacggtgaaggcgatgttgtgcttgatgatacaaaggttattccataccttaagcctccgattgctatcccgattatctctgctgttcaagcagggacatggactgaaacttattcaagctcaagactgactgatgtgatttcctggacacaaactactgcaaatgtttcagatgaagctttcggacttgtagtccgtggcgaatccatgacaaacccacacgggattccttcgataccagaggggtcgattgttattgttgaaccccattacgggcaaattgatgatctgtatggaaaggttgttgtcgcaatgttagacggctcaactgaagccacagtgaaaaaattggtttgggatagcccatatgcatacctgatgcctttaaatcctgcgttcaagccaattcagatcgatggaaactgccggataatcggcaaagttgtccaaatcacacagaatatctaa

SEQ ID NO: 202188 - DNA, 198 bp, Klebsiella oxytoca
atgcgcaaacatgaagtcatagagtatttcggcggagtttctaaaaccgccattactttagggatatctcatccagctgtttgtcgttggggggagatcatccctgagaagcaggcgtttgtaattgagcgaatcaccaacggaaagcttaagtacgacgctagcctttatcaaaagtctaccgattctgcggcataa

SEQ ID NO: 202189 - DNA, 600 bp, Klebsiella oxytoca
atggcttggctaggaatacctttcccattagaaaaagttgaaggcacaatattttctaattatcaattttctcatttgactattgataagctaccttcggtagtagtagatagttcattttcatgggaaacattattatcagcaattattgcgggtgctattcctgcctggattgcatataaagcaataagaagcaacaatgagcttgctacttatcaaaataaattgcaggctaaaacaaaaattaatgaagaaataaggattgcagctgctgattatgtaacggcggttcattatatatcaatagagtatagtgaatggataaaagggctggttaataaaagagttacaccagtatctgagctgaagcttccggaaaacatacaagaaaatatttataaggcagagttgagtaagaatgcccttatgcttttagtaaaaccaaacgaagccggtaaagtattactaagtcaaatggctgagataaaattaaaattggggccagttctggaagtgcatgcaacccaaaaggatattttaaatctacaaaaagcagccagtaagtttatactcgcatgccacgaatattttgataaataa

SEQ ID NO: 202190 - DNA, 123 bp, Klebsiella oxytoca
atgttcggcaataattctgccggattattgaccctcgcctgcgtggcggttgtcggggttgttattatcttttcactgcgcgtgagccgcacggtaccgcaggccggcagcgtacagcattaa

SEQ ID NO: 202191 - DNA, 516 bp, Klebsiella oxytoca
atgaaacttattggtaatttgttatgcataggatttgttatctggatagcttcttttttcgttaaagctgaaaaaaaggaattcccatctaatgaagaattgctctctcagttcgaacgggtgggagtactcgatagaaatgagtggaaaaaagggaatatcgttaatggtattcaggtttatacggcaaaaaccaagaatgaaattcttaataatgtatggagccttggaacaaaagatgttggtgtaatctccctatcaaatggagatgatctggcgatggagggtattgccgcgttaggtgaatgctataaagtcgcaaaaggtgtgattggcctggacagcaaagaaaatttcaatgctgtagcagcgatatttcgagaggcatctgcgactaggagtgaagatggtatttatcaatcttcaggcgttattgatggaaaaaactttgatgtacgcatgcaaagagtcactccaaatatattttcattttcctgcataatggaaagatcataa

SEQ ID NO: 202192 - DNA, 972 bp, Klebsiella oxytoca
atgccaaagcctgcaacacaactcgaatttctggccctgtgcttcgagcttcccgacctgtcggatgccagcacgccgctgccggaatggttgccgatgatccctgcgggcacattcactggccgggatggccgttcgtggattaacgacaatcccgctgcggtcattgccgcctcattccgttatccaaagttaccgattgatatcgaacattctaccgaactgcttggcccgaaaggcgaagaagcaccagcctatgcctggattgattccatgcgcattaatgctgacggtagcctagatgctcacgttgagtggacgcctgatggtgaagcatgtgtcaggggtaagaagtacctctattacagcccggccttccgttatctctcaacaggtcaggtgacgctgctgtccagcgctggcctgaccaacaaacccaacctgtatttacccgctcttaactcggagaacaccatgcctttacctgtgcagattgccacggcactgggtctggctgagaccgcgtcggttgacgatgccgtatcagcgatccagaccatcaagaacagcgaacagaccgcgctgaaccgtgctcagaacccggacctgtcgaagttcatcccgcaggagacctatcaactggcgctcaaccgcgctcagacagcggaagatcgtctgaagacactggatgaaaagacggccaccgcgctggttgacgatgccgtgaccgccgggaaagtcgcgcccgctaaccgcgatatgtatctggccctttgccgcagtgaagaaggccgtcagcagtttgctgagttcgtgaaaactgcgcagccgctggtcaatcaggacccgtccaaaggaaaagagaacaaggggcagcagaccacgctgaccgaaactgagctggcgatatgccgcagcatgggtctaacccaggaagagtttctcgccgctaaaccgaaacaggagcaataa

SEQ ID NO: 202193 - DNA, 387 bp, Klebsiella oxytoca
atgaaaaaacctttattaattcttttgctcttcgcctctcagaccgctttcgcagacaagatcccaacctccatcgaaaatttgattgctgcaaatgacaccagaacacacagtctggaaaacggggagttaatcgtaagatatggcagaccagaggttacgctcacaatggttgaatcaatgcttaatgacatatgcggcgattactttatgaataagtggaaacctacgacgattaaaaagataacgctacttaacattacccgtgaccagggctacacaatcaatgcaggcggggaggagtgtcaaaaaactggctctatgacctatgagcaagataaagcatataaagccagcattatagaaagcgcaaagaaattcgagtga

SEQ ID NO: 202194 - DNA, 219 bp, Klebsiella oxytoca
atgatgaattgtccaaagtgcggccacgcggcgcatacgcggagtagctttcgcgtaacggatcagacaaaagagcgttactgtcagtgccagaacattaattgcggagccaccttcatcactcatgaaaccgtagtgcgttacatcatgacacctggagttattgataatgccccgccgcatcccactgccgccgggcaggggcatatgaacttttaa

SEQ ID NO: 202195 - DNA, 798 bp, Klebsiella oxytoca
atggctactgtttttcgttcgttagatgtcgaaattaccggcagcggtttaaaaccgatttacgttccgtttaaaactattcccgggctgattgccggctggaggcctggacaatctggtctgaccgatatcagcggaaacgggcacacgttgacggcagtcggtgagccggttgttacggagctatcttttatcggcgatatgctgaacgggtttaaaacctcagtccccgatggactggagaggtcaatacttgccgtgtaccgtcacccggttgacgttgataccgtagcgcccgcgtcaacatatggctatccggtcagcaatctgatgcagcaagtttccacactcggaacggggttcgggattgtcggtaccagtaacgtatcggcggctctgtcgcgccgtaacgcgcttgtaggcgcaaatgtaaaggcgtcaacgctgttatctgtggcgactggcccggcagatccgttggcccgcagaacagaatttgcgtttacaggcgctgataccagcggcgctaatttatctgcgcatatgtattaccctaaaaacagtgaatcgctacaggcaggggttctgaatactgcatcaggaacgttggccacccgagcgacaggcgtagattttaacctgctgtgctgggaagatccgagcacgccagctgtaccgtactcaggtatggaattactggaggttttattttacgaccatcagctgactctggctgaatatcaggctcagtatgctcaatcgaaagcgtacgcggcatcaatcgggttttcgatttaa

SEQ ID NO: 202196 - DNA, 2028 bp, Klebsiella oxytoca
atgaatattagtgaaaaaccacaatgggaaaataatatcagcatgcttgcccgccaacaaaaggttgaaggcgggagagatggtgcggctaatattcaggcccagcaactggctaaccgcacgcaatatctgaaggagcaactagatgcatataacaatatgattaaatctggagaattacccttctctgatttagccaccgcacaggccgcaatagatgccggaaaaattccactggacgcccctttctcttatcgttctgatagcgatgagatctgggcgatagaggggaaaaatgtcgcaggtactgcaacgccagttgttgataaagatggcaagcttaaggcataccccactgcgaaggcagtagaaaccgccgcagttgtggtgcgggaagttgacgacaggacctctgaagtattacgcgtaccgagaatgtttgacgaggaagggttgaggattgtcggtggttttcttgataaagaaggtcactccccggtatacggtaatgaaaatggagatgtaggggttgcgaatttaaaggtgaaaattattacggatgaccttgcgctggccgcttttcatagccgggacatgacaaccgaattttttcgcctgtcaaaaaacggcggggtcattataggtaatgtggaaatattccagattccggggcctgctggaattgtctggacggataaaaactatatcccttatgccgctgatccaaaattcgcagcatcgtcagggcaggacattccagcgatggggggcggggttactccagttgccaaatctgtcaggatcaggatgtgtgacagtatgggggtgcgatctgatgggcagtcgctttctttggggctggccactaacctgataaacaatcatgcgttatcaattattcagcgctatgcaaataagggtttcggcaaaaataataactccgataccaccgatactgacacgatggtgccgctggttgaaaaagactatacaccggtagagggcacataccctggcggtgaaactccctgcaccgccatgaccgataagcttaccgaattactgatgcaggaatcggggcttgattttggcgaaatgggcagttttttcttttcttctgcgccaggaaaaggcggtcagcctattgagaacctgatgaaaggcactgtcccctatcagcgcatgcttgatcacgtatcaaacacggttcggctttgttctgcacagggcctgacccatgccgaactggcggcggtttttatgcagggtgagtcagattacagtgcatcaactactcgggcggtgtatctggagcgtcttctgcaataccgggatgactccgctgcggataaaatggcaataaccggccaacaatttgagccgttatttctcagctatcagttaagcgcgcataaagcgtataacaaatctgttcccgtcattgctctggcccagcgagacgcagcattgcagggtaaatcctggctcagtgctcccggctatattatggattacaacgctgatcatattcacgctgtcaattactcgtatcaaatgtgggcgtattaccacggcatcctcatttacaaattattgcaggatgacctgaatgacagagaacgcggcatgcatcgcctggacgtgatcaatgagttcaggcaaggggttattaatgacctgttgctaaacgttccggtaaaacccgtggtattcgataccacctgggtcaccgctgcgcccaatatggggtttgatatccgcagcgtctctaatgtgctgattgacattatttcatctgtttcaatcgtcgggcaggatcgaatccgaattattacaacccgaccactggcggacggggagtttatctcttacggctggggacggactggcgacgccgcaggtaacgggcgagtgtccggcccgcgagggaatgtccgcgacagccagggagaccttaacggatataactacatcgacggtgccggaacaacgcgcgcacttcacaactggttaaatattattgggtga

SEQ ID NO: 202197 - DNA, 843 bp, Klebsiella oxytoca
atggcaacattacttttagcagtgattttggttagtggttttatatatgtaaacctatcactttcaacacgttatagatataagcgttccaatggctgggacgcttatttttttgtggctgcatggggaattgtctttttcctcgctggcggcttccttaccttcgctcttaacatcagcggtgggtttcgctggttttctaatgcgctgaatctgactccagacagctttaacggcatgttatccaccacaaccgataaaccgcagcgcatcaatgaaattaagcaaatcgcgtgggttgtgatttcaatagttctggcggcactgttcggttggctaaacaaacgccgtacttcaaagggggatcgccgttgggatgcactggcaaaggcagtgggaaacaatgcttttgaatcgctgctcatggaagcatcagctcgccagtttcctatcattgctacactttcatcacgcaaaatctatgtagggctggtgacttgccctgcgttggaaaatggattgtcggaacaccttgaaattctccccttgctgagcggatatcgtgataaagacgacctaacgataaatatcacgacaaactatcatcagcactatcttgaaagcggtgttatcagtgggatgtcgcgcctgaatatccaggatttccgtgtgctgatccctaaagacgaagttgaaaccatctcgttttttgatactgaaacgtataacaaatttaaagaaaacgaagcgcgtgaccggaaagactgccgcaagttgggtggtaaaaagccatccacacgcaggagaaagacttctggcgacgcagagcagggtagtgcatga

SEQ ID NO: 202198 - DNA, 219 bp, Klebsiella oxytoca
atgtcaagtatcgccgcattgaagctgggtaatccagttgaacgtttggcacgggttctgaaagagaaccaggacaagctcaatctgagtaaagatggttttgtgtccgtagatttgtccaacgaagaagctatgaaagccatccgagatcagatggataagcttgaaggcatcaaaacgagcactgttaaagcaaaatattattacagaacccgataa

SEQ ID NO: 202199 - DNA, 150 bp, Klebsiella oxytoca
atgcgtgtcgaaataatgattgataaagagcagaaaattagcctggcgacactggaagcacttgaaaccgagctttaccgcaacctgacccctttgtatcccaagacggcgatccgcattcgtaaaggagtgccaacggtatcgagttga

SEQ ID NO: 202200 - DNA, 510 bp, Klebsiella oxytoca
atgtttgattatcgcgtttccaaacatcctcactttgatgaagcctgccgcgctttcgcacagcgtcacaatatggtgaagctggcagaccgcgcaggcatgaatgtccagacgctgcgcaacaaactgaacccggagcaaacgcatcaacttacggcgccggaaatttggatgcttaccgatattacagaggattcaacactcgttgacggtttcctggctcaaatccattgcctgccatgtgtgccgctgaacgaagtagccagcgagaaaatgcctcattacgttttgaatgctacagcagagatcggtcgcgttgcagcaagcgctgtttctggcgaacaccagacaacaacggaacgccgccaggttatcgaaagcatcaattctgttactcgtttgatggcactaacagctgtttccctgcacgcgcgcctacagtacaacccggcaatggcaagtgctgttgatactgtgacgggcctcagcgcttcgttcggcatcatctga

SEQ ID NO: 202201 - DNA, 237 bp, Klebsiella oxytoca
atgaatcgtaatttttcaatgcgccccagcatcaaccttgtggtatctgagccattcatcacactggatgagttttgtcggcgtactggctacaaacctagttatgcccgtcaaatgatccgggagaaccgcctgcccatcaggaaaaaagccggagtaaacagccttatcgaaatcaacatgttcgcattgacgatggaagcggcccaaggctgcgaagtcacaatgcaagcctga

SEQ ID NO: 202202 - DNA, 615 bp, Klebsiella oxytoca
atgtcaaacacaaaaaaaacccctaaggcgatctcaaattacaactttacatcccaaagtggaggtaaagaggcaattactcgcatccttcaggcttatggattcagtaccagacaggctttgtgcgatcatctaggagtatctcaaagtacaatggcaaaccgttggatgcgcgatacttttccgcacgactggcttattgcatgtcaccttgatactggcgcatctatgctttggcttactacagggcaaggcagtcccaccacaaaaataatcaatgacagtggattgcttttgcaattaaaagaaatctcaaatgggatttactcatcatctgaacaggtccgttatgacgcctgccttatccccgcagattcatcagctcctttcttggtgaagtttgaaaaggctttctatcttgtggatgagttcaagggagaaatcaatgatggaatctggctgattaaattagatggttttctgagcatcaggcaagtttatcgccttccaggcgggcgcttacgtgtagagaatggcccagcatcctttgaatgcaccccagcggatattgaggttaacggtagggtgatcagcaaaacagcatttacagaatga

SEQ ID NO: 202203 - DNA, 909 bp, Klebsiella oxytoca
atggcttttgagcgccacattaaggatcaagcgcaggacaagccctggttaggagaaaaagcagataagcgtcgagttaccgacctcgtagatacttggttcaatgcacatggtgttacactctctgatggcctcaagcgtaagggcgcaatggaatttgcctgctttgctatgggaaatcctcttgcaacagaattcaacgccaagctttttgcaacctaccgcgagcaacgtttaagcgggaaaatcacacgttcggatcgtgtaaaaacggtggctccccgtactgttaatcttgagctggcgtatttccgtgctatgttcaacgaactaaaaaggctggatcactggagtttgccaaacccactcgaaaacgttagggaatttaaaattgatgaggctgaactgacatggcttacagttgaagaaattaagcaattgctagctgagtgtgagaaaagcaaagcgacagatttagtgactattgttaaaatctgccttgcaaccggcgcaaggtggggcgaagcggaatcactaacaggcaagcaaatcagccccggaaaaatcacttacatcaaaactaagggcaagaaaaaccgcgccgttccgatatctgatgaactttatgaagctctccccaaaatacggaattcaaaaccaatatttacgaggtgttattctgcgtttcgtggtgcaattaagcgagcaggaattgaattgcctgacgggcagttatcgcacgttctaaggcatacctttgcgagccactttatgatgcgcggaggtaatattctcgtactacaacgaatacttggacataccgatatcaaggtaacaatgcgatatgcccattttgctccagatcatttaactgaagcaatatctttgaaccccttaaatggtatataa

SEQ ID NO: 202204 - DNA, 1473 bp, Klebsiella oxytoca
atggatattgaaaaagaaatgcagcaaaaaatgcgtccttttttacccatcaagagagtatttgacaatgaatttatctctttagtcacagaactaattttcctgataagaagttatggaatagataaagtcggtttttctaatataaaaaaagattataaattatttatttctgcagtacatgatggttggaaaaaagcacaaataaaaatctctcacaatgtcatcaataaactcagtgaaattgaaagtctggagataaagaaaaaagaatttcatcgacaaaaaaacaaagatgccaaacaagagtgcattaacaaaatcaacactttaaaatcagaaattttaattctaagacgttttattgactctatcgtttggactattctcgaagatgaacactcaacgattaggcgattacctttagatgataatcttgacaacctctcaatcaagaatttaaaagaagcaatgcaaacacttgaggagattaattccaacccatttacaattggtatctcatctgatctaacgacattcatacacacaggagatttattagtaagaaactattttgatggcactctatctattgtcgagctgaaaacaggcaaaaaaaaccttgagttttgcgatgctgctaatttttctctacattcagaatgtcctatttttgatgagcaatatacaaaagagttatcgcctgtcgatttaaaacactatcaaagaacgaaaaaacaactacaacatatgaaagatgtaacaaacacaataaatacaggagagggatatgatcactttcataaaaaaacagtaaaaatccaagataataactatatacctaattacttttcagaaaaaataatggattcttggcgacgcatatctcttggaaaactttgggatatacacgttatagacgaatgcttattcattggaacttacaaaaacgttgaaatggggtttgttgggttcaatagctggatgaaagtctcaaatttcaatggcactgtatttaacatcaacgatagctttaaattaaaattaaccaagccattgttaaacttgaaccttcccaatgagactatcaaagatattcttcttggtgaatttattgtcgttttatgcttagatactgaaaaattctataatgaagcaaataagatacatccggggattttgaagagaaaaagggtaactaacagtaaactaaacacaatggatttggttactgtcaatgacgaggccatttacagtgaaaataacggacaagagatttatttagggacaggttttctcagcagaattattttcgactttcaacggccaaaaaatatcataaattggatttataaagatagtgatgtaaaaagacgtgacaatagagaaaaaaacaagaaaaagaaaattactcaaaatgccaaaaaaagcaagtcaaagatagctaagcttagcaggagaaaacaaaattaa

SEQ ID NO: 202205 - DNA, 696 bp, Klebsiella oxytoca
gtgactccgactccgacagcgattcggatagcgacagcgatgccgactccgacagtgactcggattccgacagcgattctgactctgacagtgactcggactccgacagcgactctgactccgacagcgattccgactccgacagtgactcggattcggacagcgactcggattctgacagcgattccgactctgacagcgactccgattccgacagtgactcggactccgacagcgactcggactccgacagcgactcggactcggacagtgactcggatagcgacagcgattcggattctgacagcgactcggatagcgacagcgattctgactctgacagcgattccgattctgacagtgactcggactctgacagcgactcggactccgacagcgactcggattccgacagtgactccgactctgacagcgactcggattctgacagtgactcggactctgacagcgactcggattctgacagcgattcggactctgacagcgattctgactctgacagcgactccgactccgacagcgactcggattcagacagtgactcggattccgacagcgattcggattctgacagcgactcggattccgacagcgattctgactccgacagcgattcggattcggatagcgactcggatatcccgcaagccaacgcggataccaataccgctctga

SEQ ID NO: 202206 - DNA, 246 bp, Klebsiella oxytoca
atgtcatgggcagctcagcagaatataacacttcgttttattcagcctggcaaacctcaacagaatgcctgtattgagcgatataaccggacggtacgttatgactggctgggccagcacctgtttaactcactggacgaattgcagggctatgccacgcagtggcaatggttttataatcacgaacgtccgaatatggcactgaatggcttcacgccgatgcagcatattcaacgcatgacctga

SEQ ID NO: 202207 - DNA, 171 bp, Klebsiella oxytoca
atgaaaaaatcacgttttactgacagccagatcatgtccattctgaagcaagccgaggccggaacaccggtatcagatggtcgctccgtccgtttactgaatgcatcgatgactttaatcgtgaagcactggcgattgaagtggatttttccctgccagcaaatcgtgtag

SEQ ID NO: 202208 - DNA, 231 bp, Klebsiella oxytoca
atgagtaaatataaaaaagcattcgatgaagttaacttacttatgaatgaggtgcttgataaattcaatatgacattagaggaaactaattttcatcctacggaagatatatttagaatagttgttagagaaatcgaagttgataacttgaaggtaatatcttctatttttacgaataatgaatatcatgaggtggtaatccccccgaaaaaccggtgtgtttataagtag

SEQ ID NO: 202209 - DNA, 516 bp, Klebsiella oxytoca
atgtctattaataccctggcgcgggtcttcaccccgcacggcaacatcgtctacacggcgaacgattttcgccagaccttgcgtatcgccgtggccggcactatcgcgctgagcatttcaactttttatgacgtgcagtacggcgtcttctttgtggtttatccgctgatgctgctgtcgctggtgccggtgtttaaccgccacgtggcgcggcagtttgtgttcagtgcggcggtgaactgcgtcgaaatggtgttaatcgtcggctatttatcgcagtggccggtcatcatgacgctggtggtgtttggcctgtacgtgatgcgcctttcgctttatgagccaggggccgctgtttctgctggggtcgatgggcgtggtgtgtcaaagcacgatgctcaactttatgagctatcccaccagcaactggcacacgctgatgttctccaatatggaggcctgcgtgatggcggtggcgctcagcgcgctgctgaactacttcatcccggacgttga

SEQ ID NO: 202210 - DNA, 1104 bp, Klebsiella oxytoca
gtgtcgcgaactttagagcatttcaattatctgcaccaaattcctgaactgggctttgaggagtacaaaacgtcggcatacatcggcgatgcattagaagccgcggggtttcaggtgcaacgcaacgtcggcggtaccaccggtattgttgcgctgctggatagcggtaagccggggccggtcgtggcgctgcgggcggatatggatgcgctgggccatatgattgatggccatctggaggctcgccatacctgtggccatgacgggcactcttcggtggtgttgaccgccgcggaagagatcctcgccgaggggctggtaaaacgcgggaagctgaaaatactctttcagcctgccgaagagctgggtacaggggcgatcgcgctgacggaagcgggcgtgctggacgacgtggagatgctgttcggcttccacctcaggccgctggaggagtgtccgaagggcaaggcggcgccggcgatgtactactccgcctcggcgacggtgatggccgactttcacggcaaagccgcgcatgccgcccggcctcatctgggcgttaacgcgctggatgccgcgtcgcatgcggtgcaggcggtaaacggcattcatctggcgccttcgctgacctggagcgcaaaagcgactcgcttcctgtgcgatgcgggggtaaccaactcggtgccggcgaaagcgcacgtgtgctgggatctgcgtagcgcggaaaatgacggtatggcgatgctgaaagagcgggtggtacgggcgatagagagcagcgcggccgcttacggcgccaccgtcgatatccagatcgtcaaggagatgcctgccgcgattatcgatgaacaggccacggctatcgtcagccaggcgattcgggaaacgtttggcgaagccggcttaacggcagcgaagagtacgccgggcagcgaggactttttccactacctgcgcctgcgtccacaggtgaaaggcgggttctgggggctgggctgcgacctgctgccggggctacatcatccggagatgcacttcgatcgcgccgcgctggcggatggcgtgcgggtgtttaaatcctgcattcgccagctgctgggatga

SEQ ID NO: 202211 - DNA, 465 bp, Klebsiella oxytoca
gtgctaacactgatcctacctcctaagcagcatgagttaatgatgactgcactccaaaatgctggtcaacgcgaagtcggcgggattcttatgggtgaacatgtcgggacaaatactttcatcgtccgggagataactatacatcgccgtggtacgtttgcttcctttgtacgacgtattgaggatgctattggtgggctccgtgctttttttaaaggaactggatacgattatgttcgcttcaattatatcggtgagtggcattctcacccttcatttgagccatacccaagcagaacagacgatctgtctatgttacagattgtaaaggatgaaaccgttggtgcaaattttgtggctttgttgataatcaagctcggacctgatggaaaaatggtttcaacagtccatacatatcttcccgatggttcgaagattctctcaactcttaagattcagccttaa

SEQ ID NO: 202212 - DNA, 633 bp, Klebsiella oxytoca; identical to SEQ ID NO: 32308

SEQ ID NO: 202213 - DNA, 483 bp, Klebsiella oxytoca
atgaaatttttaaagaaacttaaatatgtaatcactctggggttaataacagcctcctgttcagtaatggcatcaccttatggagattcagatgttctgttcgggtgtatcataaaaggtaaaaccactaaagaggtggctgtgttgaggagtaataatgaggtcacttatttattcggtaaattggatattaacggaggtggtggggttattcctgaaatcattttggtaaaaaatgtgagccagctaagtcagacctggaattacagtagggctgagggtgtgtcgatacatacattgaacataccagaaaacgagtatacttactctgtttcctatatcgatgatggaaaaaatactgatggggaaataactgttttaaaacagggaaaagaaatcagtacgataaaatgtgatgatgtctgggagcaacatctgggtaacagcaatatgatgcatggtatccccgatgagtcagattga

SEQ ID NO: 202214 - DNA, 2604 bp, Klebsiella oxytoca; identical to SEQ ID NO: 197607

SEQ ID NO: 202215 - DNA, 513 bp, Klebsiella oxytoca; identical to SEQ ID NO: 197605

SEQ ID NO: 202216 - DNA, 348 bp, Klebsiella oxytoca
atgaaacagtttctttgcgaagactttttactgcacaatgacatcacccgccgtctttatcatgcgtatgcggcgcaatcaggctctacaatcgaagaaagaagctttggggtaaccattttttggtcccgagggtactttgtcgatacggtaggcctaaataagagagtcggtgagtctggagttacaggggaaaatcaacttacagaagccaccttcttagaaggtggtcttttacttattacggttcataacacgccgcagcagccaggtaaaccccattaccatgctgaacagaataaacagcagcagcacccaggtgaccgagattttcagcagggtacttag

SEQ ID NO: 202217 - DNA, 162 bp, Klebsiella oxytoca
atgcaggtagcgctggcctggctgctccagcgctcgccaaatattctacttattccgggcacctcttcgctacagcacctgcacgaaaatcttgccgccgcggaattaacccttccggccgacgcgttagccattctggataacctccagcctcacgcctga

SEQ ID NO: 202218 - DNA, 438 bp, Klebsiella oxytoca
atgcaacaagccatccgtatgagaatcgaagccgataaagcagcattagatgctggttttactacgaataattttgtcggtgaactgggcgaaaaattagctcatgccgtatatggaggtcgcatacttcctaactcagctaaaagcgcagacatacagacagacgacggcactttactccaggtgaaaacgaggaagccgaacaaaggaaaacagtttggtagcatccgctcttgggattttgattatctgatagcgataacgctgggtgataaatacgaagtcatcagggccttaaaaatcccagtatctacctgtaaagaactggccgaccatcgggcacatacgaactctttcataataaagccgaccagaaaattactttcacatgcggatattgaagatgtgacggataaatttcagagtgttgttttatag

SEQ ID NO: 202219 - DNA, 711 bp, Klebsiella oxytoca
atgattgtaggtattggagcagtcggtagtaatgtggcaacgtatcttgctcattgcaatgttggttcgataatttttgtggatcacgataatgtagatataagtaatttacatcgtcagttttattttgaagatgcaattaactctgataaaaatatggcgttactcaactctttgaaaaagatatctcctgatattaatattgacattatcaatgacattatcgatgatgatttttttaaaagaaatattctaccctctgatatagatttgataataaactgcgctgatgaacctaatgtggattacaccagtaaaataatcgccctctttagtatgactcataatatcccacatatagttggcgggggatataatcttcatcaaacccttatcggtcagacaattattccatttaagtcagcatgctttaattgttttaacctatttttgggaaaaataaatagcaaagaccttgtcaatgtgaagaaattgcaccgggtaaaacgaaaattaggttcattttcaccactatcaggtctggctgcaagccttgcaagcttggacgctataaaattacttgccgggaaagttgagcacttgcaacaagaaaataaaagggtcgaatttagtctcagaagtttatcttttaacgtccaagatgttccacgtgatcctgaatgtgattggtgtagaggaaagtatgaataa

SEQ ID NO: 202220 - DNA, 441 bp, Klebsiella oxytoca
atgattgtaggtattggagcagtcggtagtaatgtggcaacgtatcttgctcattgcaatgttggttcgataatttttgtggatcacgataatgtagatataagtaatttacatcgtcagttttattttgaagatgcaattaactctgataaaaatatggcgttactcaactctttgaaaaagatatctcctgatattaatattgacattatcaatgacattatcgatgatgatttttttaaaagaaatattctaccctctgatatagatttgataataaactgcgctgatgaacctaatgtggattacaccagtaaaataatcgccctctttagtatgactcataatatcccacatatagttgaacgagggttgttatttgtgtttctttgtggtatcgcaacagcgggaattaacccactgaaatttacaactttataa

SEQ ID NO: 202221 - DNA, 1185 bp, Klebsiella oxytoca
ttgttatgtgaacgactctcattgcttttaaagcatattctggtggatgaatatcaggatacatctcatatacagtatgaaatattacggctcattgttacgaaaaaaaataccatcgtgtcgttaataggggataaggaacaggctatttatactgggcttggagctattgtaaagaatagaagtgaattaatagatttttttgagcttgatgacttggctgagatgagattgactggttgctttagaagtagtcaatcaattattgatttttatagtaaatataaagatgagccatataagatccattctctttcagagtataaagagtttaaatcagttcttgtcactgaaagcacaatagactttactcaattatcgtcatacatttcaagtgtaattaatattcacttaggaaaaggtacccctcctaatgagatcgcagttttgtgtccaggttggtttgatgtaattaaattatctaatgagattattgctctgaatcctcattttgaaatagatggagtaatggtttctccaataccaaagaataatgagaacttttggctgaatctgattaaattgcttttaattaaaaaaacacctaataatttcaatctgagacagaaattgcttcgtgattttcacaaacaattagacgttttagaaccatggactgaatctttatcctcaaagcaaatgatgaagtggataaataaaatagctattacaattgattatgattgtgatatttctgattggataaataaagtgattagttgtttttgtgactatgtgcatattgattgcaattctgaaagctattacttcaaagaagcagaatctttgattgatgccactcaaaatagaatgagtaagtataagatgacttataaagcaaatgacttgcattcgttttttaattcaaaaagtggcataaaaataacgacttgtcactcaacaaagggtgatgagtttgaggtcgtcatttgcaccagcctgcttaatggaaaaatacctaactggaatgatattatagggtgcagtcttgaacatcagaattatgttgcccgtagacttctttatgtcatttcatcacgagcaaaaaaacatttatatatgatatctgaatcaggctgtaaaacaaatggaggctatccatataggattacacctcaattatga

SEQ ID NO: 202222 - DNA, 288 bp, Klebsiella oxytoca; identical to SEQ ID NO: 157208

SEQ ID NO: 202223 - DNA, 225 bp, Klebsiella oxytoca
atgttgaccttaattgatcaagtaagtctgatgattcactcagaacagacatgctcctggaacacctcattacggggattatggagtttctcacacacaatcgaagcagccaattcagggcttgttctgcgttgtaacagaagcgtacgaaatcaacataagcaaagttttacgtatttcttgcaagggtcgccgttgcatgaattttttcactcttataactaa

SEQ ID NO: 202224 - DNA, 132 bp, Klebsiella oxytoca
atgaagattatatcccccgccaactatatgtgggatattatgagtcatactaaagagggcgattattttactggtgtaatccacattaggttcatcagcgcagtttattatcaaatctatatcagagggtag

SEQ ID NO: 202225 - DNA, 228 bp, Klebsiella oxytoca
atgatcggaataggctatggctgtaactcctctgtcacgccatttggcttcgatatcctcggcaaggccgcgatcaaacgcataaagtctggaacgatcatactggccatcatgattgagaccctgaaggaggtatttaactggtgggtcttctgcctgataaccgaccaaaacaacgatgtatcgttccagaagaagcttaataaaattggtcgcccatccttctga

SEQ ID NO: 202226 - DNA, 471 bp, Klebsiella oxytoca
atgccccaggttcagctggctcttgccgccgtactccgtgctgaccttgatgtgctcttttccccgcgcgtcgtcgaggcggattttgttgttcgccggcgtgcgcagcacgttacgtttatagttccggatggtgacagggtccgggtgcgccgagtcgtgcaggacaccggctatatacggccggtccgggtcgccctgctcaaaggcgatggccacctcggtgcccgccagcaggggcagatgcaggccgtacgtgtcaccggcatacgggcgcgcctggcgtacccacagactctcttctcccggctgccagtggtcgcggtcgaacagcaggttgaccctgtaacgcccgtcgcggtcgatatggccgtagatatcactgcttttcgtgctggtgacccgcgccggcagcgtcccggccatcaccggcctggcgatagtggccgggcggaagccgtaatcttctga

SEQ ID NO: 202227 - DNA, 1278 bp, Klebsiella oxytoca
atggaaccaacattgtcattaaccgtgatgttctgtgctgcagtgggtgcttcagtatcagaatcgctgtcagaatccgagtcactgtcggaatccgagtcactgtcagaatccgaatcgctgtccgaatccgagtcactgtcagagtccgaatcgctgtcagagtcggaatcgctgtcagaatccgaatcgctgtcagagtccgaatcgctgtcagagtccgaatcgctgtcagagtccgagtcactgtcggaatccgaatcgctgtctgaatcggagtcgctgtcagagtcggaatcgctgtctgaatccgagtcgctgtcggagtccgagtcgctgtcagagtccgaatcgctgtcggagtccgagtcgctgtcagagtccgaatcgctgtctgagtccgagtcactgtcggaatccgaatcgctgtctgaatcggagtcgctgtcagagtcggaatcgctgtccgaatccgagtcgctgtcggaatccgaatcgctgtcagagtccgagtcactgtcggaatccgaatcgctgtctgaatccgaatcgctgtccgaatccgagtcgctgtctgaatcggagtcgctgtccgaatccgagtcgctgtccgaatccgaatcgctgtcagagtcagaatcgctgtctgaatctgaatcgctgtccgaatccgaatcgctgtcagagtcagaatcgctgtcagagtcagaatcgctgtcagagtcagaatcgctgtcgctatccgagtcactgtccgaatcggaatcgctgtcggaatccgagtcgctgtcagagtcagagtcgctgtccgaatccgagtcactatcagaatcggaatcgctgtcagagtcagaatcactgtcagaatccgagtcactgtcggaatccgaatcactatcggagtccgaatcactgtcagagtccgaatcgctgtctgaatcggaatcgctgtcggaatccgagtcgctgtcggaatccgaatcgctgtcggaatccgaatcgctgtcagagtcagagtcgctgtccgaatcggaatcgctgtccgaatccgagtcgctgtcagaatccgagtcgctgtcagaatccgagtcactatcagaatccgagtcactatcagaatcggaatcgctgtcagagtccgagtcactgtctgaatcggaatcgctgtcggaatcagaatcgctgtcgctatccgagtcgctgtcagcatccgagtcactatcggagtccgaatcactgtccgcatctgagtcagtttctgaaatcgaagagtggtga

SEQ ID NO: 202228 - DNA, 483 bp, Klebsiella oxytoca
gtgggctcggagatgtgtataagagacagtcttgcgcggacagcttcaccggggcgaacccatgtgagaagttgccattcaatcagtagtcttgtttctaaacggacagatgcattgttcagtgctgccagaaaacgagggagttcagaggggggtagggcaggcatattctgctttttaggcttactgaaacgttggcccagattatctgcggggttaaattcaatcagctcttctgtagccgcccaacggaagatttcattcaacctggaaatgagccgtcgcaaagtttccagtactcctcgttgttcaattggatcaagatgctgttttaagagcttgggacggatctcattgattggcacattacccagaccggggaaaatatttcgttcaaggcttcgccagatgtcgttagcatggtcctgggagatgcctgacgttttgactttctcatcaagccacttcttggctactgtttga

SEQ ID NO: 202229 - DNA, 228 bp, Klebsiella oxytoca
atgatcggctgtgatgactacgcgagtaacgccaaacccattgataattttattgatgagtccattcagttcatctatagcctggcgggcatgaatgaatgttttaagctcacttttctgagattcactctgagcatcaatgacatcgtgatagacatagattaccttagcgtcaccaaccgcctcgttagcttctgcccgggtccagctaagcagacttttggctga

SEQ ID NO: 202230 - DNA, 429 bp, Klebsiella oxytoca
atgatagagacggaatttttaatgcagataagagagctgtttaccaaacaactggatcgcccaatcaatggtgtggtgaaagccgaacagctggatgagcaaatcatctggactgagcttgacgagtatgtggtgacacgtgaacttgaccgccaccttcgtcacttttttgagacctacctgcctggtgtcagccatccagatgatcctagtgtggcgggtaaaattgggatctgggtatcgggttatttcggttccggtaaatctcactttataaagatcctctcttatctgctcggtaaccagaaagaccatgcgtttactgtcgccagatggatcgctgcgatcgagatactcccgcacccatttacagaagttggcaatgtcgagagtaaacatggattcgagattttccatactctgcactga

SEQ ID NO: 202231 - DNA, 288 bp, Klebsiella oxytoca
atggaaaggcaccaatacaccgatctctttgttcatctgctggcgtgcggcattctggaatgcatccagcagagaacgttcaccacgggagagatgtttaccggtagcccctactttgcggatcgcttcgaagaccttttgtaccagcagatattgatagggaataaaagggtagtgatcaacaaactcgacattatcactgtagttagcaagctcagctgtagtgctggtatcaaaggtcaattggttgcgaaggatgtcgcctttttgactaaacaattcggctag

SEQ ID NO: 202232 - DNA, 195 bp, Klebsiella oxytoca
atggccgagcaatacaagccacgaatgcagacgacgctggcggggtatctgacgagctgtattgtgcagtttgctcctgagttgaatgactctcactgtttcctgttgtcgttccaggcgaattttttcttcaagctgaaggattttctccagaatcgtttcccggtttgcagcctgttcttcaggctcgcatga

SEQ ID NO: 202233 - DNA, 213 bp, Klebsiella oxytoca
atgctgacagtgattcagactccgacagtgatacggatgctgacagcgatagcgactctgattcagacagtgattctgattcagacagtgattctgattcagatagtgattccgattctgacagtgattccgactcggattcagatagtgattcggatgctgacagcgactccgatactgataccgagctacctaccgcggcacagaacatag

SEQ ID NO: 202234 - DNA, 747 bp, Klebsiella oxytoca
atggctgaaaataattttaagccgtttgctgttggtgcaggtgcaaacgtgtcttcacaggcggactgggaaagcctggttgcattgtccaccgggtttactgcggggatagcccgttccgatcaggtcaataaagcgttgcgacaggcgacggtaattgcaagcgtcctggcgcagtttatcgcagacaccactgattcagatgtgttggatgatggtgatactgctgcgttactcaccaaattaatagaggcgctgaatctgagcggtgatgaccgattccttaaagttgcgggccgcttatcagaaattgctacagccggttctgctgcccaagcctctgcgcgtacgaatattgggctgggtaattctgctacacgagcggtaggaactacagctggtacggtggccgcaggggacgattcgcgaattactggcgcattacagaaagatcaaaaccttgcggggttaactgatctggcaatcgcaaggggaaatcttgggcttggcgcgatggccacaaaagataatcctccgtttataaatgaaataggggcctatgcatttgcatggtatgacggagcgatgggttacacgggcactgtagatggctcggcattgtttccctcgacaggtgatggtaatcacgcaacaacgccgctatccggtacgtggcgttgtatggggcagacagaaaccattaacgaccagcacagaacaacattgtggcagaagattgctaattaa

SEQ ID NO: 202235 - DNA, 489 bp, Klebsiella oxytoca
atggaatttgaaatcaaaggcgtgaattaccgcgctaataagctcggtgttttcgaacagttgaaagtctcccgcaaactcctgccaattctggccggactggtgtcggattttggaagtatcaaaagccttcttcctgctggtggggttaaagagctatttaatacggaagagggagtagagggagacaaaaccgtcaacctggaccgtcttgaaccgatttttaacacactgcttccgcgtatcgctgatgaactatccaaactctccgaagacgatacgaacgccattattcacccttgtcttgcagtggtagggcgtcaaaacggcaagacgtggacgccggtattccgcagcggagaactgatgtttgatgacatagacctcttcagcatgctgcagctggtggcgcgggtggtcgccgacagtttgggaaattttttgccagaaccccccgccagcgagacgcccaccccgccaacggcctga

SEQ ID NO: 202236 - DNA, 504 bp, Klebsiella oxytoca
atgaaaagcgggctaacggttagcgaggacaattacgccggtgtcctcgacgcgctaaagcagctttccggcactgacgtgctggtgggtattccggcggataaggcgcaacgtgaagaagggccgctgaataacgtcgaaattggttatctgcaatccactggcgccacggtggagatcgacggcgaaaccgtcacgcttccgcccaggccttttctcgacatggggattgaggattcgcgggataaaactaccgctcggttaaaacttgccgcacaggctgcgctggatggcaacgtagcgctggcggagcagcatcttgaagccgcagggcagattgcccgagacgccgcaaaagcggttatcggcgacggtgaccgccttacgcctctctcagagaaaacgctccagcggcggcgagagcagggattacctggcgacaagccgctttatgctcatggtttcctgttgcgggcgattaactacgtcgtgaggaaaaaataa

SEQ ID NO: 202237 - DNA, 420 bp, Klebsiella oxytoca
atgacaataaaaattgagcggttaaacggatttgagtaccactatgagaagcacccactgggtggaacatgggtttattattggtatttcagaccagtggggcaaactgagtggtgcaatttttacttgccaactggcaacgctaaaaaagcggatatgattagctttttaaagaacccagaggattccgccgcccactataagtcttggtttgaaaccgtcagtgatgttgagaatgcagagctaaacctgagcagagctcaagctcatcttgaaagggtttctgatccggaatggggagggcgtggtaataacccagacaaggatgcgaggataaaaagacaggccctcgatgatgttgatagcgctcttcgaaagttggaaaaagctaaacgaatacgacaacagataaccaaataa

SEQ ID NO: 202238 - DNA, 300 bp, Klebsiella oxytoca
atggttaactggatttctgagtcgatttcaagggtagtgcagcactacaaagaaatgactgcgattgctctgctgctaactttcataaagatttccctgcctatatttttacgctggcttaacaaaagattggatcgctctgagcaccgcaagagaataaagctatggacggatattggctgcagcgaggaagaggcggaagaaataatcagaaagttcgaagatgatgtcaggaaggaaatgaagagaacctcactcctctctcgcatcaggaatatcatccgcaaaaagacccagtaa

SEQ ID NO: 202239 - DNA, 285 bp, Klebsiella oxytoca
atgtacccggattatgtgcagattgaaatgcctgctcagtacagccaggcagatgcagcctggatacaggaacagctgttgcggttgccttcatcgctgcgacggaaaatagccctgaagtattcagaggtttacgaaatcgagtttaacgccgagcccgtttcatatcgacaggagaaccgagctcgacatgaagccaatgtgaggcttcgcagattcgtggatgcacacggacgcgcactgcaggggtatacgacccagccaccccttgccggatcacggtaa

SEQ ID NO: 202240 - DNA, 222 bp, Klebsiella oxytoca
atggcaaagagacgcagcagcaaaacccgacaagggctatgtggtttgactcttgcgcaagggcaccggctgacgcgggcccccatcccagagcaaaccaacacacagcagtttgtatctcaatttgaaactggtgacggcaatgtgcagatgccattaaaccgcaacatgcgccgttatgcccggcacatcggcatcaaactcgcgaaggtaacgaaatga

SEQ ID NO: 202241 - DNA, 945 bp, Klebsiella oxytoca
atgcggcctgtggcgatctcccctggggcggcgcaaagcgccttgcccgggctacgggttcatcgccgtctgcgagcggtagcccggacagatgcgcagcatcgcctccgggagccatatccaatgcggcctgttgcgatctccccgggggcggcgcaaagcgccttgcccgggctacgggttcatcgccgtctgcgagcggtagcccggacagatgcgcagcatcgcctccgggagccatatccaatgcggcctgttgcgatctccccgggggcggcgcaaagcgccttgcccgggctacgggttcatcgccgtctgcgagcggtagcccggacagatgcgcagcatcgcctccgggaaatcatatccaatgcgccctgtggtgagctccccgggggcggcgcaaagcgccttgcccgggctacgggtccatcgccgtctgcgagcggtagcccggacagacgcgcagcatcgcctccgggaaatcatatccaatgcgccctgtggcgagctccccgggggcggcgcaagcgccttgcccgggctacgggtccatcgccgtctgcgagcggtagcccggacagacgcgcagcatcgcctccgggaaatcatatccaatgcgccctgtggcgagctccccgggggcggcgcaagcgccttgcccgggctacgggtccatcgccgtctgcgagcggtagcccggacagacgcgcagcatcgcctccgggaaatcatatccaatgcgccctgtggcgagctccccgggggcggcgcaagcgccttgcccgggctacgggtccatcgccgtctgcgagcggtagcccggacagatgcgcagcatcccctccgggaaatcatatccaatgcgccctgtggcgaactccccgggggcggcgcaaagcgccttgcccgggctacgggttcatcgccgtctgcgagcggtag

SEQ ID NO: 202242 - DNA, 1812 bp, Klebsiella oxytoca
atgaatttattctctacacattgccacgaagtcgtaagggaatatgtgcaaaacgttatgattattgatgatggtgcacagctagatgctgcaaatgagccatcgtctaccataatattgaatactcctatcagtacaagtccattagtttcaagctttcaacaaaatattgttttcccgaaaaatcaattacaaaccctaccggaaaacgtgcaccctcttgatacactatctttgacaaatgctttctttgaagaaggtattgttgctggaatttatcaacccaaaatacaaaacaatcaaactccggagcaatttgccgctatcgctagatctgcatgtgaaaaagctgacatcattattttagactggattcttaaggaccgaaaatctgatttcagcaaagccatagtgaaagagatacttagaagcgatagtgagaatggaggtagaattagggcaataatgatttacactggcgagtctcatttgaatgatcttagagatgagctatgtgtttatttggctgattcaaatcttgataaaaatatagattttgaaattcattcaagtaatttaataattgctttttataataaagatcatcaaacttatgatttcgggccagaaagagctgttagtgaatctgaaatccctactgctgcattaaaatcattttcgaaattagtcaatggattagtccctgcgtttgcaattaaatctgcagcatctatcaggaaaaatactggaagaataatctctaggtttggcaaaaatcttgactctggatatttagctcatagaattcttttaccaagagctgatgattctgaagtatttatgctggaaaacttcgtatcctatatgagaaatattttagccatttcgagagttgacaattcaactttgggtgcttgcgcaatagaaaaatggattaaagacaacgccgaaaaacttgaaaagaaaatagttcatagcgatataacatgccagattgaattagctgacatgataaaactatcaagggaagggttttcaggtaatttgcaaaaaatcatcaacaaaagcaacaaatcaatttctaatgaatttgatgatataagtaagaaatcatcactagacgcaatatcaatattcaatacggataaaattcaggttattgattcctcagttgagctatctattctttcctctttccgacgtacatttaaagatattataggagttaatgaatcaccatatttaactcaaggttcacttatatactcgaagaacaaaaaccagtttctgttgtgtataacacctaaatgtgacaccgttagaataagtaaaaaattaaatttttcatttgttactctagatgaaacaaccgatggaaaatttgatattgtcataccaaaaaatgatataatagataaccataaaaaaaccattcatgaatctgaaaaattaaaaattgtagaacaagtagttgataacattttatcgaaaaatattaaagcaaataaatctcttagaaaacaattccttactttccctccatacgaagcgaaagaatacatttacctacatacaacgcaaaaatttcataaactcgaacatattacatttgaaactgatgagcgtaaaagagtattatcgagcaatgcagaccctgacatcattattttctgggatgagaattgtgacgaatatatctgggttggagatttacatgatttaaatacaatatcccgggtgggtaacttagtttctaatcttaacaggactggaacagatgaagttgaatggttgcgccgtaatgcacgataa

SEQ ID NO: 202243 - DNA, 561 bp, Klebsiella oxytoca
atggcggctaacgccttatccgggctaccggcggtctgcggtcccgtagcccgggcaaggcgctttgcgccgcccccgggggaagcgtgcaggatgttgcagaattttcccggaggcgatgctgcgcatttgtccgggctacgcgtccccggcggtctgcggtcccgtagcccgggcaggcgctttgcgccgcccccgggagaagcgtgcaggatgttgcagaattttcccggaggcgatgctgcgcatctgtccgggctacgcatccccggcggtctgcggtcccgtagcccgggcaggcgctttgcgccgcccccgggggaaacgtgcaggatgttgcagaattttcccggaggcgatgctgcgcatctgtccgggctacgcgtccccggcggtctgcggtcccgtagcccgggcaggcgctttgcgccgcccccgggggaaacgtgcaggatgttgcagaattttcccggaggcgatgctgcgcatctgtccgggctgctcttccccggcgggaaaacccatcaaccctacgccgaattaatatgttccttgcagtaa

SEQ ID NO: 202244 - DNA, 672 bp, Klebsiella oxytoca
ttgcttaacgtgagttttcgttccactgagcgtcagaccccgataagcaccgtcagcgcccccgtttgcccgccagcgttgaggataagcaccttcagcgcccccgtttacccgccagcgttgaggataagcaccgtcagcggtcacgtttacccgccagcgttgaggataagcaccgtcagtggatccgtttacccgccagcgttgaggataagcactggcagcggccctgtttacccgccagcgttgaggatgagcaccggcagcggccctttttgcccgccagcgttgaagatgagcaccggtagcggatccgtttacccgccagcgttgaggataagcactggcagcggccctgtttacccgccagcgttgaggatgagcaccggcagcggccctttttgcccgccagcgttgaagatgagcaccggtagcggatccgtttacccgccagcgttgaggataagcactggcagcggccctgtttacccgccagcgttgaggatgagcaccggcagcggccctttttgcccgccagcgttgaggatgagcaccggtagcggatccgtttacccgccagctttgacactaccagcgactacagtcgacattaaaatcgccgtgacctgctgcagcgtgatatacgcccggctggcatcaaaagaatcttaa

SEQ ID NO: 202245 - DNA, 528 bp, Klebsiella oxytoca
gtgacgcgcccggacgaagtttgcactgttcgccaggacctggattttatggctacagatcgcggcgctatttttgctgattacaacatgcccgccagcctgcaggcgatgagcggggtttataatgccgggcaagccattgtctgccttgacaatgattctgtggctgagtatgtgaactttatgaaccgtcgcatcagtaacagcatcaccaatcagaacctgactgcagcagctaaaattgtcggtagttcagagataaccgtggaagttaaacgtttagggcaagtgagaaacggccatcaggccttcatcagttcgtttatcaacgacgatatgcgtgtatttgatggcatcaacaaatacagcggtgcgccgctggtctcaacacagctgaaccggcttatgattggccgagcaagaacgacacctgccgcggtttccaatgcttatctcaagcgcctggtgtattaccctgttacgttagttgatactgagctgacgtctcagttcaatgcactttcataa

SEQ ID NO: 202246 - DNA, 216 bp, Klebsiella oxytoca; identical to SEQ ID NO: 118659

SEQ ID NO: 202247 - DNA, 300 bp, Klebsiella oxytoca; identical to SEQ ID NO: 198471

SEQ ID NO: 202248 - DNA, 216 bp, Klebsiella oxytoca; identical to SEQ ID NO: 156084

SEQ ID NO: 202249 - DNA, 345 bp, Klebsiella oxytoca
ttggcagataaacgcagcaaaatgcttacgatgtgggtgactgaggatgagcaccggcgtctgctggagcgctgcgagggtaagcaactcgcagcctggatgcggcagacgtgcctggacgagaagccggcacgcgcctgcaaacttccgtcgatctcgccggcgctgcttcggcagctcgccggtatgggtaacaacctcaaccagattgcccgccaagttaacgccggtggcggcagcgcacacgaccgcgtgcagatagtctccgcgctgatggccattaatgccggactcgagcggctgcggcatgccgtactggaaaagggagctgacgatgatcgttaa

SEQ ID NO: 202250 - DNA, 210 bp, Klebsiella oxytoca; identical to SEQ ID NO: 198485

SEQ ID NO: 202251 - DNA, 300 bp, Klebsiella oxytoca; identical to SEQ ID NO: 198484

SEQ ID NO: 202252 - DNA, 1110 bp, Klebsiella oxytoca
ttgaataacaagataaaattagagaaagagatcgcatgggccagtcagaatatgccgcgcaccctgcgtcaggtcgccgccctgccggatctcagccaggtgcgtctcgcctgctgtatgcacctcgatatgaaaatgatccccctggtgcagggaattctggagaaaggggcgaaggtttttcttaccacctgtaacccaactacggtgcaggatgacgtggtcgcctggctggtggagcgcggcgcggaagcctgcgcctggcgggatatgagcgacgccgagtggcagcaatcctgggaaaaagcgattgcctggcagccgacgcatctgtgcgaaatgggcgcggatattaccaccctactgcatcagcgcggggagtttggcaatatcgtcgcgggccttgaggcgaccggctctggcgttagccgcctgggcgatattcgccccggctacccgatttttaactgggatgatttgccggtaaaagagggactgcacaaccgtcatatggtcggcctgaccgcctggcacacctttttccagacgacccacctgaccctgcatgagaaaaaagtgctggtcatcggctatggtctggttggccagggcgtagcggcggcggcgaaggccttcggcggccaggtgatggtagcggaaatcgacccggcgcggagactacaggcggcctacgatggctggcacgtcgttgaattacaggaggcgattgcctctgcggacgtggtggccacggcgaccggcggtaaaaaagtcgttaaccgccaggcgctggataagtccaaagacggggtgtttattctcaacgtgggtcacgtggcggaagagattgactgtgagtacctgcgccagttccgtcatgaagaggtcatgccctatatcaacgcttaccggatgggcgataaaaccgtttatctgatggcgaacggttcaatgctcaacctgaccgcgggctttggcgatagcctgaacgcctttgacgtgaccctggcggtaatggccagcggcattcagcatatcgtgaccgacggcatgacggcaccggcggacgtttacctcctgccacagagcgtatggcaaaaagcgctgtaa

SEQ ID NO: 202253 - DNA, 933 bp, Klebsiella oxytoca
atgcaggaaaattccactccggcccccaccgtgggaagtcctgtcacattcagtatttttgcgaaagcgaataccgcgagtgttatccagctggtcgctcagggtgcattaacaacgacgcagtttgcaaacttcgatttggtcaacggcttgagaacccgtagctcgtccggcatcctgcagacaagcatgcggaaatataaaaatggctggtaccgtctgagtattaccattacccctgcgggcacagcctccccgcagttcacactggcgcttgtgaatgacgtgacatcagccgctgcgttgccagcctatacaggttcagggaagggtgtttacatctggggggcgcagattgaaaactgggacggtgttacgccatacatcccgacagctggcgcaactgtaacccggcctgatgaggtctgcaccgttcgtaccgatctggattttattgctgctgaccgcggggcaatttttgctgattacaatatgcccgccagtttacaggcaatgagcggcgcctataacgccgggcaggcaattgtctgtcttgataatgacagtgtcgctgaatatgtcagttttctgaaccgcagaatcagtaacagtatcaccaatcagaacctggcggccgctgcgaaaattgtcggcagttctgaagttacggttgaagtaaaacgtctcggccaggtacgaaacggccatcagtcctttatcagttcatttatcaacggcgatatgcgtgtatttgacggcattaacagatacagcggaacgccattggtatcaacacaactgaaccggctgatgatcgggcgagcgagaacgacaccctcagcggtttccaatacatatctcaaacgcctggtgtattacccggtcacgttagtggaagctgaattagtatctcagtttaattcactctcctag

SEQ ID NO: 202254 - DNA, 1122 bp, Klebsiella oxytoca; identical to SEQ ID NO: 198497

SEQ ID NO: 202255 - DNA, 981 bp, Klebsiella oxytoca; identical to SEQ ID NO: 82814

SEQ ID NO: 202256 - DNA, 546 bp, Klebsiella oxytoca
atgagcatctccaccacgaaacgccgcaatgaagaagtcaatgttggtctttctgatcgccggaaagcagagattacagccccaaagtttgatctgtttggtgaaacttacacgtttgttaagactttctctggcactgtcattaattccaacccaagcaataatcagatctgggtaaaaaccgacgctggggatgagaagcagatttccgactatggtatccccttcagaagttcacacactatttataaatacgagcttcgccagtatagtgaggatggttcgtataatgtgtataaagatgcacttatcgttaataagaacacgggagaacatgaagtaaacttaaacaggaaaaaagttgtcatccccgcttttctgacaatgctgttccataatgcttctacagcatcgtattacagagcaatgcctgtttcgaaactattatctattgttttcattttactttgtactgctgcacttatttcatttctcacattgccttggggctttaaagatggatatgtgttaatgagcacagaataa

SEQ ID NO: 202257 - DNA, 210 bp, Klebsiella oxytoca; identical to SEQ ID NO: 198485

SEQ ID NO: 202258 - DNA, 300 bp, Klebsiella oxytoca; identical to SEQ ID NO: 198484

SEQ ID NO: 202259 - DNA, 159 bp, Klebsiella oxytoca
atgggtaacaacctcaatcagattgccaggcaggttaacgccggtggcggcagcgggcacgaccgcgtgcaggtggtcgccgcgctgatggccatcgatgccggactcgagcgcctgcggcatgccgtactggaaaaggaggcaggcgatgatcgttaa

SEQ ID NO: 202260 - DNA, 216 bp, Klebsiella oxytoca; identical to SEQ ID NO: 156084

SEQ ID NO: 202261 - DNA, 300 bp, Klebsiella oxytoca
atgagccagcgcacgaaagggatggtgcgcatggtcagccagacgtggctgaccatcgtgctgatctccgtcctgctgatcgcgtcgagcgcgggcattctgtgggggcaggggaaccggatactcgagaactacacgaccatccgggagcagaagagcacgcaggccatgctgtcagagaggaacagcggcgttcagctctcgacgtgcggagagcagagacgccgatgcgtgagggtgaatccgcaagcgggcggattcggagaggactcgagctggatgatactggcggggaaatag

SEQ ID NO: 202262 - DNA, 183 bp, Klebsiella oxytoca
atgaatatcagacgcccgctgacgcagggcctgttcgaggatctggttgacccgttcggcgatattttccggcccgtcgttctgcgccagttgcgcctgcttttcctgggcctgcagacgcttatccatctgctcctggctccagcattcaatgtcgatccgcttttgcgtcgcgaagcgtag

SEQ ID NO: 202263 - DNA, 699 bp, Klebsiella oxytoca
atgcggcctgtggcgatctcccctggggcggcgcaaagcgccttgcccgggctacgggttcatcgccgtctgcgagcggtagcccggacagatgcgcagcatcgcctccgggagccatatccaatgcggcctgttgcgatctccccgggggcggcgcaaagcgccttgcccgggctacgggttcatcgccgtctgcgagcggtagcccggacagatgcgcagcatcgcctccgggaaatcatatccaatgcgccctgtggtgagctccccgggggcggcgcaaagcgccttgcccgggctacgggtccatcgccgtctgcgagcggtagcccggacagacgcgcagcatcgcctccgggaaatcatatccaatgcgccctgtggcgagctccccgggggcggcgcaagcgccttgcccgggctacgggtccatcgccgtctgcgagcggtagcccggacagacgcgcagcatcgcctccgggaaatcatatccaatgcgccctgtggcgagctccccgggggcggcgcaagcgccttgcccgggctacgggtccatcgccgtctgcgagcggtagcccggacagatgcgcagcatcccctccgggaaatcatatccaatgcgccctgtggcgaactccccgggggcggcgcaaagcgccttgcccgggctacgggttcatcgccgtctgcgagcggtag

SEQ ID NO: 202264 - DNA, 642 bp, Klebsiella oxytoca
atgtctattcgtgaactgatcgatccctcaaactcagcgcttatttttattgaccaccagccgcaaatgtcttttggcgtggccaatattgaccgccagaccctgaaaaataatacggtggccttagccaaagcgggcaaaatttttaatgttccggtgatttatacctcagtagaaaccaaaagcttcagcggctatatctggccggaactgctggccgtacatcctgatgtgaaacctattgaacgtacctcaatgaattcctgggaagacgcggcttttgttgaagcggtaaaggcgaccggacgcaagaaactgattatttccgcactgtggacagaagtctgcctgactttcccggcgctgatggcgctggatgcgggctatgaagtttacgtggtgaccgatacctccggcggcacctcggttgatgcccacgaacgctccattgaccgtatggtgcaggccggcgcggtgccggtaacctggcagcaggtgctgctggagtaccagcgcgactggtcgcgtaaagagacgtatgacgcggtgatggacctggtgcgcgagcacagcggcgcctacgggatgggcgtggattacgcttataccatggtgcacggcgcgccagagcgtaaagcttaa

SEQ ID NO: 202265 - DNA, 903 bp, Klebsiella oxytoca
atgcgcctgaaccttgatgtcctgttgattctcgacgcgctggacaaacatggctcttttgccaccgccgcagaatcgctatttaaaacccctgccgcgctgagctacatgattcaaaagctggaaaacgatctgaatatcactctgttggatcgctccgggcaccgggcgaaatttaccgatacgggcagaatgatgctggagaaaggccgattgctgctgaatgccgccaaagatctggaaaagcaggcggtgcagctcagcgccggttgggaacgggatctggcaatcgccctggatgactctttcccgtttagcgcgctgctgccgctgatcgacgcgttctacgcccagcatccgcaaacccgccttaactttacccaccatacccttgcgggctcgtgggaagagctcacccacaacggcgcggatattattctcggggcgatcaatgaaccgccgacctccgccgaatggtcgtggaaaatgctcggcgccatggacaatattttcgtcatcgcgccggggcatccgctggcggaaacaacccaaccgctgaccaacaagcagctcagcctgcatcgcgcggtggtcatcagcgacagcgcccgctactgccatccgctcaacagcaacctgctcgacgagcagccgcaaatccgcgtcgatgatttcgccagtaaagtcgaactcttgcgcgccgggctgggctgcggctttttaccgcgccacattgcccggccgtggctggaaaaaggcgagctggtcgaaaaggccgtcatctcctgccgcgagaaagatatcacctatatggcctggcgcagcggcaacgacgggctggcccagcgctggtggcgcgaggccattttgcaaagtgaaagcctgagccagctttacgactag

SEQ ID NO: 202266 - DNA, 1818 bp, Klebsiella oxytoca
atgttgaaggcatggcacctcccggttgctccgtttattaaggaacagcaggaacgactgattattacgctatggttaagcggggacgatctgccgccgcgggtcacgctgcgcgcggaagaggataacgaagagctgtcgctgccgatgcaccgcctgcggcaggagccgcatccgggcgtggtggcgtggcgcggggaaatcagcctcgttaacgggcagccgcgtcggcgctacagcttcaagctgctgtgggccgaccgccagctgtggttcacgccgcaggggttcaaccgctttccgccggcgaggctggagcagtttgcggtcgatctgccggacagcggaccgcagtgggtagccgatcaggtattttatcaaatcttccctgaccgttttgcccgcagcgagtctcgcgaagcgggacaggatgcgatttattaccatcacgccgccggtcacgacatcgtacgcaaagcgtgggatgaaccgctaaccgccgaggcgggcggctccaccttttacggcggcgatctcgatggtatcagcgagcggctgccgtacctgaagcagcttggcgtaacggcgctgtacctgaacccggtatttgtcgcccccagcgtgcataaatatgataccgaggattatcgtcgcgttgatccgcagtttggcggcgatgcggcgctgctgcgcctgcgccaccatacgcaaaaagagggaatgcgtctgatcctcgatggcgtgttcaaccatagcggcgattcgcatgcctggttcgaccgccaccagcgcggtagcggcggcgcctgccataacgccgattcgccgtggcgcgactggtataatttttcccccgagggcgttgcccacgactggctgggatacgccagcttgcctaagctggactaccggtcgtcgacgctgatcgatgaaatctatggcggggaagatagtatcgtgcgccactggctgaaagcgccatggagcatggacggctggcgcctggacgtggtgcatatgctgggcgaagagggcggggcgcgcaataacctgcgccatatcgccggcattaccctggcggcgaagctggagcggccggacgctttcgtgttcggtgagcatttcggcgacgcgcgccagtggctacaggccgacgttgaagactcggcgatgaactaccgcggctttacctttccgctgtggggctttctcgcgaacaccgatatctcctacgatccgcagaaaatcgatgcgcagacctgtatggcgtggatggataactatcgcgccggactgtcgcaccagcagcagctgcggatgtttaaccagctcgatagccacgataccgcgcgctttaagtctctgctcggcaaagatgttgcccgcctgccgctggcggtggtgtggctatttagctggccgggcgtgccgtgcatttactacggcgatgaagtgggcgtggatggcaataacgatccgttctgccgtaagccgttcccgtgggatccggctttgcaggatggcgctctgctcgaactgtacaagcggatgagcaagctgcgtaaggccaatcaggcgctgcgctacggcggctgtcaggtgatttatgccgaagataacgtggtggtgttcgtgcgcgtctataagcagcagcgcgtgctggtggcgatcaaccgcggcgaagcctgcgaggtggtggtggaggattcgccgctgctcgacgtcaacggctggcagctgaaagagggcgccggggcgctacacgacggcgtgctgacgctaccggcgatctccgccagcgtctggtttagccgctag

SEQ ID NO: 202267 - DNA, 1371 bp, Klebsiella oxytoca
atggaaagtagtaacaagcttaagcgcgggctaagtacccggcatattcgctttatggcgctggggtcggcaatcggtaccggccttttctatggttcggctgatgcgattaaaatggcgggtccgagcgttctgttggcttatattatcggcggcgccgcggcctacattatcatgcgcgcgctgggcgagatgtcggtgcataacccggccgccagttcattctcgcgctacgcgcaggattatcttggtccgctggcgggctatatcaccggctggacctactgtttcgaaattctgattgtcgccatcgccgacgtcacggccttcggtatctatatgggcgtctggttcccggcggtaccgcactggatctgggtactcagcgtggtgctgattatctgcgccgtcaacctgatgagcgtgaaggtcttcggcgagctggagttctggttctccttcttcaaagtcgccacgattatcatcatgatcctcgccggtttcggcatcattatctggggtattggcaacggcgggcagccgacgggtatccacaacctctggagcaacggcggcttcttcagcaacggttggctggggatggtgatgtcgctgcagatggtaatgttcgcctacggcgggatcgaaatcatcggtatcaccgccggcgaagcgaaagatccggagaaatccattccgcgcgccattaactcggtgccgatgcgtatcctggtgttttacgtcgggacgctgtttgtgattatgtctatctatccgtggaaccaggtggggaccaacggcagcccgttcgttctgaccttccagcatctcggcatcacttttgccgccagcatcctgaactttgtggtgctgaccgcttcgctgtcggcgattaactccgacgtctttggcgtggggcgtatgctgcacggcatggcggaacagggcagcgcgccgaagatgttcgcgaaaacctcccgtcgcggggtgccgtgggtgacggtgacggtgatgacgattgccctgctgttcgcggtctatcttaactacattatgccggagaacgtcttcctggtgatcgcctcgctggcgaccttcgccaccgtctgggtgtggattatgatcctgctgtcgcagatcgccttccgtcgccgcctgccgccggaagaggcgaaggcgctgaagttcagggtgcctggcggggtcgcgaccacggtgattggcctgctgttcctggtctttattatcggtctgatcggctaccatcctgatacccgcatctcgctgtacgttggctttgcgtggattctcctgctgctgattggctggcagtttaaaacccgccgcgagcgaaaactggcgaaagcctag

SEQ ID NO: 202268 - DNA, 1320 bp, Klebsiella oxytoca
atgacccatcagttaaaatctcgcgacatcatagcgttgggctttatgaccttcgcgctgttcgtcggcgcaggcaatattatcttccccccaatggttggcttacaggccggcgaacacgtctggagcgcggccattggctttctgattaccgccgtgggtctgccggtgctaacggtcgtggcgctggcaaaagtcggcggcggcgtagagagcctgagcacgccgattggtaaagtcgccggtatcctgctggcggtcgtctgctatctggccgtagggccgctgttcgcgaccccgcgtaccgcgaccgtctcttttgaggtggggattgccccgctgaccggcgacggcccgctgccgctgctgatttacagcgttatctattttgcgctggtgatcctcgtttcgctctacccgggcaagctgctggacaccgtggggaatttcctcgcgccgctgaaaattatcgccctgattattctcgccgtggcggcaatcgtctggcctgccggtccgctgagccacgcgatggaagcctaccgcaccgcgccgttctctaacggcttcgtcaacggctatctgaccatggacaccctcggggcaatggtctttggtatcgtgattgttaacgccgcgcgttctcgcggcgtcaccgaagcccgcctgctgacccgctacaccgtctgggctggcctgatggccggcgtgggcctgacgctgctgtacctggcgctgttccgtttaggttccgatagcggcacgctggtggagcagtccgctaacggcgcggcgattctgcatgcttacgtccagcacaccttcggcggcgcgggaagcttcctgctggcggcgctgatctttatcgcctgtctggtgacggcggtgggcctgacctgcgcctgcgcggagttctttgcccagtacctgccgttctcctaccgtacgctggtgtttatcctcggcctgttttcgatggcggtctccaacctcggcctgagccacctgattcagatttcgattccggtgctgacggctatctatccgccgtgtatcgcactggttgtattaagctttacccgcggttggtggcataattcgtcccgcgttatcgccccggcaatgtttatcagcctgatgtttggtatcattgacggcattaaagcgtcggcgtttgcagagatgatgccgtcctggaccgcgcgtctgccgctggcggagcagggtctggcctggctgatgccaaccgccgttatggtggtgctggcggttatctgggatcgcgcagcgggacgtcaggtgacatccagcgcgcactaa

SEQ ID NO: 202269 - DNA, 1290 bp, Klebsiella oxytoca
gtgctggaacggctgtcatggaaaaggctggcgcttgagcttttcttgtgttgtatcccggccctgatcctcggggcgtttttaggttatctgccgtggtttttattggcggcagtgaccggtcttcttgtctggcatttctggaatctgatgcgcctgtcgtggtggctgtgggttgatcgcagcatgacgccgccgccgggcagcggcagctgggagccgctgctttacggactgcaccagatgcagatgcgtaataaaaagcgccgccgtgagctgggaagcctgattaagcgctttcgcagcggggcggagtctctgccggatgcggtggtgctgaccaccgaagaaggggtgatgttctggtgcaacggtctggcccagcagatcctgaatctgcgctggcctgacgataacgggcagaacatccttaacctcttgcgctaccctgaatttgccaattatctgaaataccgtgatttttccaaaccgctcaatctggtgctgaataacggccgtcatctggaaattcgcgtgatgccctatagcgataaacagctgctgatggtggcgcgcgatgtcacgcagatgcaccagctggaaggggcgcggcgaaactttttcgccaacgtcagccacgaactgcgcacgccgttgacggtgctgcaggggtatctggagatgatgcaggagcaggtgctggaagggggaacgcgcgaaaaagcattgcacaccatgcgtgaacaaacccagcgcatggaaggcctggttaagcaactgctgacgctgtcgcgaatcgaagccgcgccggtactggcgatgaacgataaaatcgatgtgccgatgatgctgcgggtggtcgagcgcgaggcgcaaacgctaagccagcagaggcaggtgctgcatttttcggtcgatgaatcgctgaaagtactgggtaatgaagaacagctgcgcagcgccatttccaacctggtctataacgcggtcaaccatacgccgccgggcacggacattaccgtaagctggcagcgcgcgccgcacggagcgttgttcagcgtcgaagataacgggccgggcatcgcgccggaacatattccgcgtctgaccgagcgtttctaccgggtggataaagcgcgttcaaggcagaccggcggcagcggtctggggctggcgatcgtcaaacacgccgtcagccatcacgatagccgcctcgaaattgagagtacgctggggaaaggcacccgctttagcttcctgttgccggaacgtttaattgccaaaaattga

SEQ ID NO: 202270 - DNA, 690 bp, Klebsiella oxytoca
atggcgagaagaattctggtcgttgaagatgaagctccaatccgcgaaatggtttgctttgttctggagcaaaacggctttcagcccgtcgaggcggaagattttgacagcgcggtcaatcagctcaatgaaccctggcctgatttgatcctccttgactggatgctgccgggcgggtcgggtctgcagtttattaaacagctcaagcgtgaagcgatgacccgtgatattccggtggtgatgctgaccgcccgcggcgaagaggaagatcgcgtccgcggcctggagaccggcgccgatgactacatcactaagccgttttccccgaaagagctggtggcgcgaattaaagccgtgatgcggcgcatttcgccgatggcggtggaggaggtgattgaaatgcaggggctgagcctcgacccctcttcgcatcgcgtcatgaccggcgaaaatccgctggatatggggcctacggagtttaaattactccacttcttcatgacgcacccggagcgagtctatagccgcgaacagctgctgaatcacgtctggggaaccaacgtttatgtcgaagacagaacggtagacgtgcatattcgccgtctgcgcaaagcgctggaacatagcggccatgaccggatggtacaaacggttcgcggtacgggatatcgtttctccgcccgtttctga

SEQ ID NO: 202271 - DNA, 1203 bp, Klebsiella oxytoca
atgcgcatccttcacacctctgactggcaccttgggcaaaatttttacagcaaaagtcgcgccgccgaacatcaggcgtttctcgactggctgctggccagcgcgcaggaacatgatgtcgatgccattattgttgcgggcgatatttttgataccggctcaccgccgagctacgcgcgcgagctgtataaccgctttgtcgttcagctgcagcagacccgctgccggctggtggtgctggcgggaaaccacgattcggtcgccaccctcaacgagtcgcgagacattctcgccttcctgaatacgacggtggtggccaatgccggccacgccccttttatcctgccgctgcgcgacggtacgccgggggcaattttttgtccggtaccgttcctgcgcccgcgtgagctggtgaccagccaggccgggcactctggcggcgaaaagcagcaactgctgctcagcgccatcagcgattactaccagcagcagtaccagctggcctgcgaactgcgcggcgaccgggcgctgccgattatcgccagcggccatttaaccaccgtcggcgccagcaaaagcgacgcggttcgcgaaatctatatcggtacgctggacgccttcccggcgagccgttttccgcccgccgactatatcgcgctcggccacattcaccgggcgcaggtggtcggcggctgcgaacatatccgctacagcggttcgcccatcccgctgagctttgacgaaaccgggaaaaataagagcgtcaatctggtcactttcgctaacggctgcctgacggacgtcacgccgcttatcgtccccgtcacccagccgctggtggtcctgaagggcgatttcgccagcattagcgcacagctaaaccaatggcagaataacgaccagcagccctcagcgtggctggatatcgaagtcaccagcgacgaatatatgcatgatatccaacgtaaaatccaggcacagaccgaaacgctgccggtagaagtgctactggtgcgccgcagccgcgcccagcgcgatcgcattctggctggcgctcagcgcgagaccctcagcgaactgcaggtggaggacgtcttcgcccgccgtctggcgctggaaacgctggaagcaacgcagcagcagcgcctggaacagctctttaatgaaacgctgcatagtctgaacggtgaggatcgcctgtga

SEQ ID NO: 202272 - DNA, 3135 bp, Klebsiella oxytoca
gtgaaaatactcagcttacgcctgaaaaacctcaattcactcaaaggcgaatggaaaattgatttcaccgctgagcccttcgccagcaacggactgttcgcgattaccgggccaaccggcgccggaaaaaccaccctgctggatgctatctgtctggcgctgtatcacgaaaccccgcgcctgagcagcgtgtcgcaatcgcagaacgatctgatgacccgcgacaccgccgaatgcctggcggaagtggagtttgaggtaaaaggcatcgcctaccgcgccttctggagccagaaccgggcgcgaaaccagccggacggcaacctgcaggttccgcgcgtcgagctggcgcgctgcgaggacggcaagatcctcgccgataaggtcaaagataagctggaactgaccgcctcgctcaccggcctggactatggccgcttcacccgctcgatgctgctgtcgcaggggcagttcgccgccttcctgaacgcgaaaccgaaagagcgcgccgagctgctggaggagctgaccggcaccgagatttacagccagatttcggcacaggtctttgaaaagcataagcaggcccgcgtcgagctggagaaaattcaggcccaggcctccggcgtgctgctgctgagcgacgaacagcagcaggtgctccaacaaagtttgcaagcgcttactgatgaagaaaaacagcaggttagcgaacaaacccgcctgcaaaatgcccgtcagtggctggtacgcggcgcagagctgacggcagaagatcggcaggctcaaaccgcgctacgcgaagcgcaggctgcgctggagcaggcgcaaccgcagcttaccgtattgctgaatgcccagcccgcggagcagctacgcccgcagtggacgcgtcaacaggagcaaatcgccgcgctggcgcaaacccacaatctgagagaagaagtaaatactcgcttacatgaacgactgcggctgcgggcggggattcgcctcgccgcccggcagcaatctgaacgcctgcagaaccaccagcaaacgctcgccgcatggctaaaagagcacgaccgctaccagcgatggggcaatgcgctggcgggctggcgggccgctttccagcagcaggcccgcgatacgcagcagcaagccgctctgcagcagcgtctggcggaaaccagccgccggctgggcgaactgccgcccgacgggctggcgctggatgctgagcaggtcagcgccggcctcgcgcagcacgccgcggcgcgcgctctgcgccagcagctcgcggccctgcatggccagctgcagccgctgagccagcgtttatcccagcttcatgccgccgggcaggccagtaagcaggagcaggagcggctggaaaccaccctggcccagcgccgtcaggcctataaagagaagaatcagcagtttagcgatgtcaaagccctgtgcgaaatggaagcgcgcattgccggcctggaggccgagcgagcccgcctgcagcccggttccccctgtccgctctgcggttccgcgcagcatccggccgtcgccgagtatcaggcgctggttcccggcgtaaatcaggcgcggcgcgatgcgcttgagcgcgaagtcaaacagctggcggaggccggcgccctggtgcgcggcgagctggacgccctgcttaagcagcagcaaaaagaggccaccgagaaagcatcgcttctgcagcaggagcaagcgcttacctcacgctggcaggcgacgatcgccggattaaatatcgacctgacgccaaaggatgacattcccggctggctaaacgcgcagcaggagcatgaacagcggctgtatcagcatcagcagcgtctggcctggcaggcccagcagcaggagtgccagcagcagctccagcagctccagcaggaacaagcgcagcgcagcgccgcgctggcggctgaactggccgcatttgcgctgagtttaccggcagcggagcaggccgcaggctggctggcgcagcgggaagacgagacccgcggctggcagaccaaacagaacgaactgatcgccctgcaggaacagcttcagcagctgaccccgctgctggagtccttgccggaaacggacttagcggcggaacccgcgccgctggacggctggcgccaggtgcacgacgactgcctcgcgcttcagagccagtggcaaaccctggggcagcaggagagccggcagcaggctcagttgaaagagagcgaagcgcaattcagcgcggcgctggccgccagcccgttcgctgaccagcaggcgtttctcgccgcgctgctcgatgaggaggcgcgccggcgccttgaacgcctgaagcagacgctggaaagtacgctacagcagaatcaggcgctggcgatgcgggcccgcgaggcgctggacagccaccgccagcagccgccggcggaaacggatatcagccagcctcttgagcgggtacaggaacagcttcagcagctgacgacgctgctgcgggaaaacagcgcccgtcagggagagattcgccagcagctgaagcagaatgcagaaaaccagcagcgtcagcagtcgttacgccagcagatggaacgcgctgcgcaggaagtggaagactggggatggctgaacgcgcttatcggctccagagagggcgataaattccgtaagtttgcgcaaggactgacgctggataacctggtgtggctggccaaccatcagctcaaccgcctgcacggccgctatctgctgcaacgcaaagccagcgacgccctggagctggaagtggtcgatacctggcaggcggacgcggtgcgcgacacccggacgctgtccggcggcgagagcttcctcgtgagcctcgcgctggcgctggcgctctccgatctggtgagccataaaacgcggatagactcgctgtttctcgatgagggcttcggcactctggacagcgaaaccctggataccgcgctggatgcgctggacgcgctcaacgccagcggcaagattatcggcgtcatcagccacgttgaggcgatgaaagagcgcattcctgtgcaaattaaagtaaaaaaaatcaacgggctgggctatagccgtctcgataaagctttcgccgtcgaataa

SEQ ID NO: 202273 - DNA, 363 bp, Klebsiella oxytoca
atgaaaagcttacttattttgattgccggcccggtacgcagcggcacccacaatcgcgcggaacttatcgacgctaacctgaacaatatggcccaggttgcgctacgcgtttaccagaaaggccatatccccgtggtcggcgaatggctggctctgcccatcgccaaagctgcgggttcaacggaaattggcgatgcgattagcgaggaatatctctatccggtcgctcaccgtgtcattagccgctgcgacgctatattgcgcatgccgggtgaatcccgcggagcggacctggatattgaggaaggtaaaaaaagggggctgtcgatttactacagcctggaggagatcccggaccggtaa

SEQ ID NO: 202274 - DNA, 276 bp, Klebsiella oxytoca; identical to SEQ ID NO: 198261

SEQ ID NO: 202275 - DNA, 681 bp, Klebsiella oxytoca
gtgcgcattggcattgatttaggcggaaccaaaacggaagtcatcgcgctgagcgaccagggagcgcagctatttcgtcatcgcctgcctacgccagggggcgattatcgccagacaatagagacgatagcctcgctggtcgagatggccgagcaggctaccgggcagagcggcacggtcggcatcggcatccccgggtcgatttcgccctataccggcgtggtcaaaaacgctaactcaacctggctcaacggtcagccgtttgataaagaccttagccagcgtctgcaacgggaagtgcgtctggccaacgatgccaactgcctcgcggtgtcggaagcggtagacggcgcggcggccggggcgcaaacggtatttgcggtgattatcggcaccggctgcggttcaggcgtggcgcttaacggacgcgcccatattggcggcaacggtacggcgggcgagtgggggcacaacccgctgccgtggatggatgaagatgaacttcgctatcgcgctgaagtaccgtgctactgcggcaagcagggctgtattgaaacctttatctccggtaccggctttgcgaccgattaccggcggcggtcattcgctaaaaggcagcgagattatgcagcgcgtgggcgagcgggatccggtggcggagctggcgctgagccgctatga

SEQ ID NO: 202276 - DNA, 912 bp, Klebsiella oxytoca
atgctgtggttcaaaaatttaatggtttatcgtctcagccgcgacatttccctgcgcgccgaggagatggaaaaacagctggccgagctgacctttactccttgcggcagccaggatatggccaaaaccggttgggtaccgcctatgggatcgcacagcgatgcgctgacgcatacggcaaatggccagatcgttatctgcgcgcgtaaagaagagaagatcctgccgtctccggtgatcaaacaggcgctggaagcaaagatcttcaagctggaagccgagcagggccgtaagctgaaaaaaaccgaaaaagattctctgaaggatgaagtgctgcattccctgctgccgcgcgccttcagccgcttcagccagaccatgatgtggatcgataccgtcaacgggttgatcatggtggactgcgccagcgccaaaaaagcggaagatacgctggcgctgctgcgtaaaactctgggctcgctgccggttgttccgctggcgctggaaaccccgatcgaactgacgctgaccgagtgggtgcgttccggtaccgtggctcagggcttccagctgctggatgaagccgagctgaaagcgatgctggaagacggcggcgtgatccgcgcgaaaaaacaggatctggtgagcgacgagatcgccgtgcacattgaagccggtaaggtcgtcaccaagctggcgctcgactggcagcagcgcattcagttcttaatgtgcgatgatggttcgattaaacgcctgaagttctgcgacgaactgcgcgatcagaatgaagatatcgatcgggaagatttcgcccagcgttttgacgcggactttattctgatgaccggcgagctggccgcgctgattcagaatctggtggaagggctaggcggcgaagcgcagcgctaa

SEQ ID NO: 202277 - DNA, 285 bp, Klebsiella oxytoca
atgcttcaaagcaatgaatactttgacggaaaagtaaaatctatcggcttcaccagcagcagcaccggtcgtgcgagcgtgggcgtgatggcggaaggggaatatacctttggtaccgcgcagccggaagagatgaccgtagtcagcggcgcgctgaacgtacttctgccgggagaaaccgagtggaaagtctatgccgccggggaagtattcaacgttccggggaatagcgagtttaatctgcaggtggctgagccgacctcttatctgtgccgctacctgtaa

SEQ ID NO: 202278 - DNA, 666 bp, Klebsiella oxytoca
atggcaatcttgaccattggggtcgtacccgtggcggagatgctgccgcttttaactgaacatatcagggaagacgagatcgcccacattagcctgctcggcaaaatgacgcgcgaagacgttatgcgggactacagcatagggcccggcgatgagatgctattgaccttgcttaacgataatcaaattgcgcaggtctcaaggcagaaggttgagcgtgatttacatagcgtcattgcgatgctcgataaacaaaattacgaccttattttactcatgagcactcatccctttagcggatttacggcgaataatgcgatcctgcttgagccgcaaagaattattccgccgctggtcgcgtcgattgtcgacggccatcaggtgggggtgattgttccggttgaagagattttgccgctgcagcggaataaatggcaggtattagaaaatactccgttttacgccatttccaatccggtgagcggcggtaaagaggagttaatcgccgcgggcagggagttgattgaacagggcgcagacgtattaatgctggattgcctttgctaccaccagcagcatcgcgacatattacaaaaggcgctggatattccggttctgttgtcaaatgtgctggtttcacggctggcggcagaactattagtttaa

SEQ ID NO: 202279 - DNA, 192 bp, Klebsiella oxytoca
atgccgaccagacctccatatccaagggaagcgcgtgttgtcgccgttgaaaagggcccgcagggccagacggtcacctggtatgaactgcgcgccgatcacccgacgccaaactcactcatcagcgaacatcctacagaacaggaagcgctggacgccaaacggcgttacgaagatcctgataagtcttaa

SEQ ID NO: 202280 - DNA, 528 bp, Klebsiella oxytoca
atgacacagctaatatttcttgtcgggcctcgcggctgcggtaaaacgaccatcggacacgcgctggcgaaagctcgcagctttaagttcgccgacacggaccatgagctgcaggagcatgagcagcgcacggtagcggctatcgtccagcaggaaggctgggaacgctttcgtgcgctggaaacgcaggctttagaacgcgtcgctcaacccgcgacgatcatcgccaccggcggcggcattatcctcagcgaatacaaccgacagtttatgcgggaaaatggcatcgttatctatctcgaggcctcggtttccgcgctgattgaccgccttgaagcctatccgaaggcggaacagcgcccgacgctgaccggaaagcccatccgcgatgaagtgggtgaggtgctggcgcagagggaagcgctgtatcgcgcggccgcgcatcatattattaatgcgaccgccacgccggatgaggtcgtggaacagattatgaccaccgtctgcggcgagacctataccagttaa

SEQ ID NO: 202281 - DNA, 699 bp, Klebsiella oxytoca
atgcaatctgaagagcaacgccttatcgatggactgttttcccgattaaaagaggccgagagccacagcgcatcacgggatgccagcgctgaggagcggattgccgggcacattaaagagcagccgttcgccccttactatatggcgcaaacgattctgattcaggaagcggcgatcaaacagctcaacgaccgcattcaggcgctggagagccaggtgacccagcttcaggccgcgaagccgagcagcggcgggtttctctcaggcctgtttggcggcggtcagtcgcgcggttccgacccgattcctggcgccgagcagtatggccgaccgcaggccggcgcccagcctcagtatgctccgcaggcgcagcagcagaactacgcccctcaggcgtcgcgcagcggcggcggttttatggccggcgcgctgcaaacggcggcaggcgtcgcgggcggcgtggtgctgggaaacatgttgaccaatatgtttagcggctcgcatccgcaagagatcgtcaatatcatcgaagagaaaccgcagccggatctcagccaggcgcaggacaatagcgtcgctgacgataccttccgccaggatgacgggcagttcctcgccgacaacaacgattatgacgccgactttgacgccggtttcggcaatgatgatttcggcagcgacgacgacagctgggtttaa

SEQ ID NO: 202282 - DNA, 459 bp, Klebsiella oxytoca
atggctatttgggttgatgcggacgcgtgtccgaacgtcattaaagatattttgttccgcgccgccgagcgcgcgcaaatctcgctgacgctggttgctaaccagcctctgcgcgtcccgccgtcgcgctttatccgcacgctgcgcgtggcgcaggggtttgacgtggcggataacgaaatcgtacgtttatgcgagccgggagatctggtgattaccgccgatatcccgctggcggcggaagtgctggagaaaggcggggcggcgctgaatccacgcggtgaacgctacagcgaggcgaccattcgcgaacgcctgacgatgcgcgactttatggaaacgatgcgggccagcggcgtgcagaccggcggcccggatagcttatcccagcgcgatcggcagcagtttgccgccgcgctggagaaatggctgttagacgttaagcgccagcagggttaa

SEQ ID NO: 202283 - DNA, 810 bp, Klebsiella oxytoca
atggagaagaaaatcggctttatcggctgcggcaacatgggcaaggccatcctgggcggcctgatcgccagcgggcaggtgcagccgggtcaaatctgggtctataccccgtcgccggataaagtggcggccctgcacgaccaatacggcattaatgcggcgcaaagcgcgcaggaagtggctcaggtggcggatatcgtttttggcgccgtaaagccgggcgtgatggtaaaagtgctcagcgacgtcgcctccagcctgaataaagactctctggtggtttctatcgccgcgggcgtgacgctcgaccagttggcgcgcgccttaggccatgaccgcaaaatagtccgcgcgatgcccaacacgccttcgctggtcaacgcggggatgacgtcggtcacgccgaatgcgctggtcagcgccgaagaaaccgcggagatcctgaccatattccgctgctttggtcaggcggaaatcattgctgagccgatgattcatccggtggtcggcgtcagcggctccgcgccggcttacgtctttatgtttatcgaagcgatggccgacgccgctgtgcttggcggaatgccccgcgcgcaggcttataaattcgcggcacaggcggtgatgggctcggccaaaatggtactcgaaagcggcgagcatccgggaaccctgaaggatatggtgtgttcacccggcggcaccaccatcgaagccgtgcgcgtgctggaagagaaaggcttccgttccgccgtcatcgaagcgatggtgaaatgcatggagaaatcagagaagctgagccgttcctga

SEQ ID NO: 202284 - DNA, 321 bp, Klebsiella oxytoca
atgaaaataacattacttgtgaccttactttttggcctggtatttatgacagcggtgagtgccgcgaaaaaagagttgacccctcagcagcaaaagatgagcgtctgcaataaagaagcgtcatcgaagtcgctgaaaggggatgagcgtaaaacgtttatgagtagctgcctgaagaaagatggcgccgcgcaggacggtaaggggctaacgcctcagcagcagaaaatgcgcgagtgtaacgctcaggcgacccagcagtccctgaaaggggacgatcgcagcaaatttatgagcgcctgcctgaaaaaacaggtgtaa

SEQ ID NO: 202285 - DNA, 1416 bp, Klebsiella oxytoca
gtgaaattaagcgccctgtttattgccctgctgcctctgctgggctccccgattattcacgcagaaacaacaaccgcaccggttctggaaaatcgtgccgcgcagggcgatatcaccacgccgggcggcgcgcgtcgtttaagcggtgaccagaccgaggcgctgcgcgcttcgttaatcaataaaccggctaaaaatattattttgctgattggcgacggaatgggcgattctgaaatcaccgccgcgcgaaattatgcagaaggggcgggcggcttctttaaaggcattgacgcgctgccgctgaccggccagtacacccattattctctggataagaaaaccggcaagccggattatgtcaccgactccgccgcttccgcaacggcctggaccaccggcgtgaaaagctataacggcgcgctgggcgtggatatccatgaaaaagatcatcagaccatccttgagctggcgaaagcggcgggcttagctaccggtaacgtctccacggcggaactgcaggacgccactcctgctgcgctggtggcgcatgtgacgtcgcgtaaatgctacggcccgagcgtgaccagcgaaaaatgcgccagcaacgcgctggaaaagggcggtaaaggttcgattaccgaacagctgctgaacgcccgtcccgacgtaacactgggcggcggcgcgaaaaccttcgcggaaagcgcgacggccggtgaatggcagggcaaaacgctgcacgatcaggcggtagcccgcggctaccagatcgtcaccgacgccagctcgctggccgccattagccaggccaatcaggacaaaccgctgctcggtctcttcgcggaaggcaatatgccggtgcgttgggaaggcccaaaggcgtcttatcacggcaatatcgataaggcggcggtgacctgtacgccgaacccgaaacgcgatgcatcggtgccgacgctggcgcagatgaccgaaaaagccatcgatctgctgagcagcaatgagaaggggttcttcctgcaggtggaaggcgcttctatcgataaacaggatcacgcggcgaatccgtgcggtcagattggcgagaccgtcgatctggacgaagcggtacagaaggcgctggaatttgccaaaaaagagggcaataccctggttatcgtcaccgccgaccacgctcacgccagccagattatcccggcagataccaaagcgccgggcctgacgcaggcgctgaacaccaaagatggttcggtgatggtgatgagctacggcaactctgaagaagagtcgatggaacataccggcacccagctgcgtattgccgcctacggcccgcacgcggccaacgtggtgggtttaaccgaccagacggacctgttctacaccatgaaagccgcacttaatctgaaataa

SEQ ID NO: 202286 - DNA, 261 bp, Klebsiella oxytoca
gtgaagaatctcattgctgagctactggtaaaactcgcccaaaaggaagaagaatcgaaggagctgacggcccaggttgaggcgctggaagtggtggtgaccgctctgctacgtcacatggagcaggacgcccagcaggcgctcatcaccgatattgagcaggccatcgatgaggccagccccggcccgctggtggatgaccgcgatacccagctcctgcagcaatatataaagaagctgttacggcatcctcgtagctag

SEQ ID NO: 202287 - DNA, 993 bp, Klebsiella oxytoca
atgaaaaacaaccggatgacattgcaggatatcgccaacctggcggggctgaataaaatgacggtcagccgttatttacgtgaccccggccaggtttctgagcgcagccgtgagctgatttcaaaggtcatggaagagaacaactatatccctaaccgcgccccggaaatcctgcttaacgcccggagtaaaacgattggcgtgcttattccctccttccgcaaccagatttttgccgatgtgctggccggcattgagtcggtgacctccgcgcaccagtatcagaccctgattgccaactacgaatatgacccgcagcgcgaagagcgcgaagtgctcaatctgctctcttataatatcgatgggctgattttgaccgggaagcagcacagcgatcgcatggtgcagtacgtgcgcgccagcggtatccccgtcgctgaactgatggactacggcggccagcagctggatatccaggtggggttcgataacgaaaaggcggcgtgggatatgactcatgcttttcttgagagcggcaaacgggcgatcgccttttttggttcaatggacgatccccgcgatttaagccgcttccgcggcaccgagctggcgctggcggagcacggcctgaaggcgtatcacatggcgccgcggaccatctcctcggttgcgcttggccggcagatgttcctgcagatgcagaagacgcgcccggatattgacgccattttttgtaccaacgacgatctggcggtgggggtgctgctcgagtgccaggcgcaggggaaagccgttccacaggagatcgccatcgccggttttcacgggctggaaattggccgtgcgcggctgcaaaaaatagccagcgtcattaccccacgttatgaaatcggtaaaacggcgagcgaaatacttattgcgcgcctgaccggtaaagacgcgccggacagcgtgaatctggcctaccagatatattatggcgatacgttatag

SEQ ID NO: 202288 - DNA, 1287 bp, Klebsiella oxytoca
atgcacatgctcgcgaaattacccgcgcgtcgctggtggtatttaatgccgattatatttattacctatagtctggcctaccttgaccgtgcgaattatggttttgccgctgcggcgggaattgaaagcgatttgggtattaccaaaggaacggcatcgcttattggcgcgctattttttctcggctatttctttttccaggtacccggcgcgatatatgcggtaaaacgcagcgtgcgaaaaatgattttctttagcctgattttatggggattctgcgcggcggcgaccgggttcgtcagcaatattccgatgctgatggcgattcgctttacccttggcgtggttgaggcggcggtgatgccggcgatgctgatttatatcagcaactggtttacgaaaaccgagcgttcgcgcgccaacacgttcctgatcctcggaaacccggtgacggtgctgtggatgtctatcgtttccggctacctgattcaggcgtggggctggcgcgaaatgtttatcatcgaaggcattccggcagtactgtgggcggtatgctggtggatactggtacgcgataaaccgtccgaggtttcctggctgaacgagcaggaaaaagagaccctgcagaaggtgatggacagcgagcagagtcatatcaagccggtgcgcaactacggtgaagcgctgcgctcgcgcaatgtgattatgctctgcgccgtgcacgcgctgtggagcatcggcgtgtacggctttatgatgtggatgccgtcgattctgaagaacgccgcgcagatggatatcgtggcggtgggctggctggcggcggtgccgtacctggcggcaattatcctgatgctgacggtctcctggctgtcggataagtgccagaatcgtaaactgtttatttggccgttattgctgattgccgctatcgctttctttggctcctggctggtgggcaaccaggcgttctggctctcctatgcgctactggtcattgccgcggcctgcatgtatgcgccgtatgggccgttcttcgcgcttattcctgaactgctgccgcgcaacgtttccggcgtatcgatgggcttaatcaacagctttggcgcgctcggcgctttcctcggcgcgtggctggtggggtacctcaacgggattaccggcgggccgggggtttcctatacctttatggctgtcgcgttgctgtcctccgtcgtgctgatgtacaacgtgcgcgctaacccgcaacccgtctccccggtgacggcaaaaaaggttgccggctaa

SEQ ID NO: 202289 - DNA, 765 bp, Klebsiella oxytoca
atgcgaaatttatttgatttgtcagggaagcgcgcgctgatcaccggatccgctcaggggattggccatctgctggccggcggcctcgccgagtacggcgcggagatcatcatcaacgaccgcacccaggcgcgcgcggaccaggcggcgcaggcgctggtggcgcagggttttcatgcggtaggggtcgcctttgatgtcacccgggcggcgcaggtcgagcaggcgatagcccgcatcgaagaggagatcggcgccattgatattttaattaataacgccgggatccagcggcgtttcccttttaccgaatttccggaggaggagtgggataacgttattgaggtcaatcagaagggcgttttcctggtttctcagcaggtggcgaaatatatgatgggccgccgcgcggggaaaataattaatatttgctcaatgcagagcgagctggggcgtaaaaccattacgccttacgcggcctcgaaaggggcggttaaaatgctgacccgcggcatgtgcgttgagctggccgaatataatattcaggttaacggtatcgcgccgggatattttgccaccgacatgacggccgccctggtcaacgatgaggcgttttccgcctggctgtaccagcgtaccccggcggcgcgctggggaaaaccggaagaactgattggcgccgcggtatatctggcctcgtcggcggcaaactttgttaacggtcatttgctgtttgtggacggcggaatgcttgccgctgtctga

SEQ ID NO: 202290 - DNA, 1200 bp, Klebsiella oxytoca
atggaatcctggaaggttaatcttatctccgtctggtttggctgtttttttaccggcctggccatcagccaaattcttccctttttgccgctgtacgtttcccaactgggcgtgacctcgcatgaagcgttatccatgtggtcgggcctgacgtttagcgtcacttttctggtgtcggcgattgtctcgccgatgtgggggagcctcgccgaccgcaaagggcgcaagctgatgctgctgcgcgcctcgctggggatggccatcgccattttacttcaggcgttcgccaccaacgtctggcagctgtttatcctgcgcgcggtgatgggactgacctccggctatattcccaacgccatggcgctggtggcgtctcaggttccgcgcgagcgtagcggctgggcgctgagcacgctgtcgacggcgcagatcagcggcgtgattggcgggccgctgctcggcggtttcctggctgaccacgtcggtttgcgcgccgtatttatcatcaccgcgattttgctgaccgtaagcttcctggtgacgttgtttctgattaaagagggcgcccggccgcaggtcaccagggcggagcggctgagcggcaaggcggtatttgcctcgctgccctatccgggactggtgatcagcctgtttttcaccactctggtgatccaactgtgcaacggctcaatcggcccgattctggcgctgtttatcaagtcgatggcgccggatagcaataacatcgcctttctcgccggcatgatcgccgccgtgccgggcgtgtcggcgctgatttcggctccccgtctggggaaactgggcgacaggatcggcacctcgcggatcctgctggcgacgctgtgctgcgcggtggtgatgttctttgccatgtcgtttgttaccaccccattccagcttggcgtcctgcgtttcctgctcggttttgccgatggggcgatgctgccggcggtgcaaacccttctgctcaaatactgcagcgacagcgtcaccgggcgtattttcggctataaccagtcgtttatgtatcttggcaacgtggccgggccgctgatcggcgcgtcggtctcggccatggccggcttccgctgggtgtttatcgccacggcggttattgtcctgatcaatatctggcaactggccatcatgctgcgccgcagccgccgtcctgcggcttaa

SEQ ID NO: 202291 - DNA, 684 bp, Klebsiella oxytoca
gtgaaaggaaaagggcttatcgttctgttggcgctgctggcggccggatattacggctatcgttatcttcccgcgcactataacccgctggcgccgctgcgtctggaggatccgccggggttcatcacccactataagctgcggcgattgacgcccggacagtgcgccaacctgctgaaggaagcgaatcagcgaaatctcatcaccagccgggcggtggccgatagcgggggagagtgccccctgcaaaacgtggttcgggtacgcgattttggcgcggtaaagctcagcagcagcttcctcgccagctgcccgctggcgttaagcagcgcgctgtatctgcaacagcaggcgaaaccgctgactcggcggatgctggggcaagagctccgccaggtcgaccattttggcagctatgcctgccgtaatatttaccatcgtcagaacgcgcggcgcagcgagcacgctaccgcggaggcgctggatatcagcggctttcgtttggccgatggccgacgcatcagcgtgctgaaagggtggcccgatgcgcagtatcacccctggctgcaggcgttactggccggcggttgcagctattacggcaacgctttagggccggactataacgcggcccatgcgaaccattttcacctcggtatgcgcggccaggggttctgtttctga

SEQ ID NO: 202292 - DNA, 1098 bp, Klebsiella oxytoca
atggctaagatgagggttgggatcgttttcggcggtaagtcggcagaacatgaagtatcgctacagtcagcgaaaaatatcgtggaagccatcgacaaaacgcgcttcgacgtcgttttgctggggattgataagcaggggcagtggcatatcaacgacgccagcaactatctgctcaatccgcaggaccccgcccatattgccctgcgcccatccgatattaccctggcgcaaattcccggacgcgaagcgcagcagctgattaacgccgatagcggccagccgctggcggccatcgacgtcattttcccgattgttcacggcacccttggggaagatggttctctgcagggtatgctgcggatggctaacctgcccttcgtcggctccgacgtcctcggctccgccgcctgcatggacaaagacgtgaccaagcgtctgctgcgcgatgccgggctgtcgattgcgccttttattaccctgacccgcgccaaccgtcatcaggtgagctttgccgaagtgcaggcgaagctgggcctgccgctgttcgtcaaaccggcgaaccagggctcctcggtgggcgtcagcaaggtcaacagcgaagagcagtatcagcaggccgtcgccctggccttcgaatttgaccataaagtggtggttgaacaggggattaaagggcgtgagatcgagtgcgcggtattgggcaacgataatccccaggccagcacctgcggtgaaatcgtcctcaacagcgaattctacgcctatgacaccaagtacattgacgatcagggcgcgaaggtggtggttccggcggccatcgacagcgatgtaaacgataaaattcgcgatatcgccgttcgcgcctatcagaccctcggctgcagcgggatggcgcgggtcgatgtgttcctgaccgccgataacgacgtggtgattaacgaaatcaatacgctgccgggcttcaccaacatcagcatgtatccgaagctatggcaggccagcggtctggactataccagcctgattagccgcctgattgagctggcgcttgagcgtcacgccgccgatcgggcgctgaaaacatcgatgaattaa

SEQ ID NO: 202293 - DNA, 204 bp, Klebsiella oxytoca
atgaaactcacggaaaaaatccgccgcgattggcactactacgcggtagcgctggggttaatttttattatgaatggcgtggtcgggctgctcgggtatgaaaccgaaggctggcgttcttacgcggttgggctggtgacgtgggtcattagcttctggattgccgggtttattattcgccgccgcccggcagaggaagcgtga

SEQ ID NO: 202294 - DNA, 303 bp, Klebsiella oxytoca
atggcagagttcacctttgcaaagaccgtcaacggcggcaaaaagaggggctctctcaccggcagcaacatcgcttacgctctgtttgtgctgttttgcttctgggccggtgcgcaaatgctgagtatgctgatccacgcgcccggcgtttttgagcatctgattcaaatgcaggacagcagccgcccgcgggtcgagattagcctggtggtcggtaccctgttcggcctgattcccttcctggcgggctgcgtgctcattggtattcctgggctgatattccgctggcgcagccgccgctaa

SEQ ID NO: 202295 - DNA, 1107 bp, Klebsiella oxytoca
atgccggtagcgcaatcccgaattacttctctcaccctgacgctactggcagggattgtcctcaccgcctgctccagcaagccggagccggagctgaaaaagggcgaaaaggcgattgatgttgccgcggtggtgcggcagaaaatgcccgccagcgtgaaagatcgcgaggcctgggcgcaggccatcgccaaaacctttgccagccagaagctggcgccgacggaagagaacgtctgttcggtgctggcggtggcgcagcaggagtccaactatcaggccgacccggcggtgccggggctgaataaaatcgcctggcaggagattgaccgccgggcggagaaaatgcatatcccggtttttctggtgcataccgcgctgaaaatcaaatcgcccaacggcaaaagctatagcgaacgcctcgatagcgtgaaaaccgaaaagcagctgagcgcgattttcgatgattttatcggcatggtgccgatggggcagaagctgttcggctcgctgaacccggtgcataccggcggcccgatgcaggtcagcatcgccttcgccgagcagcataccgacggctacccgtggaaaatcgacggtaccgtacgccaggaggtgttcagcctgcgcggcggtctgtggttcggcacatatcatctgttgaactatccggcgaactacagcgtaccgctgtaccgttttgccgatttcaacgccggatggtacgccagccgcaacgccgccttccagaacgccgtcgcaaaagcgacgggcgtgaagctggcgctggatggcgatttgattcgctacgatagcgacgaggccggaaccaccgaactggcggtgcgccggttatcctcacagctggcaatgagcgatgatgatatccatcgtcagttaaagaagggcgataccctggcgtttgaagagagcgatctctataagcaggtgtttcgcattgccgataagaaagccggcaaaacgctcccgcgggaggtgctgccgggcattcagcttgagagcccgaaaatcacccgtaacctgacgaccgcctggtttgccaaacgcgttgacgaccggcgggccagctgtatggcgcgccgttag

SEQ ID NO: 202296 - DNA, 1221 bp, Klebsiella oxytoca
atgtttaaatcctttttccccaaaccggggccgttttttatttctgcctttatgtggtcgctgctggcggtgatcttttggcaggcgggcggcggcgactggctgctgcgggtcaccggcgcatctcaggatgtggcgattagcgcggcgcgcttttggtcgctcaattacctggtgttctacgcgttctacgtattctgcgtgggcgttttcgcccttttttggtttatttacagcccccaccgctggcagtactggtcgatcctcggcacctcgctgattattttcgtcacctggtttctggtcgaggtcggggtggcgatcaacgcctggtacgccccgttctacgatcttattcaggccgcgctggcgacgccgcataaggtcagcattaaccagttttatcaggagattggcatctttctcggcatcgcgcttatcgcggtggtcatcggggtgatgaacaacttcttcgtcagccactacgttttccgctggcgtaccgccatgaacgaacactatatggcgcactggcagcatctgcgccatatcgaaggcgccgcgcagcgtgtgcaggaagataccatgcgctttgcttccaccctggagagcatgggcgtcagcttccttaatgcggtgatgacccttatcgccttcctgccggtgctggtgacgctctccgcgcacgtcccggatttaccgattgtcggccacctgccctacggcctggtgattgccgccattgtctggtcgttaatgggtaccggcctgctggcggtggtggggatcaagctgcccggcctggagttcaaaaaccagcgcgttgaggcagcctatcgtaaagagctggtgtacggcgaagatgacgccaaccgcgcgacgccgccgacggtgcgtgagctgtttggcgccgtgcgccgcaactatttccgcctctatttccactacatgtatttcaatatcgcccgtattctgtatctgcaggtggataacgttttcggtttgttcctgctttttccgtcgattgttgccggtacgattacgctgggcctgatgacccagatcaccaacgtctttggccaggttcgcggttcgttccagtatctgattagctcatggactacactggttgagctgatgtctatctacaaacgtctgcgcagcttcgagcgcgagctggatggcaaagagctgcagaccgtgacgcaaacattaagttga

SEQ ID NO: 202297 - DNA, 534 bp, Klebsiella oxytoca
atggcggcgaaacgggtagtgatggtagtggatatgcaaaacggcgttttcgcgacgccgcgtattgagcgcgagcgctgcgcggcgcaaattaaccgcctgataaacgccgcggataccgttatcttcattcagcactgcgaagagggcggtctggaagaggggagcgaaggtttttctttgctgcctgaactgcaccagccggcaggcgcgttgttcgtgaccaagaccgcctgcgacgccttttaccgctcccgcctggaagaggtgctgcgcgaacatcacatcacgcagtttgtgatttgcggctgcgccaccgactactgcgtagataccaccatcaaaaacggcgccagccggggctatgcgattaccgtcgctgaagatgcccataccacagccaaccgcccggcggcgcaggccgtcacgctgatcgcccactacaacgaggtgtggcgtacgctgaccgttccgggcaatcctttacaggtgaaatcgacagaaacaattctgaacggatggtcggcgaactaa

SEQ ID NO: 202298 - DNA, 1170 bp, Klebsiella oxytoca
atgcccccgttgaaacgtagtctgctcatttttgctgcgctgtgcgcggcgtcgttgacatcggcccaggccgcgcagccgagcgtcgacccggaattcgctgcggatgttgtcgaccgttacgctaaccatatctactacggcagcggcgcgatcggcatggcgctggtggttatcgatggtaaccagcgcgtattccgcagcttcggcgagacgcgcccgggcaataatgagcacccgcagctcgattcggtgattcgcatcgcctccctgagcaagctgatgaccagcgaaatgctggtcaaacttctcgaccagggcgtggtgaagctcaacgatccgctgagcaaatacgccccgccgggcgcgcgcgtgccgacatatcagggagcgcccattacgctggtgaatctggcgacccataccagcgccctgccgcgcgagcagcccggcggcgcggcgcatcgtccggtgttcgtctggccaacgcgccagcagcgctggaactggctctccacggcaacgttaaaagccgcgccgggttcccaggccgcctattccaatctggcgttcgatttactggccgatgcgctctctaccgccgcgggcaagccctggccgcagctgtttgaagagcagattacccgtccgctggggatgaaagacaccacctttacgccttcgcccgatcagtgccggcgcctgatgatcccggagaaaggggccagcccgtgcaacaatacgctggcggccatcggcagcggcggcgtttactccacgcctggcgatatgatgcgctggatgcagcagttcctctcttccgatttcttcacccgcgggcagcaggcggaccggatgcagacgctcatttatcaacgcagccagctgacgagggtgatcgggatggacgtgccgggcaaagccgatgcgctgggtctcggctgggtctacatgaagccgaaaaacggccagccgggcattattcagaagaccggcggcggcggcggttttatcacctacatggcgatgaacccgcaggctaacgtcggcgcctttgtggtggtcacccgctcttcattgacgcgtttcaacaacatgagcgatggcgtcaacgagctggtcagcgaattaagcggcgaccgccccgggattgagacagccagccagtaa

SEQ ID NO: 202299 - DNA, 975 bp, Klebsiella oxytoca
atgacagatttaatcactcgcccgcgccgactgcgcaagtccgcttcgctacgtgccatgtttgaagagacaacactgagtttgaacgacctggtgttgccgatctttgttgaagaagaaatcgacgattacaaagccatcgaagcgatgcccggcgtgatgcgtattccggaaagacacctggcgcgcgaaatcgagcgcattgccaacgccggtatccgttcggtgatgaccttcggcatttcccatcataccgatgccgttggcagcgatacctggaacgaaaacggcctggtagcgcgcatgtcccgcatctgtaaagaggcggtgccggagatgatcgtgatgtccgacacctgtttctgcgaatacacctcccacggccactgcggcgtgctgtgcgaccacggtgtcgataacgatttaacccttaccaacctcggtaagcaggcggtggtcgccgctgccgcaggcgcggattttatcgccccgtccgccgcgatggacggccaggtgcaggccattcgccaggcgctggacgccgccggatttaccgatacggcgattatgtcctactccaccaagttcgcttcatcgttctatggtccgttccgcgaagccgcgggtaccgcgctgaaaggcgatcgtaaaacctatcaaatgagcccgatgaaccgccgcgaagcgattcgcgaatcgctgctggacgaagcccagggcgccgactgcctgatggtcaaaccggccggtccctatctcgatatcctgcgcgatctgcgcgagcgcaccaacctgccgctcggcgcgtaccaggtgagcggtgaatacgcgatgattaagttcgccgcccaggccggcgctatcgatgaagagaaagtggtgctggaaagcctcagcgcaatcaagcgcgccggcgcggatctgatcttcagctacttcgccctcgatctcgccgaaaagaaaatcctgcgttaa

SEQ ID NO: 202300 - DNA, 492 bp, Klebsiella oxytoca
atggtggcctaccgtcgttattacctgaagggtggaacctggttttttacagttaatttgcgaaaccgaaaaagcagacttctgaccgagcacatcggaactttacgtcacgccatcctcaccatcaaacggcgaaaacccttttacattgatgcatgggttatccttcctgaacatcttcattgcatctggacattacccggagacgatagcgatttctccgccagatggcgggacataaaaggttgctttagcaaagcattaaaacaagaaaatgtctggcaaccgcgtttctgggaacatgtaatccgcgatgaagatgactaccgccggcatatcgattacacctacattaatcctgtaaaacacggttgggtacgacaggtttgtgattggcctttttcaacctttcaccgggatgtacggcgcgggttatatcccgataattggggtggcgaaattcacgattttttgtgcggcgaacgccagtaa

SEQ ID NO: 202301 - DNA, 1719 bp, Klebsiella oxytoca
atgtttagtctcgacaatgtcatcgatgacctgtggcctcaggcaaagccagcgctctggcagaaaaaggtgctgaaaaagctcctgcatgaggaagagtttcagcagtttgccgcgcgtcatcatcacctgaaaggactggatacggtcgaacaggtgctcgaacatcttaatatccgctgcgctatcccggcgcacgatctcgaacaaatccccgaacatggcccgctggtcattatcgccaaccaccccaccggtacgcttgacggcctggccctgctctacgcggtgtcccgcgtgcgccgcgacgtcaaagtggtcaccaaccgcatgctgacccaccttgaaccgctgagctcgctgtttattccggtcgataatatcaacggccgaaccgccaaagcggcgctgcagcagatggaccagcagctgcaaaacggcggcgtgctgattttcttcccggcgggtgaagtttcacgcctcacccggcgcggtattcgcgataaaaaatggcactccggatttattaagctggcggcgaaataccgcgccccgctgctgccggcgtggatccgcgcgcgcaacagcgcgctgttttacgccagcacgctgatttccgatagcctgccgctgctgctgctgatgcagcaaatgtttcgccgccgcaacggcagcctgccggttaatttcggccaacagattgcctggtcaagctggttcgatcctcagcgctctgttcgcgagctgaccgaacgctgctatcgccacctggagctgctggcaaaagggcagcccggcgtatttaaaagcgaaagcgctattgcccgacctgaagaccgcgccctgctcaagcgcgaactgggccgggcggaaacgctggggcgcacggcggatggcaaagtgatttatctctggcagcgccgcggccaggaagatgcgccggtgctgcgcgaactgggccgcctgcgggaaatcgccttccgcgcggtgggcgaaggcagcggcaaacgtcgcgacgttgacggttacgacgacgactatctgcatctgattctgtgggatgaagaagacctggaaatcgtcggcgcttaccgctttatgccgaccgcgatgcagctggaaaagcgcggcctgaacggcgtctacagctacagcctgttccattacgacgcgcgcatggacgatattctgcagcacggaattgagctggggcgcagctttatccagccgcgctactggggccgccgcggactggactacctgtggtccggcatcggcgcgtatctggcgcgctatccgcactatcgctatctgttcggcccggtgtcgatttccggcgggctgccgccgtcggcgcgcgatctgctggtcgcgttctatcgactgtggttcccggcgacgcatccgctggcggagtcgcgccgcccttatccggcctcgctgcccgatgtgctggcgcagtttggcggagaagattacaacgacgatctggcgcggctgaagtccctgctcggcaacctcggctgcgcgatcccgccgctgtataagcagtactcggaagtttgcgagccgggcggcgtgcagtttatcgatttcggcagcgacccggatttcaacaactgcgtggatggtctggtgctggtggacttgacctacctgaaggcgaaccgctatcagcgctatattggggtacatctggacgcgcaaaaatcggcataa

SEQ ID NO: 202302 - DNA, 852 bp, Klebsiella oxytoca
atgagcgaacgtttaagcattaccccgctggggccgtatattggcgcgcaggtatccggggtcgacatcacccgcccgctgagcgacaaccagtttgagcagctgtatcacgcggtgctgcgtcaccaggtggtgttcctgcgcgagcaaaacatcactcccgagcagcagcgggatctcgccctgcgctttggcgacctgcatattcatccggtctatccgcacgcgcccggcgtggatgagattatcgtgctcgatacccacgacgataacccgccggataacgacaactggcacaccgatgtcacctttattgagacgccgcccgccggggcgatcctcgcggcaaaagagctgccgtcaaccggcggcgataccctgtggaccagcggcattgcggcctatgaggcgctctccgcgcctttgcgccagctgttaagcggcctgcgcgcggagcatgattttcgcaaatcgtttcaggagtacaaataccgcaaaagcgaagaggagcatcagcgctggctggaggcggtcgcgaaaaatccgccgctgctgcatccggtggtgcgcacccatccggtgaccgggaagcaggcgctgtttgtcaatgagggctttaccacccgcatcgttgacgtcacggagaaagagagcgaggcgctgctcggcttcctgtttgctcacgttactaaaccggacttccaggtgcgctggcgctggcagccgaacgacgtggccatttgggataaccgcgtcacccagcactacgccaacgccgattacctgccgcagcggcgcattatgcaccgggcgacgattctcggggataaaccctattatcgggcggggtaa

SEQ ID NO: 202303 - DNA, 828 bp, Klebsiella oxytoca
atgagcgtggtcatcaatgacaaaccgcgtcagcgggggctgaagtggcgctggccgctctcgcgtcagctcagcctgagcgtggcgaccctggcggtactgctggctatctggtgggccgttgccgccctgcagctgattagtccgctgtttctgccgccgccgggacaggtattgcagaaacttatcgctattgccggtccgcagggttttatggacgccaccctctggcagcacctggcggcgagcctgacgcgtatcgttatcgcgctgctggcggcggtactgctcggcgtgccggtggggatcgccatggggctgagccccacggtacgcgggatcctcgacccgctgatcgagctttatcgcccggtgccgccgctggcctatttaccgctgatggtgatctggttcggcatcggcgagacctcgaagatcctgctgatctacctggcgatattcgcaccggtggcgatgtcggcgctggcgggggttaagagcgcccagcaggtgcgcattcgcgccgcgcaatctttaggggccagccgggcgcaggtgctgtggctggtgatcctgcccggcgcgctgccggagatcctcaccggcctgcgcattgggctcggcgtgggctggtcgacgctggtggccgcggagctgattgccgccacccgcgggttaggttttatggtgcagtccgccggtgagttcctcgccaccgacgtggtgctggccgggatcgcggtgattgccatcatcgcctttttactggaactggggctgcgcgcgctgcagcgtcgcctgacgccctggcatggagaagtacaatga

SEQ ID NO: 202304 - DNA, 768 bp, Klebsiella oxytoca
atgctgcaaatctcgcatctttccgccgattacggcggtaaaccggcgctggcggatatcaacctgacgctggacagcggcgaactgctggtggtcctggggccctccggctgcggtaaaaccacgctgctgaacctgattgccggattcgtgccttatcagcacggcagcatcaccctcgaaggccagcgggttgaagggccgggcgccgatcgcggcgtggtgtttcagcacgaagggctgctgccgtggcgcaacgtgcaggataacgttgcgctcgggctgcagctggccggggtcgacaaaacgcagcgccgggcaaccgccgcgcagatgctaaaaaaagtgggcctcgaaggggcggaaaagcgctttatctggcagctctccggcggccagcgtcagcgggtaggcattgcccgcgcgctggcggccaacccgcagctgctgctgcttgatgaaccgtttggcgcgctggatgcctttacccgcgagcagatgcaaaccctgctgctcagcctgtggcacgagaccggtaagaaggtgctgctgattacccacgatatcgaagaggcggtgtttatggccaccgaactggtactgctctcgccggggccgggccgcgtgcttgaacggctgccgctcgattttggccgccgcttcgtcgccggtgaatcctgccgcagcattaaatcggacccgcggtttatcgaacagcgcgaatacgtcctcagccgggtatttgaacaacgggaggctttctcatga

SEQ ID NO: 202305 - DNA, 963 bp, Klebsiella oxytoca
atggcactatcatcgcgtatcacactcattgccgcgctggcgctggcggcgttccaggcccaggcggtcaacgttaccgtggcgtatcagacctccgccgagccggcgaaagtcgcccaggcggacaacaccttcgccaaagcgagcggggcgaccgtcgactggcgcaagtttgacagcggcgcgagcatcgtgcgggcgctggcttccggcgacgtgcagatcggcaacctcggctccagcccgctggcggtcgccgccacccagcaggtgccgattgaagtctttctgctggcctcaaagctcggtaactccgaagcgctggtagtgaagaagagcatcaccaaaccgcaggacctgatcggcaaacgcatcgccgttccttttatctccaccacccactacagcctgctgtcggcgctgaagcactgggggattaaaccggggcaggtgcagatcctcaacctgcagccgccggcgattattgccgcctggcagcgtggcgacattgacggcgcctacgtctgggcgccggcggttaacgcgctggaaaaagacggcacggttctcaccgactcgtcgcaggtgggcgagtggggcgcgccgacgctggacgtgtgggtggtacgcaaagactttgccgaaaagcatcctgacatcgtcaaagccttcgccaaaagcgccattgacgcgcagcagccctatatcgccaaccccgatgagtggctgaagcagccggagaacatcagcaagctggcgcgcttaagcggcgtaccggaagccgacgtcccggggctggtgaaaggcaatacctacctgaccgccgcccagcaggcgcaggagctgaacgggccggtgaataaagccatcatcgacaccgctaaattccttaaagagcagggcaaagtgcccgccgccggtagcgactacagccagtacgtcaccgaccgttttgtgaagtaa

SEQ ID NO: 202306 - DNA, 630 bp, Klebsiella oxytoca
atgattcgagtggtgctggtcgatgaccatgtggtggtgcgttcaggctttgcgcagttactcagcctcgaagaggatctcgaggtggttggccagttcagcagcgcggcggaagcctggccggcattattgcgcgacgacgtcaacgtggcggtcatggatatcgccatgccggatgagaacggcctgagcctgctaaagcgcctgcgcgcgcaaaagccgcagtttcgcgccattattctcagcatttacgacaccccggccttcgtgcagagcgcccttgatgccggcgccagcggctatctgaccaaacgctgcggcccggaggaactcgtgcaggcggtgcgttccgtcggtatgggtggacactacctgtgcgccgatgccctgcgggcgctacgcggcggagagcaaccggcgcaggtgctcgaggtgctcaccccgcgtgaacgcgaagtgtttgatttgctcgttaaaggcgacagcgtcaaggaaatcgccttcaagctcgatctcagccacaagacggtgcacgtccatcgcgccaacgtgctgggcaaactacagtgtcacagcaccattgatctggtccatttcgccctcgaccaccagctgctggcgggtcattaa

SEQ ID NO: 202307 - DNA, 1542 bp, Klebsiella oxytoca
atgtcgcgcagccttcgccacagcgtcatctcgctgttcatcgtgctggcctggggaagcggctggctgatgctgtggacgctcgggttttacctgacccataacggccagcaggcggcgctgttcctgccgcacggcgtctatctggcgctgctgatcctgctttcgcgccgctactggcccgcgctggtactgcctccggtgctgatgctgctctggctgcacggcgaacagctgctgaacggctatattctgctggccgcgccgttgatcggtctgcttcccgccggcctcgcccaacagttctggcaccgctttcccctttactggcagcggctgacgctgctgctggccacggtcaccgccagcgcattactcaacaccgccctgctctcgccgtttgtgaaaagtccggcgatgatgctcggtctggcctcgtttaccggcggggtgctgctgacgccgtttgtctatctgatttttgaattcctgcgccagcagcaccgctaccacctgctggggctggataccaataatccgccgctgcgcacctcattgatcatctggtgcagcctgttctttattattggcatcggcacccagatggttctgtcgccggaaatcgagcgtctgctgttaattgtggtgtttctgcccaacgtggtgatggcgtggaagttcggctggcagggcggcgttctctccggtctgctgggcagcatgatgatcaccattgcccgccaggttggcgtcggattcagcaacctggtggagctggagatttttctggcgacccaggcgctgctcggtatcgggctggggattgccatcagtcgccagcagcacctggcgcaaaacctgcaccactatcgccagcggctggaggcggagctggcggcgcggcgggcgctaaccgaaaagctgatccataccgaagaggatacgcgcaaaagcctggcgcgcgagctgcacgacgaaatcggccagaatattaccgccattcagatccagtcgcagctggtgaagcgagcgcgcgatccggcgcaaacccaggccgccgccagccagattaacgatctcgcccggcgtattcaccactctacccgccagctgctgcgccagctacgccccccggcccttgatgaactgtcgtttaaagaggcgctgcaccatttgctcaatgagtttgcctttgccgagcgcggtatccgctgccgctttgactaccggctcaccgccacgccggagagcgaaacggtacgttttaccctctatcggctgctacaggagctgcttaacaacgtctgtaaacacgccgacgccagcgaggttgccattgctctgtatcagcaggggacgctgctgcgcctggaggtcaaggacaacggcatcggtatcagccccgacaaaatggccggcttcggcattcagggcatgcgtgaacgggtcagcgccctgggcggagagctgaccctggagtcgcagcatgggacgcgggtaattgttaacttgcccacaaatttgcaacaaacagccggctaa

SEQ ID NO: 202308 - DNA, 1296 bp, Klebsiella oxytoca
atgcgctcagcaaccgacattaatcaacgttaccggacgctgcgtccgcagctgctgatgtacatggtcatcggatatgcggcgttttacctgacgcgcaaaatcgtcaactacgtattgccggcgctgcaaacggatctgggtctggataaaggcgatatcggcctgctgggatcgctgttttacctgacctacggtctgtcgaagtttaccgccggactgtggcacgacagccacgggcagcgctggtttatgggcgtgggcctgttcgccaccggtctgctgaacgtggtgttcgccttcggcgaatcgctgacgctgctgctggcggtctggacgctgaacggattttttcagggctggggctggcctccctgcgcccgcctgctgacccactggtactcgcgcaacgaacgcggcttctggtggggctgctggaatatgtcgatcaatatcggcggagcgattatcccgctgattagcgcctttgccgcccactggtggggctggcaggcggcgatgctggcaccggggacgatcagcatggcatcaggcatctggttaacgctgcacctgaaaggaacgccccgcgaagagggattgccgtcagtaggccgctggcgtaacgacccgctggagctgcgccaggagcagcaaagcccgccgatggggctatggcagatgctgcgcaccacgatgctgaagaatccgatgatctggctgctgggcgtctcttacgtgctggtctatctgatccgcatcgcgctcaacgactggggcaacatctggctgacggagagccacggcgtcaatctgctcagcgccaacgccacggtgatgctgtttgaagcgggcggtctgctcggggcgttgttcgccggatggggctcggatctgctgttcagcggccagcgggcgccgatgattttactgttcacgctggggttgatggtctccgtcgccgcgctttggctggcgccggtccatcactacgcgctgctggcggtgtgtttctttacggtgggcttcttcgtttttggcccacaaatgctgattggcctcgcggcggtggagtgcggacacaaagcggcggcgggttcaattaccggatttcttggcctgttcgcctatctgggggcagcgctggcgggctggcctctgtcgctggtcattgaacgctacggctggtcgggcatgttcagtttactctcggtcgccgcagttctgatgggtttattgctgatgccgctgctgatggcgagcattactacctctgctgctcaaaggataaaataa

SEQ ID NO: 202309 - DNA, 1032 bp, Klebsiella oxytoca
atgaaaaaaacgctggtcactaccctgattgcttccggcattgcgctggcgacgttaagcggcgcggcgcacgccaaaggtcgtctggtggtctattgcagcgccaccaacgaaatgtgtgaggcggaaaccaaagccttcggcgaaaaatatgacgtaaaaacctcatttattcgcaacggttccggcagcacgctggcgaaggtcgatgccgagaagaaaaacccgcaggcggatgtctggtacggcggcaccctcgacccgcagtcccaggccggtgaaatgggcctgctgcagccctataaatcgcccaatcttgcgcaggtgatggagcagttccgcgatccggcgaagctgaaaggcaactactcctcggcggtgtacgttggcatactcggcttcggcgtgaacacccagcgcctgaaagagaaaaatctgccggtgccgaaatgctggaaagatctgactaaaccggaatataaaggcgaaattcagattgccgacccgcagagttccggcaccgcctacaccgcgctggcgaccttcgcccagctgtggggggacgatcaggctttcgattatctcaaacagcttaacgctaacgtctcccagtacacgaagtccggtatcgccccggcccgcaacgccgcccgcggtgaaacggccatcggcatcggcttcctgcacgactattcgctggaaaaagaacagggcgcgccgctggagctgatctcgccgtgcgaaggcaccggctacgaaattggcggcgtcagtatcctgaagggcgcgcgcaacctcgacaacgccaaactgtttgtcgactgggtgctgtcgaaagaggcccaggagctggcgtggaagaaaggcaagtcctatcagatcctgaccaacactaccgccgaaacttcgccgaactcgctgaagctcgacgacctgaagcttatcaactacgacatggataaatacggctcaacggacgtgcgtaaagcgctcatcaataaatgggttagcgaagtgaagatgggtaaataa

SEQ ID NO: 202310 - DNA, 2079 bp, Klebsiella oxytoca
atgtcacacacacttgcactccatcccgtgaaaaagcgggatgcgatattcctttgggttttattcggctggctggcgttcgccctgctgccgagctggagcctggattacggtctgctggagtccacgcgcgatgaaattctcgcggcctacggctggtcacagttcaatatcagctggctgtggtatctcctgccgagcctgctgctgattcgtccatggcaggaagccagccgggagcagcgcagccgccactacctcgacgccggctgggcgctcctctgtatggcgtttatcgtcgtcagcgccaccgtggaaggccgcgggttaggctacgccaccctcgtgctgtttgtcgcgctgggggccatcatgaccctggcgctcacccgcctggaatggcttggcggcgaccgctttgtgattggttcgctggtcaccatcgtggcgttaatcggcgtctttatcgtctggccgagcatcgccattttcatcccgatgttcaccaacgacgccggcgagtttgccccgctggcgtttatggccgtgctgtcgcaggcgcatattgtccaggtgatcctcaactccatcgccctgtcgattgcggtaggcatcggctgcaccttctttggcctggtgctggcgatttacaccacccgcatcgccaagcgcagcgcgattattggccgcattttctcgattctgccgatcgtcaccccgccgtttgtcgtcggcctcggcgtcaccctgatgatgggccgttccggctacgtcaccgagctgatggtcgactggttcggcttaaccaacaccaactggctgtacgggtttaccggcatctggctggcgcaggtgctggcgttcactccgatggcgtttatgatcctcgacggcgcgattaaaaccattcatccgtcgctggaggaggcgtcgtacaccctgcgcgccagccgctggcagacctttaacggcgtcttcgtcccgctgctgaaaccggcgctggcgaacgcgtttttaattgtcatcgtccagtcgctggccgacttcagcaacccgctggtgctcggcggcaacttcgacgtgctggcgacgcaaatctacttctatatcaccggttcgcagctcgattatcaggccgccagtacactgggcgcgttcctgctgctgttctcgctgctggtgttctgcattcagtatatgtggatcggcaagcgctcgtacgtcacggtttccggtaagtcctatcgcggcgacgtgcagccgctgccggtgaccctggtgtggagcgtgatcgccattctggcggtgtggatcgccttcaacgccctgctctacggcagcattttctacggcagctttaccgttaactggggcgtggactacaccctgacgctggataactttatcaagctgttcggccaggggatgagcgacggcgcctggccttcgctgctcgataccctgctctacgccgggatcgccgcgccgatcaccgccgccttcggcctgctgatcgcctggatcgtggtgcgtcagcagtttaaaggcaaaaagaccatcgagttcaccaccatgctgtgcttcgcggtgccgggcaccgtggcgggcgtctcctatattctcgcctttaacagcgcgccggtgtacctcaccggaacggcggcgattgtgattatctcgatggtgatgcgtaacgtgccggtgggcatccgggcgggcattgccggtttaggccagatcgacaaatcgctggacgaagcgtcgctcagcctgcgcgcgggttccctgcgcaccattacgcatatcctgctgccgctgctgcgcccggcgatcctctcggcgctgatctacagctttgtgcgcgccattaccaccgtcagcgccattgtgttcctcgtgacgccggacacccgcgtcgctaccgcctatatcctcaaccgggtggaagacggcgaatacggcgtggcgatcgcctacggatcgattctgatcgtagtgatgctggcgattatttttatctttgactggctgatcggggaagcgcgtatctcccggtcaaaagccaaaaaccaggcgtaa

SEQ ID NO: 202311 - DNA, 1047 bp, Klebsiella oxytoca
atgagtcagaaaaattttgttgaactgcgcaacgtcaccaagcgattcggcagcaacacggttatcgacaatatcaatctcaccatcccgcaggggcaaatggtgaccctgctcggcccttccggctgcggtaagaccaccattctgcgcctggtcgccgggctggaaaaaccgagcgaagggcagattttcatcgatggcgaagacgtgacccatcgctccattcagcagcgagacatctgtatggtgtttcagtcttacgccctgtttccgcatatgtcgctgggggacaacgtcggctacggtctgaagatgctcggcgcgtcgcgcggcgacgtgaaagcgcgggtgaaggaggcgctggcgatggtggatctggaaggcttcgaagaccgctatgtcgatcagatctccggcggccagcagcagcgcgtagcgctggcgcgcgccctgatcctcaagccaaaggtgctgctgtttgatgagcccttaagcaacctcgacgccaacctgcggcgcagcatgcgcgataagatccgcgaactgcaaaagcagtttgatatcacctcgctgtacgtgacccacgatcagagtgaagcctttgcggtttccgataccgtgctggtgatgaataaggggcatatcatgcagatcggctcgccgcaggatctttaccgccagcccgcgtcgcgctttatggcgagctttatgggcgatgccaacctgttcccggccgccttcagcgagggtttcgttgatatttatggctatcggctgccgaggccgccgcattttgccgcccacggcgagggcagcgtcggcgtgcgcccggaggcgatcaccctgagcgatcgcggcgaggagagccagcgctgcacgattcgccacgtggcctatatgggaccgcagtacgaggtgacggtagagtggcacgggcaggaaattttgctgcaggtgaacgcgacgcggctgcagccggatgtcggcgagcattactatctcgaaatccacccgtacgggatgtttgtgttagcggatgccggatga

SEQ ID NO: 202312 - DNA, 933 bp, Klebsiella oxytoca
atgtcgcagaataatccgttaaccgccctccttgacgcaaagccctttatcctgctggacggcgcgatggcgacggagctggaagcgcgcggctgcaatcttgccgacagcctgtggtcggcgaaagtgctggtcgacaacccggagcttatccgcgaagttcacctcgactatttccgcgccggcgcgcaggtggcgatcaccgccagctatcaggcgacgccggcgggctttgccgcccgcggcctcgatgaagcgcagtcgaaagcgctgatcggcaaaagcgttgagctggcccgcaaggcgcgggaggcgtatctggcggaaaacccgcaggcgggcgcgctgctggttgccggttcggtcgggccgtacggcgccttcctggcggacggttcggagtatcgcggcgattatgtccgcagccgtgaggaatttcaggcgtttcatcgtccgcgcgtggaagcgctgctcgacgccggggccgatctgctggcctgcgaaacgatgccgaatttcgccgagatgaaggcgctgtcggagctgctgaccgcctatccgcgcgcgcgggcgtggttctcgtttaccctgcgcgatgcgcagcatctcagcgacggcacgccgctgcgggaagtggttgccgtgctggcaaactatccgcaggtggtggcgctgggcattaactgtatcgcgctggaaaacaccaccgccgcgctggcgcatctgcatagcctgacggcgctgccgctggtggtttatcctaattccggggagcactatgacccggtatccaagacatggcatcaccacggcgaagcctgtgcaacgctggcggaatatttaccccagtggctggcggcgggggcgaagctgattggcggctgctgccgcacgacgccgaaggatattgccgaactgaacgcccggcgttga

SEQ ID NO: 202313 - DNA, 1407 bp, Klebsiella oxytoca
atgcaaacaacacaacaacaaggtgggcagcttaagcgcaccatgaagacccgccacctgattatgctgtcgctgggtggcgttattggcacagggctattttttaataccggctatatcatctccaccaccggagcggcgggtacgctgctggcctatctgattggcgcgctggtggtctggctggtgatgcagtgtctgggcgaactctcggtggcgatgccggaaaccggggcgttccacgtctacgccgcgcgctatctcggcccggcgaccgggtacaccgtcgcctggctctactggctaacctggaccgtcgcgcttggctcaagcttcaccgccgccggattctgcatgcagtactggttcccgcaggtgccggtatgggtctggtgcgtggtgttctgcgcggtgattttcgccctcaacgttatctccacccgcttctttgccgaaggtgaattctggttctcgctggtgaaggtggtcactattatcgcctttattattctcggcggggcggcgatcttcggcatcattccgatgcaggatggctccccggcgccggggctgcgcaatatcaccgccgaaggctggttcccgcacggcggtctgccgatcctgatgaccatggtggcggttaacttcgctttctccggcaccgagcttatcggcatcgcggcgggggaaacggagaatccgcacaaagtcattccggtggccattcgtaccaccatcgcccggctgattatcttttttatcggcaccgtcttcgtgctggcggcgctgatcccgatgcagcaggcgggagtcgaaaaaagcccgtttgtgctggtgttcgaaaaggtggggatcccctacgcggcggatatctttaactttgtgatcctgacggcgattctgtcggcggccaactctggcctctacgcctccgggcggatgctgtggtcgctctccaatgaaaaaacgctgccgtcctgttttaccaaattgaccaggaacggcgtgccgctgacggcgatttcagtcagcatgctcggcggcgtgctggcgctcttctccagcgtcgtggccccggatacggtgtttgtcgcgctgtcggcgatttccggcttcgcggtggtggcggtatggctgagcatctgcgcctcgcactttatgttccgccgccgccatctgcagcaggggaaggcgctaagcgaactgcactaccgcgcgccgtggtatccgctggtgccggcgctgggatttgtgctttgcctggtggcctgcgtgggtctggcgtttgacccgagtcagaggattgcgctgtggtgcgggatcccgttcgtggcactgtgttatggtgcgtattatctgactcgttcacggaaactcacccaggagcctcaacatgtcgcagaataa

SEQ ID NO: 202314 - DNA, 1383 bp, Klebsiella oxytoca
atgataccccgcgctttacctctgtgggccgccgctgccgccgtcggtcttctaccgctgtacgccgctcaggccgcgagttccgtgaagtttcccgataaaatctgtgatatcacccactacggcgcagaaggccatcggctgcaaatcgcgctcaacaccgatgccattcaaaaagcgattgatgactgcgccgccgccggagggggaacggtgctggtgccaaaaggtaatttcctgaccaacccgctgtttctgaagaataatattcagcttaagctggagaaagacgccaccctggtggcctcaaccgaagtggctgcctatcgcggcgatgataaaacgcgatatgccgaagcggaaaacggctggctgccgtttatcagcatcgccgacgcgcaaaacgtggccatcgtcggtgaaggcactatcgacggccagggcgcggtgtggtgggagcgctggcgggaaaatatccgcgccaccggcaagaaaggcggtaccgaccgaccgcggctgatttatatcacccgcgccagcaacgtgcttatcgacggcgtgaccctcacccattcacccagcttccacgtggtcacccgctacgcgcacgatgtcgatatcaacggcacgcgtattctttcgccgtggcatgcgccgaataccgacgccatcgatcctatcgatagccagaatatccgtattaccaacaactatatcgactgtaacgacgaccatattgccatcaaggcggaaaaagccgacccgcgcttcccggagggcgtggtggataacatctatatcgccaacaacaccctgaagcaggggcgcgggatctccatcggcagcgagagcgcaggcggcgtgaataacgtgctggtggaaaacaataccttcgaaggttcgatgtacggtattcggattaaaagcccgcgcggcaaaggcggtgaggtaaaaaatatcgtctaccgcaataccagaatgcataacgttgaggtgccgctggtgttctccgcctattacaaagccgcgccgattgtgcaggccgaggtcgataagctgttgcaggcaggcggctttaccctcggcgaacagatctatccgccggacagcgacccgaaacagccgttcgataaatacaagactccgcacttcagtaatatcaccgttgaaaatttaacctccactggcgacagcaaagcggcggcctatattatcggtaccccggaagcgccgctcagcggtttccattttagcaacgtcaatattgaagccgaccgcggtctgcgcattcgcaacgccgagctggagagtaaaggacttaacctgcaggtgaaagcaggtccggtaattcaaaaagacgctggcgccatcgtgcaccagtaa

SEQ ID NO: 202315 - DNA, 1380 bp, Klebsiella oxytoca
atgacagagcaaaccacaacgctaaaaagaacgctcggcagtttccgcttatgggggatcgccgttgggctggttatttccggagagtattttggctggagctacggctggtcccaggccgggacgctgggctttatgatcgtcgcgctggccatcgccgcgatgtactgcgcctttatttttagctttaccgagctgaccaccgccattccgcatgcgggcgggccttttgcctacgcctaccgcgcctttggcccgaccggcgggtttatcgccggcttcgcgaccctgattgaattcgtcttcgccccgcccgccatcgccatggccatcggcgcctatcttaacgtgcagtttccggcgctcgaccccaaatgggtggcctgcggcgcctacatcatctttatgacgctgaatattctcggcgtgggtatcgccgcgacctttgagctggtggtgacgttattagcgattttcgaactgctggtgtttatgggcgttgtcgcaccgggcttctcctggagccactttactgctaacggctgggcgggcgcggagagcttcagcggcctggcgctgccggggatgtttgccgccatcccgttcgctatctggttctttctggcgattgaaggcgcatcgatggccgccgaagaggcgaaggatccgcagcgcaccattccccgggcgctgggcggcggcatcctgaccctgaccgtgctggcgattggcgtgatgatttttgccggcggcgtgggcgactggcgaaccctggccaatattaacgacccgctgccgcaggcgatgaaaatggtggtcggcaacagcagcggctggctgcatatgctggtgtggctgggactcttcggcctggtggcctcgttccacgggattatcatgggctactcgcggcagatttactcgctggcgcgcgcgggctatctccccgccagcctggcgactctgaaccgccgcacccgcacgccgcatctggcgatcctcgccgggggcgtggtgggcatcgccgccattttctccgattcgctgatcaccattagcgggatgccgctgaccgcctgtatcgtcacgatgtcggtatttggcgctattgttatgtatatcacctcgatggcggcgctgtttaaactgcgccgcagcgagccgaagctgattcgaccgttccgcgcgccgctctatccgtgggcgccggccttcgcgctggccatggcggtactctgcctggtggcgatggtctggtacaacaccctgctggcgctgattttcgccgccatgatgctcggcggctacctgtggtttcgcaagaccgcagcggcccgccagcgcgcggcggtggatccgcagctgcgtacggtctcctga

SEQ ID NO: 202316 - DNA, 1389 bp, Klebsiella oxytoca
atgtataaaactacgctatcgggccaggtatggcgctttgatagtctgaaaaccttgatggcgaaggcctctcctgcgcgttccggcgacgcgctggcgggcgttatcgccggctccgccgaagagcggatggcggcaaaaatggcgctggcggaggttccgctcacggagattctcgataatccgctgattccctacgagcaggatgaggtgacccggctgatcctcgatacccacgacgcccggggcttcgcggcgattcgccaccttacggtcggcgattttcgcgactggctgctcgacgacgccaccgatgaagcggcgctgcgccaggtcgcccgcgcgataaccccggagatggccgccgcggtcagcaagctgatgcgcaatcaggatctgatcctcgccgccagcaaatgccgggtcgtcacccgttttcgcaataccatcggcctgccggggcgcctgagcgtgcgcctgcagcccaatcatccgaccgatgatatgaaaggcatcgccgccagcatgctcgacggcctgctgtacggcgccggggacgcggtgatcggcatcaatccggccagcgacagcctgccggtgctggcgcagctgaaccatatgcttgacgatattattcagcgcttcgccattcccacccagtcgtgcattttgacccacgtcaccaacaccctgcagctgattgagcgcggcgcaccggtggatctggtgttccagtcggtggccggtaccgaagccgccaacagcggtttcggcattaatctggcgctgctgcaggaagcgcgggaagcggcgcttagcctgaaccgcggcacgctgggcaacaacgtgatgtattttgaaaccggccagggcagctgtctttccgccaacgcccaccacggcgttgatcagcagacctgcgaagcccgggcctatgccgtcgcccgccattttgagccgctgctggtcaatacggtggtgggctttatcggcccggagtatctgtacgatggtaagcagattatccgcgccgggctggaagatcacttctgcggcaagctgatggggctgcccatcggctgcgacgtttgctacaccaatcacgccgaagcggatcaggacgatatggataccctgctgacgctgctctgcgcggccgggctgacctttttgatcggcgttccgggggctgacgatattatgctcaactaccaaagcacctcgttccacgatgccctttacgcccgccgactgctgggtttacagcatgcgcctgagttcgccgactggctgacgaagatgcaaattattgaccgtcacggcgcgcttcgtctgaccgatgcccgccatccgctgctttccgtcctgccgcaaggagaaccggtatga

SEQ ID NO: 202317 - DNA, 777 bp, Klebsiella oxytoca
atgaatcctcccgacgcctggaacccgctgcgtgagtttaccgatgcgcggattgcgctggggcgcagcggcgccagcctgccgacccgcgaagtgctgaatttcggcctcgcccacgcccgggcgcgcgatgccattcaccagcctttcgccagcgaccagttagtccagccgctggcggagctggggctgtcgacgctgaccgtccgcagcgccgccagcgatcgccatgtctatctgaatcgcccggatctggggcgacagctgaacgaagagagccgcgccgacctcgccgccagcggcgcgcgccccgccgacctgctgctggtgattggcgacgggctgtcgtcgtacgccgtgcagcgccaggcggtgccgctgattcgcgccctgctgccctatctgaaaaccctcggcctgagcctggccccggtggtgctggcgcaccagtcgcgggtcgcgctgggcgatgatataggcgaaacgctgaaggccagagcggtggcgatattgattggcgaaaggcccgggctctcctcgccggatagcctcggggtgtatttaacctggcagccgcatcgtcagcggctggagtcggagcgcaactgtatttctaatatccgtccggaagggctgagctttgatgccgccgcttttaagctggcctggctactggagcaggcctttttgcggcggcttaccggagtgcgcctgaaagacgaaagcgataatccggcgctgcatggaaaaataaaaccgtttagccagttaaaataa

SEQ ID NO: 202318 - DNA, 1137 bp, Klebsiella oxytoca
atgaacaagttttccgggaaagcgtctttaatggccacgctggttgccgcgtgggtcggtgccagcagcgcgcaggcggctgaaattaaaatcggcgtggtcttgccgctgagcggcgcgctgagcggctacggtcagccttcgcaaaaagggctggatattatccagagcattacgccgacgttaaaaaacggcgacaccgtgaagcttatcgtgatcgacgataagagcgataaggtcgaagcggctaacgccatgcagcgcctggtttccagcgataaagtcgacgcggtgatcggcgaagtcacctcctccaataccctggcgatgaccaaaatcgccgacgacagcaaaacgccgctggtctcctcaaccgcgaccaacgaccgcgttacccgcaaccacccttacgtcagccgggtctgcttctccgacagcttccagggcgtggtcggcgctaacctcgcctcgcgcgatctgaaagccaaaaccgccgccatcgtcttcgacagcagcaacgactactccgtcggcctggcgaaggcctttcgcacgcagttcctgaaaaacggcggcaccattcctatcgaagttcaggctcccggcggcagcaaagactttaaggcccagctggccagcgtgaaggcgaagaacgtcgacatgatctatatgccgatctactacaccgaaggggcgctgatcgccgtacaggcgaagcagctggggctgagcaagccggtggtcggcggcgacgggctggcggcggatcaggtcttttttgacgtcggcaaagacgcggtcaacggctatatgaccaccgactactactcgccgaacgccaaagagcaaacgccggcgggcgaggtgtttatcaaagcctgggaagccaaataccagcagccgacccacacctggggcgcgatggcggcggacgcctataacgtcattatcaacgccatgaaccagtgcagcgacccgcacgaccgggtttgcgttaacgaaaaaattcgcgccactaaggacttccagggcgtaaccggcacgctgacgttacaaaacggcgacgctatccgcagcgcggtcatcaacgaagtgaaggatggcaagctggcgtttcgtaccgtggttaatccttaa

SEQ ID NO: 202319 - DNA, 900 bp, Klebsiella oxytoca
atggatggtgccatttttctccagcaagtggtcaatggaatgagccttgggggcatgtacgccctgattgccatcggttatacgatggtttatggggtgctgcgcctgatcaacttcgcccatgcggacgtaatgatggtcggggcgtttaccaccctgtttttgttttcttccattgggctacccttcggggtagccgttttcctgaccctcgcgctgtgcggcctgttcggtatgctgatcgaccgggtggcctatcgcccgctgcgtcaggcatcaaaaatctccatgctgatcaccgccatcggcgtcagcttcttcctcgaaaacctgttcaacgtgctgtttggcggcagctcgcgcttcttttccgcaccggaatttttcaacaacacccgcgcctttggtgacgtgattatcaccaacgtggcgtggatcgtgccgctgatcaccgtcctgctgctgctggcgatcctctggctgctgtaccgcacccgctacgggatggcgatccgcgcggtggccttcgacgttaataccgtgcgcctgatgggcatcgacgccaaccgcattatctcgctggtgttcgccctcggcagcagcctcgcggcgctgggcggggtgttctactccatcagctacccgaccatcgacccgctgatgggcgtgctgatcggcctgaaggccttcgccgccgcggtgctcggcggaatcggcagcgtcaccggcgcggtgctcggcggctttattctcggctttaccgaggtggtggcggtcgctctgtttcccgaactgggcggttacaaagacgcctttgcctttatgttcttgattctggtcctcttgttccgcccggttggcattatgggcgatgaacgtctggaaaggagccgtttctga

SEQ ID NO: 202320 - DNA, 1050 bp, Klebsiella oxytoca
atgctcaacgctacgactaccgccggggcgcagctgcgcaacctggtcattattgctctctgcgtcgcgctgctggccgggatcaacgtcgtcttcaacgactacattactcgcgtcatcagcaccattttcgtctttatgatcctcgcggtcagctacaacctgatcaacggcgtgaccggccagctgtcgctggagcccaacggctttgtggcggtcggcgcttacgtcaccgccctgctgatcctccccagtgacagcaagctggatatgtttgagatggccgcccccagcccgtggatcctcgtgctgcacgccgggttcctgcccgcgctgctcattagcggcctgtgcgcggcggcgctggcggtttgccttgccctgccggtcttccgcgtgcgcggcgactacctggcgattgtgaccctcggcttcggctttatcattaaaatcctcgctatcaacaatccgcagatcaccaacggcgcgattggcctcaacgatattccgcagcagccgcatctcctgttctggtgcgggctgttcgccctgctggcgaccgggatgattttgcagctggtgtggtcgaagtacgggcgaatgatgaaagcggtgcgcgacgacgaagacgccgctatcgccatgggcgtgaacacgtttcgcattaaaacctgcgccttcgccaccagcgccttctttgaagggatcggcggcggactgctggcctcgctgctgaccaccatctcgccgggcctgttcgactttatgctcaccttccagctgctgattattatcgtgctcggcggcctgggcagcaccaccggcgcgctgctcggcaccgtactggtggtcggcagcggcgagtggctgcgctttctcgaccagccgctccagttcttcggtcacgatctcggcgcgtatccgggcctgcggatggtggtgttctcgctgctgctgctgatcatcatgctgttcgcccgcgaaggtctgctgggcaaaaaagagatttggcaagtgggcaaaaggggccgcggctatggcgcaaaataa

SEQ ID NO: 202321 - DNA, 783 bp, Klebsiella oxytoca
atggcgcaaaataaggtcattttacaggtgcaggacgtgaccatgcagttcggcggcctgcgggccatcgacagcgtcagtttccacgtcgacgaagcggaaatttttggcctgattggccccaacggcgcgggcaaaaccacgatgttcaacgtcatcaccgccaactataagccgaccagcggcagcgtgaccctggcgggaaaatcgctgaaggggctgaagccgaaccgggtggtcaacgccgggattgcccgcacctttcagaatatccgcctgttcaactcgatgacggtattagaaaacgtgatggtcggcctcgacagcgccagccgctattcgctgctggaagcggcgctgcatattggccgctacttccccgccgagcgggcggcaaaggccaaagcgatggcgattctggacgatatcggtatcgcccatttcgccgacgtgcaggccaccaacctcagctacggcaaccagcgcaaggtggagatcgcccgcgcgctggcgacgtcgccaaaattgctgctgctcgacgagcccgccgccgggatgaacccgaaagagacggaggatctggcggatctgatcttccgcatgcgtaacgactatcagctcagcgtactgctgatcgagcacgacatgccgttcgtcaacaagctgtgcgagcgggtgatggtgctggagtacggcaagccgctgtttagcggcctgatgtccgaagccattcaggatccggacgtgatttccgcctacttgggggacgttcgttatgcttag

SEQ ID NO: 202322 - DNA, 696 bp, Klebsiella oxytoca
atgcttagcgcgcgcgagttaaaagtgttttacggcgtgattcaggggctgaaaggggtggatattgatattcacgatcgggagattgtgacccttatcggcagcaacggtgcggggaaaacctccaccctcaacgggatcgtcaatctggtgcgttccacggggcgggtcaattttctcaacgaggatatttcccgcagccagacgcatcagattgtgcgtaaggggctggcgctggtgccagaaggacggcgcatctttaccaatctgaccatcgaagaaaatctgcgcatgggggcctacaacaatctcgccggctttacccgcctgcgcgatcgcatgtacagcctgtttccccggctgaaagagcggcgcagccagatggcgggaaccatgagcggcggcgagcagcagatgctggcgatcgccagagcgttgatgagcgagccggtactgctgatgctcgatgagccaagcctcggcctggcgccgaaaattgtcggggagctgtttgcgacgattaagcagctgcgggaagagaatattaccgtgctgctggtagagcagaacgccacggcggcgttgaccatcgccgatcgcgcctatgtgctggagaatgggaagattatgctctctggtccggcgccggaggtgctggcgaatccggaaatcaaacggatgtatctggggggataa

SEQ ID NO: 202323 - DNA, 183 bp, Klebsiella oxytoca
atgaaagtggcgctgtggcaacgcataacgggctggctggcttctttatctggatccggcggtgaagccggtcagcaggatacccaacgcatcatggaggcaatattaccggtcgccagtctctacggaattgagctcggcaacgttgaaacaaggtggtttcgccatgataaaacatactga

SEQ ID NO: 202324 - DNA, 810 bp, Klebsiella oxytoca
atgcgcattgcaaaaacaaaaatcgcgctggcgctgggcatgctggtgctcgccgcgcaggctcaggccgatcaactagccgatatcaaagccgccggcgtggtcaaagtcgccaccttcgacgccaacccgccgttcggctcggtagacccgaaaacgcataaaatcgtcggctacgacgtggacttcgccgaagcgctggcaaagtcgctcggcgtcaagctggagctggtcgccaccaacccggccaaccgcattccgctgctgcagtccggtaaggccgacctgatcgtcgccgatatcaccatcaccccggaacgcgcccaggtgattgatttctcaacgccttacttcgtgaccggccagcagttcctcgtcccggcaaaatcgccggataagctcgatgattacagcaaagcgcgcatcggcgcggtaaaaggcaccaccggcgaacaggcgctgcatcagcgtttcccgcagtcgcgcgtgctctcttatgacgatattccgctggcgctgaccgccctgcgcaacggcaacgtgcaggccatcactcaggacagcaccatcctcgccggactgctggcggaagcgccggacaaggcaaacttcaaaatcatccccgacctgctgagcaaagaagagattggcgtcggcgtgaagaaaggcgaaccggccctgctgaaagcggtcaatgacgagctggtcaagctggaaaaaaccggtgaagcggccaaaatttacgacatctggtttggcccgagcaccaaaaccccgcagccgcgcgcctttactatcgaagcgaaataa

SEQ ID NO: 202325 - DNA, 819 bp, Klebsiella oxytoca
atgttatcggctctattttcacgctccgcggcatcgtccgcggatttttcgcatctgcagcgcgccagcattgagtttcgcgatgtcgccaaaagctacggcgaccatcgggtgctgaacggcgtaaatttacaggttgaacccggcgaagtagtggcgatcctcggcccttcgggatccggcaaatcaaccctgatccgcctgatcaatcagctggaatcccttagcggcggcgagattctgatcgacggcaaaccgacgcgccagcttaccggcagcgccctgcgccagctgcgcagccgggtcggcttcgtttttcagcagtttaatctctacgcccacctgacggcgcaggagaatattaccctcgcgctggaacgcgttcacggctggagcaaaagcgccgcccgcgagcgctcgctggcgctgctcagccaggttggcctggcggataaagcccggcagatgcctgcccagctctcgggcggtcagcagcagcgggtggcgatcgcccgcgccctcgcctcctcgccgcagatcattctgttcgatgaacccacgtcggcgctggacccggagatgatcggcgaagtgctgcaggtcatgaaaaccctcgcccacagcgggatcaccatggtggtggtgacccacgagatgcagttcgcccgcgagattgccgatcgggtggtgtttatcgacggcggcgatattctcgaagtcgcgccgccggccgagtttttcgcccggccgcagcacgcccgcacccgccgtttcctgcagaaggtgctcgatccgctgcaccaggagggtgaggcgtga

SEQ ID NO: 202326 - DNA, 753 bp, Klebsiella oxytoca
gtgatcccacatctcgactggcatggcgtgctgagcgggcagccgctgcagtggatcatctccggttttctcaccaccgtctgggtcagcgtcgcggggatgattctggcgaccgtgctggccgtcctgctgctggcgctgcgtctcgggggcggcaggcccggccgctggctggtggcggcctgggtttcactgttccgcaatacgccgctgctggtccagctgctgttctggtattttgccgcctggaatctgctgccgctgggggcgcgagattttatcaacgacgaccacagctggtcgattctgccgggcaacgtctggtggctgacgccggaatttctctgctcaatgtggggactcggggtctttacttcggcgtttctgatcgaagagatcgcctccgggctgcgcgccgttagccacggccagcgggaagcggcgctgtcgcaggggtttacgccgtggcaggagctgcgccacattctgctgccgcaggggctggctaacgcctggcagccgattatcggccagtatctgaacctgatgaagctctcctcgctggcgagcggtatcggcttcgccgaactgacctatcaggtgcggcaaatcgagagctacaacgcgcatgcgctggaggcgtttgccgtcggcaccgcgctgtatctggcgcttggggtgctcatgggcgtggcgctgacgcgtctcggtccgggaagggatcagcaaaggagagccggctatgaacgctaa

SEQ ID NO: 202327 - DNA, 684 bp, Klebsiella oxytoca
atgaacgctaacctggcggttatcgttgataacctcgattatctgctgtggggacggctggcggacggtattcccggcggcgtggtgctgacgctgctgatggctatcggcgccgccgcgctggcgctgccggggggcgtgctgctggcggtcatcgcctggcgctacgacgggatcgtgcggcggctgctcttcctgtgggcggagattattcgcggcatcccgctgatcttcgtcattttctggctgtggtatctgctccccatgctcaccggcagcgacctgccgggcgcggtcaccgtcacggtggcgctggcgtggtttaccgccgcgtcggtgatgcactcggtgctggcgggcctgcaatcgctgccccgcgggcagtacgaagcggcgctgacccagggttttgcccccgggcagacgctgcgccttattctgctgccgcaggctctgcgcaacgttcagccctcgctggtagggatatttatcgggctgctcaaagacacgtcgctggcgtttatcgtcaacgtgccagaactgaccaccgtcgccgggcaggtcaataatcgggtgcagatttacccgctggcgatatttgtctttaccggcgcggtttattatctgctgtgctgcggcctgagcctgctggcgaaccgccgctatgccgggcgtacggtttag

SEQ ID NO: 202328 - DNA, 705 bp, Klebsiella oxytoca
atgttcaggcgacgtggcgtaacattaactaatttgctgcggatgcttatctgcctgctgtcgctcggcttcgcgaccgcggcgcaggccatctcggtgggtaatttaactttctcgctggcggcggaagataacttcgcgtctaaacgggtgattaataacaataaaagcgcccggttgtatcgggtttctattgtcgctatcgaccgccccggcggcaaagaggtgcgttctcgcccggcggacggcgagctgctgtttgccccgcgtcagcttaccctgcaggcgggggagagcgagtattttaagttttactaccacggcccgaaagatgaccgtgagcgctattaccgggtctcctttcgtgaaatacccacccgcaattacgtgatgcgcaataaaagcggtaccgaggtgagtatggatccggtggtggtgatggacacgattctggttgtgcgcccgcgcgaggtacggttcaagtgggcctacgatcgggcggcgggcaccgtcagcaataccgggaatacctggtttaagctgctgatcaagcccgggtgcgatacgacggaagaggaaggggatgcatggtatttacggcccggggacgttgttcgccaggcctcgctgcgccaaccggggaaccactacatcatctataacgataaatttataaaaatgaccaaagactgcccggtgaactaa

SEQ ID NO: 202329 - DNA, 1644 bp, Klebsiella oxytoca
atgaaagctaaatggctggcatgtttagtgatgttcacggcggcgctgtgcgtgacgcgggtcaacgccgcggtcaccaaaaccacctggccggatgcggcggccatgcagtttgttttcgtggaaaacaactcggacgataacttctttgttaccccgggcggcgcgctggacccgcgaatgaccggggctaaccgctggaccgggctgaaatataacggctcgggcaccatttatcagcagagcctgggctatatcgacaatggctataacaccggcctgattgccaactggaagtttgatatgtggctggataactcccccacatctcatccgttacaggggctgcgctgtatcaactggtatgcgggttgcgacatggccaccagcctgattctgccgcaaaccagcgatgccagcggtttctacggcgcgacggtgacctccggcggacaaaagtggatgcacggcatgatgtccgacgctttctaccagtatctgcagcagatgtcggtgggcagcagtttctcgatgaccatcaactcctgtcagacttcggtgaactatgacgcaaccagcggcgcgcgctgtaaagatcaggcttcaggaagctggtacgtgcgtaaagtcacccatactaaagcggcaaacctgaagctgattaacacccatgcgctggcggaagtctttatcaacagcgacggggtcccgacgctgggcgaggggaacgccgactgccgcacccagactatcggctcccgttccggtctgagctgcaaaatggtgaactacaatttgcagcacaatggcctgagtaatacctcaattcatattttcccggcaatcagcaactcggcgctggcttccgcggtcggaagttatgatatgcagttcagcctggatgggaattcatggaagccggtgagcggcatctcccagtactatacgtttaatgagatgaaatcatctgactcggtttacgtatttttctcgagcaacttttttaagcagatggtcacgctgggcatcagcgacgtgaacaccaaagacctgtttaatttccgtttctataacaccacctcgccggagtcaggctggtacgagttttcgacctccaacaccctgattattaaaccgcgcgacttcagcatcagcattatttccgatgagtacatttcggcgccgacgcgcgaaggctacgtgggcagcggcgagccgtcgctggactttggctatattgtcaccaccagcggcaaaaccgccgccgatgaagtgctcattaaagtgaccgggccaacgcaggcgatcggcggacgttcatactgtatttttagttcacccgacggcacgtcgagagtaccgttcccggcgacgctggcgtttaccacccagaccgggaccatcaaaacctacgatgccggatgcgatgatacctggcgcgatatgaccgacgcgctgtggttaaccacgccgtggacggatatctccggcgacgtcggtcagatggacaaaacgacggtaacgttttccattccgatggataacccgatatcgctgcgcacggtggaagataacggctggtttggtgaagtgagtgcttcaggagaaattcatgttcaggcgacgtggcgtaacattaactaa

SEQ ID NO: 202330 - DNA, 2526 bp, Klebsiella oxytoca
atggctctaccagggaacgctccaggattaaaaacactccttgcctccggcatggtcattttgctggttccgtttagcgtcactgccgccaccgacaaagtacagcaaatcggcggcgtgattatccctcaggccttcagccaggcgctgcaggacggaatgagcatcccactgtttattcatcttgaaggcagcaccggtacccaggacgatcagcggatcggcaatgcctttatctggctggataatggcgttctgcgcgttcggcaaattcagctggaagaaaacgataataacgccaccgtcagcgagcagacccgcaaacagctgaccgcgctggccaatgaagctttcagcaaagatcttaacattagcctgacggatgacgcccggctacagctcagcctgcgccagctgctcctgcagctggtggtaaaaaaagaggcgctgggtacggtgctgcgctcgcgcagcgaagatatcggtcagtccagcgtcaacacccttagcagcaccctgaactataacctcggggtctataacaaccagatgcgcaacggcggcaataacacctccagctatctgtcgctgaacaacgtcaccgcgctgcgcgagcaccacgtggtgctggacggctcgctttacggtattggctccggcaatcaggacagcgacgtctataaagcgatgtatgaacgcgactttgccggtcaccgctttgcgggcgggatgctggatacctggaatttacagtcccttggcccgatgaccgctgtttcggcagggaagatctacggcgcttcctggggcaaccaggccagttcgacggtgttcgataacacccagtcggccaccccggtggtcgcctttttacccgccgccggggaagtccatctgacccgcgacggacgcctgatgagcgtgcagaactttgccatgggtaaccatgaagtcgacacccgcggcctgccgtacgggatttatgatgtcgatgttgaagtgattgtgaacggccgggtggtcagcaaacgcacccagcgggtcaataaattgttcagccgcggacgcggggccggcgcgccgctggcctggcaattctggggcggcagcttccatatggatcgctggtccgaaagcggtaaaaaaacgcttccggcaaaagatagctggctggcgggggcctcggcctccgggtcgttcagtaccttaagctgggcggccaccggctacggctatgataacaacgccgtcgccgagacgcgcctgaccctgccgatcaccgagtccattaacgtgaacctgcagaatatgctggccagcgacagctcctggagtagcatcggcagcatcagcgccacgctgcccggcggctttagttcggtgtgggtcaaccaggaaaaaacgcagattggcgaccggatacggcgcagtaatgccgacaaccgggccatcggcggcacgctgaacctcaattcactctggtcaaagctgggtaccttcagcgtcagctataacgacgaccgccgctataacagccattactacacggcggattactaccagacgctttacaccggctcatggggatcgctgggcctgcgcgcgggcgtacagcgctttaataacggcgacagcagcgccagcaccgggaaatatattgcgctcgatttctcgctgccgctcggcaactggttcagcgccgggatgacgcaccagaacggttacactatggccaacctgtcggcgcgtaaacagtttgatgaaggcagtattcgcaccatcggcgcgaacgtttcgcgcgccatttccggcgataccggcgatgacaaaaccctcagcggcggcgcgtatgctcagtttgatacccgctactccaccggcacgctgaatgtgaacagcggcgtggatggctatgtgaacaccaacctgaccgccaacggcagcgtgggctggcaggggaaaaatatcgccgccagcggccgcaccgacggcaacgccggggtgattttcaaaaccggccttgaggatgacggcaagctcagcgccaaggttaacggccgcattgtgcagctctccggcaaccgtaattacctgccgctgtcgccgtacagccgttatgaagtggagctgcagaacagtaaaaactcgctcgatagctacgatatcgtgaccgggcgtaagagccagttgaccctttatccgggcaacgtggcggtgattgagccggaagtgaaacagatggtgacggtctccgggcgtatccgcgcggaagacggcacgctgctggctaacgcgcggattaataaccatatcggtcgtacccgcaccgatgagaacggtgagtttgtgatggacgtggataaaaaatatcccaccatcgatttcagttacggtaaaaaccagagctgcgaagtggcgctggagctgagccaggcgcgcggcgcggtgtgggtgggcgatgtggtctgtagcggcctctccacttatgcccgcacgcagcagacaggagaaggtaatgaaagctaa

SEQ ID NO: 202331 - DNA, 669 bp, Klebsiella oxytoca
atgaaaaaacacattctggccatcggcctgttgctcagcacaatgacgccagccctggcgctggatgtgggcgatatctcttcatttatgaacagcggcagcagcacgctgagcaaagagatcaagaacacgaccgacagcggtcgcttaattaacatccatatggaacgcctctcttcgccgctggacggtggcaaggtgatcccgatggataagcaggacgagattttactgacccccgccagtctgctgctgcccgcgaaggccagcgacgtgatccgctttttctacaaaggcccggcggacgataaagaacgctattaccgcattgtctggttcgatcaggcgctcagcgatgcccagcgcaatggctcgacccgcagcgcggtagcgacggcctcggcgcggatcggcaccatcctggtggtcgcgccaagaaaagccaacttccgctatcagtacgccaacggcacgctggtcaataccggtaacgcgacgttgcgcattcttgcctacggcccgtgtctgaagccggctgacggtaaagagtgcaaggaaaattatttcctgatgccgggaaaagaacggcgcttcacgcgcgtgaatgtggcggataaaaaaggacgggtcgcgctctggcagggcgagcagtttgttcccgtgaaatag

SEQ ID NO: 202332 - DNA, 588 bp, Klebsiella oxytoca
atgaaaaaaaaggttcttgcaattgctctggtaaccgcgtttgccggtatgggtgtcgctcaggcagctgacgttactgctcaggcagtcgctacctggtccgcaaccgccaaaaaagacactaccagcaagctggtggtgactccgctgggcagcctggctttccagtatgccgaagggattaaaggctttaactcacagaaaggcctgtttgatgtggctatcgaaggcgatgccaccgcgaccgcattcaaactgacctctcgtctgatcaccaacaccctgactcagctggatacctctggttccaccctgagcgtgggcgttgactacaacggcgctgcggtcgaaaaaacggctgacaccaccatgatcgacaccgcggcgggcatcctgggcggcaacctcagcgcgctgtctaacggctataacgtcgccggtcgcaccaccgctcaggacggcttcacgttctccatcatcagcggcaccaccgatggcaccactgccgttactgactacagcgctctgccggaaggtatctggagcggcgacgtcagcgtacagttcgacgcgacctggaccagctga

SEQ ID NO: 202333 - DNA, 543 bp, Klebsiella oxytoca; identical to SEQ ID NO: 189353

SEQ ID NO: 202334 - DNA, 843 bp, Klebsiella oxytoca
atgaacagttccctggctgcggtggcagaaaccgattatcaaccgtttacgccgccctttatcgaccggcagcgtaaggtcctgagcgtacgcaacctgagcaaatcctacagcgcgcagcaaaccgtactggacggcatcagtttcgatcttcatgcgggcgagctggttggcgtcattggccgctccggcgccggaaagtcaacgcttctgcacgtactgaacggtacccacagcgccagcggcggcgagatcctcagctatccggaagtgggtacgccgcaggacgtatcaaagctgtcgggccgcgcgctaaacgcctggcgcagccagtgcggcatgatctttcaggatttctgcctggtcccgcgtctcgacgttttgaccaacgtgctgctgggtcgcctgagccagacctccaccctgaaatcattattcaaagttttccccgacgcggaccgcgcccgcgccatctccctgctggaatggatgaatatgctgccgcatgcgctacagcgggcggaaaacctctccggcggccagatgcagcgcgtggcgatttgccgggcgctgatgcaaaacccgggtattttgctggccgatgaaccggtcgcttccctcgacccgaaaaatacgcagcggattatgaatgtcctgcgcgaaattagcgaacagggtatcagcgtgatggtaaacctgcattcggtggagctggtgcgtgaatattgcacgcgggtcatcggcgtagccaagggcaagattatttttgacgatcatcccacgcagctgaatcaggatattctgcatcggctgtacggcgatgaaattagccaattgcattaa

SEQ ID NO: 202335 - DNA, 885 bp, Klebsiella oxytoca
atggcgtggcaggcaagcgctgctgaacaaccgaaggaattaaatctgggcatccttggcggtcagaacgcaacccaacaaattggtgataaccagtgcgttaaacagtttcttgataaggagctgaaggtcgatacaaaattacgtaactcttccgactattccggcgtgattcagggattgctgggcggaaaagttgacgtggtcttaagtatgtcgccgtcatcatacgcttccgtttatattaacaaccctaaagccgtcgatattgtcgggattgccgtagatgataaagatcagtcccgcggctatcactcggtggtgattgtcaaagccgacagtccgtataaaaagttagaagatctgaaaggcaaagcgtttggcttcgccgatccggactccacttccggctttttaattcccaaccacgcctttaaacagcagttcggcggcacctcggataataaatataataacttcttctccagcgtgaccttctccggcggccacgagcaggatattctgggcgtgctgaacggtcagtttgccggcgcggtgacctggacctcgatggtgggtgattataatagcggctacagcgtcggcgccttcaaccgactgattcgcatggatcacccggatttgatgaagcaaatccgcattatttggcaatcgccgctgatcccgaacggcccaatcctggtcagcaattccctgcctgctgactttaaggccaaagtcgtcaccgcgattaaaaagctggataccgacgatcacgcctgctttatcaaagcgatgggcggcacgcagcatatcggcccgggcagcgtagccgatttccagcagatcattgatatgaaacgcgaactggttaccgcgcgttaa

SEQ ID NO: 202336 - DNA, 873 bp, Klebsiella oxytoca
atgaataatacccataccgaattcgaacgctattaccagcaggtccgctcgcgacaaaagcgcgacacctttagctggtccctgctgctgctggcgctctattttgccgccggcagtatggccgagtttaatctctttactatctggcactcgctgcccaattttctcgattacatgtttgagacgctgccgacgctgcacgtcgccgacctgtttgccgattcgcacactaaaggctctctggcttactggggctatcgtctgcccattcagctgccccttatctgggaaacgctgcagctggcgctggcgtccacgctggtggcggtggcgattgccaccctgctggcgttcgttgcggccaacaacgcctggtcccctgccccactgcgttttgccgtccgcgtgctggtggcttttctgcgcaccatgccggagctggcgtgggcggtgatcttcgtgatggcttttggtatcggggcgatccccggctttttggcattaatgctccacaccatcggcagcctgaccaagctgtactatgaagcggtagagagcgcccaggataaaccggtacgcggcctggccgcctgcggcgcgtcgcatctgcagcgtatccgctttgccctgtggccgcaggtgaaacccatctttctctcctacggctttatgcgcctcgaaattaacttccgctcctcaacgatcctcgggctggtgggcgcgggcggcatcggccaggagctgatgaccaatatcaaactggaccggtacgatcaggtcagcatcacgctgctgttgattattatcgtggtatcgctgctggatatgctatccggccgcctgcggcagtgggttctggaggggaaaaaatga

SEQ ID NO: 202337 - DNA, 882 bp, Klebsiella oxytoca
atgagtcagtggcaaaatcaaccggatatcgccgccagccgtcgccagcatcggcatttataccaggcccaggggcgctatttgcgctacgtcggcctgctgacgctggccagcgtgctctactatgtctggttctttatgcagttcggcatcagcggcgagcagctcgccacggggctgcagcaaatcagccgctatttgctacggatgttcgtctggcacgactttttcaactggccgtttcgctattacttcacgcaaatcgccattaccctggcgattgttttcgccgggacgcttaccgcgacggtcatcgccctgctgctctcgtttctggcggcgcggaatattatgcgcggcgtgattccgggaacgatcgccctgctgatgcgccggttgttcgacgtgctgcgcggtatcgatatggctatctgggggctgatttttgtccgcgccgtggggctcgggccgctggccggggtgctggcgataattatgcaggataccgggctgctgggccgactgtacgcagagggacacgaggcggttgaccgctcgccgggacgcggcctgacggcggtgggggcgaacggtttgcagaagcaccgtttcagcatttttacccagtctttcccgacgttcctggcgctgagcctgtatcagattgaatcgaatacccgttccgccgcggtgctcggctttgtcggcgcgggaggcattggcctgatttatgcggaaaatatgcgtctgtggaactgggacgtagtgatgtttattaccctgctgctggtggcggtggtgatggcgatggatacgctgtccgcctggctgcgccgccgctatatcggcggcagcgtggtgccgctgtttaaagctgattag

SEQ ID NO: 202338 - DNA, 663 bp, Klebsiella oxytoca
atgggtaaaacgctgaccattttcgatctggataatacgttaattaagggcgacagcagtacgctgtggagccgctttatggtgcgcgaaggctgggtaaacgatcccgattacctggcgcgggaagcgatgctgatggacgactatgaccgcggcgaaatgaatatcgccgattatgtggctctgattcaggcgccgctgattggcgtcgcaaagcgggaggtggacgcgctgctggcgcgctgcgtgcgcgatgaaattatgccgcgcgtgtatccccaggcgtgggatctgattcggactttacaggctaaaggcgagcagatgctggtgatctcggcctcggtcagcctgctggtgcaggcggtggcggcgcagctgggtatcgaacaggcgctggggattgacgttgagatgaccgacggcggctatagcggcgtgattgccggtacgccgagctatcagcaggggaaggtggtgcgcctggcgcagtggcaacaggcgcatcctgaatactcgggggaggtgaccttctacaccgactcgatcaacgacctgccgctgtgcctgcatgccgatcgcgtacggctggtcaatccgtgcccgcagctggcggcggcgaacgcgcagcaccagtggccggtgctggcgtggcagctgtga

SEQ ID NO: 202339 - DNA, 810 bp, Klebsiella oxytoca
atgagcgactggctttttctgtgcggcatactatcgggcgtgaccacctggctctttggcttcggcggcggtttcgttaccgtcccgctgctctatttcctggtgaccggcgcgtggggcgcgcaaagcgtcgtcgggcaacaggcgatgcacatcgccgtcgccacctcggcgctggtcatgctttgctccgcgctgctggcgagctggcgacacgcgcgtaccggtaccctccgctggcgccgcttatgggccatgctcaccggcattgccgttggcggaacggcgggcgcgctgctggcgcttgaggcgagcggggcgtggatccgctggctgttcgttatctatctgctggcaaccgttgccgattgctaccttcgcgccggatttatgaccccgccatcccgccgggtggtgccgacggtgccgcatgagctaacggtaggggggatcattggcctgatcgcctcttttctcggcgtgggtggaagcgtgatgaccgtccctctgatgcgccgtcgcggcgtgctgatggctgaagctgcagggatggccaacgtattgacgctgccgctggcggcaacggcgacgctaacctggctgttgatggcctggctctcgccggtggcgttaccgaatgggtttgtcggcaatatctggctgtcggcggcggcgcagctggtggcgggaagctggctggggttaaaaatcgcctcccgctggctggcgcgtttaccggaccgctggcatgtgcgaatttatccgctattgctgattgccgtactgctggtgatgagcgtgtggggataa

SEQ ID NO: 202340 - DNA, 798 bp, Klebsiella oxytoca
atgcgcaacgttgcgattaatgacgtcgaccatcttcctcgccgggtgctggcgctgggcagcgactatccgcccaacacgcttctggagcgacatagccaccgccgggcgcagtttctgtacgccatgcacggattaatgaaggtcgaaacggacgacggccagtggctggtgccgccgttcagcggggtctggatcccggcgacgaaaccgcatcgcgtctggatgcccggcgtcagcacccacagcctgtatattgacgcgcgggacgccccgcgggaaagcgaacgctgcgaagtcttacaggtttctccgctgacccatcagctgctgctggccgcctgtcagctaccgctgttgtacgacgagagcgggcgcgatgccgccctgattgcgctgctgctccatgaactgcgcgccgccgcgccgctgccgatgtttacgccgcttccgcagaacagccacctcgcggcgctatgcggcgattttcagcgccagccgagcatccgcagtacgccgcagcagtgggcgcaaaaattgagtaaaagcgtacgcacgtttaatcgtctgtttcgccgggagaccgggatggcgttttgcgactggcgccagcaggcatgcctgatgtacgccatgacggcgctgcgcgaggggcgttcggttaccgaagtcgcgctcagtctgggctatgagtatccggccgcctttaccgcgatgttccgcaaagcgatgggctattcgccgatggcgtttatccgccagataaacggcggaccggcacacgccagcccgccgtag

SEQ ID NO: 202341 - DNA, 1788 bp, Klebsiella oxytoca
atgggacatccttccgtctacccgaccggcgccaccctctacgatccgcagcgcgcctggagcggctatacccttttccaggccaccgaacacggcgcggtgctggtggatatgaacggccgcgcggtgcgcgaatggcctgaactgcacgggtttcccaataaaatcctgcccggcggcgcaatccttggccacagcggcgagcgcgacccgcgctacggcatgcaggatatgctcgatctgatccaggtggactgggagggcaacgtcacctggaaattcgaccgctacgagcaggtgagcgatcccggcaacgccacgcgctggatggcgcgcgcgcatcatgactatcagcgggcgggcaacccggtgggctattacgcgccggggctggagccgcaggtggatggcggcaataccctgatcctcgcccacaccaatctggtgaatgaagcgatctccgacaagctgctgctggacgacaccatcattgaagtcgactggcagggtaacgtggtatgggagtggcgctgcagcgaccattttcacgaactgggcttcgacgatgcggcgcgcaccgcgctctacaacaacccgaatatgcgcgccagcggcggcggaatgggcgactggatgcatatcaactcgatgtcggcgctggggccgaataagtggtacgacgccggcgatacgcgttttcatcccgacaacattatctgggacgcccgcgaatccaacattattgccattatcgacaaacagagcggcaagatcgtctggcagctgggcccggactacagcaaaccggagctgaagcacatcggctggatcatcggccagcaccatgcgcatatgatcccgcaggggctgccgggcgcgggtaatatcctgattttcgataacggcggctgggccggatacggcgcgccgaatccggcgtcggcggacggggtgaaaaacgcctggcgcgattattcacggatcctggagatcaacccgctgaccctcgatatcgaatggcgctactcgccctatgaagcggatctgccgcagccaaccgattcgtaccgcttttacagcccctacatcagcaatatgcagcgcctggaaaacggcaataccctgattaacgaaggatctaacgggcgcatttttgaagtgacccgcgaccacgaaattgtctgggaatatatttcgccgttctggggcaagaccctgaacaacaatatggtctatcgcgcctaccgcattccctacggctggatcccgcagctggcgcagccgcaggagacgccgattgcggcggtcgatgtacgaaccctgcgccagcccggcgcggcggcggccggtccggcgcagagcgtggtgcgggtggcgggcgtacagccgtacagtaaaagcgccgatgcgctgtgcgtggcaaccgataacgataccctgcgccgcagtccgaagctgttccgcgtcgcggaaagcgcgttcacgccgataagcgcggcgagcgagctggagagcgaacggccggttctgctgttcgtcggcgcggaacgctgcgtgcactgccgcaagctctggcagctgctggcgcatgaaaagctcagcccgcggcttgctcagctggatacgcgctatctggatgccgaccggcatcaggatctgacgggcgacctcggcgtgcgcggcctgccgacgctgctgctgattaaaccggggcagccagcatcgcgcgcgcctgcgcagctctcggtggacgcgctgctcgactggctgcatcgcgcagccgggtaa

SEQ ID NO: 202342 - DNA, 744 bp, Klebsiella oxytoca
atgacctcttcaaccctggtctcttttcgccacgtgcgtaaatcctggcaacaggtgacggcgctacagaatttcagcctggatatcgccgccggtgaactggtggcgctggtgggcagcagcggctgcggtaaatcgacgctgctgcggatgctggtaggccttgaatcagcgacccagggcgatatttgcattaacggcgagccggtcaccggcgtgggcaaagagcgcggcattgtgtttcaggaaccgcgcctgtttccctggcttaacgtgctcgacaacgtgatgctgggcctggcggatgaaaagctcagccgggcggcgaagcgccagcgggcgctggaaatgctggagcgcgtgcagctcagcgaattcgtcaacgcgctgcccgcgcagctctccggcggcatggcccagcgggtggccattgcccgcggcctggtggcccgtccgcagatcctgatgctcgacgagcctttcggcgcgctggatgccctgacgcgccacaccctgcagcaggaacttttacagatccaccagcgcgcgggaaccaccaccctgctggtgacgcacgatgtggaagaagccgtcgccctggccgatcgcgtcgtcgtgctttcgccgcgtccggggcggatacgggaagtggtaagcctggcgctgccccatccgcgccagcgcgatgatgccgcgtttaccgccgcctgccgccagattcgcaacctgattacttctgcctga

SEQ ID NO: 202343 - DNA, 1569 bp, Klebsiella oxytoca
atgtcgcagatgatcttaagaaccgatgccccaggcaggccgggcttcaggcttaacggctggccgtggctgctgcctgcgttactgctgctgctgtggtacatcgccgcccgcgaacggtggatgccggagcaaattttgcccgcgccgtcggtggttgccgataccgcgctatcgctgctgagcggggatctgctggcgcagtggggattcagccttcagcatctggcgcttggcctgctgctgggcgctatcgctggtacgctgctcggcgcgctgttcggcctggtgccggccgccgcgcagcgggtggaaccgctgttctacgcgctggcgcaaatcccgacgctcggctggatcccgctgtttatggtgctgttcgggattgataacggcctcaagctggcggttatcatcaaaaccaccgtagtgccgatgaccattaacacgcagcaggcgatggccggcgtgccgctgaccctgagcgaagccgcaaaggtgatgaacttttcccgctggcagcggctgcgctggctggtgatccccgcaagcctgccgggctggtttaccggcctgcgtctggcgctatcgcaggcctgggtgtcgcttatcgtcgtcgaactgctggcctcttcagaaggcattggctacctgatggtctggggccgccagctgtttcagctggatatcgtcttcgtcaccattgcggtcgtggggctgagcggcatgctgatggagtgggcggcgaaccgcgcctgtgcccgtctggtgttctggccgcagcctgccgccggacgcctggcgtggaaaccgcaggccagctggcgggcgctgcagctgccgctggtcctgctggcgctgtggcagctggcaagctcgtggggctggatcgatggcgcgctgttctcttcgccgctggcggtggcgacgcgttttattcagggcgccctgagcggggagctgaccgcggcgatgctcgcaagcctcgggcgagcctttgtcggcggcgcgctggggattgcggggggcctgctctgcggacttctgctggcgctgcgcccgcgcgccgggcaaatcttcacgcccacgctcaacgtgctgcgccatatcgccctgtttgcctggctgccgctgctgaccgcatgggtgggcaacgataacggcggcaaaatcgtgtttatcgcgctggcgtcgttctttccgatgttcttcagcaccctgcaggctgtgcttcagcgtaacccgcagctcgacgaagtcgccagggtactgcgcctgggcgagttagcgcgcctgcgcagggttattcttcccggcgcggcgccggggatcttcgccggtctgcggctggcgctgatttacgcctggcttggcaatatcggcgcggaatatttcatgtcctccggcgtcggcatcggcagcctgatgatcaatgcccagcagctgctggatatgcccaccattctctgcggcatggtgctggtcggtatcaccggcgcggcgctggataaagccggacgtttactggaaatgcgcgccacccgctggcgtcaacaggagcagctatga

SEQ ID NO: 202344 - DNA, 1068 bp, Klebsiella oxytoca
atgatgaaagcattttttagccgcaccgtgctggcgctggtggcggttatcggcctggcggccagcgcgcaggccgaagcgctgcgtaccattcgcatcggcgtaccggaccaaagcgcgggcagcaagccgtttattgaggggccggttggcatggcgtttatccgccatcagctggaagaggcgtttaaaccgcagggtgtggaagtgcagtggcagtttttcaaaggcgcgggcccggcggtaaatgaagccttagccaaccgccagctggattttgtctacctcggcgatctggcggcgatcatcggtaaagccaacgggctgccgacgcgcctgctgctgggcagccgcggctcggaatcctggctcgcggtaaccaaagcctcagggattaaaacgctggccgatctgaaaggcaaacgggtcgcggtatatcgcggcacggcggaccagctggcctttgaccgggcgctgcaaaccgtcggcctcaatgagcgcagtttgcagacgatcaaccttgactggaacgccggcaaagcggcgctggcggccggtcgcgtcgatgcggtgtggggcggcgtttcgctgctggcgctgcgcggcgataagattgatgtggtcgtcaaaagcggtgactccggccgccagaacacgactcaggcggggttcctcgggacgcaggcgtttattgacgcctggccgcaggcgacccagcagatcgttaacgtgctggtgaagaacgccgctgaaatcagtgacccggccaatcgcgacgcctggtccgccgagatggcgcagcagagccagatcccgcaggcgctgtttctcgaagagctgcagccgcaggatctgaactttaccacctcgccgcgtatcgatccgttcctgaccgacagctttagcaatagcgtcgaacaggctaaatccgggcggctaatccgcagcgcttttgacgtcagccagtgggtagacggccagtttgtcgagcaggcgctgaaagcccagggactggaaaaccgctggccgcagtacgatgccaaaggccaggcgaaaaacgccggttaa

SEQ ID NO: 202345 - DNA, 945 bp, Klebsiella oxytoca
atgcatctggattttcgccaactgcgcaactttgtcgcgttagttgaatacggcagttttaatcgcgcggcggaggcggtgtgcctgtcgcagtcggcgttcagccgcagcattcaggcgctggagcagagcgtcggtcatccgttattcgatcgccagagcaagctaccgacgctcaccctgcacgggcaaaagctgctgccctacgcccgccgctttcaggagctgaacgtggagctcagcagccagctgcgcgaagcggacgatgcgcaaaacggcgaggtcgcttttggctgcgggccggcccctgccgcaaggctgattccggccgccgtcggcgagtttcatcgccttttgccgcaggcgagggtgcgctttcagattgataactggctggcgctgcatcaggcgctgacctctcagctctacccttttgtggtcgccgacagctggcaggccgagctcgacccgcagctgcgcgtgcagccgctcagcccgcagcgctgctttttcgtctgccatgccgatcatccgctggccaaacatgggccggtctctatccaggcgatgctgcgctacccctttgccgccccctatctgccgccgggcgtgcgcaaggtgctggcgaccctcagccagcagcaggactttaccccggcgattcagtgcgatcatatctacgcgctgcttgccaccctcgcgcagaccaacgcgattagcttcgccagcgaggacggcttcgcgctatgccagcacagccatcgtctggttaagctggagctcagcgatctgcctgaggagtggcggctgatgcagacccggtttgccattatctctccggttcacgcggcccagccgccgctggtggagaagctgattgagattatccttcataccgatcgtcagcatcagcttcagctgctggcgcaggaggagaggggttaa

SEQ ID NO: 202346 - DNA, 564 bp, Klebsiella oxytoca
atgaagcccagactctctcacgcgctattatttgttccttttttgcttttggcaggatgttcatcctcatcgaaaccgcataaaaccgccgcccagagtagccacgcgaccatcgacggaggttctgacgatctgatcccggtgatcgccgcgctgcacgatcagatgcatacctgggagggaacgccctacgaatggggcgggacggagcaaagcggggtcgactgctccgggtttgtctggcgtacgctcaaagatcgcttcaacctaccgatggagcgcatcaccacccgcgaactgctgcatatgggagaacgcgtgagcccgcggcagctgcggccgggagatttggttttcttccgcattaaaggcggcatgcacgtcggcttctatgataccgaccgtaatttccttcatgcctccaccagccagggcgtgatgcgctcttcgctggataatccgtactggcaatcggtattttatcaggcgcgccgcctgccgaaggaatataacgcgcagatcacgatgaataacgataatctgcatctggcgaaaaaccgttaa

SEQ ID NO: 202347 - DNA, 1053 bp, Klebsiella oxytoca
atgaaaaagagctcactggcattaatgatgatgggtcttattgcttcttcggctacgcaggcggcagaagtttataataaaaacggcaataaactggacgtctacggcaaagtcaaagcgatgcactatatgagcgactatgacagcaaagatggcgaccagacctacgttcgtttcggcatcaaaggcgaaacgcagattaacgacgatctgaccggctacggccgctgggaatcggagttctccggcaacaaaactgaaagcgactcttcgcagaaaacgcgtctggcgttcgccggcgtgaaagtcaaaaactacggttcatttgactatggtcgtaacctcggcgcgctgtacgacgtcgaagcctggaccgatatgttcccggaattcggcggcgactcttccgcgcagaccgataactttatgaccaaacgcgccagcggcctggcaacctaccgcaataccgacttcttcggcgtggtggatggcctggacctgaccctgcaatatcagggtaaaaacgaaggccgtgaagccaagaaacagaacggcgacggcttcggtaccgccttaagctacgacttcggcggcagcgacttcgccgtcagcgcggcctacaccagctccgatcgcacgaacgatcagaacctgctggcccgcggcacgggtaaaaaagcggaagcctgggcgaccggcctgaaatatgacgccaacaatatctacctggcgaccatgtactccgaaacccgcaaaatgacgccaatcagcggcggttttgccaataaagcgcagaactttgaagccgtggcgcagtaccagttcgatttcggcctgcgtccgtccctgggctacgtgctgtcaaaaggcaaggatattgagggcgtggggagcgaagacctggtcaactacattgacgttggcgtgacctattacttcaacaaaaacatgaacgcctttgtggattacaaaatcaaccagctgaagagcgataataagctcgggatcaacgatgacgatatcgtcgctgtcggtatgacctaccagttctaa

SEQ ID NO: 202348 - DNA, 1104 bp, Klebsiella oxytoca
atgagtgatagccagacgctggtggtaaaactgggcaccagtgttttaacgggcggatcccgccgcctgaaccgcgcccatatcgttgaattagtgcgccagtgcgcgcagctgcacgcgatgggtcatcgaattgtgatagtcacctccggggcgatcgccgccggacgtgagcacctcggctacccggaactgcccgcgaccattgcgtcgaaacagctgctggcggcggtcggccagagccgtcttatccagctgtgggaacagctgttttctatttatggtattcacgtcggccagatgctgctgacccgcgccgatatggaagaccgcgagcgttttctcaacgcccgcgataccctgcgcgcgctgctggataacaatatcgtgccggtcattaatgaaaatgacgccgtggcgaccgccgagattaaagtcggcgataacgataatctttcggcgctggcggcaatcctcgccggcgccgataaactgctgctgctgaccgatcaacagggcctgttcaccgccgacccgcgcaacaacccgcaggccgagctgattaaagacgtttacggcattgatgacgctctgcgcgccgtcgcgggcgatagcgtgtccggtttaggtaccggcggtatgggcaccaagctgcaggccgccgacgtcgcctgccgcgcgggcatcgataccattatcgccgccggtagccgtccgggggtgattggcgacgtgatggagggcatctccgtcgggacccgcttccacgcccaggaatcgccgctggaaaaccgtaagcgctggattttcggcgcgccgccggcgggcgaaattaccgtggacgccggcgcgacccaggcaattctcgaacgcggcagctccctgctgccgaaagggatcaaaaccatcaccggcaacttctcgcgcggcgaagtgatccgcattcgcagccttgaaggccgcgatatcgcccacggcgtcagccgctataacagcgatgcgctgcgccgcatcgccgggcagcactcgcagcagatcgatgccattctgggctatgaatacggcccggtcgccgtccaccgtgacgacatgattatccgttaa

SEQ ID NO: 202349 - DNA, 1254 bp, Klebsiella oxytoca
atgctggaacaaatgggcattgctgccaaagcggcctcgtacaaactcgcgcagctttccagccgcgaaaagaaccgggtgctggaaaagattgccgactatcttgaagcgcagaccgacgcgatcctgcgggctaacgctgaggatctggcggaagcgcgcgccaacggtttgagcgaggcgctgcttgaccgcctggcgctcaacccggcgcgcctgagcgggattgctaacgatgttcgtcaagtctgcagcctggcggacccggtcggtcaggtaatcgacggcggtctgctggacagcggcctgcgcattgagcgtcgccgcgtgccgctgggcgtggtgggcgtaatttatgaagcccgtccgaacgtgaccgtcgacgtcgcctctttgtgcctgaaaaccggcaacgcggcgattctgcgcggcggtaaagagacctggcgcaccaacgccgccacggtgaaagtgattcagcaggcgctgcaggagtgcggcttaccggcagccaccgtgcaggcgattgagagcccggatcgcacgctggtcggcgagatgctgaagatggataagtatatcgatatgctgatcccgcgcggcggcgcaggtttgcataagctgtgccgcgagcagtcgacgatcccggtgatcaccggcggtatcggcgtctgccatatttatatcgaccactccgccgacgtggccgaagcgctgaaggttatcgttaacgccaaagtgcagcgcccgagtgcctgtaactcggtcgaaacgctgctggtgcatcaggatatcgccgaacgcttcctgcccgcgctgagcaagcagatggcggaaagcggcgttagcctgcacgccgatgcggcctccctgcccgcgctgcaaaacggcccggccagcgtagagccggtgaaagcggagcagtatgacaatgagtatctgtcgctggatctgaacgtgaaggtggtggccgatcaggatgaagcggtagcgcatattcgcgagcacggcacccagcattctgacgccatcctgacgcgcaccctgggcaacgcgaaccgctttatcaacgaggtggattcctcggcggtgtacgtcaacgcctctacccgctttaccgacggcggccagtttggcctcggtgcggaagtggcggtcagcacccagaagctgcacgcgcgcggcccgatgggcctggaagccctgacgacctataagtggattggtttcggcgacgataccattcgtgcttaa

SEQ ID NO: 202350 - DNA, 1215 bp, Klebsiella oxytoca
atgaagctcaatgccagacaggtcgagactgccaagcctaaagataaaccctataagttagcagatggtgggggcatgtatctggaggtgttccctaacggcaccaaaagctggcgcatgaaataccgtatcgcaggtaaagaaaaacgtgtggtgtttggtgtttacccgaccattaccttagctgatgccagaagcaaaagaggtgatgctaaaaagctgctggttaatggcgttgatccgagtgcgtttaagaaagaaagcaaactagcccaaatcgaagaagtaaaaaacacctttcagcaaattgcgctcgaatggcacaacatgaaagtgaagaaatggtctgcgggatatgcctctgacattcttgaagccttcaacaaagatgtcttcccgttcatcggtcaacgtcctgttgcagacatcaagccgttggaattgcttaacgtgcttaaaaagatggaagagcgaggtgcgactgagaaagctaagaaagtacgtcagcggtgtggtgaagtgtttcgctacgccatagttacaggcagagccgagtataaccccgcaccagatctcaccagtgctatgcaggggcatgagtctaaacattatccattcctgaccattgaggagcttccagccttttttaaagcccttgctggctactctggtagtgagttggtagtgttagccgcccgactaatgatcatcactggtgttcgaacgggtgaattacgtggtgcgttatggtctgaaatttatactgataaagggttatgggaaatttctgccgaacgcatgaaaatgcggcgtcctcatattgttccgttatccgtgcaggcattggaaattattgaaaaaatcagggcaatgactggtaattttcatctaatgttccccggtcgtaatgatccaagtaaaacaatgagcgaagccagtatcaatcaggtgtttaagcgaattggctataccggccgggttacggggcatggattccgtcataccatgagcaccgttcttcatgaacaaggctacaacaccgcatggattgaaacccagcttgcgcatcttgataagaatgctatccgtggtacctataaccatgcgcaatatcttgatggcagacgtgagatgctgcaatggtatgctgactatatggatagccttgagaatggtggcaatgtgatgcatgggacgtttaatcgacgtgcatag

SEQ ID NO: 202351 - DNA, 867 bp, Klebsiella oxytoca
atggcaatcatgagaaactggtcaacggaacacaccaaagaagttaaaaaatggttggatatcaatacctatcgaggatttgaagatctgactctcatacagctttaccatgagctgcttgcaaggacactgttctttaagccttatcatgaggaattcgaagcgaaagccgtgaacctctatattgaccgaattttcagcggaaaaccgtttcttattacagagcaacatctcggatacctcacgagagaggacaccctttaccaacccccacatttctttttgaccacgacagaacggctggctcagctcagcatcgttggattacggaattcattatttttctgggatggaagtgatgagtattcggttaaccgtgaatttctcgatagccctgtatccgaagctctccctaagctgttcagagatactgtcatggtcgaaatagaccttgcgaatggaactgatgaggaaatagctgaatctttgaaagccgcgctacctcaatggcgtaaagtacggggcattgaagccgatacatctgattcgatcaggtttggctatggaaccatcaagaaaatcatcaactacagactcatacccatgattgacatccttgtatggtctactctgcacaaggttcgcatatcagaagatcgactttcacgcctcctttacaccgacgatgatgatgaagaacagacccgcctcaatcaccaaattcgggacacagacagaccactggcgataaaagcagccagtatacctttcatccgtcagttccatctgttcatcaacaaaaacagtcatctcaaaaacatcagagtttcagacgtcatgaaaatcgcggattctgataaagactga

SEQ ID NO: 202352 - DNA, 207 bp, Klebsiella oxytoca; identical to SEQ ID NO: 134348

SEQ ID NO: 202353 - DNA, 291 bp, Klebsiella oxytoca
atggcgttaaaacgtatgggcttcaaagatctgctggtagctcatggcatgagatctattgcctcaacggttctgaatgagaaaggctttccacctgacgtgattgaagctgcgttagcacatatcgatactaacgaagtcagaagagcctacaacagatcacagtatctggaacagcgtagggatatgatgagctggtggggtgaacatgtagaagcggcttcttttgggaggacgggtatgggagcaatttctgccaaggcacagcttaaatcagaaactacaagctga

SEQ ID NO: 202354 - DNA, 738 bp, Klebsiella oxytoca
atggaattgattttttctatacctcatgaggttatctccccaccttcatattttgaaatgatagttaaataccttccttcagcaacgccaataattgctttattagctgctcttgttgcattcttcggatacagaaggcaacgcagacttcatcaagaaaaattgtctttcgattttgttcatttttatcagaatgataaagaacttgcacagcataaaaataatttgaataccttattcaaaaaattccgaagagagaatattgatgttgcttctttcgcacatattgactctgaaagcgaatatggtaaatcaatcatggccgttctcaatacttgggaaagatgcgcgcattcaataaaagaagaacttatcgatgaagaatatctttataatattttccatgtagtagctttaaaagcatatgatcttcttgaaggttatattgattcacgaagaagcttaaaagggaatagcacagcatatattaactttagatggttggttcaaagatggaaattaagagcattaattgatccgcctaaagaagactttacagaattaaaaaaacttatcactaaatcttcagattataactgggcctttaaaaagggttatagattaacagatgataagtataagaagaaaaacttgaagagattgtataaaaatttaactcaagagaatcggaaaaaaggtatttctaattggataaaatctatattgtctcaaaattaa

SEQ ID NO: 202355 - DNA, 876 bp, Klebsiella oxytoca
gtgggctcggagatgtgtataagagacagacctttaactgaaacggaattcaataacatcattaacgccgttggaaaattttatcatgagaagaaaattcaatgctttttgtattgttatatccttttgctggcaataacaggaagaaggccattacaattaatatctctaaaagctaaagatctcattaaaaatgagagagggtgctttttgaatgtaccaaaagtaaaacaaagaaaatgtttcagaaaagaatttaacatggttatgatagaaccgttcttatatgacagcttatcaatgctaattaataaaaatcaggcgtttgttgaagataaattcagtgttgggattagtaactatagaggcgaattaccaatcttcatgaatttagataagattacggaaacaaaaaggattgaggattttttatatgatttaacaacagattttttccatatgaaaaattcagttatgtcaaaactattaaaacactttccgtcaaaattcgatgttaggtcagaaaggactaacagctatatagaacttaatgctagaagattcagatatacgttaggaagtcgactggctaatgaaggagcctcaattgaggtgattgctaaagcgttagatcataaatcagtaagctcttctatgatatatataaaaaataatcctgacaacgtttatgacatcgataagagactaagtgcgttttttaaccccttatctaatatacttatgggcatagagattgaagaaaacaagaacttttttatcaagtatgtttcagatgcatttttcttattggaagatacgaaagaggatttgaaatgtttaacgtgtaaaaaattcaatccctggagagcattatga

SEQ ID NO: 202356 - DNA, 1401 bp, Klebsiella oxytoca
atgactgacagcgtccaggagcggcttgacactttaaagaaacgggttgacgagatgcgtaagcgccgcatgattctggacgtgagggaatgtgggcggcatggtgaggcaagggaaagttctactcgcagacttcagcgcggatttgactggttgtctggagagggcggcggttttctctacaatcctccaggatattttgagctttatcagccagtcatcccacggtcgggggtctccctgctaggtgcgggtgaggatgcaacgatatttttaccgatgggttaccttcctgcatttcagtaccgagggaagccaaccgaagcatcgccggagatttacctcgagaacattcagttctttgatttttccattgatggcgaaaatcagcaactccatccggtcaatggctatatcccggatattaaaggcatcttccttcagtattaccgcaacgcggtatttgaccgaattactatccgcaacaccggcgctacggggttcgggatggatatgcatgacagagcgtccatatttcgctgtatgactgaaaactgcgggcgactggctacagtcggagcccttggtgcatctggctttggtattggaaccagcttcctcagtagtgagcctttctttgccagccagcttattggacgaaataacaaaaactttgggattttctttgagccgcagcgtggcaccgggacatcgcaggatgccatcgtaactgacagcacgttctacggaaattatgccggactggcagattgtggtatcgaggggctgattgcatcaaatctgaatcttcgggaaaaccagtacggttttgtagccgagccaggcaccaatggtggaggtaatccaggtttcagagggaagcttaataacctcatcatcaagggaaatgcaaaacacggtatgtattttaataccgggaagtcggccgagattatcggagagtacgcaattactggaggtcatatctttgaaaatggtgaggacggtataaatgtccggtatgccagtgaagtaaccaataaaggcctcaggatatgtggtgtcgatattaatgataacggacgtcatggcgtcaactttgaggcagggccggtagtcaacgctcgtatcacaaactgtgacttctggaataacgggaaactgattcctggcaatggtattaacagcagccgtagtgtcaagaaaagccgtttttccatgaactctttttatgattttcaggatacgcccactcagcaatacccggtatccatcagcggtgatatggaggatgtcgacatttcctttaatcacggcgcaggcaatgtgcataacgaactgaaccttaccgggaataaaactcgcgtcaccacacttagcaacccaggaattgattcatga

SEQ ID NO: 202357 - DNA, 1215 bp, Klebsiella oxytoca
atgaagctcacagcccgccaggtcgacacatccaagcccaaggacaaaccctataagctgtctgatggcggcggtctttacctgttggtgaaccccaatggttcgcgatactggcgtctgaagtaccgggtcgcaggtaaagaaaagtcgttggctttaggtgtataccctgacgtctcgctggctgatgcacgtcaaaaacgagcagaggctaaaaaagtactggctgctggcggtgacccggggcaggaaaagcaggaaaaaaaacatgctatggcgatggccgtatcaaacagctttgagagactggcgctggaatggcatgaacataaatcgatgaactggtcagcaggctatgccagcgacatcctggagtatctgagaaaagatatttttccttatattggctcccggtcgatcactgatattaagcccgttgatatgttggctgttcttcgcaagatggaacaacgtggagtacttgataagctcaaaaagactcgtcaagcctgccggcagatcttcacctatgctgtcatcaccggcagagcagaacataatcccgtggtcgatctcgccagtactctaaaagcaccgaagcaaaaacacttccctcatttatcggttgaacaaatacctgactttctgcgagctctgaacgactatagcggcagcgtggtgactcgaaatgctacccgcctgcttatgcttactgggctcaggacaattgagctccgtgcttctgaatgggctgatatcgactttgacaaaggcgtttggaatatccccgcagagcgaatgaagatgcggcgcccacatctcgttcctatctcaactcatattcgcgaactgcttgaagaaatccaccagcttaccgggcgagggaagtatgtattccccgggcggaatgacgctggcaagccaatgagtgaggccagcatcaaccaggtgattaaacgaatcggctatgacgggaaagctaccgggcacggctttcgccacaccatgagtaccatactccacgaacagggctataacaccgcctggattgaaacgcagttggcgcacgtcgataagaactccatccgcgggacatataaccacgctcagtatctggatggccggcgggaaatgctccagtggtatgccgactatatggcggcgcttgagaacggtgaaaatgtggttcatggctcgttcggaaaacgcgcctga

SEQ ID NO: 202358 - DNA, 759 bp, Klebsiella oxytoca
gtgtcttacaattcaaaaagctgtagttctcttgaaaaggcatattacactccggttgaagcagcactacggtggtgtaatttgattgcgcatgaggtgttgattcttgagcgtgtcggcttggatgttttacctggtgtagggatgttcccacagtggccatgtttgcgtgttaacgctgaaaagattcttgatgccatacacaatggagaaattgcttatggacgagatggcaaaactgtatctccgggagagcaggtagctaagcatcgccttactattcgtcactcagatcttaaaacatggatggcgaaaaattatcccaatcagaagccctctttcctttttgataccgttgagcagcaattgcacgcgggaattacagttgatgcatatcagacccttcaggctgaaaacaagcgtcttaatatccgattagataatgctgtaaagaccttccaacaacagaaacatgaaatctctgaattacagggggagcgtgactcgttacgacagatggtagataactcggtacaaaatatggatgggcgttcagagactacttatttgaatataatcggcgggctactttctttgatgctgggcagttcaccaagcggtgaaaaactgtccaggttcgccaaccaggcctcaattatcagctcgatgcttgcccactttgaggggattcccggtataagtgttagaacgcttgagaacaaattttctgaggctaacaagagcctaaaaaaacgttga

SEQ ID NO: 202359 - DNA, 213 bp, Klebsiella oxytoca
atgtctaatacccttatacgtcttcctgaagttcaacgccgtactggctacagcaaggcgtggatctatcggctaattagccaagaccgttttccttcagctgttaagatcggctcccgggcgattgcatttgtcgaaagcgaagttgatgaatggataagccagcgtattgaagaacgtgatgctgtaatttccacaaaatctcaactgtaa

SEQ ID NO: 202360 - DNA, 561 bp, Klebsiella oxytoca
atgactatcaaaaatgcccgtgccgggcagggcttcgcttaccctgaaaatagcagcgatgatatttcggtcattaaatttgaggatacaaaagttcgaattgttaagattttgggcgaaccttggtttgtggcggcagatgtatgtgcggctttggaaatcaccgatcacaaggttgctttgcggcgtctcgatggtgatgaaaagggggagtgtttaatacccacccttggcggaaagcagactatgcgaattatatgcgagtcaggtttctacaaactgattgctcgcagtcgtaaggccacaatacctggttcgtttgctcacagcttcagcaactgggtattccgcgaggttgtcccctctatccgtaaaacaggatcctacggtgtgccattcgcgttcctgaatgaccatacccgccgcaaagaactctatatgaagaaggctagcaggcgcggtaaagaccttcagtcgtgcaaggctgagaaagctcgcttggccgccgaagaaattgagctgtggcgtaagtatcaacctgacctgctggaggttcattaa

SEQ ID NO: 202361 - DNA, 759 bp, Klebsiella oxytoca
ttgattaccgccgcccaggataaaagcctctctatggctggcctgatgcttccatactcaggctttaaaaacctagcaaaaattagctttccatttgcttataaggggaattattttccccatatcgctggtggggtgaattgtattgctacctctgacagtggcgccgcatgggctttcgtgaacagtacgcgcgagcttcatcacacctgcagtaatgagtttttagagtccataaaaaagggcttgatgttagactacatcccggtctatggttatagcgcaccagcaaaatctggtgccgggattggcgtcctgctaaagttgtcggcgacacatgacgcgccaagcgtctttttttgtgtcgttagctcagtacacccttctttcagcggttcggtgtcattccgtacttgcatcagaattatggtgggctgggcgggggcttcttcggaagcgccggtttccgataacgccggttacgccaaccctgtccagtccatcaccagtgaaattggcgtttccggtgatgggtttaatcccctgttatcggaggctgccatcatggctactacccctacccaaaatccacaatttatctggatcatcgctgctattcgccgcgatagccaatccgccactgtaaaaatcttccacgtcactgcagtatctgaacgcgaagcccggcgcactttagtgcgtgatcacgtttgctttttcgctggccgcatccgtctgacggaggtggatcatgcgtaa

SEQ ID NO: 202362 - DNA, 192 bp, Klebsiella oxytoca
atgttaaatcgtgatgatatagaagtaacagtcattagccttgccacaaaacagggactgagcctgaatggaaaagatttattggatattcgcacacaggtagcgacagctctggccgccaaaaaacggcaccgacaacggatgatggcacccgcccaccagtggaagaagccggataatccgcgtcactaa

SEQ ID NO: 202363 - DNA, 294 bp, Klebsiella oxytoca
atgaacatcaaattagtcacgatttctctactcgccgccgctttcgtctttgtatcagatatggccatagccaaatcgaaccagttaactgatgaccaggttaagcaaagaattatcgacgactctgtagcatcgtaccccggcacctgcgcctgtccattcaatacggcgcggaacggcagttcgtgtggccgccgcagcgcctggagcaaagcaggaggctattcacccatctgctacaagaaagaggtcacgaaagagatggtcaaagaatggcgtcagcagaatcagtaa

SEQ ID NO: 202364 - DNA, 678 bp, Klebsiella oxytoca
atgcgttttatcagaacaattagcctggcgataacaatgttaacgctggtgcaggcaagcgctactgccggggtgattatcggcggcacgcggatcattttcgatggtgcaaaaaaagaagcgtcaatcagcgttaataatcctgatgcgacaccttatttaattcagtcatggatagatgatcaagacgttggttctggtaaagcgccttttattattacgccgccgatgtatcgcctcgacagcggacaaaaaaatattgagcgaattgtcgcgacaggttcactgcctcaggccaaagaaagtttattctggataaatattaaagcgattccctcggcatcaaagcagatgaactccctgcaaattgccgtaaaaacgcgcatcaagctaatttaccgtcccgttacgcttcgcgcctcaacgccggaggaacaggcgaataaactcacctggcaaagaagcggcaatgaacttcaggttaataacccaacgccttacgtcattaatttcaatgaaattaccgtgggcggaaaaatgcttgcccaggtgacctacgtcatgccgggttcgaccacccgattccgcatgccggacggggcctccggcaatgccctgacatttaaaattattaatgactacggcagccccggtccgtcacatcaagccagtttgtaa

SEQ ID NO: 202365 - DNA, 822 bp, Klebsiella oxytoca
atgtcacaggacgcattttttcagggccagagtgaggcacagccaaggcttaaccctcccatataccgctggcaggaggatatgccagagaataaccagcctcagctagtgcctccccagcttatttggctaaatatcaaaaataacatctggattgaaattcctcgttatgaaggtgttatatggggggggatgttgggaggtgcatttatagtgtctcttttcatcatttttgtaactccatttttttactctattcttagcgattttccggatatattcgcagtaattaactgttcaggtatgttctttgtattgatttcgtccttatttgtttttttaaaatcatacttctgggctgtgagagatcaacctattcgtctgaacaaaaaaaggcagaagatctacgcctttgactataaaagaaaatggtggaatccctgggccaaatggccagccactgtcaaagcttaccactgggcagatattcacggtgagatgcgtttttccagcgaccgctataccgggggctttcagctgttcgcttccgtctgtcagccaggaacgctgaacgtggtggaacgcttccagattgccagtggctctcctgcgcagttgcagcagctctggagctatctgtgcctgtatatgaaaggcgagcctgtgacggatgaggcagtcaacaaaggtcgccctgatttctggtgcccgcgtaaagcggataaatggcctgctgaattggaacgagaatccaccaccgggccggatactgaactttctgctccccgagcctgtagcaaactatctgataagacgagctaa

SEQ ID NO: 202366 - DNA, 1023 bp, Klebsiella oxytoca
atgttagttatagactttgatgataacgaaatagatattaatgataaaataaacgcttctttaaatttaatcatatcgactatcattaacctcaatatcataaatcaacttcatgagttcaaagaaataaaatacttgccagatggtctaaatgaacttctaacattcagcaacattaattccaattactactactcagactctcttgaggaaaaacataatataagcgcagaggatttatttaattttatagagctagcctttgaaaaaaagaaaatccctgccgagagcgacttaattcttgaagcttgtaaagaatccattttagagaattttattactgagtatggatacaccacagctatagacagcggaatcattgatgtttacacaagagatatagaattgcttgaagttgattacgctgagatcatcgagatacttgatattttaaaaggcaagcctaatgaacttaaaaagcaaaacattatcttacactcatttgctagaacactatgttcatatcttgattcactatcacgagagtatctgggtgctcttttttccaacaaccattattttctttgcaaattaattcgtgataaaaaggactttttgaaaataaccaatgacaaaacggcgtcaattatcacgagttccatactaggcaagaaattaaaaaatacaataatagatttttatggtatttctgaaactgagaatggacatcttcatgctatttaccacccaaaaatttcagagctagatagaattatagaaagcagaaatgagatcatgcatagattcaaacctcataaacaacactataatacaattctatctaagtgggggttgtttggtaagttcttcaatgaaatctatgaagaacataactttgaaaatagagacgggaaaaactttttattaagaaactgcataagtataatgagtgaggtatcacttgatcataaatatgttactggaaaattggttcaagtttatacagaccactatgataattaa

SEQ ID NO: 202367 - DNA, 1041 bp, Klebsiella oxytoca
ttgattaaagtagttgatcttttttgcggggcgggcggcctaactcacggactacaaagggctgggctgaaagtagttgcaggctacgatatagatgcagcttgtcgctatgcatatgaaaaaaataataatgctgtctttgtgcaaaaaagtgtcactgatcttgaagagggtgaaattaataaatatttcaaaggtgcctcagtcaaggtattggctggatgtgccccttgtcagccattctctagttatacgaatacagaaaagtcagataaaaaagtaaaagatcaccgctggccactcttgtatagttttgcaaaacagataaaaagctcttgtccagatatcgtaacaatggagaacgtcccaagagtaattaaccatgttgtttttaaggactttgttgatacgctaaagtctgaaggttactcagtatggtacggtactgtattctgtccagactatggaatggcacagagccgctcgcgattagtgttattagcctcaaagtttggtgaaataaaaattatacctcctacgcataataaagataattataataccgtaaggaatatcataggaaaattaccccccattgaagcaggtatgggcgatgaaaatgataaattgcatttcgcatcatcattatcacctttaaatatggagcggatcaggcattccaagcccgggggaacatggaaagattggccagaaaatctgcgtgcatcatgccatgtaaaagattcaggtgcgtcatatacagctgtttatggaagaatgagttgggataaattaggttctacaataaccactcagtgcataggatatggaaatggtcgatttgggcatccagaacaaaaccgagctattagcttaagagaagcagccttacttcaatcttttcctatgaattatgagttttggcctgtagatcataaggtagaattaagaaatgtagctcggcttattggtaacgcagtgccagtacgtcttggcgaagtggtaggcgaaagtattattgcacatttaaaaggaaagtga

SEQ ID NO: 202368 - DNA, 1959 bp, Klebsiella oxytoca
atgtctgattttgagataaaaatagacttgaacgtattaaatcatttaggaatgagtctttattccaatacacctgctgtattgactgaaataatatctaacgcttgggatgccgatgcaaaaaacgttgatataacattagatgtagaaaatgaaaaagtaataataaaagatgacggacatgggatgtcaaaagatgacattatcaatagattcctaaaagttggttatgctcggcgtgaaagtggtagatttaaaagcgacggcttccagcgacaagtaatgggtaggaaaggcattggtaagctggctatgttttctttagctaataaaatacaagtattctcccatcacaaaaatgatactccgcaaggctttgaagttgatgttcaagaattgcaacgctgcataaagagcagcacgcaatatgttgcccaagccattaatgtacctcctgattttgggatcggcacgacaatagttttaatggatctcaaaaaatccattgatagaacgcaatcataccttagaaaaagactagcaagacgctttagcatcatcggccccggacatgattttattgttaaaatcaatgataccgaaataactccggaagatagagactttctcgccgatttagagttcttatgggaatttggaagctcagatcctgaaaggattaaatcatgcaaaaaccttacaaaaaaaagcttacttgacaataagataagttttgatggaattgactattacatcactggatatattggcagtgttgaaaaaccatctcagcttaaaaaggaccctgaaatttctaataacagcataacagttatttctaatggtagggtatttgaagaagatatattacttgaatttggcagcgccaaagtttttacaaattacttagttggtgaacttgttgctgacttccttgacgaaaatgagaaacctgatatggcgacctcgtctcgtcaaaaattgcaacagaatgatcctcgctatccagttataaaaggatttcttgagcggaccttgcagaaagttgataaagaatgggatgaatggagaagagaaaaaggtcttagcgaagttaaacaaacttcgcccgcagtaagccaatggcttgactcaatgacaaggcacgaacgtaacagcgctgaaaagctactcggtaaaattaatacgtttagattctccggtgatgaagagaatcaaaagatcgcgaaaaaaaccgtattaaaaaatacagtacttgcttttgaaagactaagaattaaagataacttggaagctcttgataaaatcagcgacctaaactctgaacatttcagagaggtttttgcatcagtaaacgatattgaagctagtctattctatgagataacatcacaacgattgaaagtaatagagaagttccaaaaaattaccgaagataacgaattagagaaagctgtacaaaaatatctttatgatcatctgtggttacttgatccgtcatgggaaagagttacgggtagtactaccatggaacaaacgctaactaaggaattgaaagaagttgacccagatgctgaaagcggagctagaattgatatagctctaaaaacaatatcagggaaacatattattattgaaatgaaaagaccgaaagtattcccgaatatttcggcacttgttgatcaaggtagaaaatatgtaattgccacacaacaatggtttaaaaacaatcctaatagttgtccgggaggaaaaattccgccaattgatgtcgtattcttggtgggaaggggttacgatggtgtaggcgatgactatgttagatttcagctccaatctattaatgctaaagtactaacatatagcgatcttatcattcagtctaaacaagcctatgcagagtacacaagcaaaaaagtagatgctgcccgtatcatgcaaattgttgacggtatttaa

SEQ ID NO: 202369 - DNA, 336 bp, Klebsiella oxytoca
atggtgacctttccgcgccaggagtgggtcgccggggaggcctacgggatggggaaatggcagattattcgtcgtctggtgctgcccgcgacgctcagacgcgggatcccggcgctgaataatgaaatggtctttttacttcatgccacgtcgctggccagcaccgtcaccctgctggatattaccggcgtggcccgcgcgttctacgccatgacctattcgccgtttattccgtttctgatggccgcggcgctgtatctgctctgcacctttatgctgattttcgccttttcccgcgccgagcggcgctggctggcgtttatccggcgcggctag

SEQ ID NO: 202370 - DNA, 588 bp, Klebsiella oxytoca
gtgactccgactcggattccgacagcgattcggactctgacagcgactccgactccgacagcgactctgactccgacagcgattcggattccgacagcgactcggattcagacagcgactcggactccgacagtgactcggattctgacagtgactcggattctgacagcgattcggactctgacagcgattcggattctgacagtgactccgattccgacagcgattctgattcggacagcgactcggattctgacagcgactcggattctgacagtgactccgactcggattccgacagcgattccgactccgatagtgactccgactccgactcggactctgacagcgactcggactccgacagcgactccgattctgacagcgactccgacagcgactccgattctgacagcgactccgacagcgactccgattctgacagcgactccgacagcgactcggactctgactctgacagtgattcggactctgactctgacagtgattcggattcagacagcgatgccgactctgatagcgactcggatatcccgcaggccaatgcggataccaataccgcgctga

SEQ ID NO: 202371 - DNA, 687 bp, Klebsiella oxytoca
atggcaagaatagaccttaatgttccgtttgatgagaaagatgaagctaaacgtctaggtagccgttgggattctgaaaacaaaacctggtatattcctgatggtatacatccagaaccctttgaaaaatggatacctttcagaaatgttcgtgcaccatactggtacattgcacaaacatttggtgcgtgctggaaatgtggtgaggaaacgttactgacgtcaatattgctgccagtggggcatgaaactcttgaagcggatgaaaatgatgtcaacgacgagacagcaaattcagagacattgcagacatactggatggtacacgagaaacccgctttcgtgttttatattgatgacatgccacgaggggtattaacgcaactcggacaggttaagcattacttgtccaaagattacagtaaaacgacggacagtcgttactggatgaatcattgtcagcactgtcatgctaaacagggagactttcccctgcattgcgaacccaatggctatttcggccctctggaggttcgatatgggcaacgcatagaattgcgtaccatcaacacaccgttttctgcagcgtgcaatggtatttcgcatgaccatattcacattcattttggtgattcgggcgtctctacggctggtgaaatgtttccctggatgaaaatcgtaagctga

SEQ ID NO: 202372 - DNA, 294 bp, Klebsiella oxytoca
atgccagcgacgaacaacatttccctcaaacgcgaaacattaaatttacgtatcaaacctgccgagcgtgatcttatcgaccgtgcagcgaaagccagagggaaaaaccgtactgattttgttctggaggccgcccgcgccgccgcagaggatgcgttgattgaacagcgcatcattatggctgatccagatgcttatcaggaattccttgcccgtttggatcaggctcctgcgccgagtgctgcgctgcgtaaaaccatgcaaacgccagcgccgtgggaactgaaaaaatga

SEQ ID NO: 202373 - DNA, 507 bp, Klebsiella oxytoca
atgatttctgcgcctgagcctcttcatgccgggcatgtgctatccgcattttgctgtggcgtggatactatggacaactggctgaaacagcgggcgatgaaaaatcagctaacaggcgcgtcccggacgttcgtttgctgtgatggttcaaaagtgctggcgtattactcgctggcctccagcgccgtgatggtaagtgctgcgcccgggcgctttcgccgtaatatgcctgatccgatcccggtggtcgtcctgggtcgtctggcagtagataaatcattacatggtcatggaatcggcaggggactggtgcgggatgccgggttacgggtgattcaggtggcagagactatcggcattcgcgggatgctggttcatgcgctgtctgatgaagcccgggagttctacgtgcgggttgggtttgactcttcgccaattgatcccatgatgctgatggtgacgctgggagatctagctgagagtctgattccgactttagataattag

SEQ ID NO: 202374 - DNA, 186 bp, Klebsiella oxytoca
atgatcccttacattaccaatgagctcagaaaaaattgtaaacaccgccatgtaatattcctggcctgcatggagcacaaattgtttagtcagctttaccggaatagaatcatcaaaattatcaaggtcaatggacgctatctcaaccagattgtcattatttccccggtagcgttttgctcttga

SEQ ID NO: 202375 - DNA, 264 bp, Klebsiella oxytoca
atgtttttggttacgcaagcattaaaaaatgggggattaagtcagtttggctctgcgcctgatgaggccgctcgcggtctgggattgaaacggtcacaggagctggccgccagatatgatgccgttgttcttgtccggcaaccaaacttcgagttgaggatcacatataaagatggtcaactcaccgaaattaccggtaaaagaggactggcgttgattaaaggcactcaggtttgctttgattttttcctgggctatgattaa

SEQ ID NO: 202376 - DNA, 1089 bp, Klebsiella oxytoca
atgaacgacctgcaatcacaacatctccgccgtcgcatcattgaggtggcggacgaaagcctcacttaccgtcaggtaaccgtggaagataacacgcctaccggtgcacagatttcagctgcatcagggtttaaacccgatcagctacctgtcgtgctgatgttgctttctgatggttctctggaggacatccgtcccgatgaagttgtggatcttggctctcaggttcgccgctttatcattgtcgagtcagaccgcacctatttgtttactattgatggtactcgtatggagtggccatgtcgtttaattaccggttatgtcgttcgtaaactcggcaatgttgatgataataaaaaactgttactggagcgtgaagacgaagctgatcttgaaatccagaatgaccagtttatcgatctggatggggatggtattgagcgcttcatcagcaggaaggcatcatggaaactgaatgttcagggtaaggaatttacttttgataccccgactattgtaatccgtgacgccgttatccgtgcagggctgaatcccggtcaggaatggcatattttcctcaaagtcgaagggcagcctaagattgagaagaatattgatgacgtcattgatttgcgtacgcctggcattgagaagctgcgcctcacgccgaaagatgtgaacaatggcgaagcatccggggtaacccgtcgtgagtttagtttgctacctgcagatgagcaatatcttgatggaatgggatattcctgggaaacctgcctgaacgggaatgctcgctggctgattatccacgattatgaactcccggaagggtataaccataataagattaaactggccctgttgattacctccggttatcccgtaaacatgctggatatgttttacgtatacccgccactgtcgcgggtcaatggcgtcaagatcccagcgacggaagctacggcggttattgatagtgtcgcgtatcagcgatggtcccgccatcgctcatgggatcctgaaacagattctgtcatctctcaactggcgatggcggatggttgtctgcaaaaggaggccggacaatga

SEQ ID NO: 202377 - DNA, 1371 bp, Klebsiella oxytoca
atgagctccgggagtcgcctgatattgacgcaggagcttcatgcctcactccgtaaacatctgttcccgggagacggaaaagaggctgctgcaattctggtctgtaatcgttacgatggtactcgtctgaagctcctggctaaggagctcattcttgttccatatgaagagtgtaaatccaggacgatcgattttatttcctggccgggtagctaccttgagaaggccattgatatcgcagaagaaaaatcgatgtcaattatccttgtccattcgcatccaggtggtttcctggctttctctgatatggatgatgcaagtgatgtgcagactatggcatcgctttttcagggcgttaacaccattcatggttcggcaattatgattcctgacgggaatatgcgtgcacgttgctaccgagaggggaagcactctgagaatgtggaactggtaaccgtcgcgggtgataatattcactactggtgggacgggatcactgagccacggccgcctgcaatggcttttacatcggggatgacggacacttttaacaagctcaccgcagctgtcattggtgtatccggtacagggtcgattgtggccgagcaggtagcaaggctgggctttggcgaaattattttgattgatcatgaccatatagaaaagaaaaatctgaaccggatcctgaactcgacccttgaagatgcgatggtctgccgaccaaaggtagacatgttcgcggaagttattcagcgtattcggggggacgatattgcccggccaattcacaatactattttctcgcgggaggccgttcttgctgcagcaaacgcagatataatcttttgctgcgttgacacctaccatgcccgaatgattgcagatcgtattgcttctgcttttttaatcccattgcttgatgtgggggtaaaaattccgactcatgttgatcctgaagatgggcgaaaaattacggacgtgacgggccggattgattatgtaaaacccggtggatctactttatctgatcgtcatgtatatacacctgagcttatataccgggaaaacctgagcgcgaaggattatgaagatcaggtcgggagaggttacatcacaggggttcaggaagaggctccatcggtaatcaccctgaatatgcgagcggcatcggcttgtgtgtcggaattcatcgcaaggtgtttcccttttcgcgaatatcctgataagagatttgcccgtactatgttcagtcttgctggtgtcgaagaagactataccgatgaaagtgatatagagaaggcgctgaatccccggcttgcagtcggatgtgaagagcctcttttggggatcccggaactggggggtaaataa

SEQ ID NO: 202378 - DNA, 570 bp, Klebsiella oxytoca
gtgttaataggctatgtcagggtatcaacaaatgaccaaaacaccgatttacaacgcgaagcgttagaacggttaggatgtgagcagatatttgaagagaaaatcggtggtgctacagagaaaaaaccaaaactcaatcgtgcgctgaagacattacaggcgggggatacgctcgcggtgtggaaactggatcgattgggacgcagtatgagacaactcgtcaaactaatggacacgttacaacaacgagggattcattttcgtagcgtgaccgactctatagataccgccacgccaatgggaaggtttgtttttcacattatgggggcgatggctgaaatggagcgagaacttattgtcgaacgaacccgtgcaggtttggctgccgccagggctaaaggacgcatcggtggacgcaggcccaaactgacgccggagcaatgggcacaagccggacatcttctggctaacggcgtcccgcgacagcaggtggcactgatttatgatgtagcggtagataccttatatcgaaaattccctgtcggcagaaaacggagtgccaaaacgtaa

SEQ ID NO: 202379 - DNA, 213 bp, Klebsiella oxytoca
atggcagtgaatcaagcgaggattttcgagcaacttgaacagataacccaagagatgaatcgtgacgaattcatttacggttttatggccgcatttgattttcctaaatcaacaattacgcagatgagcgttatcgggcgatctggcattctccttccttttgagaggaggaaatggcgtgttaataggctatgtcagggtatcaacaaatga

SEQ ID NO: 202380 - DNA, 2622 bp, Klebsiella oxytoca
gtgcgtcagggcagtagtcgtaacatcgctaaggagcctggtcaggtcggtatcaagaataaactctggtttcagtctgctgaggaaggagaagatcttgagacactgttgaatcagtgcgttgatgaccctgcgatagctaaaaacaagatccgcttcgtgctggtcactgattttacccgcttcctggcttgggatactgcgagcgaagagcgactcgacattgagatggatgagttacatagcaattacggtttctttctgccattagtgggccttgagaaagccattattagcagtgaaaaccctgctgatgtgaaggctgccgagaagatggggaagttgtttgacctcatccgaattcgtaatgacctcagcaagtctgaagatattcacgcccttaatgtctttctgacccgtttgttattttgcctctttgccgaagacaccggtattttttccctctcccagttcacttctgctatcaaaggttttactgaagaagatggcagcgatctggatgcatttctctatcagttatttggtgtattggatgagaaacctgacagtctgcaacggcaaagattacctgcccatttggcagcatttccgtatgtaaatggtggattatttgccagcgatgaaccggttcccgaactgggcaaaaaggggcgcaagatcttactcgaatgcggcactatgaactggagtgagattaacccggacatttttggcagcatgttccaggccgtgattgatgtggaacagcgcagccgcttagggcagcactacacttcatatcgcaatatcatgaaggtgattcagccactgtttcttgatccgttacgtattgaattggataaacaacgtaacaatgtcaagggactcaaagcgttactggtgcgactcggcaagatcaaagtgttcgacccagcctgtgggtccggtaatttcctgattgtggcctacaaagcgttacgcaatctggaaattgaagtgattgaggctctgcgtgagctggaacctcaaacattttcaatgagtggtcttcacctgtcacagttttacggcattgagattgatgatttcgcctgccagattgcccggttatccctctggctagcggaacaccaggtgaatagccagtgggaaaaagcgtttggttttgcaccaccggcattgccgctacgtgaaagcggcaatattcatagtggcaatagtttgcgtcttgactggcagcaggtctgtcctaagcaatctgatgatgaagtttacgtaatcggtaatccgccatttttaggaacactggggcgttcagatgagcaacgtgctgatatgcaatctgtatttagcgacttcaaagcgttaggctccttagattttgttgcttgctggttctggaaaggagcgcaatacattcaatattcacatgctgagctggctctggtagcaaccaattccatttgtcagggagagcaggttgccacactgtggccgccaatttttgcccttgggctgaatatccattttgcatacccaacatttccatgggcaaataatgcccgtgataaagcggcggtacatgtcattatcatcggactatcagctcaatcaaaaacacgaaagctttatcagagagttgatggagagtggcattgtaaacaggtcagtaacatcagtccgtatttggttgaaggtagtaatattgccatttctacacgtgatacaccgttggttaatgatgtttctcctttattatttggtaataaacccaccgatggcggtcacttattgttaaatagatcagagcgggatgagttattaaaaaaagagcctagagctgaacgctggattaaaaaattactgggggccgatgagtatttaaatagtaaggaacgttggtgtttatggctggtagggataacaaaagaagaacttcagacaatgctacatgtgtaccatcgggttcagcttgtagaggataatcgtaagaaaagctccaaaaaaagcacaagaaaaaaagcgaataccccgcatctttttgacgaaaacagacacccggcatcaggaagttatattcttgttccaagtgtttcttctgagaggcgtatttatattcctctcggtttttttaacacagacgtaatttcaacaaaccttaattatatcatccccaacggtacgctatacgaatttggcatactttcttcattaatgcataacgactggatgaggctggttgctgggcgtcttgagagtcgttatcgctattctgccaccgtggtttacaaccccttcccctggcctgacgttaccgcaacacaacgcaaagaaatcgagatacttgccgaagacgtgattttaatccgtgaagagtttcccggccatacgctggctgaactctatgatcccgacaagatgccgcaaaagctgttaaccgcccatcagtccctcgataaagcggtggatcgactttaccgtgagcgcccattcaaagatgcagcagaccgcttaagctgcctgctggcacgctatgaagcactgacgcagaaactgacagcaactgtggctaaatcaagaaagaccagagcaccggccaacgcaggaaaccataatgaataa

SEQ ID NO: 202381 - DNA, 2010 bp, Klebsiella oxytoca
atgaataacttattgcaggttgagtatggtcaaacaggccagagtaccagccttaattcgatggggatgcgtgaaatgcaggcccgtgcttttgctgaacgcaacagccagtatctattgattaaggctcctccggcttccgggaaatcgcgtgcgttaatgtttctggggctggataagctggaaaatcagagcgtgcgaaaagtgattgtcgccgtcccggaaaagtctattggcggctcttttcaggacaccagtttaaccaaaaaaggtttttttgctgactggcgttttaaatccgagaacaatctgtgtgtggatggcggggaagcgggtaaggttcaggctttccaacgctttatgtccggcaaagaacgtattctgatatgtactcatgcgaccttgcgttttgcctttgataaattactggtaacagatttcgatgattgcctggtggctattgatgagtttcaccatgtttctgccgatggtgataaccggcttggtaatcttattgacgagctcataaaaaaatcgagtgcgcatatcattgctatgaccggctcatacttccgaggcgataccgtgccgatcctattgcctgaggatgaggcacggtttactaaggtgacatacacctattacgagcagctaaacggctatcaatatcttaaatctctggggattggctatcatttttatcagggtcgttatattgatgcattgccctcggtactcgatatcagcaaaaaaacgattattcatattccgaatgtcaattccggtgaatccaccaaagataaatacggagaggttgattctatcctcgatgtgattggcaacgtgataaaacgggatcctttgactggggtttaccatattgcgggaaaaaatggccgtgagatcaaattagccaatctggttgatgataatcctaacgaacgacccaaaatccaggcgtatttacgtaatatcaaagcggctgatgacatggacatcatcatcgccttaggcatggcgaaagaagggtttgactggccttactgtgaacatgtgctgactattggctatcgcagttctctgacagaaattgtgcagattatcggccgggcgacccgagattgtatgggaaaaacgcatgctcagtttaccaatctcatcgctcaacccgatgcacaggatgatgatgtgaaggcatcggtcaataatatgcttaaggcgatcaccacgtcgttattgatggagcagatcctggctcccaacatccagtttaagcctcgttctcaatgggacggtcagccactgcctcccaatactttgctcgtagatgattccgcaacctcaccggtatccccgaaagtgttggatattctgaacagtgacaagaatgaaattatggcgaccctgatggctaacgagcagttggtcaaagaggccatcagtgaaaccacgcctcccgaaaccgttactcaagtagctttgccagcagtgattcaaacgctttacccagatttgaccgaagaagaacaggaacagatacgcttgggggtattgcaaagtatgttgatctctcagaaagggggcgtggttgattgggaaaacctgccgcaggatgccaatgtggatatggcgaatggtgctgaagaagaatcagctaacagtatcgcaggtaaacagttcctgaaaatgggtgaaaagttcatctgtattgatcatctggatatagacctgatcgatgcggtaaatccgttccatggtgcttatgaaattctctctaaatcggtaactgcgcctatgctgaaaaccattcaggaagcagtaagtgccagccgatcgcaggtctccgaagaagaggcaattatcctttggcctaagatcaagcagttcacccgagaacaacagagagagccatcgctgaatgccagtgatccgatagagaagcgttatgccgaagcgctggcctttatccgcaaaatgaagcaacagaagttggctaatcaggagcagtaa

SEQ ID NO: 202382 - DNA, 1260 bp, Klebsiella oxytoca
atgatccggttatcgacaacgcgattagcggccaaatcaacattagatgagatcctcagtgaagaagatgatctctgtttattggatgttcaccccctgaagaacaaagcgagtcctgtcgatttagctggcaatcagtttgctgaaattgccgcgttttacgatcggcatggtcgtctaccaacggaaaacagcactgcttctcttgatgaaaaacgcctggcaagacgattgcgcatcattaaagaaaaccccaacatatgcgcttcgttgcaaacgctggattgccgggggcttctggcttcaaatcatcttgaaaatgatagaaccccgctagtcgctgaaccagagccaataccttacgccaacaaatcagaactggtgacttctttagaggatatttttgccgacgatgaagacggtttattaaattttgcggaacctgatatcttcagcttacagtatgtttccgctgacaaaaaagagcagccagatgaaattgcccagcgccagccttgtcatgacttcccgcgtttcgaaccgttgtttcacagcctgcataaaggcttaaaagatggggtttttggtcttgagcgttttacccataaattgaaaattgttgaaggcgatttttttattcttaatgggttactcgggtatgtgcatagcgctggtgaacgtttggaagaatatcggacctacaacgcccgattgcggctgatatttgagaatggcacagaaatgaacatgctctatcaatccttaactcacggcttggtgagagataaagaagggcgcaaggtgcaactcaatggcgagacgttgcaaccatcagatattgcggtgccgaccggcttggtttatgtgctcgccaccacgagtacagaccccgcgcttattccttataaacaaagcctttacaagattggctttaccgaaacaaccgtggaacaacgcattgaacatgcccagaaagaccgcactttcctcgaagcaccagtcaggattgtggctaccagccagtgctttaacctcaatgctcaaaaactggaggcattagtacatggtttcctcgctgcccgtcggctcaatattacgctcaagagtcacaacggtcaggtctatgctcccagagagtggtttaatgtcccattgactacagttcaggccgtgatccagcacattgtggacggaactatttcgcagtaccgactggataatacgaccgggaagattgttgcaaaacatcttgggctatga

SEQ ID NO: 202383 - DNA, 1536 bp, Klebsiella oxytoca
atgatcacgttgaactccaaagctcaattgaccgtggatgtcattgcaaaagtggctgagcgtaaaatcactattgccaatgctgccaaactcctcagtaagtccagacgtaccatcgaacgctatctccagcgctatcgagaaaaagggctccagtttgttgtccatggcaacgtggggagtgaacccgctaataaaacaccagatacagtaaaacaacaggttcaggtacttatccgtgaaaaatactatgacctgaatttgctgcatctcgctgaaatgctggaagccaatgaacacctcgtcgtgaagcgtgaaacattgagaaaatgggctcacgatattcatcatgtaaaacgcgcaaagcgccggcgaagtcgggttcacaaacgcagggaacgaatggatgcgccaggattgatgttgcaaatggacggcagcactcaccgttggtttggcaataacaaatcctgtctgattgcgatgattgatgatgccaatagcgatcttcacgctgaattcttcccgtcagaaaccaccgcaggctgcctgaaagtcatgcgctcagttattgagaaacacggcgtgtttaagacgttatacgttgaccgggcgggtatctttggtggccccaaacgttgtaacttctcccagatgcagcgggcttgtgaggagttgggtattgaaattatcttcgccagttccccacagggaaaagggcgtattgaacgtgcctttgataccctgcaagatcggctcataccggagctgagactgcgcaatattattgatatggcgggtgccaacagctaccttcagcatgtgtttatcccgcagttctggcgcaaaaaactgacggtaaaagcaagaacatccacctgcgaatataccccgttgtccagacacgtaaaccttgatgatatctgtatcaccaaggtttaccgccagatccgtaacgaccatacgttcagctacggcaataaattctatttcattgaatcaccgctcaggcattctatcgccaatcagaaaatcgaaatccgaacaggaaaagataaaccgttcagcgcctattttgcaggcagacaattacaggtatcagaggtgacagagccgactaaagcctccctggaggacatcgatatccagaaaaagcttggtgtacttgccctggctgacaagctgggtaacgtagccgaagcttctcgtctgagcggcgtgtcacgggataccatccaccgtcacagacggctagtcaaagaaggaggtattgatgccctcaagcgccaggagacaccagatttacggcataagaaccgaacggaagaagccctggaaaaattgattatcgacttctctctacataatcctcatctcggtcaagtacaggtatcacgtcagataaacgctcgttactcagcagagattagccctaatggcgtccgttacatctggctgcgcgaaaatatgaatacgatggcccttagattagccaaagtggaatcgctatctaataccgcaaaagactttgcctga

SEQ ID NO: 202384 - DNA, 1752 bp, Klebsiella oxytoca
atgcctgaagttcattcacccgcagaggccgcaagcctacgcgcgctcgaagccatgtacacctgccttgcaatgggtcagagttttcgtttggaagccggcgcaggcgctggcaagacatactcgctaatcaaagctcttagattcttgattaaacataacaacgatgtatttcagaaacacggtaagcagattgcttgcatcaccttcacaaacgttgcaaaggacgagatcgcaacgcgtacagataggagtccattggttttctgcgaaaccaatcacgcgttctgttggtctctcatcagtggttttcagaagtcgctcaggacgctaatcgagtcaatgccaggctggcaagaaaagatcgaggaagttgggggatcgataggtaatcgtatcattgagtacagcctcgggcatcggtcaatacgcgaccatagcgtgtccatccaccatgacgatatcctgccgttaacgatatcgctcatggctcatgaaaagttccgtcgcatgatcacggatcgatttccaatcattctggtcgatgaataccaagacacgaataacgagtggatcgaagcgataaaaacttattttctgggccaacctagcgcaccgctattcggcttctttggcgatcattggcaaaaaatctatggcggaggatgcggcaaactggagcatccaaacttaaccgaaatcgggaaggaagccaacttccggtcagttaaagcaatcgttgattctctcaatcgaatgaggccgggactgaggcaattcgttgaagatccagagtctaaaggtgaagtgcgcgttttccatacgaacaattggcagggagaacgtcaaaaaggggcacattggggaggtgatttgcctctgaatgaagggctatccactctggaacgtgttaaaaccgcactggagcaagatggatgggatttatcccccgattgcacaaaaattctgatgctgacgcataaactcctggctaaccaacaaggttattcgaatttgtcagccgcgtttcaatataacgaatcatttacgaagaaggagcatgaacacatcgctttcttcgtcgataaactggagccagcctgcgaggctttcgctgctcataagtatggaatgatgtttgaagctcttggtggcaccaccccgcaattgagcagccattcagacaaatcccgctggtacgattccatgatgcaattgctagcgatccgtgaaacaggaagcgtcggtgaggtgctcgagcacttacgcactcatcgaaagccaagacttcctgacgctatcgaaaagcatgagagaaagttacgcgacttcgacaaaacggcgggtgttgaaatgcctagagcattaaaagaattagagaagttgcgaaacgtttcttattctgaagttaaggcgcttcgccgctaccttgatggtcattcaccgttcgaaacacagcatggcgtcaagggcgctgagtttgagaacgttctggtcgtggttggtagaggctggaacaaatacaatttcggtgaaatgttggagcttgctgacgctcaagcgattcccgcaggaaaagaagaatcatttgaacgcaaccgaaatttgttctatgtcgcctgctcaaggcctcaaaagcggcttgccattctattcacacagtgcttgtcgccaggagcactgcatacgcttgaaaactggttcggaatagatgcgattacatgtgctagtgtgattaccaagggatactga

SEQ ID NO: 202385 - DNA, 2070 bp, Klebsiella oxytoca
atgcgtattactcaagttaaaatcaataatttccgcctattagcagacgttgagctcatactagaagaccaaacaaccgttatcgttggacgaaataacagcggaaaaacatccttgtcagaggtaatgcgcagatttttggctgatggcagcgccacctttcagatcgaagacttttccagtgcctgttatgatcgtttctgcgaagttctgagtgcttcgaaccagggagaggaggaaaatgttattcgtgaactcgttcccgccattgagcttagagtgaaattccaatacgacctccgtcaacctcaatttggaccattgagccccttcgtgattgatttggatcccgagtgtactgaggtgctggcggtaattcgctatgaattaaaggatggtcaattggcccagttcctcgaaaacctccccaaggatccgctaaccccagagacccgtatcgtattcttccggactttgcgggagcgcatccccagagatttcggcatcaaaatatgggctgaagatcctaacgatccagataaccgccgagagttacaatctaactcgctacgaggtttggtcaaaacaggatttatcaacgcacagcgaggactcgatgatgtaacatcacgagaatccgatgtgttggccaaaacagtggagggccttttcgcaacagcctcttcaacatcagctgatacagcagacaagcaaattgccgaggctttgaagggagcggtccaagatattcaaactcagatcgacacaaactttggcagccaacttaaaagcctgatccctgcgctgagaacctttggataccccggactgggaggacaagaactacacaccgaaaccttgctggacgttcgaaagctgctatcaaactttaccaaagttcgttacgcgggatatagcggtatcacactacccgaatcatacaacggccttggcgcacgaaatctaatattcatccttctgcaattagctggcttttacaaagcttttcgtgctgaagccacagaaccaggcgtacatctgatcttcatcgaagagcccgaagcgcatctacatcctcaaatgcaggaggtttttattcgtcagcttgccaagatagcgcagcaattggttgacggcactgaggacaagaggccctggcctgttcagttcgtcgtatccacacattcatcacatatcgccaacgcagctggtttcgagagcattcgctacttcctaggaacgccagcgccaggagcgcacaaggggatacgtaaaaccaagataaaagatctacgcaaagggctaatgcatataccatctgaagataagcggtttcttcatcagtacatgacgttgacacgctgtgacttgttttttgccgataaagcgattcttgtcgaagggttgagcgagagattgttgcttccagtcattgtcgcgaagttggaagccgctgaacccgagcatccgaagttgtccagccaatatgccaccgtgatggaggttggcggcgcttatgcgcatttgtttttcgacttgttgcagttcctcgaacttcgcagcctaatcattacagatttggatgccgtcgaaaaacagggaggcaaggcatgtgtagtccaccttggcgcatattccagcaacgcttgtctgaagaaatggttctccggggatatccctttcactttagctggattgcttactaaaaaagacacggacaaagtgttcaagaacaatcgcatagcctatcaatgcgcagaggaagaggatggcccttgcgggcggacattcgaagatgcattcattcttgcgaatccgaagctgttcggattagtcaaaaaggatgcccaagatctagaaatcgaagcacgcagcgaggcggaaaaatggaaaaaatctgaattcgcattgaagcatgcaattcaagaaacgacgtgggtcgcaccgaaatatatcgcggccggcgttcgttggttggctggcggggatgtggtcatgccagatcaggcgttggcattagctgcgaaagcagtcgccgatactgcggatggagggaacgttgatgcctga

SEQ ID NO: 202386 - DNA, 1065 bp, Klebsiella oxytoca
atgtccggtggtgtttttatcggtgttgaaaaacacctgatagacggaataactgacgccacaaagggactgatgatgtcatattcatcgatgatgtcagggctggcggcgacgtcagtctccctctacatcctgtggcgcggataccagaccctggcaggcaagctgtccacgccagcggaggatgtgatgtgggacatcatgaggatggcgatcatcctgtcctttgtggcgaacgtcagcggttatcttgatggcgttattgatgctgtcaatggcttaaaggaagggttttccggcagcgataatatctggcagttactcgataccttatgggataaggcgaaggtgctcggaaaaacactacatgatatggataactcaacctacataaaagatgagggcatgacggctcagttttatgtctggctcgggatattcgtattaatgattatcaccgcctttgtttcaatgatcgcagaggtgatgattttactgctgagtattacggcccctgtatttatcttttgtctgatgtatggctttttacgccccatgtttaacaactggctgcaaaatgttttcgccgcaatattaacggttctgttttctgcgttatcgctacacattgtcgttaattatttaaactcgcggttagatattgcaacaaaggtcgccgcgaatgccaatattgtggagttaggcgcacaggtctgtctggctggtatctgcgcggcgatactggtatatctctccgcaaaactggctaccgcgctggccggggccagtgcgaccgtttccatgcagggactggcggcggtgggtattggcgcggcggcgtttggctccgggaaactggcggcaggagccgggaagcagacaacccgcgccattcaggacaacattcagggctggagagatggcagcgcggggacgcccggcggcgggccgggctacaacgcggccagggcgcggaaatacgccattgagcagatgatcgcccgcaacgaagcccggcgactggcgcagtcaggggaagctgccgttcagaaattccatcgttaa

SEQ ID NO: 202387 - DNA, 234 bp, Klebsiella oxytoca
atgagaaaacccgtttattacgcctatgtaacccaggaaagtcagccggactcacagggtgagaaaaatacctggtggacaaaagtcggcgtggcctttgcccaccacggcaagcccggtctgaatattgtcctgacacccggtattgcggtctccggaaaactggtcctgcttgagtctcgggaggataacaatccgccacagagtgcggaacccggcgaaaccgcgctttaa

SEQ ID NO: 202388 - DNA, 585 bp, Klebsiella oxytoca
atgatcccatcattgaattacgccgtattaaccgatgcactgaacgcactgaaagagggaaaccttcgccactgtgaagcgctgggattcacttttgacgaaatgaatactcttaatcagctatcgcttgatgagctgtttattgtcagccggtcgtcagcgccgtttgttgcaatcagcgttcgccatgatgttttgcgccatctgatggcgctggcccgtcaggaggtccggctccagcagttgattaaccgggcgatccgactgggtggttcgatcgcgttgctcaaccagtattttggtctcacctccaacgaaacctgtcttcgccgtcggttgctgggtgtcagcgtgccgtatggccggacgcctgaaccggacgaagagacggatgccgaaatctggcggcaatggcaacaatgccgggcggataacctggaatcctccgacgcactggccgccatgatgcaggtgacggaaaagctgttgccggacgccgaaggcctgtctctcaccactgtctggaagcgcatcacactctgcgaacaggaagccgccaacaggagggcatcacatgccggatga

SEQ ID NO: 202389 - DNA, 186 bp, Klebsiella oxytoca
atgacatctcatcagttattacgcctgaaacaggttgaacagaaaactggcctgaaacgctcccaggtctacctgtatatgaaaaacggcacctttccacagtcactaaagattggccccaccagcgtagcctggctcgaatctgaaatagatgagtggatcaaccttaaattagctaaccgctga

SEQ ID NO: 202390 - DNA, 912 bp, Klebsiella oxytoca
atgcaaaacgatatccataaagtcaatacctttttccctaaacaggcctgggttactatccgtgaagcagttaaaatagcgaataaactgaggaagataaaaatagcagagagtgacatttatcggcatgccttatatggaaatatttctctttccatatatttccagtcccctgtcatactaagaaaaatacgttcttctgtgaggaaaataaaactacgcccagtgggaggttcactaccatatcgactttgcatgcttgaacggaatgtttttctgaatggtacgtgtttaattctcagtaccgaggggagatatatctcacctgatcagttagtcatgaatacagggatgctgggatatgaatttgttctcattcagcgactgctggcacagtcccttaatatgccgttacccgttacaggtgcaaacaatgccaattatggtattactgtgactctgtcaggtcagtcatatcaggtttttgaaaaaaagacatggcaggaaagagttaatcagcaaattatgcgattacctgagcatatcattacagatatttatgaagatgaatcagtaaacagattcatggattgctccggtaaaggatattttcctgtttatgatattccggaagatgcctgctttgtgatacgacaggaggaacttgataaattactcggtatgccagcagaacgctttacgcactcttcatccagtcggctttcgacacctctgtcacgtttattctggctggcatgcaaacataatgattcgatcagcccactgctcaggcatccctataaacttcttcccatttttgaacaatgggcgtccgtcgagggtattaccgatcatctgagcgcggatacgctgaaaagagcgcttgaacgcggttccccaaatcagggttaa

SEQ ID NO: 202391 - DNA, 1236 bp, Klebsiella oxytoca
atgcaacacatattaattgtcggaataaacaggatatcagtgaagtatatctgtgaagctattcgtaatgctggttacgatcttattctttctattgataaatcgggtctttgtggcgatgccctgcgtgcaatcagtgatgttcagtgtattccgcctttttctgagcataatgagctatctgactatctgagcgcacatccggatgtttctcaggagattcacagtattacgactttttttgatgaattgttcccgatgatcaaaaccgtcgcggaggcgtttaaatttaacggaccacctcccgtctttgctgaactggcgtcaaaatatgctgtagggaagttaatccctgagcatgttccggcagaggtacaaatctcattttccgaagagaaattcgtcctcccgtggctcaacacgcatgaaaacaatacggtcatactgaaaccggcgatcggatccggtgcgcttgctacgacaacactgcaccttgaaccagaccgggatccgacgcatacaatcaagtcagcaatatcagcaagcggtgctgaatcccacgaaaccctgccctggattattcaggcatactgttcaggtgtgctcgtgagcatggaaggatttgtacagggaggtaaaactgtcttcctggggttgtccagacgtgaaagggtccgctttactgaggtagcaaaccactttccagacgacagcagtatcccatgtgtcgtgcaggaaaaaattcaggtagccattcacgatcttgttaaccgttccgggtttgataacggattcttccattgtgaatttatcaccactgacaccactgcgtatctgatcgatgccaacatggggcgtttaggtggggcaactattgtcgaacaggttgctatggcctatgggttttcgccttcatcagttctgcagcatgcagcgttactccctctggggctggcagcatccattcccaaatatgacccggcagcgagggcccgtaataccctgagctactggtatggcctggaggaagaatcggttatccggggatgggaaattccggttatttcatccattcataccccggtagccagtccaggcagtcgtatccagcctgtgggtgtatcggattattcatgggtcggaatgctgaccgggtataccgatattgttcagcaagaaatcaacctgatacgcgtaaaaactgaccatggggacagggttcctgtattcaaatga

SEQ ID NO: 202392 - DNA, 723 bp, Klebsiella oxytoca
atgaataaagtatccgggctgtactatacaaccccttatcttaaccagatcgacacgcgactccttcatgttggccttgatgagtcaggctctccctattgtctcctccatcagaccattttttacccacagggtggtgggcaactgggtgacagaggttacctggttttacctgacatactgacaccacagcaaaaaacgaacgttgtcacaacaaaacgaaaagatgaggaaatcaggcattatcttgatatcaacgacatcaattttgattgcctgaaaaagcacgctggtcagcgtgtgacggctgttcttgactggaagctgcgatatcaccagatgcgtatacactcggcggtacatctgatccattgtatgcttgagcagataacaggccattccataccttatcctgttcgttcaccactcagcgatgaaagcggagagaatcactatcaattccttgactatcttgatgaagatgtccttgaaaaggcaacaacagaactgaatgaattttgttcggcgggacatgatatacaaactgtggatgttcctgaacagggaaacaattttcgggtatggaaatgtagtcgatggtcaattccttgtggaggaacacatgtaaatgacacaaaagagattgggatgatattttcctcactgaaagtcaaaaagaacatgacacgtatagcgctcaggctgtctgataattccggataa

SEQ ID NO: 202393 - DNA, 1071 bp, Klebsiella oxytoca
atgatgccctctgaaaacatccggaaggacgctgatcaggcaattcataataatgcgctcgcccgcctgcacgccaatgaaaatccgctgggttcgccaggactgatacaaccggggagatatgatctgtctctgctgagccagtatcctgaccccacctacagtgcactgagatcagcaattggacagcgctggaacgttaaccccggacagatcatcacgggtaatggttctgacgaactgattgatatcacactgcgtagtctgctgaaaccgggggcgcggcttgctgcccccagccacagttttatgatgtataaaaagagaagcgatatacttggggccctgtacagtgagatcccggtcaatagcgggcggatcctcccggaggatttaaaagaggccgtcagccataaacctgacattctggtcctggttaatccttctaaccctttgggtcactatattgtaccgtcagaactgatatctttagttgaaaccgtaccgccagacacaacggttatcattgatgaggcctatgcagaattttcccccgatcgtgaaaacactgcaggcatacaaattgttcataaccgcgtcaactcaatctgcttacgaacattttcaaaagcgtatgggcttgccggattgcgtcttggctgggcttacgtcagtacagacctgtatccacaactggaagctcgtcgtgcaccttacaatgtcagcgctttatctgctcttgctggtgaatatgcactacaggatcctgaacatctttccagaacaacggaatattgcctgaactggggaagaagactggtggatttatttgaggcattcggcgtaaaagccagcagccaatatgtcaatttcgtctttgttgaatttgacactaaagaacgctgccagaaaatccacagcacccttaacagtgaaggcttccttacggccaggctgacagattatttcctggaaaactgtctgagaatttcattcggaacccagaaacaaatggaaaagttattctctgttttacagaaagaattgatagatcagatcctgccggaatga

SEQ ID NO: 202394 - DNA, 1584 bp, Klebsiella oxytoca
atgagtatggctcagcataatggttcgttcacaggtgatacattcatcctcaggccggatcgtaacgtcagcctgaaagagtttattgcgttctctcagccaggcaaaaaaatttctgcatccgatgcaacaaaagatagggttagcgcatccagacgagcccttgagcaacttgtcaaagaaggtgcagttatatacggagtcaatactggcatggggggatttgtcgatcatcttgttcctcttgacagagccccggaattacaaaaaaacctgatccgtggtgttgccacaaatgtcggtgaaagattttcagatatcatttgcagggctactatgtttgccagaattgtctcactttctcgcggcaactcagcattatccctggaaaatttcgagcggtttattgccatttacaatgctggcgtgatcccggagataccacgtaaaggatcactgggtaccagcggagacctggggccactggcagctatggcacgtatgctcactggcgagggttatgcctggttcaacggcgaacgcgtggctgcacaaaatatcctgcatgagctgggactcacaccgcttgaattgagttataaagaagggctggcactcatcaacggtacttcctgcatggtagcacttgctgccctgaatgttactgaggccagatcacttcttgaacaatatgcgtcaatctcggctttttcagcagaaacacttcttgccagagtacggccattccatcctgatgttcaccaactgaaaccgcataccggccagcaaaaaattgccgaaatgatgtggaatgctctccagggaacagggctggctgttgatgatatacagctttcctctgaactcggaagcagacttacggatcgcataaaacaggaagatatgccgattgaagatgcctattccattcgttgcacgccgcagatccttggcccggttctggagacaacagaattcgtcgaacagatagtgagtaatgagctgaattcgtcaaatgataaccctctcatcacaccagaaaatggtcagattttccataacggtcattttcacggacagtacatctcagccgcaatggactatctgacgatagcaatcatcaccatgtgtaacctgtctgatcggcggactgaccgattactgaccggcgcaaacagtaacggactcccttcttttttgtgcgcagaaaatggaggcctgcggtttggcctcatgggggggcagtttatgtcgtcttctgtcactgcagaaaatcgttctctggcaacgccggtttcaatacaaacgctgtcaacgacaggtgattttcaggatgtggtctctttcggtctggttgccgcacgcagaacagcagaggtactccagaatacccgctacgttattgcctttgaattaatctgcgctgctcaggcagcggatatcagggacgcaacaaaactgggaatttcaggtcaccgctggtatgagaacgtacggaagtccatcccgtatctggatcatgatgagtcgattacaccctacctggaaaatattgtatcgcggttactgggaggccacgtatga

SEQ ID NO: 202395 - DNA, 1008 bp, Klebsiella oxytoca
atggtgatgttgagagaatgcaaagtaagtggtttggctggctttgtcgtcaatgggctacctgtcacagatacacaatctttcttttcagaagcagccccagaaatccgggatgcactgcttagcaatggggcactgatcctgcgcggtgttacccacagtacagaacccgctgtatttgaaacaataatgagcgcgctgggttttcacagcagagattacattggcggttcatcaccccgctcaacggttaagggtaaagtgatggaagccacccggacacctcctgcatggtcaataatcctccaccaggaaatggcctacgttaaacatcctccagaaatcattgcgttttcctgcgccatccctgccgccgaaggggggcaatccaccgttggtgatatgcgccgcctgagacatttactcccttctgaaacattacagattctgacagaacgcggactcaggctacgcagaacattacctcataaggagcgggttcatctgaaacccggaataaaaaaaagctggcaggaagcgctttctgcggaaacgaaagaagaagcagaacttgcctgccacacacgaagttgggaattcgaatggtgggatgatgatctgattctctggcaggactgtatttctcctgtgcgccagcacccccgaaaaaatgagctgatctggtgcaatcaggcacatttctggggagccgctgcgatgatcgaatgggcgcgtatagatgcaagacgtgaagatgaaacggagttaacagaggccgttcgtagttgccccgaacttctcgaatccatgtgcttcggggacggagaacctcttccgggagaactgacactcagcttatttcatctagtccaggagctggagcaggatgtgaatctgaacaccggtgacatattactgctggataacctgcagtttgctcatggccgacgcgcctttgcaggaaaaagagaaattaatgtcctcattgccgactggggtgaaatgtaa

SEQ ID NO: 202396 - DNA, 522 bp, Klebsiella oxytoca
gtggagctaatcataatttgcgcaattattggatgcatcccggctgcgatagctagcggtaaggggcgttcattctttgcctggtgggtatatggggcgctgctgtttatcgtggctttgattcattcgctggtcatcaagaaagacattcgttctcttgagcgttctcaacttgatgaaggtttagttaagtgcccattttgtgccgagatgatcaagccggaagctataaaatgcaagcactgcggcagtaatgtaaaagaagcgcaagaggcggctagcatcgcaaatttcaaaccaagcgacatgccatttgatgttttttttatcaggcgtaaagacagctttgaagttaatgaggtgtcagtaaccactttagtttcacaactgaaaaaagccaatccgggtattcatcccatgaatctcaaagagaaatacagtgcgcaaattactgaacttgtgaatcagttgccaagcgaaattagggatgagttcttgcgtgtttatgatgcaaagttttga

SEQ ID NO: 202397 - DNA, 885 bp, Klebsiella oxytoca
atgacaagtttagcaattgcagatcgtacaatcaatgtgccttttcatggctcaaacctttttatggttagcttcaataacgaaccttacgtgcccatgaagccagtagttgaaggcatgggtatggtgtgggcagctcagtttgttaagttaaaacagagatttgctaaaggtgtttcggaaatcgaaataccttccgctggtggtaagcaagcgatgacatgccttgcttttcgtaagtttgcagcttggctttccagtatcaaccccaacaaagttcgccatgaaatccgtgaccgcgtaatccagtaccaggaagagtgtgacgacgttctttacgaatactggaccaaaggcgaagtaaaaaaacctcgcaaagccgcaaaaacagcacctggtaaaatcaccaccgaacagcaggaggcgatcaagcagttagttctaactcgcggacatgcattaccgaaggaaaatcaggcacgagctattatcaccatgtggtcgtcgctgaaatctcactttggttgcagctataaggaaatcagcgaggatcagttcaccgaggccctttcaatcgctgcgcgcttaccgctggaaggcgagttgatccccgcagaaagaaagtctgtcacgctcgcagcgccgggccgttaccaattgctgcaaacaattgaagcaaatcaggtagtggaaagccaactgataggaccaaaacaattctgcgcaactaaagaggaatttacctcaatgatgcggtggtgtggttgcgttgtggcatggcctgaagacctgatgaaactcacggccgtagagcttacagagtacatccagaagagcatggcaagacgtagagagtggttagctaccgcgtcatcattgccataa

SEQ ID NO: 202398 - DNA, 984 bp, Klebsiella oxytoca
atgaaatttattaattttatattattcttcgttttattcagttgtttagcttttggtaaaaataagcctttttattatggggttggagggcatccgaataattatactagtcaacctgctgactacgttaatctcgtggagaaatataactttaattcgttacggtttgactattattggtctaatgtagagcgtgcacctggtgtttataccgtgcctaagagtaaagatgttcaagttctcattcaggctgctaaagttaacattaagccacttgttgtacttggttatgacaattctctttattttaaaggtaagccagaaactaacagtgatttagaacactttgcaaactatgcagcttatgtagctgcgcatttctctcctcaagatccaattatagaaatctggaatgaatggtctattgatcatcttaatcttaagtcttcaaggtctttagaatctgctcaaaagtatgttgatttagtaaagttggtttcacaaaaaatacgcaaagtgaatcctaaaactattattatcgctggttctttcaatcctctaaatcgagatgatcttagttgggggaaggaaattatatcgttgggtattttaaattatattgatggcctgtccattcatccatataaattcggtccacctaatagacctgatgtgaactataatatttctgctattgattcactacattcttttattctaaagaattataatgttaacacaaatatttatattactgaggttggtttgcctacagattcatggacaagatatgatccagtatctgttgctgcatatgctaaagaatatttctcatcagcttctaaagtatcttatattcgaggcgtttggtggtatgacttaattaatgatggtgatgattttcataatggtgaatataattttggtattcttgataataaagggatggataaaggtggtgcacgatattttataattaaatga

SEQ ID NO: 202399 - DNA, 288 bp, Klebsiella oxytoca
atgcgcaactggctgaaacaggcggtgaagcggactgaagctgatggcgtgcatttttcgatcgccgtgacgccgcataccttccggcacagctatatcatgcacatgctttatcaccggcagctcaggaaggtcatccaggcgctggccgggcataaggatccgcgctcgatggaagtctatacccgggtatttgcgctggacatggctgccaccctggccgttccctttaccgctgacggtcgagatgccgcggagatccttcgctccctgccaccggccggctga

SEQ ID NO: 202400 - DNA, 1182 bp, Klebsiella oxytoca; identical to SEQ ID NO: 149135

SEQ ID NO: 202401 - DNA, 171 bp, Klebsiella oxytoca
atggacgagaaggcgcagtttatcgcggtggtggggttattccgggcgccggatatggtgaagaatgactggaagctggtgctgaggcgcgacgatctcgatcccgacaaaccgcgcattattgaagccagccataaccgcctgacgttgaaacccctgaaggatgactga

SEQ ID NO: 202402 - DNA, 471 bp, Klebsiella oxytoca
atggacgctcaggactatgggaaacaggtcaacttcgcggacggcccggactatgggaaacaggtcaacttcacggacggcccggactatgggaaacaggtcaacttcacggatggccgggagtgtgggaaacaagtcaactccgcggacggcccggactgtgggaaacaggtcaactttgcagacgtccgggactgtgggaaacaggtcaactttgcagacgtccgggactgtgggaaacaggtcaactccgcggacggccaggactgtgggaaacaggtcaactccgcggacggccaggactgtggaaaacaggtcaactttacagacatccgggactgtgggaaacaggtcaactacgcggacagccgggattgcgggaaacaggtcaagttaggcaagcactatgggaaatacagcaattttagtatccccccatatgtcagcaacaaactaagggggaggaaataa

SEQ ID NO: 202403 - DNA, 891 bp, Klebsiella oxytoca; identical to SEQ ID NO: 194756

SEQ ID NO: 202404 - DNA, 624 bp, Klebsiella oxytoca; identical to SEQ ID NO: 102411

SEQ ID NO: 202405 - DNA, 381 bp, Klebsiella oxytoca
ttgctgctcctgctgtttcagcagggcttcggcttcttcaacctgtcggcgaagtttttcggagcgggtaccgaacaacattcgacgcagtttttctatctgtgcccgcagatgctctatctcgcgctcttcgttctctattttctcttctgcgcgggccagtgcagaacgcaggaacgactcagtctctgcaacgagactgagctgactgtctttctggcgaagcgcgtcttccagcgcagcgatacgggcgagatagtcgtgattcataaccgcttttataatgcggttatgatttttttacaacattgtcagtgcgttaaggcgggatatttttggctggcgccagtccagcttatcaaggagcatggcaagttgtga

SEQ ID NO: 202406 - DNA, 306 bp, Klebsiella oxytoca
atgcatcgccgtcttggtgagcttgtttcatgggcaagtaagaattatgacatcgttatattagatacaccacctatattagcagtaacagatgcggcaattattggtcactatgttggtacaacgttattgattgcaaggtttgagcaaaatacaaccaaggaaattgaagtcagttttaagcgttttgaacaaagcggtgttatagttaaaggatgtatccttaatggtgttgtgaaaaaagccagcagctattatggctacggttataatcactatggatattcctatatggatgataagtaa

SEQ ID NO: 202407 - DNA, 699 bp, Klebsiella oxytoca
atgatattgcaagcaatcgagttcaaaggtgacttactcagacatgtggagacttttgatggtgattcaggccactgggacggaactgacaaaattagagttaagctgaggggagcgataagaaagcattatcttgcgcagcaagattatcattgtgcttattgcaatagattcaggcaagacttccatgggtattgctgggatatagatcatattatccccaaagacacacatcctcaattcacctacgagccgcataattatgcactgacatgcaaggattgcaatactaagaaaggtgagtttaatgttttagaaccaagtgttatagctgctgtaaaatatcctaaaaatagcaatgattatataataataaatcctcattttgatgactacagtgttcatatggctgtggattataatattaataaacaggtttaccacattccaaaaacaaaaaaaggaactgagacatttaggatgtgcaatctatcaagattcacagaggtaatagcaaaaacatctgaggttgttgaagatgaaaatatcactataggcttttcagatgcagagtttagagaaatatatataaattataaagcaataatgaacaataatgaactaactccgagtgagagaaagcaacgactcatttcaagattgactgaattactaggagttgacattaacaatatgtga

SEQ ID NO: 202408 - DNA, 1449 bp, Klebsiella oxytoca
atgtttaagcttgatacaataaaaaatcacagaaaagatgacgttatagttagcattgacaataaattgaacaatgagagcttttacacattaattacaggtgagaatgggtgtggtaagtctactttactaagcaaagctattaatagctttctatttatcaaccctaggaaaagtaaagagtgtcaagtttcttcttcgtcaaaatcgcaaccatcgagaataattgccatatgcaatgctcgatataataagtttgcgctaaaaaaaaccttcttggaaaaaaataaaatctataatcctgattattatatccaagcagatcctaccttggaagtagggagagccttaaatgaagtaatccaatcatcattaagggaaataactaatacacaaaatgaagtcaataacaaaacggtgagaaccatacaggataaagaaagatgctttaaagctttttccatgatcggaatacatcctgagattagatttaatttagagttaaatgttgatagaatttgtaaaataaaggatgcgtaccagcgtccggaattaaatgaacctagtcatgtctcagttgatcattccatctctagggattttctttatctcgctaggatgaatcacattagctcaagtgatattgaggattttttcaatttttatgattgtattgacaataaaataattagcttaggagagggtgttttacactttgattctcctagatatcagattctatcagaacagactaatactgacctattaaaaatcggaatagcagtgggttttattgcccctacaaaaataaaagttcagcgtgacaactctttgaaatgggtaagccatcatgaccttagttctggacaacaatctttacttttaaatgcagtactcatatccattttcgcgaaaaaaaattctttgatttgcattgatgaaccagaaaatagtcttcaccctgagtggcaaataaactatatgaagtttctagactgcttatgtccatcaaatctgcaaagtcatatttttattgcgacacactcgccacaaataatttcaggactacagagcaataatggttgcatagtgtctttgttaaatttaaatcctatgcataaaaataacagaaatcatatttcaacaagtggggaaataatttcaacaaattggcaagagttacattcagcttcatcgtatagaagaaagtccgctgctcatcaactagtggagatttttaaaagccctggttttgataatgaggcaataataaataagttattattaattcttactaaacagacaaaaaagattgagataaattatgaagatgaaaattttattgatggtgttcaaaatttaattagaaatgaaaaaatagatgactgcgatcctgtattggtaatgtacagacaaattaaagctattgctaatttaagggaattttaa

SEQ ID NO: 202409 - DNA, 396 bp, Klebsiella oxytoca
atgggcgctaaagttcgccgagtgaataatctcgacaaaatcattaaggacgtgacacagcgtaaagcaatggccgctgtcgcatccggtttgaatattatcggcatagccgctgccattaagacgcccgttggtaaaacatccgtgctaatcaactcacagtcccaggaagtgatggcaaacggcactcgcatcaccggacggttggtgtattcggctaattactcggtatatgtccatgaggcaaagggggctttaaaaggacagcctcgccccgcatcacagggcggcggtaattactgggatccgtcaggcgaaccgaaatttctcgaaaaagctgccgaagaagagcgcagtaaggtgctggacgccatgaaaagagagcttaagttatga

SEQ ID NO: 202410 - DNA, 183 bp, Klebsiella oxytoca
atggctaaataccaggtcatcaggccctggcatggcgtaagtgctggtcaggtggttgagatggagggggtgcacccgtcattaaagccgcatgtgatgctgattagtggaggggatttaacccccgcgacgccagaggcaaaaacaggccggaagcgcaaaacagaaaacgaagacgaatag

SEQ ID NO: 202411 - DNA, 228 bp, Klebsiella oxytoca
atgggcaacgtaaaaatttacgctggcttggttaacggtgaccttatgccaatcattgaagataaaacgtcagaagagatcgttacctctttcactggtgacgatactggcgcgccgcctacatctgtgacgattgaggtgagaaccgaaagtggcgctaaggtcagaatttacatccctaacagctcagctgatgccagcgttacagttgacgggaagagagtgtag

SEQ ID NO: 202412 - DNA, 468 bp, Klebsiella oxytoca
atgagtcggatagcggccatcgttagcgctgtgattatcttcctgatagtcagcctcggctggctggccaatcactaccacgacaacgccaccgagttcaaagagcagcgcgataaagccactgaaaatctcagtctggcgaaagacaccatcgctgacatgaaggcaaggcagcgcgacgtcgcagcgctcgatgccaaatacacgaaggagttagccgatgcaaaagctgaaaatgatgctatgcagcgcaagcttgataatggtggtcgggtgctcgtcaaaggcaagtgtccagtgtcagccgcaacccaagccaccggcgccgccagcatgggcgatgatgccaccatcgaactctcttcagttgctggacgaaacgttcttggtatccggtccggaatcatcagcgaccaaacagccctgagggcgctgcaggaatacatcaccacgcagtgtctgagatga

SEQ ID NO: 202413 - DNA, 738 bp, Klebsiella oxytoca
atgaccaataatcagttaacagacgaacgcattgaacaaatagcggtgtggctagctacggaatctcattcgctaaatctggaaatgctgacgtgtttgcgcgagctacaggaacgtcgcaaggccgagagcgagccggtctatcagtgcgaattcactcacgctgacgcatccggcgaactccaatggcactgggaagatgtgaacgaggcgttttatgagcaatacggctcaggtcctcgcggacagcgccggatactatattccgtaccacagcccacaccacaacctagaccagtgatggaaagcgagccggtggctgaagttttatcgagccgcccgggcaatgacacctcgacaattgacagggcgcttcctgttggtactccactctatcgccacgcgcagccagcgccggtagctcaatgcgttccgcttggagattctccatatgatgttccacacagcatgccatcaaaccttcgggaattgattgctgaagagatagggattctttttagcgatgatgacgttcaaagtgtgtgggatgtgtgccgccacgccgccatgctccaggctggaaactctccggtaattccggacggttacgtgatggtgccgaaggagcctacagttaaccaatgggccgcaggcatgcaagcctttgattctggagtggacaaagttacacgagtctacaaggccatgctcgcagccgccccgcaggaggtgaagtga

SEQ ID NO: 202414 - DNA, 234 bp, Klebsiella oxytoca
atgggaacgctaatttcaatccaaactgccgacagcgattccgaggacgcggtgatagttcacctgccgagcgcaaacattcagggggattatagcactctctgtggtctggcgactgatggtgatgcagacagtggggtgcttgtacctaccccggctaaggctagggtaacgtgtccagtctgttacgccatgtggctactatgtcgcgaatatacggcaaagcatttttaa

SEQ ID NO: 202415 - DNA, 318 bp, Klebsiella oxytoca
atgaacaaaatcacagcactgccagtagagcgcgaccaatacggttactggactcatccgctatacgacgaattttgtgatggtcgggagtttatttcatctgaggagttcaatgcctggctggataaaaacggacccgcttggaaagtggtttaccgtgatgaggatgacgtagacccaactgtcgatggttacgacatctctcaatggcagccagaaccgcctgctggagaaggctggtttgttggctcaattcacgacactgaagatggcgcggtatgcatctggttgcgtcatgctgaaggcggtgccgcatga

SEQ ID NO: 202416 - DNA, 204 bp, Klebsiella oxytoca
atgctaaagccaaatcacgtttatatcgaggtctgtcataaccagagcggcggactttctctatgcgtcagcaatgacagcggcggctaccgaatttcaggcgacaaagttggcgggtgcgaaacactggttcggtttgaggtaaatgccaacgagcttatcgagcaggttcgcgagcatgcgagcgcagaggtggccaaatga

SEQ ID NO: 202417 - DNA, 516 bp, Klebsiella oxytoca
atgctggccgcgagatggcggtgcctctgtatcagattgaacgcgacactgaaacgggacgatacctttgcagacgatacaggcgaaagcctttctgccgttgcgcgtcttgatacaatggtcaccgttgtcgatgcgtacaattttcttaaagactatggttcaacagacagtattcagtcccggggcgaatcactgggtgaagaagataagcgcagcgttgtcgacctgctgattgatcaaatcgagttctgtgatgtgctgatcctcgacaaagttgacctgattagtgatcaggagcgtgaaaagctgacggagattttagtgtctcttaatcctcaggcaaaaattattgtttcacagttcggacaagttcctcttgaagatgtgctgagtaccgggcttttcgattttgataaagcagcacagtccccgggtgttaaaagaacatctgaattacgctctcataaactgctgggtgtcctggcacaaattaccttgcataagcatacttaa

SEQ ID NO: 202418 - DNA, 705 bp, Klebsiella oxytoca
atgcctaaaggattttctaaaaagtcgagatacgaaatacttgctatattgagggatgattgcaggatcaaatcaacattagagcttcaatatcaggaaaacatctggcaatcaacattaaaaaaaattgacagccattgtttttacgtggaacaaacatccctgacgacactacaggacgtcgagtataattttatacttcacagccagttaggtaaaatcgaattcactacttcattatttatggaggagaaaaaaaacaagcaaaaacatatccattgttttagaatccctgaaaaaataaatattttacaacgaaggatttctcctcgaataaaattaaagacagaaggggaacagttctatttttcaggccattataaaaatggagagtcatacagatttacaatcaacgatatatcagagggaggagcatcctttatagcgaacagttgccaggcaaaactcataggcaaagagcaaattttagacaatgtcgcagtaatctttgctgaatacggaagcaccgtgacgagcttaaaggtgattaacatcactattttacattcagaaaaaatccaggatatcgaaagagtacgaatatcatgttcatttcacaaaaaaaatgcagagactcataatttcttagagaatttaatactgcaattaattatagataaaaaaaacaggaccaggtatttttaa

SEQ ID NO: 202419 - DNA, 600 bp, Klebsiella oxytoca
gtgagcattgtaaacatatataccaccgataatatcctgggcagatcaatacaatattacttctgctccatagtcgataatatactcacatcagacagtgaggaccttatcgagttcggaccagaaccagactgtgaaataatactaatcaatctcatatcaagcccattatcaccactaaaaatcattaatttcataaacacaaagtactcaaaagagcctgacccaacgatagttgtcttcgttgacagtcgcgatattctcatatgcagaaatataataacgaacaagaaaactatagttatgggtttcaacgcctcactatcccgttacgcggaagtactaagcggaatgcactccccatcatttgaagatataaaaaaagacaacaaacttacaagaaaggaactggacattcttggattattattagacggacacaggattaatgaaatatctacctcattacaatcaagttcaaaaaccatttataaccacagaaaaaacacaatcaaaaaacttaatttcaaaaacactatggaactcactcaatccatagtaagactgaatgcttactcgacaaatggaattcaatcatag

SEQ ID NO: 202420 - DNA, 717 bp, Klebsiella oxytoca
atgaagaacacaatatcggtcagcaacctgtctcctgaagatatatcgattagatatgtctttcagaaaatgtactcccctcaagggaagttagtggcggttgagtgtctgagtcgttttaatcatatctctgtccctcctgaatacttctttcttcattcggatatcaacctgcgtgaatatatattcatggaacaactggagctgattgaaaaacatcaaaactggtttataaaaaacgatattatcgcaactattaatattgatgatgacacactcaatctgttgtgccagccggcagtaaaagaaagagttgaacagctccaatatatccattttgaagtgaaggaaaattccggcatcctgctggataatacatcgctgaacaggagtaaccttcctgaagcatcaacattctggctggatgactttggttccgggtacgcaggtatgaaggcgattagaaattatcattttgattatgtcaagattgataaagactatttctggtatctgatgcataaagaatctggtcgtcaactgatggatgcattagtgactttccttacacaaaaccaccacaatgtaattatcgaaggtgtcgaaagctcgccccataaacgctggttaagtggtatgaactggtttgctgttcagggccactactgggaagaggtgaatatcgaacaacttatacaagaagatattagtgtttaa

SEQ ID NO: 202421 - DNA, 510 bp, Klebsiella oxytoca
atgcgtaaattaattttatcattagctgttttttccggtttgacagcagcacccgccatggctgccacaacgacaggaacattaactgtacaggcactggttcagtcctcctgctacctggattccgcgggtgctaatctgggtaatgcgttactggatttcggtactgtcacgaatctggaaaaggagattgatgccaaggcagatactgcggcgtcagcactgtcagttatctgcaccaatggcacaacttatgatgtttctgcagacctcggcagcaatgctaacgaccagcagcgccagatgagtaatggcaatgatcacctgccatatgtgttgtattctgacgcagtgcgtagcacgcaaattagcaatggcacgacctttgccagcggaataggtaatggtctttcgaaggtgatcccggtttatggacgtattccagcggggaccgctctgcccagcccgggcagttatgtcgatacggtaacactgactgtgacttattaa

SEQ ID NO: 202422 - DNA, 1107 bp, Klebsiella oxytoca
atgatgcattttttgttctgttctggtctttcctgggggttattaccccgttcagtcacctcgctgcggtctgcgggggttggcttgttgctcattgtcggtggaaccgggactccggaacccgtgctggcagcaatttcatccccggcctgctatttcacagggaaccagttgaatctggggaactattcaggttcggctgccacggacagtgggcatactctggggttcagttgtgctgtggggttttcctgggatgaagtcgatccgcgggccacattcaggctgtgtctgtatatgggagaggacccgggtacccaggcgggatacctgccatggcgatacctgaaaaataacaatgtgaccggtaccggacaggtctatctggcttacaacctttatgccgaccgttcacatttacaagttctgatgcccgagggaaccggtacaccgctggttgtcgattttacattgacgggagagaaaggcagcacctacgtcagtggttcgggcagtattcctgtctacgcccggataccgggtgggcagggcgcattgccagcgggcgcttactacagctacaacccgaatttcacacttcgctatcaggctgtcagcggcggggtaccgccagcaagttgtgatggaggttcgtcgacttatgcctcagggaatatccagatcaccacggaagttgccgacagttgcagcctgagcgttgtcggagtcaactttggtgcaattaatgagatcggccctctgcgtacagaaaaggtggcagaaggaaggctggctgtccagtgcagtcagggtaagccgtacacggtgtatctgggaagcggtaataatcctggagaaggaggctcccgtcagatggcgaacggtgatgcgagactgccttaccaactctatcaggatacggcgcataccctgatctggaatgatacgggggggatcttacaaaccggcggaagtggcggcgtcagtcttacgggcagcggttcagagcaaacattacctgtatatggccgaattcaggccggaaccatcgtacccggaaccgtcggcgcctataccgacacggtgacggtcactgtgtcttactga

SEQ ID NO: 202423 - DNA, 2367 bp, Klebsiella oxytoca
atgtttatttccctgaaacattctttaggcgttcttctgttcattacgatgccatcgtctttcgccagccagttaattgatggcgagaaattacttctggccgtaaccctcaacggttcatccacggatgaattactgtcggtttaccgtcatgcagacggcagtataagtgccctggccggcgaattacggcacatgcgtattaaaattccggcgagtgtgacagacgacagtcctcagtcactgaattcattaaagggggtcagagtacattatgacgaagcggctcaggtacttgcactgacgatccctgaagagcagcttgatgcctatgccgttaacctgggggaggcaacggacgcgccagatttcagcatgataacaacagagcctgccgctgtcctgaactacgggatatatcataaccggacgactgacagccatcagtgggctggctcagcagaggcactggcgacgggatccgcaggcatattttctaccagcgggttgtacaatgatgcgggttattataacggacacaggcaggtacgcctgggcagctactggcggtatattgagcctgacacgatccgttcctacacggcgggggattttgtcagtaatgccttatcctggaacaacagtgtccggctggtgggatttcagtgggccagtgcctttgaacaacgctctgacctgatcacgacagcgctgcctgagttttctggctctgcagccctgccgtcaacactggacttatatattaaccagcaacggatctattcaggggctgtaccatcaggcccttttgacctgaaatccctgccttacgttacaggcggtaatgtcaccctggtaacaactgatgcaaccggacggcagataaccactacccgtccttattactataccgccagcctgctccagccggacctgttacagttctcggtggatgtgggggctcctcgcttcaactacggcatcaaaaataatgattatgatgacacgctctttgccgcaaattccttgcgctatggattcagtcgtcaggtcacgctggaaaatcacaatgaattttctgccgacggcttggtgaatttcggtgcggctgttgcgcagggactcaacgggtacggggttatcaatggttcatggtctgccagccgttatgaaggctataccggtcagaaagccaccctggggatcgaaggacgccttgggggcgtgcagatgtatgccggcacgttgcgcacctttgaggagtattttgatctcgctcgtgtatccaccacccgtctcgttcgtcggaatgcccgtcagggggagtatggggaattttatcagtgggttggcaacagcgcacaggcccggattatcgatcgtttcggttttaacatgaccccgttcgagcgattgtcaaccaatatgagttacaaccgcatagtcagtcagaacgacgaaacccggacgcttaacttttcggtttccagggcactgacgaataccagtaacctgtctgccagtgtttaccaggatctcaatcgtagcggcagctatggtgcctggctgacattcactctcgccctgggtggtaatgtgaatgcttccgccggcgtcagtcgggacggcggtacgaccggatataaccagcgtatatccggtattgctgaccagcgtcagggggccatcgggtggggagtatctaacactacctggcgaggacgggatgatcagcgtaatgcctatataagctaccgggctccccaggcccagttgcgggcccagctcagtcagtttggttccgtgagcagcactgagctttcggctgaaggagcacttctggccagtgacagtggcgtttttgccaccaacaggattggtgatgcttacactatcgtgaagaatgccggcccacatgttgatgtcatgcagggaggcgttcgtatggcaaccactgatagttacggcagtgctttactgcctgatatccgtccttactacaggcagaccgtctccatcgatccggccacgttacccgacgggtgggaggctgccgtgacggagcggactgcgctgtccggatacaggcaggggaccgtcgtagattttggcgccaggctggaccatgccgcaattgtcatcctgcacgaccatcaggggcacgtcatttcaccgggttatccggctcgtcaggataatggcgagacgggagtcgtgggatatgacggaaaattgtacgtgaaggggttaaccgcgcacaaccaggtctcggttgatctcggctccgcaggcctctgttctgcccgttttgattatgatctgaaggggctggttcagcctgttatcggcccggtgaggtgtgaatga

SEQ ID NO: 202424 - DNA, 777 bp, Klebsiella oxytoca
atgtcatataacattaagacatactctcgtcggcagagaaataacttcattgcgcgttcattctggatttctgtctgcgtattagtccttttcttgtgtgaatttacagcacaggctgcatcaatacgtatatctcctgttaatgttgaaatgcctgcaacgcagaaagcgacggcattaactttaacgaatatggggtcagaagccgttagcctgcaactccgcactttcgtatggtctcaggctgacggaaaagatgagctgatatccactgacagattaatgattagtccaccagcagttaccgtacctgccggtaagtcttatacggtacgcattgcccgcagccgtctctcctctgtttcttcggaagaaagctatcgattatttattgacgagctcccgcgtcctgtcgatgcccgtactctcaaccggggggtctccatgatactgcggacttctgtccctgtttttgtcgtggatgagaaagccttcgcgcaactgtcctggcgtatctggcaggataccgaaggactacatgccagggtaacaaatgatggtaagcggcatgctaaaatcagccagctcatgctaactgccgataatgtggcggccagtttcggtgaaggattaaatggctatgttctgtctggcaccagtcggcaattcacaattgcacgcccggatcctcgtatcagactgacaggcggtaaaacagtcatccttacggcaaaggacggctatctccccattaaagaaaccctgcatgtgcagtaa

SEQ ID NO: 202425 - DNA, 1182 bp, Klebsiella oxytoca
atgatagcttcagcacccggcgattatcgtggggccgcccgtcgccgtcttccacgatttcttttcgattatattgatggtggtgcagtggcggaaaataccatgaacgagaactcaacagcgctctcctccgttgcgcttcgccagagagtactttgtagtgttggagatccgaaactgaccaccgagatcctcggctcgtcatgggaaatgcctgtagcactggggcccgtcggcgccacgggcatgtatgcacgccgcggtgaagttaaagcagcacgtgccgcatcaggtatgggtatcccttataccctttccaccgtgtcattgtgctctattgaagaagttgccggccatgcctccggtgaactttggtcgcagttgtatgttcttaaggatcgcggttacatgcgcaatgcactggagcgttcatgggctgctggcatgaaaacgctggttttcaccgtcgatatgccgatccccggctcccgttatcgtgataaccgttcgggcatgtccgggcctcgggctaccctgagacaatatctgcaggccagcatccatccacactgggctatggacgttggactggctggcagacccttgtcgtttggcaatattgaaacctataccgggaacaagatgacaatggacgattacatggggtttatcagcaataacttcgccccttccattgcgtggcacgatctggagtggatacgtgacatctggaaagggaaactgattatcaaagggatacttgaccctgaggatgcacgggatgccgtccgacttggcgctgatggcatcgtggtctctaatcacgggggacgacagcttgatggcgcgctcccaacggccagggcgctcccgcgcgtggtggacgccatcgaggacgagctcactgttctcgtcgattctggcgtgcgttctggtgtagatgtcattctgatgcttgcccttggcgcgaaggggggggggttgggacgcgcttctatctatgcgctggcggcggcaggcgaagctggcgtcgcgcatttactgcgcttgtatgctgaagatatgaaagtgactatggcgctgacaggcgaggcttcaccggcgagtattaacatcgattgcctcgaacgtttatgcaaagacatcgctcagtctgcaattcccccaggacgacagaattaa

SEQ ID NO: 202426 - DNA, 240 bp, Klebsiella oxytoca
atggataatgaatctggtcagttcctgcagaccagacatcttaaacactgtaacgcccctccccgcagtgagtccttgattcaggataaggtaaaaacaactaatcagatgcatgcttttctgctgaaatttagcatcagcgttcctcgtggctctgtcgttattagtcgactgagtaccatttttgagaacagcagcctgctgctctatctcagcaagttattactgaagacagactga

SEQ ID NO: 202427 - DNA, 768 bp, Klebsiella oxytoca
atgtttgatatcggaaagactgttaccgcaggcaatgcagccctgtttgtatcggaggccggtaaggccaatggagagccgatcgttttgcttcatggcgggctgggaagccgaaacgatttcctgccactggcgaagtaccttgccgctgactaccggctcatcgctatagacagccgtgggcacgggcgatcacctttaggaaacgtttcccacctcacctatcatcagcttgaacaggacttcgctgccattctggttgagcttgggctgtcagatgccggaatcatcggtcatagtgatggaggtattgttgctttgcgccttgctgccaccggagccatccggtctcgcttcattgttgtggtgggtgcgcactggcagatgccagccaatgatccgacccgcgaaatctaccagaccatcacaatggaggcatggagagaaatgtgcccggagcaggtagaccgctatgaggcggagaacccttctgcagactttgtccgattgttcaacgcaattaaggccatgtggctcgggaacgatggcaaagcctatccgggggcgtcagtgcaatctatcgcctgcccacttcttgttgtgcatggcgatgaggatttcctggtttcccgcagacaggcttttgaacttgtccaacaggtcaagggggcacgcctgctgaatctacctttcgcctcacataccgtactggaagatagcccagaagacgcacttcctgcgctcaaagcattcctctccagccagtaa

SEQ ID NO: 202428 - DNA, 255 bp, Klebsiella oxytoca
atgcgcggctctaaatttgactacatcgagagccagtgcggcatcaccatcgatagctgtattgaaacctttaccccggtacttgcaaccacaccatatgcgcaccagttgaagattaaagagggggcattgctgctgcagctcacctcccttgcactgtccaccggtgggaaatacctggacttttcgattatgtatatgaaccccagcgaatatcaggtgaaataccgtattaagcgcaacaaaatactgtaa

SEQ ID NO: 202429 - DNA, 648 bp, Klebsiella oxytoca
atgatggttaattgtatatcttttgattttgatggcacgatttgcgacacgcaaaatgcaatttttaagacgctttgttgtttgtttccttcgaaaaatgataatgagatactccattcaatatccaaaggactatcattaaaagccactttggtcgaactctcaagtgaaaacgtcaccgataatgaaattaacatgctggaattgttgtatcgaacgcgttacaataattactttttcaaatatcaatcactttatccttatgtagaggaaaccatcaaagaattacatgggatgggagttttgcttattgttgttagtaataaaggagaaggctctatatataatttccttagtgaaagtaacttattaccttttatatcattaattgttggttccagagatgatgttcaacctaaacccagtattgaaccttgggtaaaaattattcagaagcgttttcctgaattatcattgtctgacgtgctgcacgtcggtgataccgaatcagatattgaatatgctaataatttaaatatcccctgtgcctatatgacatatgggtttggcaaacccccatcagaattaaaaattaaaccagactttatattgtctgattttaattctatacttgaaattattcattga

SEQ ID NO: 202430 - DNA, 1362 bp, Klebsiella oxytoca
atgagaagaatttcagtccgttcagtgctgtgggcttccactattgcgatgtcaaccttcacaacggcatacgccgatagccaatgggcagccgccgacacgacttttcctggcagtattcgtgccggatcacgggaagttcctgttaagcccggagatcatacagtgataacgattaagagcctgccagcgggtgcgaccgtcaccatgttgaatggtgctgaagtcttgacaccgaagccacttaccgccgatgagaagggaagtctcactattccactaaacgttccggtcgatgcttctgtaggccttcatccactcactgttattacgcaaaatcccgcgagcgtttcgcaggtcatattgaaattgtccctggttgttcccccgaaaaatactgatgctttcaagctgcagacaattcccgtcggtgagcgggcttaccaggcggcagtttcggccaatggggagctgttcgtgacctctgcgcttggcccgaaggatggtagtcgcctgatgagactgaatgccagaacgctggcttttgaagcggaggctaagctgcctcaagacaaaaagggtgagcagattggtgtcttcggcgtcggtgttgataatgtccataaccatgtctggacgacgaacacgcttgccgaaacggtgaccgtctatgacgcaaagaccctttctgtcgtgaaagtctttcccgagggttctgtcgcgcatccacgcgatgtgattattgatgaagcccggaatcgtgcctatgtcagtgcagcgctgaccggttttatagaggtatatgatacaaaaacactcgaacatatcggtcaactggagttcgtggtggagcgtggcaaaaacctgtttaataataccggtcttgcccttgacagtgtcggtgagaaactttatggcgtcagccgtgatacgccatgggtgggttggattgatctgaaaacgggtaagagcacgacagtgaaagtgcccgaggccaagggcgcaaccgacatcactcgcgatccggcgactggacgtctttacgttgcttctcaggagacgaacaatgtcgtggttcttgatgagggcggtaaggttctcgctgatacttatattggtgccgggggggtatctgtcgtctgggatcctgtgacgtcgcaggttttcgccgccacgcgtgcaggcggaaccgttgctgttctgaacaaggatggtaaactagttgctaatattccgatggatgaaacaccaaaccacctgactgccgcgcctgatggtaccgtttatctggtgtctatgtatggaacctccggggataaacctcaaacaggttcagtgacgaaaatcacccccaaaaattag

SEQ ID NO: 202431 - DNA, 1821 bp, Klebsiella oxytoca
atgagcaatttcatgaagaaaacttcggcgttgcgccagggctgtttatctgccgcgctaatggcgacaataatgggccagcagacactggcggccaacacggagaatactatggcaaaaataacggcagttcagtcggtgcgtgatgagggcgcatggtggaaagaggctgttgtctaccaggtttacccccgttcattcaacgataccaacggcgacggcatcggcgatctaaatggtattaccgaaaagctcgattacctgaaaacactgggcattaacgtaatttggctgagtccgcattttgattcgcccaatgccgacaacggctatgacattcgtgactaccgcaaggtgatgaaagagttcggcactatggcggattttgatcgtctgatggcggaagtgaaaaaacgtaatatgcggctgattatcgatctggtggtcaaccataccagcgatgagcatcagtggtttgtggaaagccgcaaatccaaagacagcccataccgtgatttttacatttggcgcgatggtagcgatggcaaagcgccgaataattatccgtcatttttcggcggttcggcctggaagcttgacccgcaaacgagccagtactacttgcactattttgccagtaaacagccggatctaaactgggaaaacccaaaggtacggcaggaggtgtatgacataatgcgcttctggctggataagggcgtttctggcttccgcatggatgttatcccgtttatttccaagcagccgggcctgcaggctctgcccaccgctgcgctggcgcacccggaatacgtgttcgccaacgggccgtacatccatcaatatctgctggaaatgaaccgtgaagtgctgtcccattatgacactatgaccgtgggagaagcgtttggcgtgacacctgagcaggcaaagaaatttaccgatccgcagcgtcatgagctgaacatgctgtttaatttcgatcttgtacggatggatcgcgatggctggcgcaagaccgactggacgctgccgcagcttaaagccatctatgccaaaatcgacggaggctcgggagaaaacggctggaacaccagcttcttgagcaaccacgataacccgcgggcggtgtctcattttggagatgatagtccgcgttggcgggaggcttccgccaaggcgttggcaaccatgatgctgacgcagcgagccacaccgtttatctatcagggggatgagcttggcatgaccaattacccgttcaagcaggtggaagattttgaagacgtagaaattcggggccagtggcacgatctggtggttagcggcaaagtgccagcacaggagtatctgcaaaacatcaggcaaaccagccgtgacaacgcacgcacaccaatgcaatggaacagcgaagccaacggcggctttaccacaggtaaaccgtggcttgcggtcaatcccagctatgtgcagatcaacgccgcggcccagcaacacgatccggactccatctataacttttaccgtcgcctcatcgccctgcgtaaccaaacgccgacgcttatttatggaaaatttgaggatattgatccagctaatgagcaagtgttcgcttatacgcgcacccagggggagcagcgctacctggtggtgatcaacttcagcgaacggccgctgaaatacacgttaccgaaagggatggcgatcaactcgctggctctggacagcggtgccgggcattcggtgacagacggcgcgacgcagttggagcttcagccatggcaggcttcgatttaccaactaaaatttcatcctctctga

SEQ ID NO: 202432 - DNA, 711 bp, Klebsiella oxytoca
gtgatttacatgttgatagcgcaaaggctgcgcgagcgcattaattcagaagagtttcagcgaggcgatgcgctgcccggtgaactattgctggcgcaggagatcggggtttcacgcagcacactacgcaaagctattaatattctggccggcgaaggcatgctcgaacgcaggcacggtagcggcacctatattctgcaaaaggatttacagcacgatgcttacgggttaaacagctttgccgagcatatgcagcaaatcgaacgagaggtgaggaacgaagtggtgcagttttgcatcaggccggcgccaccggccatcgcgcgccagttgcgtattaaggtcaatgaccaggtgtactatttccagcgtatacgccacgtagacggcaaaccttatatagtggaagacagctatatgccggtgtggctgttccccacactttccttgcactatatgcgcggctctaaatttgactacatcgagagccagtgcggcatcaccatcgatagctgtattgaaacctttaccccggtacttgcaaccacaccatatgcgcaccagttgaagattaaagagggagcattgctgctgcaactcacttcacttacactttccaccggtgggaaatacctggacttttcggttatgtatatgaaccccagcgaatatcaggtgaaataccgtattaagcgcaacaaaatactgtaa

SEQ ID NO: 202433 - DNA, 618 bp, Klebsiella oxytoca
atgacaaatgatttgattgcgctttctgctattagtgttgcgatcctttttggcgctatgagcccgggagtcagctttcttctcgttgcccgcacggctatgtccagttcaagacgggcggcattatctgtggcggcagggatggggtttggtgcgcttatttttgctgccatcgcgttagcgggccttcacaccctgctggcattggttccatcactttacacaggcctgaagattgccggtggtttttatctgttatggcttgcgtccaaaatttttcggcgtccttcaaaccagttcatcgattctgccgttacagaggaattaagcgcctcaaaagcttttctaactggcgtattcacacaaatcagtaatcctcatacagcactggtatttgccagtattttttctgcagtgcttagcaaaaatattcagcctgccatgtatattattctgccatcaatggctttcgctattgatttactctggtatgcagtcgtagcatgcgtattatcaacggacgggccgcgtcaggcttacattaaataccgtaagtttatagatagattaagcgggggagtcatggcttttctgggaatacggcttctgttaaagtaa

SEQ ID NO: 202434 - DNA, 732 bp, Klebsiella oxytoca
atggggatcttaaaacctggcttattactgaccgcttttgtgttgactgcatgtggcggtgggggcggtgggggtgacagcacgcctccggcaaccactgcgcctgtgcaaacggataacggcaatacgggtaccaccccggccccccctgccacggcaccggtcagcctaacaaccggcggtacaatttctggttggacctacactaccccagaaggccgtgaatatgttatgcgtggcaccgggatctctgcgggcctggtgcaaactcagatgctcacccgtgacgaccgttcccaggtttccgcgacgtcatggtgttgtggccgtatgagttacaccacttttggtacatggacaaactttgaaaaaggtcagcatgacgtcttctacacaggagatcccacgctcgtagcaaacgtgccaacccagggagcagcaacctatgtgggtcacggtatgcgtgaaagtaccctgggtgatgccaggtttaacattgatttcgcagcgaaaaccatcaacggcatcattaccggaaatgataccttcggtagcgaagttgcgatgcagggcaccattgccaacggtggtttcaccggtaatgcgcaatccggcgggcaggcggggacgttcaccggacatttcaatggtccaacagctgaagagttaggcggtctggcgcagtttgcagacacgactaaaaacgcatcctttggcgcgacacgtcaataa

SEQ ID NO: 202435 - DNA, 1431 bp, Klebsiella oxytoca
atggtaagcctttctatgaatattttgcatactggcgcactgggtctgctgtgcccgctcagcgttgtttttgctgcgccgccggaaaccgactcgattcctgcagctccccactttgaacgactgagcacgccggacaaacgtaccgatcctaacgaaaagacactgcatgtcaccaatgctcaactggcagaacagccagaactggcgatggctctgctcgatcaggccattcgtgaagaaaagtggccgatggtacgtgccattttacctgtctatgcggagtcaccaaacccggattctaccctgattcattttgcaaaagccggtctggcgcgtagtcaggggcattatgaagaggcgattgcacactaccgcgctattctgagtacgcatcctgactttgctgcggtgcgtctggatttagcgcgcgccatgtttgaaaatcatcagtttgacgcagcggattatcaatttcgtcgtgtattacaaagcaatccccctgagaatattcagcaggtcattgaacaatatctcgagcgcattcagaaaggcagagcattaacaggttcattcagcgtgagttatctgaatgacagcaatgtcaataatgcttcatcaggtaaaactattcgggttggcgatcgtctgtttatccgtaataaagacagtttccctcagcgcggagaaggtttctggttcaatggcgcattgcaaaaagatgttcaactctacgatcagcatggcttgcgatttcttggtacggtaaacgctaagagttactggaataatcatgattttgatgatattatcacccgggcttatgctggatatcaatggcgtaatttccgtcaacaattctccctgttgcctttttatgaaaaaagatggtatggcaccgaggcgtattcttctggccctggcgtccgcgccgaatacagttatttacttacgcccacctggcaggtaagtcaggcgctggaatatcagaaactggggtatgaagatgaagattatcgattcttgcgcgggcaaaatcgttactcttccacaaccctgtctcatgccttcagtaaccgggtgtcaggatttgctggcttcgatttgctcgatcagaacacctttacccgcagtgaatctaaccatcgggtaggtttgcgcagcgggatacaggttgacatgccctggcaactctcttttgccgccaccacggccattgccagacgcaattaccaggccgacagcgatatcttctcgacgcgccggaaagataacgaacagatctataacctttcgctctggcatcgcgacctctatttctttggagtgatgccgaaactgaatttcacctataagcgggtcgacagcaatatcgatttctatgattatagacagcgaaatgtcacgctttctctggagaataatttttaa

SEQ ID NO: 202436 - DNA, 528 bp, Klebsiella oxytoca
atgattaaatatgaaaaaataaactctgaaaaggcaagtgagttatttttagaattaggtgatttattgcaagcttgtgtaaaagatggagctagtgtgggttttactgacccagaagatcggcaggctatcgatagtttctggagagataaaattaatagcctttctacgcacaattgtgagttattactagcactcgaacaaggattgttagcagctacagtcataataaactacagtggaatgcctaatggacgccatcgtgccgaaatttccaaactacttgttcatccaaaatctcgccgtcagggtattgccacacgtttaatgaaccaggcagaacaaatagctagtaagaaaggaatatccttactggttcttgatacgcgtagtggtgatgtagccagtgatctatatctttctttagactggcaggtggccggatcaatacctttttatgcgaagtcggtagataatactttagatactactacctacatgtataaaataaataaaattgacaattga

SEQ ID NO: 202437 - DNA, 576 bp, Klebsiella oxytoca
atgagaggtaatgtgaatacacaagaacatagagggagattggcggcacgcttggctgcactgcgtatacaacatggcaagtcgctggaagacttatcctttgcgtcaggtatcagtagagcgtcattatcaaggattgaacgcggtgaagttagcccaacagctgaagtcatcaatcaactttgtggtgtatatggaatgactatgtcccggctcataagtgagattgaaccggctgcagataatctgttaagggtgaagcaacagaccctgtggcaggatgaactcaatggatttgaacgacgcatattatctccaccttctaatcaatacagatgtgagttaattgaagggaaattacgtcctggatcgctaattgaatatttaaaccctccaatccaaggccttgagcaatatatatatttatatatgggtgagttgactattacaatgaatgctgaaaagtgggttatgcaagaaggagatagcttacgttttcatttgtcaggaaagtcatcttttaatactaatgagcgccagagcgcacattatcttttggtggtatgcaaatcatga

SEQ ID NO: 202438 - DNA, 171 bp, Klebsiella oxytoca
atggtcacttttgagacatttatagaaattaaaatccttcacaaacagagtctgagcaatcagacgatcgtcagggaactgggtatctcctgtaacatcgtcaaacggtatctgcgggcgcagcctgagtcccgaaatatacgccacgtcctacagtcgcttcacttctga

SEQ ID NO: 202439 - DNA, 840 bp, Klebsiella oxytoca
ttgacaacaaaactcccgtttctcctgttcacttttcccgcactcgccctggcaagtcaatatggcgatgaagttcttattgaaggtggccgatattatgccggcagcgtgttcgggcagcatgattatgccgcacatactaatattgagctggctgattttacgatcatgcggtcggaagtaagttatcgcctgtacactgatgttcgaagttgggccgtcagtcacggctattcatttggtgaaggatgtaatggtgcgacctttgaggagtgcctccctcccgatgaagataacggaatgcatcctgtcactcatgttgaatggtctgatgctgccatttttgccaatgccttcagcgaaatgcatgacctcaggcctgtgtacctgaataaggacggccagcctgctcgtgacagcgcacgttacgaattcagtcccgaccgtcaggctgacggctatcgcttacccacacttgaagaatggcagattgctgcccggggagggaaaacaggcctgaaaaatggctcttacggatacaggtattccggaagtgaggaggcaaaagacgtggcctggttcccgagcattgagtcctccagtctggggagcataccgacagaacgcctgcatcctaatgcggccgggctatatgacatgagcgggaatgtttccgaatgggtatatgcttttgacgtactctccggcattaatatgtattatttctgcggggggagcttcctgttacccacaaccagtctggcaagctgtgatacacacagcgcgggttacgccttgccggatacagggttccgactggtaaggacacatttcagatga

SEQ ID NO: 202440 - DNA, 543 bp, Klebsiella oxytoca
atgagaagatttgttattctgcttgcgacgattctggtcagccatccggctgtatgcgggaacgaaacccggattaacctgaaagagggggttaacagtatagatttaaataatgacggaatcactgacaacgtctttatggcgatttatgacaataatacgtcgcatcccagccaaacgcttaccgtatttgtcaaccagggaaagaactggttcattctgccggttcccgatgatgatggtttcacgtgggcggacttcaggctatcggcctccgcgctgaagataagcggtttcgaattacacagatataaaagccatgtttatctcgtcagggcgttaaaatacgcaggggaaaccggcagtgaagatatttctgacgtttccagggtgaagtttttacgttaccgtctggccgaaaaccgcaccgaccctgggacgtccgtatacgactggaatgctgccgggagttttataactgaaaaaaaatacaatgatgtggatgaggcttttcagtcactgagtatggaggcgtttcgttga

SEQ ID NO: 202441 - DNA, 546 bp, Klebsiella oxytoca
ttgaaatggatgactggaattttgttatttttactggtaccacgctgtatcgccagcagtgaacttcagtatcgtcagctgattgagagctctctcaacaagcaacctttgtgtctgggagaaaaacgctggcccgtatctatacagaccggtagtgaccagtggataaatgccaggatggaggcacttgttgatgccgggctgataacctctcgtgaaaagagcgggagaaaaacatggacgctgacgcagtatggtcaggcatcttttcgcaaagaacatgatttttgctatggcgtgatgcgggtgcgaactttacaggatattcagacagacagaacgggggtaacccacgtaacgtttacctattttattcagggcatccccgcctgggctaaaaatgcttcggttcgtgcggccaatagcgatcttgataatcttgttacgggaatcgattccgtacgttatcaggccagatttactcatgagccccggggagcaatgcgtcttctcacagagcctgagcaaatggatttatactattga

SEQ ID NO: 202442 - DNA, 684 bp, Klebsiella oxytoca
atgaaacaatgtaatccaataaaaaatttttatactaataatatacatttcgcagattacttcgataatgataaaaagttattaatgaagttaatagtcgtaggcattatggcaatgctcgcacttaacacccctttatttttaatgaattatttcgatgcgggtcttgataatgcaatttacagtatgttgtttgtagaaacatttctttctgcacttatgtatattctggtgttaaaagggcggaaagcatttaacatgaggatttctcagaataaaaaaactttaattataatgttctgtgtatttgttggtgcattcattttgaaaaccatgccatatgatttttttcaaaaaaatggtccaactgatgcaatagaactaacaccacaattagttatcacattaatgttcattgttcctttttatgaagagattatttttcgaggctgtttatttggtggtttttgcttcctgtttaaaaaaaacattctagcagcaatgattatgacgtcaattatatttgccgtgtcacatgcaagtttttttaatataggcgatcaaattgaattgtttttaacgggtatgttattgaaccacgccagagttttgagtagaggatttttttatccgatattattgcattcttttgcaaaccttttattcttatatgttaacttttag

SEQ ID NO: 202443 - DNA, 1254 bp, Klebsiella oxytoca
atgaaaatcttcagggaagaggtcttaaaatatcaaagtcataacgaatacggaaaaatattaattccaccatcatttcttttatcattaaccgctatccttgctttacttctttttatttttgttttattgtttttctattatggaaactacacacgaaaagctcatctatcagggatagtgatgccttcttctggactagtgaaaattacaccactatatgcaggttacgttacaacacttatactatctgaaggtgaacatgtaaaaaaaggggcccctttataccatataagtggggagcattatgatgggcatggggcaggaattctggcatctgcaagtttgtctttaagattacaattagccatgttgtcctctcaaaagtctcaagagcagtatgataacaatcaacaacagcaagcttatcattcacgtatcctttcacttcatccccaaatcaaaagcgccgagcaacgtcttgtattagctgaacagcaggtcagtctggcaatcgccgtaatgggtcgttataaaaaactgaacataactcattacgtttcagatgtagaatatcagcaaaagcagattgaggtttcaactgctaaacagaatgccgaagatcaacgacaagccgtattacaaatgaattccatgttggagacaacagaaaatgaactaaaacatcttagagctcagggagaaagcagactatccgagcttgacagacaattacagggaatcaaacaacaattggatgaaataaattcacaagcgaattttacgttgacttcacctgtatcaggaactgttgctgcaattcttatcagacaaggacaatctgtgaaagctggagagccggtcatgacactggttcctgataatgctcatttacagattgaactctacgcaacgagccagaaagctggtttcattcagccaggacaaagagtagcacttcgatttgatgcttttccttatcaaaagtttggcgttcaatatggctcaattcgtgacatcagccgtacgacattgacaccaatggatttgctttctgtgtctccaattacgtggaaggaaaatgagggacactaccgaataatcgttgagcctgaaaaaacattcatccaggcctacggtaaaaaagagcctcttaggccaggtatgactctggaaggtgatgtgagcctggataatcgccacctttgggaatggttcacagaacctctgtggagcttaaaaggaaaactgtaa

SEQ ID NO: 202444 - DNA, 2154 bp, Klebsiella oxytoca
atggaatcactgaaatggacaggcaaaaaacaacttccagtcatcaggcaaactgaatctgcagaatgtggcttggcatgtattgccatgatagcctgctggttcggtctgaagacggatttacccacgttacgtgaacgtttcagtgtcagtaaccaagggatgacacttgagcgtttgattgaatgtgcagccagtattaacctttcatctcgcgctctcaggctggagtccgaagatattaaatcactatccctaccgtgcattctacactgggatttgaaccattttgtggtattgcacaaagttcatcggaatcggctaattattcacgatccggtcaggggaaaaatatctatctcgttaaaagaagcaggaaaacactttaccggggtcgcactagagttgaatccagcagtaggatttacttccagggatgagaggaaaaaaatcaacctgcaacagttaacaggtaaaactcccggacttctacctgctatgctccgcatcattacatttgctcttgtccttgaagcattggctcttgggggacctctcctcaatcagttagtaattgatgaggttctcgttgccgcagatcgtaatttactaagccttataataattgggctactattactatcatttacccaaatgttgctttcattagcttgccagtgggccagtattacgctgtctgttaatttcaacatgcaatggaccgccaaagtctttcatcacctaatccgacttcctctttcatggtttgatgcccgcagtaaaggcagtattaatgctcgattcgatgcaattgataccatccagcatgtacttactactgaagttcttgagggcattcttgatgtaatgctggttgtaacgtcttttattatgatgcttttgtatagccctgaaatgaccttaatagccgtattcacatctttaatatatgtggttatcaggggactttggtacccttctttgcgacaatctacagaggatacttgggatgctggcgcacgcgagtcaagccattttcttgaaacgctcagtggaattttgagtcttagaataaatggtgtaacaactcaccgggaagcaacctggttgaatcttaatgttgctcgcagaaatacacacatacggcaggaacgattgctgatgtattacaacattgtcaatacgattactggtagtttggtgtcagctatcatgttatggcaaggcgctgataaagtgctaaacggggcattcaccgttggcatgttggtggcctttatatcttatcaggggcgtttttcctccagtgttagtagcctgattgataagtttttttcctggcgtatgttggatgtgtataacgaacggctggctgatatcgttcttactcctgctgaaggacaacggcaaccacacactgaaactgattattatcccctgaacgaaataaacgttacccctgtcgttgatcaagttactcatccctcgttattaatcaatgaaatattcttcacccataaagggagtaaatcacctgtgttgaagcaagtttcattgacattaaaccaaggtgaagtggtcgctattaccggaagatcaggctgtggtaaatcaacattagtaaaactaattcttggaatttatatgcccgagaaaggggatattcaggtattcggaatccaccataatcatccacaatattttcaggttcgaaaaagaattggtactgtgctacaggatgacatgctttttcgtggttcgattgcagaaaatattattttctttagtgaggactgtgattatgagtggatgatacattgtgctcaacaagtccttattgatgaagaaataatgtccatgccaatgggataccagacgttcatcggtgaaacaggtagtgggttatcaggaggccaaaagcaacgtattttactggccagagcactatataaaaaacccggatttcttttgcttgacgaagcgaccagtcatcttgatattgaaagcgaaattataattagccagacacttcgtaatttaaggatgcctgttttattgatagctcatcgacctgaaactatcgcttcagcagatagagttctaatactatcagagggccgcttaaccgaacatagtaagtgcaacaacacatga

SEQ ID NO: 202445 - DNA, 273 bp, Klebsiella oxytoca
atgatggacgatcttaaagaaacgatccgcttgcgttgtgcattctgccgctcggagcagttcgccttaccttacacggattactcacctcctggtcacagttttgtcgtctgtgccaattgtggaagggaaaatgatgtgacgtctttgctcatcatagctaaatcgaaagggatggaaatagcccgggcgtatgctgatgggctggttgaacagatgaagaaggatttggttaattcttttaaaaataacaaatacattaagataaagtga

SEQ ID NO: 202446 - DNA, 1059 bp, Klebsiella oxytoca
atgaccagagaagcgataacgccattaaactacacatcttctgcgatcgatgatctgcgggcgctggaacgtaattgtctgcatgaagcgccgtattcagcttacgttctgcgcaatgtgataaacctgctggagagcagcgttaaattcatcctgccaaattgtgctgactttattgcgcctgaagatctgcggcagacgcatctggatatggctcatttgccttacccggtagtcgtgtttgaaatcccatgggaaaaagaggggacgcccgagacctattttgataaacagtccctacgttcaactaagcggatcgcattgtgctgggaagcgaaagtggacctggagcctgtacctggaattaaccggatgcttgagcgttttccggagggcggagtttttgtgtgctctgtctactgggttgatgatgataagcgctggcacccgagttacggcgggctcttttacccctatgacaacacgctcaataacgtttctgatttaacctcccgtccgggggcgacaagactggctgtggcctcattacaggacgcgggtctggtgtccagaacgcgcatgaaacaatacaaggctgaacctgtggtgatcctgccagagattgccagccagacagaatctgtactgggaagccgcgataagctttttgcagatattatcatcaactcccgggatgagttacaggcattcatcaacgcctgcagtattctgaactgcgcaaacgtggtggtggatgaactggcgccatcgaacaccagaaaaacgcaatgggtgagaggcaagcgagttaatgtactagagcccgcagtgaggccccgttttacctacaaagtgctgcagattacggatgaacaacgaacaaactcaacgggaaaaggtatcggtgtaggggcgcatacaaagcgtatgcatctgcgcagggggcatattcgccgccttggcgagcgcttgatctgggtacgtccttcagttgtgaatcctggctctgctcagggtgctgtcactaaagattaccagttaaacaagtcatcggattag

SEQ ID NO: 202447 - DNA, 1182 bp, Klebsiella oxytoca
atgaacctaatagccacaatctgtcgttttgctttaaaagacgatccctcacgcgaagtgatcaaagcagttctcaaactgagagatacacttcaaaaagatggtttgattgttgaggctagagcacttagtgctctagtggataaagctgacacgaagaaaaatcttactttagacaacaagaaaataacttggagcaagggcttcctttccggtaaaagtgaaatgactgtatctacacctttaccagttgataaagaaaatagcatgcctttagctgaggttttgtttcctaaagaaatcaatgatttccaagaatttcatttctttgatgacaatattacaagcgctattgatggtattttagctgaatgggaacatgcggaacgtctaagagtgaatggaatacaacccagttatagttgccttttctttggcgaaccagggacaggtaaaactgaattagcaaagcacttagcagcaaaacttaatctccccttagtctcagcaagactggatgctatgttgtcatcctacttaggaactagtgcaaggaatatatcatctcttttcgattttgttgaaagatataattgcattcttttattagatgaatttgatgctatagcaaaatatagagatgacagtaaagaagtaggtgaaataaaaagagttgtaaatactcttcttcaatgcttagacagaagaaaagaaagcggtatagtaatcgctacgacaaatcatgaaaacttgttagatcctgccgtctggagacgttttcagaataagataaaaatacctaagccgacaaagttaattcgcgagaaaataatatcagcttatatttcacctatgatcatatcgaatggtgagcttacatttttaaatataattctggatggttttacaccagcagaaataaaaaactgcattgaatttataaaacgattcaccatcataaatgaatgcaaaactgtagatctgtataatgcaattaaagcttatttcgtaattaatgcaaattataacaatgatataacaaaatctattctttcaggttcagagcatgaattagcaaaaaaccttataaccaaacatgattattcaatacaagatgtatctaatcttattggaaagcataagagtactatatcaagatgggtgaaagataaaaatgaataa

SEQ ID NO: 202448 - DNA, 2391 bp, Klebsiella oxytoca
atgaataaaaaaaatatattgaagataaaaaacagcaaaaaatatatctatagtcctgaagtcattcccggcggagataataaagattttttccacggagatgacgctgcatttgctcgtcacaaaactaaactgatacttaaaacttcattgatatctcagcagatacaagaaaggaaaaataaaaaatttgcaacgataaaagtttcattaaaagaagatgctatagctaaaagccacaggcctacatctgcagtatttaattataaatacccagtaatcggtggtggtgatattggtgagatatacgttcaggttaatgaaaaatccttaccaagtttggttgaacgcctctcccaagctaaggttcaatctgagataaaatttaataagaatggagaaattgttcctaaagtaggaaaattacgaagcgaagttagtgcgattgaaaatattgaattatatacaggtaatgataagtctataatgagcgatatcgagtttgctcaagagttacttaagaataaacgagaaattatcgttgaattgttcactgccaggaaaaatgaaacgttaagcgatggtgaaatttctttaatttataaaaaccttgtggatgaactaaagtcgaggttcccaactattgaattcgtcactgaatcgaggtttttctcggataacataattacactcttcccaaagaataattctaacaccgatgttattgaattactgcgggaattaaaaattaatcccatagtaagaaaatattacctttcaccaattttcacagttgcaaaaaagaatattgacatcgaaaaaaaattaactacattccctaagaaattagctaatcaatcatatccaaaagtaatattaatagacaaaggaataagaagcagcattctatccacttgggtaaatgataaatcagatgcactgggttcagaaattatcgaagattatcatgcagatgaaatggctagcattttaattggttcaaaacatttaaattctaactatgattatttagaagaggatggttgtgaaatatatgatatctggttgccagccgataagtacagtttcgaagatcatttcgaaacgctagctgaatttacagattggttatatcttgaggttcaagctgccagagaaaatggttttcgtgtaataagtatgagtattaattttcaacaaattgtatccaacagtgagtatagtttcttagcagcaaggattgatgaaatatcaaataaacttaacgtaatatttgttatttcggtaggtaacctggaagataaaaaatatcggagcgagtggcctaaaacagaagagcaagttttccgtatgcttgcaagatttcaacaacaagataaagttctgcagcctgctgattcggtaacatccttatctgtgggatctgtcaatcatatcgaaaatgaattaataacctttcaggcacccacaagatatacacgaagaggaccggcgacagcttacggaataaagcctgacttagtgcatattggtggaattggtgatccaaataattcttgttatgtgacactcgatggaaacaatcatttatgcttaaactctcatggtactagtttagcagcaccacatatagcaaaatcgatcgctacaattgattttaaatcaaatgaaagtcttaacacaaatacactcaaagcactactaattcacagtgcaaaaatacctgattgtttatcttcaaaaaacctaggtaaagaggccaaggactttgttggattcgggttcccaagtgattcttctaatattataaatagagatgaagcttccttcacttttatttttgaagatattattaaaaaaggacaagtagctgagtttaactttatatggccagaatctctgataactgcaacaagaaaatgtaaagggaaagttaaaatgtctttagtatatacaccaacaattgataggcagtatggtcaagaatatattagagttaatattgatgcatccttacaacaagaaaaaataaaaaaaacagaaagtaattttagcaaagctgttaattctatttgggataatagacttggttcagatcttaattttgaaaaaaatctgattgaccacggtttcaaatggtggccatctaaagtttatgagagatacagtaaaaatggatttggaaattcatcaaactggcgtttaagggttacatctcaagttcgagatggtgtatcacatcctttggatggtattccattttctgtcataattacaatcgaagatccaacaaaaaaagccactaagatatataatgaaatgagtcagagtttaatagctttaggtgttgtatttcaagatatcactatccgtgatgaggtaagagtataa

SEQ ID NO: 202449 - DNA, 222 bp, Klebsiella oxytoca
atgaagaagtctgaagtggtttacgattttgaacaaattatttatcgtttagacgctttaaagtcggcttcatgcctgaaagcttctcaggtagaaattgatgaaataaaaaaaagcattgatatattaaaaaacaagatcagtttagggataatgttttcaataacgggcagagaaaatcctaccttaccaaaatcagtatgccgattctgcgggaaataa

SEQ ID NO: 202450 - DNA, 237 bp, Klebsiella oxytoca
atggcgattatgacctcgcttagcgatacctgcgtgctctcccgcgccggaatggcgggccttgaggcgatgcggcaaggcgcagccgaggtgctggcggcaggaggatgtgcgacagccagggggcgcgccgcgctggcgcgtctcgacgtgcagatgctggcgcagaacgcctcgccgggtggcgcggcggatcttcttgccgccaccctgtttctcgaccgggtttccgcttaa

SEQ ID NO: 202451 - DNA, 321 bp, Klebsiella oxytoca
atggagatggatattggccgcggcgcgctcacctttaccgccagccccgtggtgccgaataagcactttacgacggcctatgccgcggtgaatatctacaatacgcgcggctcggtggtttatcgccagtccattaaaggttcagcgcagcttggcgactatattgatacggcaatacttgatgaaggctatatcatcgaagtcttccatgccgaagccggcgatcgctccgtcattatcaacccgcaaaacggtaacgcctggccacagcctcataccgtctcctggcaagtcacggccagcgggctgcagcgcctgtaa

SEQ ID NO: 202452 - DNA, 318 bp, Klebsiella oxytoca
atgccattccagcgcaatcgctttgaaggtattttcaacactggcttttttagccaattattctgctttcttttcttctcctgggtcaccacccaaagcaataaccttccgtgcttcttctcgcttcaggcgagcatcagccaaagagatatctgggtaaacaccgatagaaagctttttctctttcccaaaaaatcggtacttcaaacgccaatactttgcgccgttaggttttaccagcaaatacaacccaccaccatcagtaagtttgtattccttctcctttggttttgcagtgtctatctgtcgtgcatttag

SEQ ID NO: 202453 - DNA, 954 bp, Klebsiella oxytoca
gtggaagaaaataacgctcagagcgtaccaaccgaacgagttgacgatcgctacgatcgtcagatgtttcgcattttgcgcaacatagaccttaatttacttactatttttgaagcggtttacgtccataacggtatcgtcaacgcggcaaaaatactgaatatcacgccgtcggcgattagtcagtccctgaacaaactgcgcgccctcttccctgacccgctctttattcgcaagggccagggcgtgacgccaacggcctacgccacgcatctgcataagcatatcagccaggggatggaggcgtttctcaacgccctggatttaaccggcaatacgcagcgggaacgggtaataaccgttgccacctccccggctatcggcgcgttgatcatgccggttatcaccaaaaagctgcggagcgtctttccccagattttgctgcacaacgtcgccattaccgacgcggccagccagttaaaccagcgtcaggttgacctgctggtcgacagcttcccccacagcgggcaggcgattacgcaccatgtgctatttcaggatagcgtacatatcttctgccgggcagggcatccggccctcgcgctccccgcaaactcagcaaacctgagccaatatgaattcgctctcctgcagcccgaaggccagcgctatacgacaatcctgcgtcacctggaggagcatctcggcgaacgccgctatggtttcagcagctacaatctgttaactcaagcagccctggtcaacgacagcgatatgctggggctaatcacttccggaatgttttccctggtcgagaagatttggcccttaaaaatgctcgatttcccgccgctgcgggaagaaaaaattgatattgcgctgcactataacaagctcagcgcgcaggagcccttgctgaaagagatcgtagagacgattcgtcaggctttttag

SEQ ID NO: 202454 - DNA, 525 bp, Klebsiella oxytoca
gtgctgtggctcattaaggccgatgatagggcactgaccgtggacgagcagttctggcacggcgtgatgcaaccttacaggcaaaaggtacagtttgtgattaaccagtccgacaaaatcgaaccctgtcatgaatgggataccctcaccagcaaaccttcaccgcaccaactgggaaatcttaaagcaaagcaggctgcgattatggcgatgtttaaaccgtatcatccggtctgtgtggtgtcagccagcactagctggggtattgaggagatggtggcaaccatgatgcgctgtctgcctgaccgcgccaccagcccggtagcgacacaactgcacgggagactctgcacagagccggtaaagtcgcaggcccgtaacaatttcggtgaagctgtgggccgggttttcgataccgcagaatcatcttcgttcatgcctgcatcgctgaaaacggtgattcgtagcgtgcgtgatgcggtggtgtcggtcgcacgggccgtctgggactggatattcttctga

SEQ ID NO: 202455 - DNA, 249 bp, Klebsiella oxytoca
gtgcgcctgattggcgaagtcggcggtttctatcagaaagacagctacaacaatggcaccagctacaaacaggccggtgagaaatacaccattgcgttgggcctggcggacgggccagactttatgtcacgtccggaattacgcatttttgcttcatatttgaatgattccgaagatggtaaaccgtttgaagaccagacggcgaataatacctggaatttcggcgtgcaggttgaggcctggtggtaa

SEQ ID NO: 202456 - DNA, 225 bp, Klebsiella oxytoca
gtgggctcggtcgagatcctttatctggtgtttaatggaaatctgccctggagcgactttatctggccgttcgccctgccgaccctggcgggaaatatctgtggcgggaccttcatcttcgcactgctgagccatgcgcagatccgtaacgatatgagcagcaagcgaaaagcggaagcccgcgcccaggcggcggagaaagggaaaaaggctgaccgggcataa

SEQ ID NO: 202457 - DNA, 303 bp, Klebsiella oxytoca
atgggcagtaaggtaaagcgcgcgccgaaccaggttccgatagcggtagcgatggcaaagaaccaggcgtgcagagaaaactgtgggataccggtaaaaaatgcggccagattgcagcccatcgccagacgggcgccgaaaccggcgatgattcccccggcgacggcctgcagaatgcggatccggctgcgggggaagcgcagcttgacgttatttgcccacagcgcggcggcgaaacagccgccgaacatgccgatgatcatcatgccgtcgatacgggtgagcggggtgccctcgagatga

SEQ ID NO: 202458 - DNA, 2136 bp, Klebsiella oxytoca
atgtcggtaccgaaccagacaccctataacatctataccgccaacgggctgacaactgtctttgcctatgagttttatctgatcagcgccagcgatattcaggtgacaatcaacggcagcgtagtctcgtctggctataccgtgtctggtgtgggcaatgtcgatggtggggatattacatttctgacacccccagccagtacctctgttgtcttgatggagcgagtagttcctacttatcgactgactgattaccaggataatggcgatcttttggctgatacggtcaacaaagatttcgatcggctgtggatggcgattcagcgtgcgtttatttatctaggcgttgcgcttacccgtcctttatttggcggtgggccattcaatgctaacgggtaccgaatttccaatctagctgatccggttaacgaccaagacgcggctacaaaaaagtttattattgaaaatgctaatgtgaatctggctcggacaataagagtccctgagaataacgtcgcgccattacccgcagttaatgggcgtaagaaaaaaatatttgcctgggatgatgttggcaatccaatcgctgttttgcctgaatctggctctgctgctgatgttctcatagaactggcttccagtgatggcgcaaaactgattggaggtttgagctttctgaccgtcgaaatgtactcgtatctcgctgaagggaacgactggcgaaaagcgattcaggcggctattgaccaggctcaccagaattatcttgcagggagcggtccgactaatattctcattggtggtgagttcactgtcaccctcaatccggactcaacattgatccccggtgaggttgctgcgggccgtggcgcgctgtgcatgcgcagtggtgtaacgctgatgggtggcgggtcaatcactcttgatggcagttttaccggctcatccagcggtgcaatcatcactaactgggaaggcgctgccgataactgcaagatacaggggatcacgtttaacggtagccgtggcaccgctgctggaacgggaattacctgcattaatatcgtggactcggataatgtcactattgataacgttaaggcgtttgacagcacatcgggcggcatttatctgcggcgtgcaaataatacagtttacgggtgttctaattcccggatattaaactgctatgtgcataatgtagggtatatcgggattcagtgtgagcgccccaatgggatgaccattacggggtgtaccgtaacctcctgcggtgataacggcattgatatctttggtaacgtaaccgatgataccggccagggtatcgcggaaaatgttgttatagctaattgcacggtaggtgatatttccgttggaatctttatcgaatcctgcggaaatgccactatttccgcctgtgttatctttgggtttccaaactctggcattttctttaaccggataaatacagcggcgtataattgttcggttacggggtgcacgattacggggaaagatatcactacaagtcagggtatccgctggaaaaacgcagtaggttatactcgcgtatataacaatacgttaaaaaactgcatcgattcctttgtgacaaccggaggcatgatttacgttgatattggggtaaataatcatgaaaacatcggtcgttgcttcctctacgtacctaaaacctcaaacggctgtgtctacacccgaatggcgcagcaggtctacaatggggttcagacggatggcataccctacaatacaacccctcgcggctggccatcaacgaacaacacccgatactaccgttgctcatttaccgcgccgtacatgatgtactccgcgacgacaggcgaggataacttcattcgggccactggcaatttgccttcaaacagtggttgggggccagcttattcactctataactccatcgtggcgggcgaaaccgttattgctatgagcagtgcgcttgtagctgggggtgagtttatgctgattaacggaaattactactctgttcacagcgtaacatcatcttatgcagtcgtcaggaaatgggatgttaccagccaggtagactggccccctgaatctccagacagttggtatcacttaagttag

SEQ ID NO: 202459 - DNA, 315 bp, Klebsiella oxytoca
atggacttgtttgatttattagcaaatcgaggtgttacatcctttttctatttcccagatgaaaaggcaatttacgatagttccggcaaaataattggggtaaagcatcataaaaagcattgttgggtggtctatacccatccacatgggccggcgcttgaaaaacacaaaattgccataagaactgcgctttctaactcagaagtcgatacgcaaaaagaagatacgattagagaatgttgtcacgagataaagacctgtaaccacggaagaacaaaatttatgttgtttggccagccatttgatatcgattaa

SEQ ID NO: 202460 - DNA, 846 bp, Klebsiella oxytoca
atgaaatactatattgctatcccaacatataatggtggggaattatggcatactacagtcgaaagcattaaaaagaatgtccctgaaaatacatttgtgcatgtaattgactcaggtagtaaggatgatactgcagtaatagcaaaaaataatggctttgatgtggtttcaattcaaagttcggatttcaatcatggtggaactcgcaaccaagcgattaataactatatcgataattatgatgtggttatatttttaacacaggatgcgatacctgaacctggttttattgataatattatgtctgtttttcaagatgaagaagttgtatgtgcctatggtcggcaattaccacattcagacgcaagcccattggcacagcatgctaggttatttaattacccaattaatggatatattgcttgtaaggccaacataccatcgatgggcttgaaaacagtattcatgtcaaactctttctcagcttatagattgtcagtctttaaagaattaggcggattcccttcaaatacaatattatgtgaagatatgtattttactgctaaagcaatattggcaggttataaagtagcctacgtacctgaagcgaaggtacatcattctcataattactcaccgatagaagaatttaaacgctattttgacattggtgtattccatacggatgaaccctggattagacatagttttggtggtgccggaggagaggggaaacgtttcataatttctgagcttaagtatttaataaaaaattctccatcgtggatacctgtatcatttctatataatgtgatgaaaattataggtttcaactcttgcccgtag

SEQ ID NO: 202461 - DNA, 1959 bp, Klebsiella oxytoca
atggctgcagatgaactgaatccgccgctgggtacgacgacgcctgaaatctttttagataacgttaagcgggccgatcggttagtgaacgggccggaggaaacggtaaacgatcgcggcggggaaccgctcgatacctggcgtcagatgatggcgaaaaatgatgaagttcggcaaaacatcattccgctgagtaagcagtacatgacgcttgatgcggcccaggccgatatcgtcaatatcccggagggcagcaccacctatgtgcgcagttctgatgatgcttatctggctattgagtacaaaaacactggaggcgtgctgcaacctacaggaagaaccatgatttcaggaaagactgccgtaagacgtacagatgaatactctgacggagttaattacgcctggggaaaggttatgtccagcggggaaatacttccgggtactcttcagggaatggacggattgccagcgcctgaaaacgtcgcagcatacgctgccaaaggtgtggcggtctatcagcttaatcccgtagatattccggcaggacatgcgattatcaaagacggcattgttttgctggaagctgaccagtcagggcgccttaattacctgccaccgctcaatcgtcgcgcgcggcagtcggtgaatcaacgccctgaaatggtcctcacgccgctacccgcatcagtacgcgcggcagtcgaaccactcgccgagcgtgcctgtaaatacatgctttcaacgtgggtgccgacatgggttcccctggctggcggaaccgggcttccagccactggctcgacgatggacagcatagagcaatacccgctgatgctggccgcagtagttcactggataagctggtgtgatgccggttacgcggcctgggatgaaacgtttattggcgtcagttatgacactgccgtttcctggattgttcaggggctggatttagtggtaagtgcgcatctggcaaacggtggttggtggggaggcccgccgccgccgtggagcgaagcctctgaagatgtggcggtaactttcggctcacaggcggcagagctggcgcgtaatgtggccagccactacgacctgatggacgcacacctgacggcagcccagaaagtaaaagtcaccgcaatggtggtgcatgaggctaaccgctttgtgaagtacacgcccaaataccgctggacgcgcccggatatccgggggcaggtgacggataactacccgacaggcgattccaaatcagaagaaatcgcctggaatctggctatcctcgcccgtgcactgattttagccccgaataatgccaatgctgagcgctgggccgagcggctgattacgatgcagattgcagcgctgggcgacagaaacgacctgtccgagacgatgacgattaacgggctggctccctgcgatgtgatgaacgggacaaacgttaacccgacccgcctcgttgaaaaccacggggttgctgatgggcaggacgtgtcccgctggtacacgatggcgtcattgtcaggtagcgagtggatgtttcgcaccttcctgctggccgggaagccagtgccatcggcagccctctggcatatggccgacaccatgcgggcgctggcctacaacccggatggttcggtgtggagcatggactggagggagcctgtcggcgaactgtcctatgcaccggcgattgcctacatgtttgccgagccgcgtcaggactatatcgatacgctgttgcaccgcctggcgatttttgccgggcagcaggacgacactaccggggcgctgcccgccggggcgtttaactggccagtctatggttcttcccagcccggcgaattcctgagttacatccgtatgtctgaccgcatgcaaaacccgctgacctgtccgcgtgccaccaatgcgcattacaccagccttgccgctatttaccggagcgtttaa

SEQ ID NO: 202462 - DNA, 162 bp, Klebsiella oxytoca
atgaacgaaaaattattgaatgacgacgtgaaaattctccttcgtcagatagaagacggcaagccatatgtcgaacttattaacttcatggttaatcagttcggattgacgtaccgagaggcgcaggaagtccatgagaagttgagtcgggagagtgattaa

SEQ ID NO: 202463 - DNA, 864 bp, Klebsiella oxytoca
ttggaaagttcgaccacctttaaaatcttctacgatgctgaagatgatgagttagcacagcataaaattgacgcgaaaactttaagtctttcaattggctcaatggcagaattgatttccaaagcagataaaaatcttaatgacgggcaagaaacagtcaaattaatggttacaacacctgctgctgaaggctcaattggtgttgtttattcaatgatggagttagtccctaatgctataaacgtggctaaagttatcggtttaacggcagcaggaggggcttttattggtgctcccgcgctttcattgatccggcagttagggagtaaaagagttatatcgattactaaaagaccccagacgcatgaagccgtccttgagcttgaagatggggaaattgtttgtaacgatgctgttgcaaaattagttactgatcctgaaatacgtcaagctctggttaacgtcgtaagggctcctcttgatggtaaaaccaatcctgtttttaaaatccttgaccaggaaggtaacgaggtcttgcggcttgagaatgaggaaacagaagaggtaaaacctttacctcgtggtacacttcttgaaaaagaagtatcaatcgatgaggtgaatgttcgattcgtccaagtgaactttgaaggaaacaaaggatggagaattgattaccttggggatgaacattcagttagcctagatgacaacgtgttcctttctcaggtccaagctgcaacagtgcaattctccaaagaagatctttacgttgttgatctagaaactattaaaacgtacacagcccgtggggtaacgcatcgttacaccataaagaaggttaagcgtaagcgcccagcgtaa

SEQ ID NO: 202464 - DNA, 126 bp, Klebsiella oxytoca
atgtttaagctgtgtgtcgaagtgaccactcttaacacgttacataacaaaatgcggaccgcgttagtgatttttttatttcctcacgctaaggtaggtttacaagaacggattgacaaaaattga

SEQ ID NO: 202465 - DNA, 150 bp, Klebsiella oxytoca
atgactaagccaagcgatattgaatctcgcctgatcaaacttgagaaagggccagataagcaagttctggccgctatgaatagtaaggcaagagctattgcaggtagccttttgaaccagattcaggtccaggcgttgaaagatcaataa

SEQ ID NO: 202466 - DNA, 273 bp, Klebsiella oxytoca
atgaaagaaagaaaactcgtaattgaaattgatgacagcgccattgattcagtcatcgaaaaggtgcgcctgctgaaagatgaattgagcagtctcggactgcctgtcaacatcgcaggcgcagtagcagcctcaactcagccagaagaagaaacggacgcgcaagacctctggatctggtgcattagcgagctggatgccagcattactcgggcttattcagagctgacagaacttttgaatatgcgtcgccgcgcgacctcctccgactag

SEQ ID NO: 202467 - DNA, 252 bp, Klebsiella oxytoca
atgacttatatgacgggtgactattcatcttccgacgaccggtatggggtatcgaaatctggatgttttgcgtttattgaaaaaaccattcaggatggagatatatttgtcagcacaataggcgtttatgcggataaagaaaaagaagagaaagtgtttaccttcaatgttggcacaatatctgaggacagcgcagatattttttcagccgcatcggaaacataccttacgggatttaccaccgaagtttaa

SEQ ID NO: 202468 - DNA, 222 bp, Klebsiella oxytoca
atgcgttttgtcatccgggatccgaaaaaaggcagttccggatctgctttccttcccccggcgcgctgcggccccctgacacaagatgtggtaggcctgtcagctgatgcagctaccagatgttgtgtttctcccctgccccgtgacccggggcgcagcagcagaaaacagtgcttcacttacttcctgaccgtggtacacttccggaaacttctgaattaa

SEQ ID NO: 202469 - DNA, 273 bp, Klebsiella oxytoca
atgacagatgtccagctacaacagaaattgtctaattcaaacgtagcaacaatatggatttaccaatcgaccaacaataatggagttgttctttatatccttaattacaacggacatgagttagcgcgtaaagagtacaacacgcgaagcggtggctgggatgatacaactgatccaaaaatgtggttctatccgcttccgaacaatgccaatgacatagatgtacatcctattggagatttcagcttttttatcgctatgtatgacttttga

SEQ ID NO: 202470 - DNA, 231 bp, Klebsiella oxytoca
atggccatcattgttattcgtggcaaccctgacgacagcgcgggcaccatgaataaaaagtgtccgcagatgcttgtcgccactcgaatgctggcgtggaaccagacccagccatgcagcaaagtggcggccattcttaaattcagttcctttgccaatagcagcaacaacggccgtggccgttttagggccaatgcctttaactttggcgatacgctgacaggcttctga

SEQ ID NO: 202471 - DNA, 321 bp, Klebsiella oxytoca; identical to SEQ ID NO: 103996

SEQ ID NO: 202472 - DNA, 2502 bp, Klebsiella oxytoca
atggctctggtaattgaattcatatgtgatttgcccaacggcgtgcatgcgcgtccggcaagcctggtagaaaccctgtgcaatactttttcgtcttcggtcgaatggttaaatacccgcacggaaggacgcggaaacgcaaaaagcgcgctggcgattatcggcaccaataccttgaagggggaccgctgccagctggttgttagcggcgaagatgaacagcaggcgtttgacgcgctgtcggcattcatcagcgaggagttcccgcactgcgatgcgccgctgccgacggcggaatccatggacgttcagccggttcctgaatccctctcgcgcctcaatcccacgctgtttcacgcccagccggtctgcgccggcagcgcgggcggcaggctcacccatcttaaatccctcgacctgcgcgattcaggcgcgctgcccgcagcgggcgcaattgaacaggaacaggcggcgctggacaggggcctgaccctgctggtgaaaaatattgagttccgcctgctggataacgacgggaccgccagcgcgatccttgaggcgcatcgctctctggccaccgacgcctcgctgcgccagcatctgctgggcgggctgctgagcggcctgagctgcgctgaggcggtggtcgcgaccggcgaacatttttgcgcccagttcagcgcttccggcaatagttatttgcaggagcgggtgctggacgtgcgcgatgtttgcttccagcttctgcagcatatctacggtgaggatcgttttccggcaccgggtaagctgacggaagaggctatctgcctcgccgatgaactcacccccagtcagtttcttgaactggataaaaccctgcttaaaggtctgctgctgcgcagcggcggcaccacttcacatacggtgatcctcgcgcgttcgttcaatattcccactctggtgggcgtcgatatggaggcgctgctgccgtgggtcgatcggcgagtgcagattgacggtaacgccgggctggtggtggtgaatcccgatgaagcggtggcgcgctactaccagcaggaggcctgggtgcaggcgcagatccgccgccagcagcaggcctggctggataaagcggggcgtacggaagacggtattcgcctggaggtggcggccaacatcgcccattcggtagaggcgacggcggccttcaacaacggcgcgcagtcggtaggcttgttccgcaccgaaatgctctatatggacaggcccagcgcgccgtcggaaaacgagctgtataacctattttgccaggcgctggagccggccaacgggcgcagcattatcatccgcaccatggatatcggcggcgacaagccggtggcctacctcaacattccggcggagaacaacccgttcctcggctaccgggcggtgcgtatttatgaggagtatcaggcgctgttccgcactcagctgcgggcgattctgcgcgcttccgcgcacggcgcgctgaaaatcatgatcccgatgatctcctcgatggaggagattctgtgggtgaaagagcagctggcggatgccaaacagtcgctgcgcggcgaacagattccgtttgatgaaaagatcccgctgggcattatgctcgaggtgccgtcggtgatgtttatcatcgaccagtgctgcgaagagattgatttctttagtatcggcagcaacgacctgacccagtatctgctggcggtggatcgcgataacgccagggtgacgcgccactacaacagcctcaatccggcttttttgcgcgcgctggattacgcggttcaggcggtgcatcgccagggtaaatggatcggcctgtgcggcgagctgggggccaaaggttccgtgctgccgctgctggtggggctggggctggatgagctgagcatgagcgcgccgtcgatcccggcgaccaaggcgcgtctggcgcagcttgacagccgcgcctgccgtcagctgctgaatcaggcgatgcagtgtcgtacttcgctggaggtcgagcacctgctggcccagttccgtatgacccagcaggacgcgccgctgattacccctcagtgcattacgctgaacagcgactggcgcagtaaagaggaggtgattaagggcatgaccgacaatctgctgctggccgggcgctgccgctatccgcgtaagctggaagcggatctgtgggcccgtgaagcggtgttctccaccgggttagggtttagcttcgccattccgcacagtaaatcggagcatattgagcagtcgaccatcagcgtcgcccgtctggcgcagccggtggcgtggggcgacgacgaggcgcagtttgtgattatgctgacgctcaataagcattcggcgggggatcagcatatgcgtattttctcgcggctggcgcggcgcattatgcatgcggagttccggcaatcgctggtgacggcgcagagcagcgaggcgattgcggcgctgctgcagcgcgagctggagctgtaa

SEQ ID NO: 202473 - DNA, 1077 bp, Klebsiella oxytoca
atgaatgaactggtgcaaatattaaaaaatacccgccagcacctcatgaccggggtttcacatatgatcccgtttgtcgtgtccggtgggatcttgctggcagtctccgtcatgttgtacggcaagggcgctgtgcccgatgccgccaccgaccctaacctgaaaaaactgtttgatatcggcgtggccggcctgacgctaatggtgccgtttctggcggcctatatcggctactccatctccgaccgcgcggcgctggctccctgcgccatcggcgcctgggtcggcaacagcttcggcgccggtttcttcggcgcgctgattgccgggatcattggcgggctggtggtctactacctgaagaaaatcccggtgcataaggtgctgcgctcggtgatgcccatcttcgttatcccgattatcggcacctttattaccgccgggatcatgatgtggggcctcggcgagccgattggcgcgctcaccgccagcctgaccggatggctgcagggcatgcgcgaaggcagcatcgtgattctcgccatcatcatgggcctgatgctggccttcgacatgggcggtccggtgaataaggtcgcctacgccttcatgctgatttgcgtttcccagggcgtttacagcgtggtggccatcgccgccgtcggcatcgccgtgccgccgctgggcatgggcctggcaacgctgattggacgtaaatacttctctgcggaagagcgcgaaaccggtaaggccgcgctggtgatgggctgcgttggcgtgaccgaaggcgcgatccccttcgccgccgccgacccgctgcgcgttatcccggccaatatgatcggcgccgccgccggctgcgttaccgccgcgctgctcggcgcccagtgctatgccggctggggcgggcttatcgttctgccggtcgttgagggtaaaggcggatttattgccggcctcgcggttggcgccatcgtcagcgccgcctgcgtcatcctgcttaaggccctggcgaaaaagaaaacgtctgacgccaaagccgatgacgagatggatcttgatttcgaaattaactga

SEQ ID NO: 202474 - DNA, 321 bp, Klebsiella oxytoca
atgaccaaaattatcgccgttaccgcttgcccgtctggcgtcgcccacacctatatggccgccgaatcactggagagcgccgctaaggccaaaggctggcaggtcaaagtcgagacccagggctccatcggcattgagaacgagctgaccgcagaagacgtcgccagcgccgatatggtgattctgaccaaagatatcggcatcaagtttgaagagcgttttgccggtaaaaccatcgtgcgcgtcaacatcagcgacgccgtgaagcgcgccgaagccattatgaacaaaatcgacggccacctttcgcagaatgcctga

SEQ ID NO: 202475 - DNA, 2298 bp, Klebsiella oxytoca
atgaccaatcgcactcaacgcttaaaagatcgtctgttcgccaacccgcgcgaaatctccctcgagcgagcgctgctctacaccgccagccataaacagaccgagggggagccggtaatgatccgccgggcgaaagcgaccgcatgggtcctcgatcatgtgcagatttcgattcgtgatgatgaactgattgccggcaaccgtacgatcaagccgcgcgccgggatcatgtcgccggaaatggatccctactggctgctcaaggagctggaccagttcccgacccgcccgcaggaccgcttcaacatcagcgaagaagataagcgcatctaccgcgaagtgctgttcccctactgggaaaatcgttcgatgaaggatttcattaacgcccagatgaccgatgaagtgaaggccgccgtcagcacgcagatttttagcgtcaaccagaccgataaaggccagggacatatcatcatcgactaccctcgcctgctggaaaacggcctcgccgcgctggtggcggagatgaaagcggtgagtcagcgacacccgcagaacaatttttatcaggcggtgctgatcctgctggaagcctcccagcgccatattctgcgctatgcggcgcttgccgatgacatggccgccggctgcggcgacgggcagcggcgcaaagagctggagaccatcgcggacatctcccgccataacgcggtgcaccgtccggaagatttctggcaggcctgccagctcttctggtatatgaacatcattttgcagtatgaatccaacgccagctccatttcgctgggtcgctttgaccagtacatgctgccgtactatcaggcttcgctgaatcgcggccaggatccgcagtttcttcaggagctgctggagtcgctgtgggtgaagtgcaacgatattgtcctgctgcgctccaccagcagcgcgcgctactttgcaggcttcccgaccggctataccgccctgctcggcggtctgaccgagactggacgcagcgcggtcaatatcctgtcgtttttatccctcgacgcctaccagaacgtgcgcctgccgcagccgaacctcggcgtgcgggtcaacgagctgatcgaccgtccgttcctgcgcaaaaccgccgaaaccattcgcctcggtaccggtattccgcaaatctttaatgatgaagtggtgatcccggcgtttctcaatcgcggcgtctcgctggatgacgcgcgggattactcggtggttggctgcgttgagctatcgatcccggggcgcacctacggcctgcacgatatcgccatgttcaacctgctgaaggtgatggaaatcgtgatgctggaaaacgaaagtaaccctgacatcacctgggatgggctgatcaaccagatccgcgacaagattcgctattacattaggctgatggtcgaaggcagcaatatttgcgatatcggccaccgcgactgggcgccggttcccctgctctcttcctttattgaggattgcgtgcagcacggccaggatatcaccgaaggcggcgcgcgctataacttctccggggtgcagggcatcggcatcgctaacctcagcgactcgctgcacgcgctcaaagggatggtgtttgagcaaaaacgcctgagcttcgccgaactgatcgcggtgctgaaagccaacttccagacgccggaaggggaaaaaatccgcgcgcgcctgatcaaccgcttcgagaaatacggcaacgatattgacgaagtggacaacatcagcgccgatctgctgcgcttctactgcaaagaggtagagcagtaccgcaacccgcgcggcggtcgctttacgccgggctcctataccgtctctgcccacgtgccgctcggctcggtcgtcggcgccactccggacggacgcctggccggagagcagctggcggacggcgggctgtcgccgatgctcggccaggacgtgcaggggccgaccgcggtgcttaagtcggtcagcaagctggataactttctgctctccaacggtacgctgctgaacgtcaaattcaccccggcgacccttgccggcgacggcggcctcaataagctggccgacttcctgcaggcattcaccaggctgaagctgcagcatattcagttcaacgtggtcaacgccgatacgctgcgcgaagcccagcagcggccgcaggattttgccggcctggtggtgcgcgttgcgggctacagcgcctttttcgtcgagctgtcgcaggagattcaggatgacattatccgccgcaccgcgcatcagctgtga

SEQ ID NO: 202476 - DNA, 876 bp, Klebsiella oxytoca
atgacattatccgccgcaccgcgcatcagctgtgaggtcctggaaacgcgcgccgataaggcgcgcatttttaatatccagcgctactctttgaatgacggtcaggggatccgcaccgtcgtgttttttaaaggctgcccgcatacctgtccctggtgcgccaatccggagtcgatctcgccgcaaattcagaccgtacgccgggagagcaagtgcctgcgctgctcccgctgccagcaggacgtggtcgagtgcccttccggcgcgtggcagcagattggccgcgacgtcaccctcgataatctgcttaaagaggtgctgaaggatgaggtcttcttccgcgcctccggcggcggcgtgaccctgtcgggcggcgaagtcctgatgcaggccgaattcgccgcgcgcctgctgcgccgcctgcgcgaatgggggatcagaacggcgattgaaacggcgggcgataccgcctaccgccgcttttttccgctggcgcaggcctgcgatgaagtgctattcgatctaaaaatcatggatgaaacgctggcccgcgagcagctgcggatgaatatgccgcgggtgctggataactttacccgtctggtggaagcgcatattcacgtgatcccccgggtgccgctgattccgggattcacgcttgatgaagcgaatttccgccggattctggcgtttttggccccctttaagctgccggaaattcatcttctgccgttccatcagtacggcgaagccaaatatcacttactgggaaaaaaatggtcgatgtcgatgattaaagcccctgcagaatctgagattcagccattcaggacgctggccgaacgggccggttttagcgtgaccgtcggcggataa

SEQ ID NO: 202477 - DNA, 342 bp, Klebsiella oxytoca
atggatttcactatcgttgccgtcacggcctgcgtcagcggcgtcgctcacacctatatggcggccgagcggctggaaaaagtcggccaccaggagaaatggaatatcaaaattgaaacccagggcgcgctgggggtggagaacaaaataatggccgacgatatcgcccatgccgatgtcgttctgctggtgacggatattgaaattgacgatgccggacgctttagcggcatccgcaccattaagaccagcatcaaaacctttctgctgcagccgcagcagattgtcgacgcggtgaaatgcattatgaaaaagccggtggtttatcttgagatcccgtga

SEQ ID NO: 202478 - DNA, 210 bp, Klebsiella oxytoca
atggctggctatattgccgattatcaggcaactaaaaatggacaggtaatttattctggaacactggcggttgagtcagaaggaagtgactccgcaataaagatggccgttactgcagagctgaatgcaattcatataaaatatggtggaggtattccggataacgtgactgttaactcatggctggaaattgaatcaaacataaaatag

SEQ ID NO: 202479 - DNA, 690 bp, Klebsiella oxytoca
atgaatttagtcgggatttcgtataattttaacttcttcactaaaaataactcaataaaggcagatagtgagtcaatatataaactcatgccttttatcaatgatggctttatgccgacgactggcgatgaaataagtgaggagggtgatagatataaagtaattcgcgtacaaaaagaaaataaagatttaaacatatccattacattctctaaaagagcaattttagtacagataacaaaagataaagagatagacaacgtaaatttaatggacatagttagttccacattttcaaagctgagagagacgctcggagacattaaaggcgatcgtactgcctgcattgcgaatgcaatacttgaaaacgataaagaaacagaagaaaaaatatataaaaaattcttttctgatgagccatcttattttgaatgggcgctaagaaaagcgagtagattcattattgaaggtgaggaatccaacagcgttttagctgtaaataaaggactgggaactaaacaaaacaatgggacaggtaatattactcaaatagaagtcattgtggtatcttgtgacaataataccattgccgaaaacaacacgcctagatttgaattgaataatattagcattttcaatgagttactaaagaaaacgaaaatggatttagataaagtcattggaggttaa

SEQ ID NO: 202480 - DNA, 600 bp, Klebsiella oxytoca
atgctttcctttatagattatataaaaaaaagcgctacacctaacattgaagacattcaattcaaaggaagcgccaatcttgaagtacccgagacaaaggttaagtctgatctttttaatgagattttaaaatcatcaaaaataaatagtagttcatctaatttctcatacttagatgacacaaagctttctaattatatatacaatacttttttgtatgacgatataagctatgaatctacaccaaaaacaaagtatgtgatagagaatatctctagggagttaggagtgcaaaaagtagattatgctctccttgatatactaagcaaaaagatattcaaatcttctgatgaggatatcgtgaagtttttggctttattatcctcttttgatgttaaaactataccattaacttcattgctttccgtgactagcttgtactcgcacaagagtgatgttgtgaaagaaagtgtattatccactgtggaatactgggagtggccagacatagtacagtatctagaaagaatggaagattttaaaagaccttacttgcagaaatacaaagaagaggtcattgagaatttaaggagtttataa

SEQ ID NO: 202481 - DNA, 522 bp, Klebsiella oxytoca
atgaccctgtattacattaggcgcataaaccctttgcggtggaatggtgatctaccaaaagacggaaattatctatctctaggtacagatgggattacgaactgctgtaaaaccactgacaatgaactatctatctggttaactgacagtaaaaacccagaaagcgaaaacaacaaaaaagtcttagctgtgattgctgcaggatctgaaaaaccatcaaaaattgattttattttcataagcgaagatgaatttaatgaacggaatctaaccctaaaagaaacacccggtaaaactgctgtttcatcaatgcgttaccttcacagggacattgagaacttagatgtgaaaaagctagctattctaggaatgcttatccatgaaaaagctaacgatgataatgaaattcacagagttagcacatctaaaataaaacaatatgttaggcatgcttttaaagatggcaccccacaggctgaagagataaaaagcattgatggttggtcaaaattatatgactga

SEQ ID NO: 202482 - DNA, 132 bp, Klebsiella oxytoca; identical to SEQ ID NO: 104006

SEQ ID NO: 202483 - DNA, 276 bp, Klebsiella oxytoca
atgaccatcgaccgctggctgctggttacccaaaacggcaaagcgtttggctggttcgacacccatcagccggcaacagcaattacccacgacaacatcaatctgggggcgacgttccaccagcaagggagcccgttgcgccatttactggacgctgcactgagctcgcccaaccaccgggccgtgatcgtcgatgaacggcaaatcccgcaggggaccatccacctcgatcaagtactcgacatgtgtaaatccacgcgcaaggagggagcatga

SEQ ID NO: 202484 - DNA, 306 bp, Klebsiella oxytoca; identical to SEQ ID NO: 200797

SEQ ID NO: 202485 - DNA, 480 bp, Klebsiella oxytoca
gtgaaaagcaacctgaagacaattaagacgggtatcacaacagttgctttgctgctgacactttctcccgtgacctgggccgggacgctcgatgaagtaaaatccctctgggacccacagggtataacaggcacggtgccggcatcatcttctggcgtgcccgctgccgtgaagccggtctctcaggcccgatggtaccggctcagcaacggcaaacaggtcaatctcagcgactggaaagtggtgttgtttatgcaggggcactgcccgtactgccataagtttgacccggtgctgaagcagttgtccggacaatacggattctcggtgttctcttatacgatcgacggacagggggacgaggcgttccctgaagccctgccggtacctcccgaggtgatgcagacttttttcccgaatatcccggtggctaccccgaccacgtttctggtgaatgtgaaggcactgttgcaaagttag

SEQ ID NO: 202486 - DNA, 381 bp, Klebsiella oxytoca
atggtacagaccgcaaccctgctgcatgccgaagctgaatgcctgctgggcatcggcttcgatttccgtcagtctgaagactctggcgtggtggcgatggccacggctggcgatttcgtcagcgatattgttaatgtccagcagcgccgactggccgcgaatttcggcgacaaaagtaccgaccccctgcatccgcaccagcaagccctccgcggtcagttctcgcaacgcgcggttaatcgtcattctgctatagccaaacagcgtgaccagttcgctttcagaaggaacacggtaattcgcgggccatgccccgctgtggatcttggttttgatcatggcctttaccctttcataaaagggggcgggatgttcaagtaa

SEQ ID NO: 202487 - DNA, 405 bp, Klebsiella oxytoca
atggtacagaccgcaaccctgctgcatgccaaagctgaacgcctgctgggcatcggcttcgatttccgtcagtctgaaaactctggcgtggtggcgatggccacggctgacgatttcgtcagcgatattgttaatgtccagcagcgccgactgaccgcgaatttcggcgacaaaagtaccaaccccctgcattcgcaccagcaagccctccgcggtcagttctcgcaacgcgcggttaatcgtcatcctgctataaccaaacagcgtaaccagttcgctttcagagggaacacggtaattcgctggccatgccccgctgtggatcttggttttgatcatgaccttaaccctttcataaaagggggcgggatgttcaagtatctcatccacggaatccgaatttga

SEQ ID NO: 202488 - DNA, 411 bp, Klebsiella oxytoca
atggctttcgtatctctatcaacgatggctgcgaaaactggccgtatggtacaaagcaaccacgttactgttactcaaactaaacgcgccactggtgctgttgaactgggattcagaattggtcgcactgccatggatgcaactggtatcgaaacaggtgaccgtgttgatatcctttacgacagtgaatcatcattgtggatgataaaaaaaatcccagagggtggttttggagttgcaggacaaaagaataaagcaggtgagtattcatcctgtgcaatcagaatcacactacggccagggtttcctcgcctgtctgatgatgatgatgcatcggttaagcagttttcacaggattcagacactcagatggagaaaggacaaattatcttcaaattgggtgatgagtag

SEQ ID NO: 202489 - DNA, 564 bp, Klebsiella oxytoca
atggaacacttaaccattcctcctgcggtcgctcgtaatgagcttgcgttaaaattttcggctcacccagcagttttggtgatgctcaatcgtatgaagaattcacagattgttgttttgtgttcacttcttcggggtgaccgtttgacttctgctggaaacaatatcacggctgattttgaagtgactcgactcccagcgatcattgagattcttgagaagaaatacttcatccctgttcagcactgtaatgtcattacgacatcggttacagcgcggagtgcaacaactcaaacattctatgtaatgggcaaggacactatctctcagattctttctgagcctgaagccgtttttcaggagaagcggagagccttggttaaaaccgaagccttgaaagctcagaaaaaactagatggcttaattaagaaacatggcggagtcaccgaaaccttactgtatctcactcatcatgcctacaaggataaaatgttaagtaatgaagagtggagggagctggatgagaagttcattgagattttgaatgaactaaacgctgcatag

SEQ ID NO: 202490 - DNA, 369 bp, Klebsiella oxytoca
atgagagaatctcatattcatgcaggtgaaaaggtattagtgctgggagcgggacagttgggcgcagccgtactcagctcattaatcccggcggtcaagcgacaaaatggtaccgtcgcggttatcgtgtcgccaggatcgtggggcgatcggggggagttgctttctgctagccatcaacaactggcggcggcgggggcagaatttattgcctgcgacgtagccgctggtacggttgcatcgttaacgggcccgtttgcagagtttgataccatcatcaactgcatgggctttattgctggcacaggaacccagataaagattacccgtgcggtactggaggccggagtgaagcgctattttccctag

SEQ ID NO: 202491 - DNA, 225 bp, Klebsiella oxytoca
atgaaaatcgattatcaggactatggcgcggtagcaaacatcgttatcaccagcaccgtacatgagatccgtaagcataaccgggtggtcgacgccaccctactctgtacgcctgacatcatagaaaaccgtagcggagttgtactggtgaaatcggtgttatccgggcggacgaaagatatgctacgcgcctacaaaaccgtgcagcgggaggctaagcgatga

SEQ ID NO: 202492 - DNA, 831 bp, Klebsiella oxytoca
atgaataacaaaactgacctgaaaatcattagcggtgtcccgatgatgagcagtcgcagcatcgcaaatgtcgttaaaaaagaccacggaaaagtttgtcgggatatccgcgtgatgttgggaaagctttacaacatctcagaagaagacagcacccgtaatccagaactggcttacctcacaaaacaaggggttacatgcattcaatacgatacagataatcctaatgcatgggaatactggctcgattatgagcactctcaatgccttgtcgctggttatgacgcgtcacgtcgtatgtcgattattcgtcagtggcaaacattaaaagaagaagtgaagcaactgcaaactccggctcaatcaacacaacaggaaatcagcatgaattatgacatcctttcgctggcccgcgtcgtggccgaggcaaccgcatcagcgacaatgaaagcggtgatggatgtagtcagcgtcaaacaggtagcggttactgctactcctgcagcgcctgcacctgctattgcagcacaaccagaaacggcaacccctgaaagcgagttcgtacgcgtcgtcaaaatcgcctgggaaaccaccctctcagatggatcctgtcgccgtcttatcaggttcgccaatctgcctacgcaaaaatataaaggcagtcgggggctactggtacatcgcggtgcattcatgcaggcacttgggacactgatcgaagagtcactacctccaggggagggtcgtaagcgctggaaacatccagagttcggcggttttgagcttcataaagatctcaatgaaattctcgggggcaaccactgtgaatag

SEQ ID NO: 202493 - DNA, 216 bp, Klebsiella oxytoca
atgaaaactcccttacaaatgcttatagatatcgcgagtgaaatgacagacgcggcaattactttagagttgatttacagaaacacggataacacgtgtgaaacagatagcggtattacttgcgttgtccgctccctgttaagaaccaacgataaagctcaggagtatattgaacagttgagcgatgcatctccccccccaacaggaaaaaggtga

SEQ ID NO: 202494 - DNA, 192 bp, Klebsiella oxytoca
atgaaaaacttcaaaggactttccctcgaatcagtagacgcacttaaaaatatcagcgccattattgaagtcggtcatttaatgacgtcttgctctgataaagaatgcgaagagatcggtgatgtggttatcgactttgcgcgtcaatatgcagctgctgcacacacatatgcactggaggaaaagaaatga

SEQ ID NO: 202495 - DNA, 213 bp, Klebsiella oxytoca
atgaataacgagaaacttttttcacataacgagataatccatgatatagccatggacttagaccgtgttattaacactctggaatacgcggaagcagattcaaatacagcttataagcccgctgcattaattcagatttgcatcaatcaacttagagccaacctatcaaccattaataaaaagtttggtcatgactgggtagaaaataaataa

SEQ ID NO: 202496 - DNA, 666 bp, Klebsiella oxytoca
atgaaaaaacactggcatgaactggctaaaaccagacttacgacgcttggtattacccaagcagaactcgctgagaagatgggcgttactcagggtgcgatggggcattggctgaatgggaggagaaacccttcccttgctgaggttggcgcaattttccagatacttggcatctctggggctctaatcaaccccgacggaacgtttaccgtatcagaagatttgacgctaccaccggtgaagcagcagtatgaataccctctttttacaactgtacaggccgggcagttcgcagatgttggaacgttcactgagcgcgatgcacagcaatgggttcctacgaccaggaaagcaggccccaactcgttttggctggaggtaagtggccattcaatgactgcaccgccaggaatgagacctagcttcccggagggaatgttaattttagtagatccatcggaagatgtggaaccaggtgacttctgcgtagcggggatacacaacgattctgaggtgacattcaagcgctatgtacgtgatgatgggcaaccttggctggaaccactcaaccctaatcctcgttatcaaagtataccctgcaacgagaactgtaggattatcggcagggtagttaaagctcagtggccggaagacaccttcgactga

SEQ ID NO: 202497 - DNA, 813 bp, Klebsiella oxytoca
atgaaacttgaagcatcacttaaacacttcagccctcagggcatgcacatcagcgacgacgtgaaaagcacatcaccgaatcgcctgaacggtaccgacgtcatgaccgggatcggggtgaccagcagcagggcgcggttcgggctggcggctttcttcggtaaggctggcatcagtaagtccgatgagcaactggctgttcaggcgctggcgcagtttgccatcaaaaacgctcctaaaaatgtccgcaaagccgctggtgacaagctcggagcctgcatgttgacgctggcgcagtttgcctttgcggagtattcccgttcagcagaaaccacgggagcatgcagggtatgcaatggcaccgggaagtttaaaactactaccacagatcgtaaagtcacgtatccgtggggcaaagcgccatattgggcgaaaaggtcacgcgctgttcgtccgtccgactgggagaagtggaccgaagtaacaaccatcgtcaacggtaagtgtgaagcctgtgacggtaaggggaagataaacggccgatgccgctgcggaggttccggccaggtgctggaccgcaaagcgacaaaagagcagggggcgccggtatataaaacctgtgagcgctgttcgggtaatggctttaccagcgtaaaatctgcggacgcccaccgcgcaattcagttgcatattccagacctgcaccagtcctcatggtcacgcaactggaagccgttttatgaaggtctggtggatacattacacaacgaagaaatgcgtgcggaaaaagcgctaaactcattcattggttaa

SEQ ID NO: 202498 - DNA, 1191 bp, Klebsiella oxytoca
atgatttttacacggctaaaatttgttaacctgtatgcgtttgcaaatgcagaattgaatttgtcttacccgagaaagccggtaaacatgccacttgatggtgagtttttgctgggaagaccaagattttattacaaaaaagtctgtatcgtcactggcgggaacgcctcaggtaagacttccttaggccgaatcctgtgtggcattcagttgttccttagaacgaaagaactaaggacctcactccgtattgatgacaaatctcgcgatgcttcatttgaggtagactttgcaacagaagattttcggcatcatcgaatctatgtgagatttgcagtgaatgatgaagggactttcgtaatcaaagaaataaaatatgcctcgttgcgtataggattaaatgattcatgcttcaagactacggagaggcttaatcagttatttttaggcaaaaaaaacacccaatctgaagagtactttgaatgcgcagatgaaagtggtgaaactgttattcttgaacaatttaaaaaatataaatttttcggcggatggtattatttgctttccgagactaaagaaagtaccgcgggtatatccggagttaacaaggatattcttgagagaataattaggacattcgactcaagcattatcggtgtatccgagatgcaggagtccaacgaaaatcaagataatgagaagccagcatcagtattcttgatacgtttcaaaaactcagattctcttgttgtgaccagcaaaggagacataacaaacagtgaccgactgtcgagagggacgtttgaagctgtaacgctatcacattttgtaagcgcgataataaatgatcatgaagtcctgaaagatagtgagttaattccgtctatgacctactttttggatgaaaaattagcatttacgcattctgaattagagaggatgattgttgcattaataatctccaagcttaaagaaaacactcagtttttttatactactcataatatggatgtatttgaattagaccttccagttcactcatttatttttatacggaaatcggaaggtagttcagaatttgtagaggctggctctgtgctaaagaagaacgacagaagcatgagaagtgcagttgagagggatgtttttggtgtgttgccagacacttctttagtatcggagttattataa

SEQ ID NO: 202499 - DNA, 528 bp, Klebsiella oxytoca
atggcgccttcacctaagatcagaataatccttgttgaaggtgagacagagcattcactatttcagaaaatgaaacaagctaaaaaaattagcgttaaatcaatagttaagaaaaatctctggcaagagaatattaaaaactatgcaataactataccccgaggaagtgagttgttggtcgtttttgatacagacgatgttggacagtttgagcgatttattggaaatgtcctttttctaagccgtcgtgggcataatgtttatcttttgcagcagaaaactaactttgaagaggagttagcttggtgttgcggaaagactataacgagacttatttctgaattttgttcgaaaaaaacctccggcatcaatgattttaagagagattttattgcttgtaacaatccaatacctaaacttgttaagctagggctagaagataccaggtggttttctagggacttgcatgaatctctttatccgcttgaaaaaatgaaatcatgctttaagaagcatttctccatctga

SEQ ID NO: 202500 - DNA, 462 bp, Klebsiella oxytoca
atgagccgattaaccaccattattatcgccgtggttatctgtctggttgtctgccttggggggcttgccagtcactaccacaccaacgctactgaatataagcgccagcgcgacgagaaaacacaggcgctcaacctggcgaacgccaccatcaccaacatgcagacccgccagcgtgatgccgctgcactggatgccaaatacaccggagaactggctgatgcgaaagaaaccattgagcgtctgcatagcgatgtcattgctggccgtaagcggctgcagctcaacgccagatgtaccgcgaacggagcgaccagcaccggcggcgtgggcgatgcttccggcccccgacttactgactccgctgagcgggattattggagtctccgagccggaatcgtcaccatcaccgggcaagtgaactacctgcaggactacatccgcacgcagtgcctgaaatag

SEQ ID NO: 202501 - DNA, 429 bp, Klebsiella oxytoca
atgacacaacaaaaattcgaaggcctcgacggctatcgcttcaatgagcttggaccaattcccggagccagtgagaggggtctggatggtgaggctcgcgagttaggtgggaatcttcaggtattcaaagtcaaaattgaactggataccactgatgttgaaaaaacgatcgcccaggtaaataaacaattcggtgattttctgaaaaccttaaaggtagatgagccagtttatcacgttgtcttttataaaaaatcgggcggtgtcgtcgaagggtttcagccgaatgaaatgatttgcccgcaatcccgcttcttcattgccaacgccacacctgaactggaggggaaagttttagtagctgctgatgaggtttcttgtgtgatctcgatgccatatcgcccggagaaaaagaccagtacagcatag

SEQ ID NO: 202502 - DNA, 759 bp, Klebsiella oxytoca
atgactaagcctgactgggaggccataaaagcggcgtaccagactggcgaggcagtaagaagcattgctcgcagatttggtgtttcgcatacggcgataaataatcgagcaaaggatgatggctggaaaaaggtttccactggaaagtttccactggaaactggaaaccagaaacggaaacctgagaaggccagaaaaggcagggcctcgggggctgtttccaccacagcaaatagccagaatccaccagatacgaaaccgattcgcggatcgcgtaccgatcctccgtccaacccattcaagcccggtaaccagcatgcattaaagcacggtggttatgcccgtcgccttcttcttaaagatgaggttatagaagatgctcgagccctacagttggaggatgaattattccgtctcagggctaataacctgacggcagctgagaatataggccgctggataaccctaatggatgatgcggaaagcgatgaggcgcgggacaaacttcaggcactgatagtggcggcagacaaagccatgatgcgcaacacagtacggattgagtctatcgtcggcactctggccacggttggcaaaatctttgctgatactgactaccgcaaggccgccactgagaaggtgtctcttgaggctgatcgcctgcgccgtgatgctggtattgatgatggtaacggagagcgcgacctcaatgacttctactctgacatccagaccgacgctgaatccgactctgcgtaa

SEQ ID NO: 202503 - DNA, 162 bp, Klebsiella oxytoca
atggatgtttctgattttggcataaaaatatcaggcccttatgtagagaagcttaaaattgccttccgtctttttctgagtggtatttggcttgcaacaaatcacgatgtaaccgtggttttaagcaagacatatatccaaggttgcaacaaagatcagtaa

SEQ ID NO: 202504 - DNA, 138 bp, Klebsiella oxytoca
atgaaaaacggtttagaaatcgacgcgccggtgacgaaagaaatcagctcagcagccgcatgggctatcagggcagtcgctgttaccgtcgttctgtatggcgtcgcccgattaattatggctattcgctggtggtga

SEQ ID NO: 202505 - DNA, 171 bp, Klebsiella oxytoca
atgatggggttttcgtcgccagcagctgattatgtagaggacactctcaacgtcacgaaactgtgccgcatggatggcaactctcgggctgtaaaaacggactccggctacgccattctgggtgtgtcgataactccgggttttccaaataaaaataagaacccgccttaa

SEQ ID NO: 202506 - DNA, 1434 bp, Klebsiella oxytoca
gtggcaaaagcaaaaacttcatcaaaaccgatcaaaggaaatatatttgaattttacgtacctaaaatatacggatctaggccaaggcctaagcagataacagacaaaaaagatccaaccaaaaaggtttacgataaaagtaacccagcaaaatttttaaaaaagtcttttaagaagacgacaagcgtcccattcggaagtggtcctaaaaaagctctatcagtgagttacccggcactacccctgccacacattgtacatgcagcacttgagtgtgggtacggtcgtatagggatgtggtcctctaatcttcttctgaatcataaagagtcacttgaacttgcttcttatttactcaaaaggttattaatggtggcttcatgcatcaaagtcgataaaaatgatgcttatttcacacaaggattttattcaaaaatagaaccttcagaaaaagttgcaatctcatttatagcaggtggtataggaagtttcattgcagcatatcactggcttgctgctgcgggtgaaaaaattaatgttatgttgcatactagtatttatactaaaggtttgtctccttctattaaaacaaatcctttaaccgctaaaaagtcacccgactatcttattgagtctgacagtggagcatggcatatttttgaaagtaaaggtggcacagatgttgggcgtcataaaaggattcaggaaggtttactgcagcttggtataataacgcaccttggatggacttcatccactttacctttaaaaaaggtgcaaacaaatgtgtgtacacatacatgcattgatgctggcagtcgtttgaaggtgttagcctatgatcctccgggtgagaataccgaagaagggcaaaccatcattcttgatgaagccatttgcaaactacttaaaatcgttgaaagcctcgatcagtttcatgtgcttggcacagaagtgagtactgaagatggctgggaatggaagactgtgccgcagataaacaacatacgggtggctctgccatctcaatacttcgaccttgaagagaagcttagaacacggcttgggttatattttcttgcggctgagagtgtggagaagtataaaaaaagagagctgtggccggtagaggttaccattcgcaccattgtccaaaaaataactgactgtaaatttgaagatcaaaacaatgtaatggcagaggagtttaagcgttttgttatagaattaaatgaagttgaagaatcctctgtttttattacatgctgtcgtcaacatcttaatcttgatgaaacattcaatgaattcactgctgtattagaaaaagttattattcagccaaatctttcaaaaaaaattcacagtgaagttaaaaactcagatgttttgacgtcaagcggtatgttaattagagaagtgaataatatagaataa

SEQ ID NO: 202507 - DNA, 732 bp, Klebsiella oxytoca
atgacagacattattcaagaaattaaatccatattgagtacagaatcatttgcgtttctcataagtgtagcgtcaatttcaattgctttagtttcagttttattattgaaagatagaaaaacacgctacaatgaaaagctcaatagaattgaactcgactttgttcgttcaaattacgaaaacaaaatatatgatttaacagagaaactaaattctgaaaaaagcagatggatggacaataatcatttttttgcaaatatgccaagtgataatagggatattactaaaattaatcaagcaataaaccccaattttttcctagaaaatatgggcgtcaagcctgaaagtattaacataaagcccaagagtgtctttatattaacagcctttaacgatagatatcttgaagactataaatcaattgaaagagcatgcattgacattggtatatctgtgtcaagaggagatgaaacacgtataaatggagatattttatcttatatagtttctcaaatatgctcagcgcaattaatcattgctaatatctcagggagaaatccaaatgttttctatgaattgggcatcgctcaagcgttaggcaaaccagtggttattgttagcaaaggcgcgaaagatataccttttgatctaaaaaataggcaggttataatttacgacaatccagcagaccttcgtcttaaggttcaaaaggcagtagtaaatgcattataa

SEQ ID NO: 202508 - DNA, 141 bp, Klebsiella oxytoca
atgattgcgggtaaggggtatctgttcactgatgcctcgtatcttaaattcaggctaacaatcaaagatataaaaccggatctactggtctggcaagcaactcgcattgcgtcacagttttgctacccgctttatgattaa

SEQ ID NO: 202509 - DNA, 759 bp, Klebsiella oxytoca
atgctttcagaaaagcaattatttgaacttattaaagcattacagtcgtcaaatttctcgacagcagaaattatttggttaagcctcgccgtcgttgtcgcagctctaataatgagttttatagtttcgattgttactgaaaaggctaaaatttcagcaaccaattccaactatgaaacgctgcgggaacagttatctataaacaccactactattaaagacatagagaaaaagataacttccgaattatggatttctcagcaggtctggcaaaaaaaatatgatatgtatgaatttgtttatgcacaattgctagcgattaaaaaatgggcagataatgagtttcatataattgagcttcatatggctcctgggtggatagcgagcagtcaccagccctattttaatgaggcgcaagaaaagcaattttataaagaaattcaacaggctcaagcggacattgataaagcaatgaatgataaggatattcagagcaaaaacagagaactacaacaaaaattaagcattgcaatgacatctttaactgaggttttaataacaaaagcaattcttttaaatactgatgtaactttaatcttagagagattaattgagagtatcggtttcgaaccttccccattggattatgaagagccagatgactatggttacagaataaaatcagctattgatacagccttgaaagaaataagagcgacagcaatctctgatctagaaattaagcatcaggactgttag

SEQ ID NO: 202510 - DNA, 1122 bp, Klebsiella oxytoca
atgagcgaaattaacactccaattttgatcgcaaatttcaaaccattcaggctaatatctcgtgatgactctgatgtatggactcctagcctagaggaaataaataattctacatatgactatgtgaaacttcacagagcaagcaagttcttcaatgcacatttacctaaaccaatgccagcatgttttggattcgacggaagcttaatatttccatttattgaagagtttaaaaatgataatttagttgttgaagaggttaatagaattttagcttctatatttatcggtggagtttatgtcgaatcaatcgagcctttagatgtgtcaagaggtgtaatgaatgttacaggttactaccgtcattactctactcatagcagtaatgctagtttccatcatgcaattggagagtgtgatgcaggttcattggcttctatcaaattgctcgaacctgagattataagtgctgataagattatatcagcatatgactatggacataaggttctgtccaaactaccaacgttatctccctcactctttatcggtgcatttacatattataaaaaacaccaattgtgcgaggcattagcgcacacctggattagtatagagcaaatattagagtttatttggaaagaaacaatagtcgaagatgcaaagtctgttaatatttataagagacgaaagtttattgaatcacaacaatggaattcagcacataaaatagaaatgctctttcaaaacaaatatttatgtcaggacggctattcgttcttaagtaaggcgcggtttgccaggaatgactttatccataagggattaacaccttcatatgaagaatctcactcggcgttaatgtcgctaattttacttatggaagttgcttcaaaaataaatgaagttgattttgaacgggctaacttagataaaaacctgtcagataattcaatacattgtattccgcaaacctttactcctaaaaaaaatgaaaaaaatacccttgatgtgaaatattggcgagaaatgaaaaagattccaggcgataaaaactgggaaggggagttcgaatcatacccagatattactttatcagcgattggtacaagtgaagattaa

SEQ ID NO: 202511 - DNA, 951 bp, Klebsiella oxytoca
atggaaccgactaaacctaaactttttatttcttattctcatgatagtgaagagcataaagcatgggtgttaaagcttgcgacccggcttgaacaaaatggagttcatgtaatcctagaccaatgggatattacattgggaagtgatcttactcttttcatggagcaagggcttacaagcgctgaccgagtgcttgtcatttgtacagaagcatatgttgctaaagccaatatgcaaaaatctgggggggtaggttatgagaaaatgatcatttccagtcagataatgcgagaattggacagtaatcgcgtaatccctgtaattgttaataactcattacctgtgccagtcccaaccttcgtaggtgagcgccttcggctttatttcgatgctgtgaattatgagaatagttatgcagagctgatccatgatttgcatggtgagaaaatgaaaccacgcccagcggctggacctagcccattcagccgcaaaccgcctccgatcaatcctgtcaatttatctcaaccagatggggctaaccaatcaccaacaagcacaggcaaagttacatttgtaccaaatggaaattatgactcttattgggttggctctggtgaaatgctttttgagacaaagtggggagttgggggacgtaatcaagcctacatttacaagcgtcagccaagtctccattccttagtatttgctaaaggcattaccgatttcaatcaaataacagatgccaattctgaagtattcttcaagagtgacgatacagaatcgcttgaagttggcgatattgctattattcaaaatattaatggttattatttggccgttaaacttgaaggaagtctttatcgtagtcgcaatgccgatgatcgtaatgaaataacattctcatatgtcatcgccccagcaaaaagcacctctttcgctggtatagtttag

SEQ ID NO: 202512 - DNA, 684 bp, Klebsiella oxytoca
atggataaagggaactctcaggccgctgacgttgcatgtgccatacaacggtgtgaatgttgccgttcacaactggaagcgcactccttcagttacaaaccagtccccacgacggatgaagatggaatgcgctttcatgttgtgttaactcaggtgtcttcgggcggggcgccggcgaccaaccggcacaacccctacagtattaatccaggtttactggacccccgacgccgtgggttaaacggctgctgtatgtcgggtgagtttctgttgctggtggtcaatccagctccgcaacccctcccgaagacacctgtttttaatcaaaacttcaaattacgcaccaggggggccgcagttgagccgcctgacatttgtactctgatacggtttactgatggtttgctacgttcttcgcccgtaaagctgttaaatgtgcataaccctaggactaaacgagggacaccgtgtagaactacaattcctccagcttttggtagcttgcggtatgccttacggcgttgtgctgaattcatcctgaagcctctgctgtctggttgcttagcgaatcatcccggccttcatatgccccgggcggctacttcgtgggcgtcctgcctgttcgctatcgatgcaaccaacgataatatgaagttgcgaattacgcaactaaaaattgcgtaa

SEQ ID NO: 202513 - DNA, 420 bp, Klebsiella oxytoca
atgcttgatgtcagtgcgagcgctggtggtggatttattcagggcagtgatgttattgatgtcataaggtctattgaatacaacaacgaccaagccatgactttattcggtggcagaacaccagactcagtgaaggtcattaacgttcggggcgacagcatggctgacactattcagcctggagatttgattttcgtcgatgtttcagtcaatagctttgatggcgatggcatctacgtctttggtttcgatggcaaaatatatgttaagcgcctgcaaatgataccagataaaatgctcgtgatttctgataatccaaaatacagagaatgggaaatcgatcgggctaatgaataccgcttttgcgtttatggcaaagtaatgatcagccagtcacaagccttcaagcgccacggctaa

SEQ ID NO: 202514 - DNA, 1935 bp, Klebsiella oxytoca
atgcgtgagattatcgttgataactttgctggcggcggcggcgcgtctaccggaatcgagctggcgattgggcgcagtattgacatcgccatcaaccatgatgaaaacgccattgccatgcacaagacgaaccacccggatacgctgcattactgtgagtctgtatttgatgtcgatccggtggcggcgacgggcggaaaccctgtaggtctcgcatggttcagcccggattgccggcacttctccaaagccaagggcgcgaaaccggtaaaaaaagagatcaggggactggcgtgggtcgtcattcgctgggcgctggcgaagcgtccccgcgtcatgatgctggagaacgtcgaagagtttaaaacctgggggccgctgctggaggatgagatgcgcccggatccggcgcgtaccggagaaacgtttgctgcattcgttggcatgttgtctaccggcattgatccggatcatccggcgcttgcggaggtgtgcgagtttctgtccatcgcgccaggtagcgagcatgctttgtctttgattcaggggctgggatacaacatcgattaccgcgagttgcgcgcctgcgacttcggggcgccgaccatccgcaaacgtttctttatggtgatgcgctgcgacggtgaaagtgtacgctggccagcgccaacccatggggatccgaaatctttggaagtacagagcggaagactggcgccatggcgaaccgctgctgagtgtatcgactgggatattccggcgaagtctattttcgaccgaaaaaaaccgttggcagagaatacgctgaaacgtattgcgcgcggcatacagcgcttcgttattgagagcgcatcgccattcatcgtgaagtgcaaccatacgaccactaaaggcaaatatgattgtttcagaggacaggcgctggacgatccgctacaaacgattacgaaaacccacggctacgcaattgcggtacctcatctgacaaaattccgaactggagccaccgggcagccagtctccgaaccgttaccgacggtaaccgccggcacgtctaagcgcccgggcgggaatgggcatgcgttggggattgttgaggcgggtctgatcccgttcctcgcgggaaacggtggtagtgaatatcaggcgaaaccacggccgctgaataaacccgttcacaccgtcctgaaagagtcgcgcgcctgtgtcgtcgctccgattatcgcgcgccagtttggcgccagcatcgggcaccgggcggatgagcccagcgcaacaatcacagctggtggcggcggtaaatcgcaactggtgacgcctactctgatccagatgggctacggtgaacgtccaggccaggagccacgggtactgaagctaaataatcccctgggtacggtcaccgccggcggcaataagtttgcgacggtcagcgcgttcctggcaaagcactacggtggaaattataccgggccggggatcggccttgatgaaccgacgcattctgtgacgacagtagatcatcacgctgttgttgcctctcatctggtcaagtttcgtggtacatgccaggacgggcagccactggacgacccaatgcctacgatcaccgctggtggccaacatgtaggagaagttagaaccttccttgaaacgtactgtggagaaaacccaaatgaatggttggtgacgatctacggcgtcaaatatcagattatcgatattggaatgcgcatgctgcagcctcatgagttatacagggcacagggatttcctgcggattacattattgatcgcgattaccgcggtaatcgttatgcaaaagataaacaggtcgctcgttgtggaaacgctgttcctccaccattcgctgaagcactggtaagggcaaatttaccggaaatgtgcatacctgagcagagggaggttgcatga

SEQ ID NO: 202515 - DNA, 1059 bp, Klebsiella oxytoca
atgagggctttacttactcccgaaatcgtaccgcgccttggcgttgtgcttttcaaaccagggcgagaacttatgcggctcttttctgccgggcgtgtcctggtagaggctgagccacaaaatatggcccggttgccgtctggccgggtaccagatgcccggcagccgttggcagaggatcccacccttcatgcgttcttttccgatgagcgcgtgatccaggctgctggtgggttatcagcgctcgaacgttggcttaattaccggcataaggcatgccagtatcctcactccgaataccaccacgctgagttggtaaccatgcggtacccgcccggtgcgcttctggtgtgctggtactgcgacaataatttgcgtgaacagactacagcggaactccaggatctggcgctgaaaaacgtcatcgactgggttattgataccgtactgatcgcccttggctacaacaaagaacgctctctttctctcgctgagctgtgttggtgggctgtgcagtctggtattgccgacaccattacggagaccatggcgcagcgcgctctgcgtatgccggaggagccatttttatcagtttataaagaaagcgacattattccgatgccagcggccaccagcgttctgcaggagaaagtgaaacctgcaggagttgcgacgaagcgcaggaataacgaattcctgcagaccgagcagcaggcggagattctggcattaaaggtagatcctgaatcaccagagtcgttcatgctgcgaccgaagcggcgccgttggacctgtgagcagtacactcgttgggttaaaacgcaaccctgcgagggctgccgccgcccggcagacgacccgcaccatatcatcgggcatgggatgggcggtacagcaacaaaagcacatgacctcttcgtgatcccactgtgcagagtgtgccacgaagaattacataccgatcttgcggcattcgagaagaaatatggcacgcagttagaactgtttgcgcgtttcctggatcgggtgctggcgatcggcgcaattataaaagcatag

SEQ ID NO: 202516 - DNA, 279 bp, Klebsiella oxytoca
atgacgcaaattaaagccattctggcatttctcactgcggcagttcttctgctcatgggtgtatttggtttgggcagaatgagcggtcgtgaaaaagccgaagcggaatctgagaagaaacgtacagaagagaatgccgccgccagcgtcgctgcggcagaacggaaagaggaagccaccagggaagccagcaatgtacagcagactgttagccatatgcatgatgacgatgttgatcgtgagttgcgcgaaaactatacccgccccggtggtggttga

SEQ ID NO: 202517 - DNA, 201 bp, Klebsiella oxytoca
atgattaaaaagaatatgcaccttcaaatggaatcaaatgcccaaacaatcgacgaattgaacaaagaaattgggcaactgaaatgtgtcgttggtttcttaatgactcaattaccaccgcaatctaggcaggctgtcatcaataatcttgaggagtttggacttgatgagtcagttaaggaatttactcagttcctttga

SEQ ID NO: 202518 - DNA, 1722 bp, Klebsiella oxytoca
atggccacatatccgaacgtcaatgcggcgaaccagtatgcacgggatatcgttggcgggaagattctggcatgtcagttaactattcttgcctgcaagcgacatcttgatgacctggaacgcgcgaaggatccgaactggccttaccggttcgataaaaataaggcagagcgatttcttcgttttgcacaaaaaatgccacataccgcaggggaatgggcccgccgaaaactcagaatagaatttgaaccctggcaaaagtttgccctgggtgttccgtttggctgggtaaataaaaaaagtggcctgcggcggttcactgagatctatatcgaagttcctagaaagaacggcaaatcagcaattgccgctgccgttggcaattatatgttctgcgctgacggtgaacatggtgcggaagtgtactgcggcgccacgaccgaaaagcaggcctggaaagtgtttgctccggcgttgttgatggtgaaaaagctgcccgcattgcggcagaaattttctataaagccctgggcaaaaaaaatgactcgcccggatggctccatatttgcacccgtgattggcgatcccggtgacggtgattcgccgtcatgcgccattatcgacgaataccacgaacatattaccgatgccctgtataccacgatgacgacagggatgggggctcgcgagcaacccattacgctcatcatcacgacagccggttatgacattacatcgccgtgctatgagaagcgggaacaggtggtggagatcctgcgcaaaacccgcaatggggaagagaatgagggcattttcggcatcatctatggtctggatgatgatgatgactggactcagccggaagcgctcattaaagccaatcccaattatgggatatcggtaaaagagcactttcttcgcgcaaaacagttactggcgatatcgaaccccagtcagaccaacaagatcctgaccaagcattttaatcgttgggttagcgcaaaaacagtcttttacgatttacagaaatggatggctgctgctgacaagagtctgaaattgtctgattttgccgatgaggaatgctggctgggaatagatctagcgtcaaaggtcgatcttaacgccgttattcctgtttttcgtcgcgatatagaaggtattacccatttctactgcgtaggccctatgttctgggtgcctgaagacaccatctattctgtcgacccgaagcttaagcatacctctgaacgttatcagtcctttgtgggacagggcgttttaattccaactgagggcgcagaagtagattatcggctgattttcgaatccatcctgcagttacgtcagaacgtgaaaatcgcccagtgtcctatcgatccttatggtgccacttccttgcgccatctgcttgaggaagagggactggaacccgtcgaaatcagacagaacttcacccatatgagcgaccccatgagagagattgaagctgcactggcgtcggggcgattccatcatgacggaaatcccatcatgaactggtgcatccagaacgttgtaggtcggtatttgccgggcagcgacgatattgtccgtccgacaaaggaggggaaacaaaacaagattgatggtgcggttggtttaatgatggggatagggcgcgccatgttgaacagcgcagtcatcaaatctatctatgatgaggaagacgtagcgtgctaa

SEQ ID NO: 202519 - DNA, 1263 bp, Klebsiella oxytoca
atgtttattccccagatgtttgaaggtaaaaagcggtcggtatcaggtggcggattctgggaagcaatgctgggtggtgtccgttcaagtcacagtaaagccggtgtcacgattacgccggaaacggcgcttgcactttctgctgttcgtgcgtgcgtaaccctcctggcggagtccgtcgcgcagctgcctgtcgaactctatcgacgagataaaaatggtgggcggcaacgtgcgacagaccacccgatttatgacctgattcattctcagccaaacaaaaaagacacttcatttgagtactttgagcagcagcaggggttgctggggctggagggcaattgctactcgatcatcgaccgtgacggtagaggctacccaaaagaactcatcccaattaacccgaaaaaggtcattgttctgaaaggcccggacgggatgccctattatgaaatcccggacatcggtgaaacgttaccgatgcgcatggtgcaccatgtgaaagtcttttctctggatggctatatcggcagttcaccgattcagacgaacgcagatgtactcgggctgaatctggcagtggaggagcatgcatctgccacattccggcgcggaacaacgatgagcggcgttatcgagcgtccacaggccgccccggcaatcaagagccaggagaagatagaccagctactggctaaatggactgaccgatattctggtatgcgtaatgccttttctgtggcgctgctgcaagaaggaatgagctacaagcagatgtcgcaggacaacgagaaagcacagctgctgcaatcgcgccagtggggcgtggaggaagtgtgtcggctctacaaaatcccgccacacatggtgcaaatgcttgcgaaagcgaccaataacaacatcgagcatcagggtctgcagttcgtgatgtatacgctcctcgcctggctgaaacgccatgaaggggcactgcagcgtgatttattgctggccagcgaacgccgcgacttgtatatcgaattcaacgtttccggcttactgcgtggcgaccagaaatcgcgctatgagtcatatgcgctgggtcgtcagtggggctggttatcgaccaacgatattcgccgcatggaaaacctgccgccgattgagggcggggacagatatctgacaccactgaacatggtcgacagcaatcaaatcctgccaggcgataaaattccgacggcaaaacaactggctaagattgaagcgattctggctcgttaa

SEQ ID NO: 202520 - DNA, 348 bp, Klebsiella oxytoca
atgttctcaaattatgatcctaatcagccaatgaagccgactggcagtattagaacatacagccaggtggcatttagagtatttctgctgggtgccgatgaagaagatctcacccggcgttgcaagagtgtaggatggcccgtcgagcggacgaagttcaaaaatcacgagtgccttgctgtatctttctccgaatattttccagcagaacaggaaaaaaactttgctcagcttggcttcaaaatgttttgcaaagaaatggactatcccaggaaagattcgaggggcttcgacgatgtgaatgtagagttcactctcacaggacgacaatctacctctatagaataa

SEQ ID NO: 202521 - DNA, 921 bp, Klebsiella oxytoca
atgaatatcacaaacctaaatctgccgcatcttaccgcccaagtgtttggcgtcccgcattacgtcacgcagcaaacgatggatgccgtaaaggccgtgttgctcccgcgcattcagggaacagtgacggacccggttttcacgatggcactcaatccggatggcaccccgactcctgagcaggtccagccagccggtggcgtggctgttattcctgtacatggattactggtgccgcgtcggggacaaataacgcaagcctgtacggagctaaccagctatgagcgtattcgcagtcagttgcacgcggcgttaaacgattcatccatcagcgaaatcgtgctggatataaattccggtgggggttacgcctccgggtgtaaagaactggcagattacatctatcagtcgcgagagacgaaatccattaccgcgattgttaacttcaacgcgttttcagcggcttattttattgcctctgcctgcaataaaatcgttattagccagaccagcggcgtggggtctatcggggtgataatggaacacctggatacatcgaaaatggaagagaatatcggtgtaaaatttacctccatgtatcgtggagataacaaaaataacggtacttctcatgagccactgagtgaagcctctctcgcaatgtacgacaagatacttgacgatatgtaccagacattcacgacttcggttgctgaatatcgagatttagatttacaggccgttattggcacacaggcagggacttttttcggtgccggtgctatttctgctggtctggccgatgaagtttcagaccctcagtcggcgatcaatgctattgcggcgaagtacaaaacgcctcaaaaagccggttccatcaagctgcaggcggcagcgatggacctgcaaaccagaatgtaa

SEQ ID NO: 202522 - DNA, 285 bp, Klebsiella oxytoca
atggcaggtaaatcgaccaaaccagcggcgaccgaagacggttcggatgtcgaaggttcagaaaacactgctgaccaaattgtggtcggagcgaacacttcggggcgtaaggccgtcgttttcttaggccctcatcatcgatattcgcgcggcgatacggcctgctttgatgcagtccatgctgaagagttggtcgaacgtcatatcgcggtatggccggaagacgcaaagaaagcgatggccccccgcaagggagaaagtgattttgatactgacattggatga

SEQ ID NO: 202523 - DNA, 318 bp, Klebsiella oxytoca
ttgatactgacattggatgatgtgaaaacccagcttcgcctggagctggatttcactgagcacgacgccatgctcacgagaatggttaacgcggcacagcgaagcatcgagcgtgattacaactgcaagctggtcaccagtgatgaggcgctgcaagcgctccctgataccgtccgtggattcgtggcagatgaggatatcaggctggccgtgcagtatctggtcagtgatgcatacctgaatggccacacagggcaatggctggaaaccgcagcagtgaagtatctccttttccctattcaggagcataccgtatga

SEQ ID NO: 202524 - DNA, 435 bp, Klebsiella oxytoca
atgctgcctgcaggcacgctaaccaaatgggggaaacccggcgacgcgctggcggcgctgaagccgcttgataactgtaaagcgttgggtgcgatgggccagaccggtgggttcgttgactgcaccacgctgaaggataagcaaaagcagtcaatcagtgatctgccggatggcccggaaaagtcgctggggttcattgacgatcctgcgaatgcgagctttacggcgttacttaatgcggcagaggctcgcgagaccattcagctttatgttgagctgccgaacaaacgtaccgcaacaatgctgctggcgttgtctggctggcagatgaatgaaatcaccgcgccagcgagtgaagtgattcagatcaccgtgcaaggtaagcaaaacagcattaagtggggtactgccggtgccgatgctggcggcgaataa

SEQ ID NO: 202525 - DNA, 3393 bp, Klebsiella oxytoca
atgcgcggcagtcatgagggcattaatgtaatggcagacgtcgcatctttagcggtcgggctgcaccttaacgcagccaactttaaatcccagcttttgggagcgtatggcgacgcggagaaccagtcaaaaaggtttaaccgcaatgctcaggcggacgcgaaaaagacggaagacgcctataagaaggtcggcctttcgatatccgggatggccagcaggctggcggggctggcaggaaccggtctttccataagtacgatcatcacaacgtccaggcagtatggccaggcgctatccgacctgcaggcgatcaccggcgcgaccgctgatgagatgaaagcgctggatctggccgcgcaggaaatggggcgaacgacagagtacagcgccagccaggcagctgaggcgcttaagctgatggcatcggctaagccggagttgctaaaaacttcagatggtctgcagcaggcgacgaacagcgcattgattctggcgcaggccgcaggaacgacgctcccggatgcgacccgaacgctggcgctgtccttgaaccagtacggagcgagtgcgcaggaagcagatcgttatatcaacgttctggccgctggcgcgaagtacggctcatccgaaatcacggatacggcagcggcgataaaaaatggcggtgtcgcagcagcgcaggctggcgtcggttttgaacaactgaatgcggccattcaggttctggccgaacgtgaggttaaaggtggccaggcaggaacggcactgcgtaacgtcatcctgaatctggaaaagggcacggacaagagcctcaagccatccgtggttggtctcagccaggcgctgactaatttgtcagggaaaaacctctccacggctcaggccgtgaagctgtttggcgtggagaacctgaatgcggcgtctatcctggtccagaaccgttcaaagattgatgagctgaccgcttcactgaccggtacaaaaacggcgcatgagcaggcatccatcagggttaacaacctgaacggtgatttgctgggtctgagtagcgcatttgaagggatggtcatcaagattggccagagcagtaacggtccacttcgcagcgggattcaaacagctacggaggcgctaaatggcctggcggataactttaacaccgtctccagtattgcgctttacagtctgattccggttctttccacaaaattaaccgcagggcttcgggaaaatatcgctgcctggcgggaaagccaggcggcggtaaaagcgagagcgcttgccgatgcggatattgcccgtaaaacgctggattcaaccgcagccatcctgaagcaaaatgatgccgagtttggtcattatcgccagatggaacggacggctaaacagtacgggatgaatatcagttaccagaatgagttcgaccggcttattcgacaggaaactgagcaaacgaacctggccagccaggctaagcagaaactggcagcggcgaaccggcagatgtcgatatcagcccgcgcggcctcagctgctgtaagcctggcaagaggcgctctggctttcgttggtggaccgcttggcgctgcgacgctggctggctccgcgctactgtacttccatcaacaggcaaaagaagcccgtcaatcggccattaatttaaaagacgctgtagtcgaaaccagtgaagcgctaatgcgcctttctctgaaccagctaaatgtgaagcaattcgacctggaagataagtatgaaaaccaggttcttcagcggaacaagctgatgaaagagattcgggacgctgacagccgcatcggcggactaaaaggttttgacccttttggccagcttgagggggttaaaaaggatcaggtacgggcgcgggctgacctggatagcgttaatgaagggttacgtaaaacagaggaaaacattaagcgcgtcagtgatgcaaaatcactggctcagcttggattgtcgggaaaaataaccaccctggttgatgatctgaaaggcgcgatggactcccctcccaaggatactggagacggtaatccctggagtggtgaaggtggtaccggcacaggaaaaggtgataaggctaaggtcgaccagttcaaaacgctgcggcaacaaattgaagaggctcacgcatccagcctggcccgaattaaccttcaggagaaggacagcaacaaggagctgagggaagcagcgaagaaaaatggcgccagcgatgctgacctgcagcgcgcgcttttgatgaatgcggagaactatcagaagcagcgactggatctggccgcacagtattcacccgcgcaggaaacattacgcaaggagcaggaagccagccagaatcttgccgaactattcaaagcccgccttcttaccgaaaaagattaccagactgcccgaatcactctggccagggacacagccaaagagcttctgcaggcgcaggctgacgaaattgctgctcctaaactggatatcgccggtgaagtcgatcctctcgtctccctgcgcaatcagctggcgcaacgccagtcgctgctgcaggcgtattacaccggcaatgccatcagcaaggatcagtacgaaatgctgatgcagaaagcgacgaaagagtcggcagatgcgcagtatcagacttcgctggagttgtaccggtcgcaaggggagctgcagagccttgccgtcgggcttcttgagacgacgcaggagcgttccacaaatatgttgaccggaatgctgacaagaacgcagagcttcagagacggcatgattggactgttttcctcgctgacgcaggcagtcattaaaaacctggtggatatggctgctcaggcgctggttaccagttccattatgcaaaccattatgggcgtggtggggattgggacgagtattgcaggtggtatttctggagccgcctccggagctgcttctggcagtacggggacggccattcagaatgcagggaacaacttccagtttgattttaactctaaaggcggcgtctacgattctccttccttaagtgcctacagcaaccaaatccacgacaccccgcaatttttcgcttttgctaaaggcgcaggtgtatttggcgaagctggcccggaggccattatgccgctgacgcgtgccggtgacggctcgctgggggtacgcgcggtcgggggcgcacagagcgccagcaccacagaagggccaaaggtctggatcaccatttctggtgacaaaacctcaaccgatagtacatcgggattcgaggagtttggccagcaaattgggtcgttcgttgagaagaaataccgtgagctgcaggcgaaagatatgcgcccgggcggtgctatctggaacgctgtaaaaggacaacgctga

SEQ ID NO: 202526 - DNA, 594 bp, Klebsiella oxytoca
atgcaagaagtaatgacaagaatagagttaatcggaattcttggtaaaaaatttggcgcttatcatgagcgccttgtaagtacgacgagcgagggaattcaggctctatgttgtacaattgatggctttgaaaaatttcttaataatagtaaagaaaaaggattaacctttgccatttttaaaggcaagaaaaatatcgggaaagatgatttaggcttccctgtgaatggtgatgttatccgaattgttcctgtcattattgggagcaaaaaagcagggattcttcaaacaatcctcggtgcagttattgttgctgcaagtgttgtatatggtttcgttactgaggattgggtaaatgctgcgtatggtatacaagcaggcggagccatgatgctaggcggcgtcgtccagatgctttcccctcagcccggaggtctagcccgcagagaatcacccgaaaacaaagcctcttatgcctttggtggcgtcacaaataccgcatcacagggctatccggttggccttctttacggcaaacgacgaattggcggcgcgattatttccgccggaatttatgtcgaagaccagcaatag

SEQ ID NO: 202527 - DNA, 10719 bp, Klebsiella oxytoca
atggcaaataacataatcaaagggcgcaaaggtggcagctcaagccagcgcacgccgacggagcagccggatgatttacagtccgtagcaaaagccaaaattctcatcgcgctgggcgagggtgaatttgcaggtgaattaacgggcaaggatatttatctcgatggtaccccgctattaaatgccgatgggtcagagaacttttccggcgtggcctgggaatttcgtcccggaacacaggcccaaaaatatattcagggtattccgggtactgaaaatgaaatcagcgtcggaacagaaatatccagtgaaaccgcctggagccatacgtttaccaatacccagctttccgccgttcgcgtccgcctgaaatggccttcactgatgaagcaggaagacgacggggacgtggtggggaatactgttaaatatgccatcgatttacagacggatggcggagcatggcagaccgtgctggaaacggcggttaccgggaaaaccacttccggctatgagcgcagccaccgcatcgacctgccgcaggcagggagcacatggacgctccgcctgcggaaagtctcgccggacgcaaacagcgtcaaaatcggcgatgtgatgacgctgcagagctatacagaagtaatcgacgcgaagctgcgctatccgcataccgcgctgctctatatcgagttcgactccagccagtttaatggttccatcccgcaaatttcctgtgagccacgcgggcgcgtgatccgcgttcctgataactacaacccggagagccgcgagtataccggcacctggaccggcgggtttaaatgggcctggacggataacccggcatggatttattacgatatcgttgtttcagaccggtttggcctcggcaaccgtctgaccagcgcgaatatatctaaatggacgctgtaccagatcgcacaatactgcgatcagatggtccccgatggtaagggcggcgatggcgtggagcctcgctatctctgtaacgtctatgtccaggaacgcaacgatgcgtacaccgtgctgcgcgattttgccgccattttccgggggatgacctgctggagcggtgagcagattgtcgtacaggcggatatgccgcgtgatgtcgactttaactacacgcgggcgaacattattggcaaaccgcgttattcgagcagcacaagcaaggcccgctacaccaacgcgctcgtctcctggtccgacccggcgaatgcgtatgctgatgcgatggaaccggcgttcgtcccggagctggtttcccgctacagctttaaccagctcgaagtgacggccattgggtgtacccggcagagcgaagcccacaggaaagggctgtggggcattctgacaaataataaagaccggatggttgagattgatgttggtctcgatggcaaaatcccgcagccgggttatatcatcggccttgccgatgagttgctggccggacgtgtgaatggcgggcgtatcagcgcagtcaatggccgggtgattacccttgaccgggatactgatgcaaaagccggtgacaggctgcagctgaatctgccatcaggcatatcccaggcccggacgatccagtcagtcaacggtcgccgacaggtcacagtcacgacggcgtacagtgagacgccggaggtggaatgtgtctgggtgattgagtctgacgatctgtatgttcagcagtaccgcgttatcggggttaaggacaacaacaacgccacgtataccatcacgggcgtggcccatgacccggataaattcccgcgcatcgataccggcgcgatcatcgaccagcgcccgataagcgttattcctccggggaaccagtcaccgccggaaaatatcgtcatcagctcgtattctgtggtgaatcagggcatcagcgttgaaacgatgcaggtgcactggaatgcggtgaaagatgcgatttcgtatgaagcgcagtggcgacgtaatgacggtaactggattaacgtgccgcgcagctcgaccacctcgttcgaggtcagcggcatttacgccggtcgttatctggcccgtgtccgggcgatcaacgctgcagaggtctccagcggatgggcatactcagaagagaaaacgctgacaggaaaaatcggtttgccgtcggcaccgctggcgctggccaccacttccctgctgcatggcgtgcagctgaactgggagttcccggaggggagcggcgatacgcagaaaaccgagctgcagtacagtcctaatcccaacggcaacggggcgatggcgctgtctgatgtggcgtatccgggcaaaacctatcagcagatgggcctgcagattgcggcgatgttctggtaccgcgcgcggatcgttgaccgtatcggcaatgaaagtccgtggacttcctgggtgcaggggatggccagcgacgatatcggtgagtattacgacaagctgaccgaagcgattaaggacacggaagcctggcaggaagcccagcgggatattgaggagactcataaggagctgataaaaaccgccgaggctattcgtgaagaagtcgcgcagcaggtcaccgatattaaccagagtattgatgattccgcgtctgagatccgccagcaggttgacggtcagatagagtccgtcaacacgtcgataacggagaatatcaacagcgtaaatcagacgctcagtgacaatatcacggcagtcaacaagagcatcaccgatgccgtgagcgatattaatgcctccgttgaccagcagctcgctgacgttaacaaaaccctcaccgagggggatgctgcgttaaaatcccagctgcaggcggttgaaaacagcctgaaacagtccatcgcccaggcgaatacaggctgggacaaagcggtaaaacaggagactgccgaccgcattgcggacgtcaacgcgaaagcggcgcaggcggcagaccagctgctgaatgaaaaaaatgagcgcgtggcggctattgataacctgcagacggttatccaggatggcgatgagtcactggcccgtcagatttctgaaatttccgccggtagcgggcagcagtttgattcgttcagtatctggtatttcgataaagacaatgaggggtggaccgaggacgatgccggtcaggtaccgatgcaaatcacggatgacggctggctgaaagcactgaacagcaccgcctcctgccgctcacccaacgggcaaactattccggcttcctcctatcgcaccgtcatgctgcgtattaaacgcgtgggtaatccggcatggaaagggcggctttactggattggtacagaggaaaccggctggagtgatgcccgctcggtgagtatcgcggagcaggagtttgacggcgatggtatcagcgtggtggccatctccgatgtgaactggaacgcatccggtacggtccgccgctttcgcctggatctggctcaggggcagaatgctgacaaccatttcctgatccactggatatcggtcgggcgcccggcaccggcggccagtactgcggcgctgcgtaatgaggagatggcgcggacgcaggctgatgaagcggaagcgctgaagcgctccacgctggcggcacagataaggggaacgacggacagtaacagcctggcggatctgcgttccggcctgctgtatcaggagatgaatgcccgtatcactgctgataaagcagaggtgacagcccgggaatcgctgcagacgcaattcaacgagaataaatcctcggtagcggaggagctgagttccctgtcgaccgcacaaagcgcacaggccagcaaaatcagcgggctggaaaccagtctgggtaaaaaagccgatgcaaccgcgctgcagtccctcacgcaaaaggttgaacagcagggcaccacgttaaccagccaggggaattcgctgacctcgctgtctaaccgcgtcggtaaaacagagtcgggcgtggccgcaaacagcaacgccatcacgggcctgcagtccagcgtcagccagcaggataaaacgctgaccagccagggcagcgcgatcgctaaactgcagaacgacctgacgacaaccaattcaaacgtcagtaaaaaggccgatgcgagcgcggtcacggcgttaaccaaccgggtatccgcgacggaaggcaacctgaccacacagtctggccagctgacgatgctgaaaaacaccctggctgaagggagcctgattagtaacggcggcatggatgtggatctgtcgttctgggagaactccggtaccggctcggcattcacgtatgatgcaggtgaaaaagcgctgagaacgacaaccggctctgttcgggttgccaacgtcacgcgtatccctgctgaggccgggctgacgcttaccgtctcatttgagtacaaaacatcggaaacgatgaacagcatatcgtctgataccgttggtgtgataactgatttgggcaatcctgtcgcctggctatcctcagaatccccgtggctgagtggcgtgacgaccagctggcagacgaaaaccgtggagctgaccattccggaaaactttaccgggaattatgtctatctgcggtttgccgccgggggctgggtaccgtcaaacagtgcgcgtctgtatatccgtaaagtcgacgttttttcgtcgaccggggtgtcgaagaaggcaaatgcctctgccgtgactgacctgaccagtcgcgttgactcagcggaagggaaactggccagccacagccaggcaatcacaaagctgcagaatgacctgaccacgacgaactcgaatgtgagtaaaaaggcggatcagagcgcgctgacgtcactgaccgggcgagtggagaagacggaaagtggcctgactgcagcgaacagtaatatcacttccctcaacagctcaattagcgccgcaaaagcagccggggatgactatatacctaacccggcatttgatccttcttacgaccgcatggggtatgacgtcgtatcatccggcgctgctggcgtgcccggggattgcccgtttgcgtacgtggttcgtctggcaggccgcgatcatgtcccaaaaataaacaacattgctgtcacaccgggtgatgtcttcgagatgtcggccctggtagcctgcggcgccggtcaggccgattttaatctctatatcgccagcggcacctcagcgacggaaggggttaaagcgagactttctggcggtaacacgaaaaccacggcggcctggaagcgcgcaacatggcgctttacggtgccgtctgacacgaatttcctgcgccccttcctgcaggttaaccagagttcaccctttggtacggtctggtatgcagcagactggcatctgcgcaacgtcaccgcagcgaaccgcgcacagaaaatcgccgatgccaccgcgtcagcagtggataccctgaccacgaaagtcactcagcagggcgatacgttgtccagcatcgggaaccggacgacggcgctggaaaacgggctgaagacgacaaacagcaccgtcagccagaaggcggacgcgagtgccgttcagaccctgcagaacacggtgacgcagcagggcaaagacattacggcggcgaacagcgcgataacgaagctgaccagcgacctgtcgacgacgaatgccaatgtcagcaaaaaggcggatgcgagtgcgctgcagacgctgcaaaacaccgtggcggagcagggcaaaacgctgacaagccagggcagcagcctgacgcagctgagcaacagcctcaatgaagctgttgctgatgcggatgcctcccgggcgatacccggcaacctgatttccaacgggtcattcgagcgcggccaggctgcgtttactggctggcagtcagcgacgtcagtcataacggcattgtcaccgtacaacggcacccgaatcctcaaggtggtgccgggcagtaacgtggtctcgctgcttcagaagatttcgttcataaaggatcgcacctacaaaataggtgtgttcacgcgtgtttcaggtggcacgacaatgccgtcaggcgctgccggaaataacaagctgcgcatcggtgaatccggcggaccactgaaagaggtgcagttcaatcccgcgacgctgccgacaggctctgtctggcaggaaatttctggcacatggaaagccacgaaaacggcagtccttgacgtctccattatggtactgctggcgacgggtgagcagtattttgatgatttctatcttattgacgtgactgatgagaccagtattgctgccagcgccactgccatcagtaatctgaccaaccgggtaacgagcgcggaagggaagctggagagtcagagcagcagcatcacgaaactcacgaacgatctggccacgacgaatgccacagttaacaaaaaggcggatgcgagtgcgctgcagtcgctgcagaacaccgtgacagaacagggcaaaaccctgagcagccagagcagcagcatcaccagcctgcagaacgggctgacgaccgcgaaccagaacatcgcgaagaaggccgacgcgtcagccgtcacctcattaagtaaccgggttaccgaagccgaagggaaactgaccagccagagcaacagcatcactcagcttgaagcttcgctcgatagtgcccgcgataccggtgagaatctggttgaaaactacgatttcagaaaccagttaaatgcgtggaatctgcagaatgccgggcgcattgtgtggggtgcctcaagcggggatggttctgccggggtgaccatcacgcatactggcgacgcaagtaatccggggttaatgtcgaataacgcaaaatggttcccggtcagttcatcccgccggttccgttttaaggtccgcgccaggctaatttcaggctcaggcgggattttatgccgcatatttaattcgaaaaccgcaggcacttacacccagacgcaggctgttgtaaccagaaaagatggttttgaaacgctgacggtagatatacccgcgttgccggccaccaccacagacgcaaggattgctttttatgtctatccgtccgcaaccgttgtggtcgtcgacagcattgccgtttatgacgtgactgatgaaactgcgggttcagcgaacgcgtccgcaatcagtgacctgaccacacgcgtgaccagtgccgaggggagcataacttcccagggggcggcgatcacaaaactgcggaatgacctgtcggacaccaatgctaacgtgacgaagaaagccgacgccactgccttaaacgcgttatctaatcgggtaacgcagacggaaaaggatatcagcagccaggctgacagcattaccagcctgaacagctcgctgaatattaatgcccgtaaaggctcaaacccgtggctggacggaacgtttgaatcctacgacgttaaccacaacctgggtgggtcagcgcgagtggtcaccggggtcagttactcgggcggcaaatgtatgcgcgtttcgcgcgcgcagaacacgacaggcaacagcgatgatttaatcggctcacgccttgccattcgcgatacggcagtattcagggttgaattctgggcgatgatgcctgccggagaaaacccgtccagcggctgggtcactgtcgtcggtctcaacgtacaaaatgatgcgggcgcgaactcatggctgggggcagcgaatgtcagcgaatcagcgctggccggtcgtgacaaatgggttaaattttccggctatgcaaaagccacagcgaaaggcgcgacgcgcgctgtggtctggatctccacgcgcggggcgaacggcagcaatacgccaggctataacctgtatatcgacgacctggttattacagatgtcaccgatgcttacaatgcgcagggcacagcagacgcggcggcctctgcggttgactccctgaccacgaaagtcacccagcagggcgatacgttgtccagcatcgggaaccggacaacggcgctggaaaacgggctgaagacgacaaacagcaccgtcagccagaaggcggacgcgagtgccgttcagaccctgcagaacacggtgacgcagcagggcaaagatattacggcggcgaacagcgcgataacgaagctgaccagcgacctgtcgacaacgaatgccaatgtcagcaaaaaggcggatgcgagtgcgctgcagacgctgcaaaacaccgtggcggagcagggcaaaacgctgacaagccagggcagcagcctgacgcagctgagcaacagcctcaatgaagctgttgctgatgcggatgcctcccgggcgatacccggcaacctgatttccaacgggtcattcgagcgtggtcaggatgcgtttaccggatggggaagcgtcgggtctgttatcagtgcgcagtcgccgaactacggcagcaaaatcgcgatgtgtggtgtgggtcttgccacactatcccagaaggtcccggtaacgaagggcaacacctataaaattggtgtgtttgcccgtgcgcagggcggttcggtcatgcaggatcagggcaataacaaactgcgtattggtcagtcgtccctgttgtacgatcgccagtttaaaaccgcagacctgcccaccggctcctcatgggttgagctgtccggaacatggaaggcgacggttgacgggatggttgatgtggctatctactcttccctgaagtctggctctcagtattttgacgacttctattttgtggatgtcacggatgaagtgaatattgccgccaacgccggggccatcagttcgctgacaacacgcgtgaccacggcagaggggaaaattacctcacagggcagcagcatcgtaaagctgacgaacgacctggccaccaccaatggcaacgttaataaaaaggcggatgcgacagcgttgaccgcgctgaccaaccgggtaacgagcgcagaagggaagctggagagccagagcagcagcatcaccagtctgcagaacgggctgacgaccgcgaaccagaacatcgggaagaaggctgattcttcgacggtcacctccctgactaaccgggtcacgcaggctgaaaataagctggagagccagggcagcagcgtcacatcactgaataacagcattgcggccacccagcaggatgcggacgcggcaaaatccatgcccggcaacatgctggcgaacaactcgttcgaacgcggttttgacggctggagtaactccggctggagcacgctggcagcgcagaacccgaagtccggtaaatacatcattcaggccacgaagatatccagcggttcaacggcctgtgaccaggtggtgaaactgacgggtggccagacgtaccgcgtgggtgcctgggtgcgcaggtctggcgatatggccatcagcaataccagcaataccaaaatcagcatccgcaatagctcaggaccgctgaaagatattacgatccctgccagcgtcggtactgcatggacttatatcagcggcgactataagccgacggcagacgccgagctgatcatctctctgcgctccagcctgtctgcgggttatctgtatctggacgatgcattctgcatcgatgtcagcgatgaggtggccaataccgtcaacgctgcagccatcagttcgctgacaacgcgcgtgaccagcgcagaagggaaaattacctcgcaggggcagcagctcaccagcctgcacaacagcctcggaaataaagcggatgccagcgcggtcagttcgctgacgacgcgggtaacaaatgctgaaaataaaatcacggccacgtcaaacagcctgaccagcctgaacagcaccgtcggtacgttatcctcgaccgtacaggcccaggggcagacgctggcggagacaaacggcaaggtcagctcgatgtactccatcaaagttgaaaccaataacgggaagaaggtaggcgccggtattgtgctgggcagcgatggttccacaagcgacatgatcctctatgccgaccgtttctcgctgtttaaccgcaacagcaagactgctgtgccggtgatgattgctgaaggtaacgagctgtatattgacactgcccggattaaaaacggttcgatccagaacgccaagattggtgatattcagtcaaacaattacgtaggaggcagtgagggttggcgaatcactaaatcgggagccagcgaatttaataatgttgtcgtgcgcggggaagtacatgctaatagcggaaagttcacgggtcatattgaagcaaccagtggtacgttcaagggcaagctggaggcgcaggaatttatcggggatattgctattgcccgtcgctacgatgatatggaatttcgccgtaacaacagggtgcgccgtaatatttactatcagaattgtggttatggaatgaccgttgttctttgctgtacgttgctaatggagtcgccgggtattgatagaaaatatggctacacggtggatgttgtgtttaatgtaggagggcagcaggtcactcgaaaatacaaaatgatgggtgataacggatttacagggaccattgcacaggaatttcgatttgcagctaatctcaacgcggacaataacaaagtgagttgctttgttgaggcccacggaaatgacgccaattttgactatagctgtagggtggagaacatcacagcaatggcattccggaccagtagtagcagcttcagctaa

SEQ ID NO: 202528 - DNA, 582 bp, Klebsiella oxytoca
atgttcacggctggtttctttgtcggaggcatcagttgggaatggtccaaaaatgaatattctttacttgttgctttttggtctatggtagggggatgggtatcaggcatttcaactttactggctgtgcttgtgtcactcatattggcgtaccaggctgtgactaaagaacaagagaacattgttataaaaatgaagtcatttaagaagagtttgtttggtgacggctggaaaatatcagttgtagtgcgtaatttaaataactatcacgttgaggtgactgatgtttttttggtttttgatcctaaaaatgccgcagtaaatatcaatgaattgactggtgtagggccatttccaaaggttttgaagaggaagggtgcacatgttgatttttcgataaagctagattcgggaaacgaatggtggcgtatttatgagacattatctcaaagtgaaatttataaatttaagaaatgtaaggtgatcgtagtaacagaagtcgggacgcattattataaattgaattcagaggtcgttagtattcttaatgaaaattatgtgaaatatttaaacttgaagtga

SEQ ID NO: 202529 - DNA, 840 bp, Klebsiella oxytoca
atgcctggaaattacgtgacagagcccgaagtgttaaccgggcacaccggtgtgatttgctccaccagcattgaacgtatcatcgctggccgtaatgctgcgctgacacgcattgaaagctttatccgtgaccttgatgatatctccattctgacccgcgatatcggcggtggtacagtgcaggagtggggaatgcgggaggggcatcactacgattgctggtttacggaaaaacccgataaagcgatgaaagcgattactcgcaatattgatcgccgtatctggcgcgatctgatgtcgaagtctggcatgctggctctgatggatgctgaggcccgtgacgagtggcacaaaagcctggagaaagacgatattccagcgatctgtgaggccaatatcctgagtacctttgagcggctttatcaggataaacatgctgtttttgagcgcggcgttatcaacgtttttagagggttatcgtgggattacaaaacaaactcaccctgtaagtttggtaagaagatcatcgcggatggtctggtttctttcaatcgttggggggttagcttcacccatggataccagcgtgaccaactggtcgatctggagcgtatgctgactctgcttgacggcaagacgctaccggataaccgggctgatatctcctgtcggctgagtgaccatatcggtcagcagcgtacttcgacggtgtatgacgatgagctattcagaattcattattttcagaaggggagtgcgcacatagtgttcaaacgtcccgagttgattgagcgactcaacgatatcattgccaagcactatctggggatgctagcttga

SEQ ID NO: 202530 - DNA, 546 bp, Klebsiella oxytoca
atgaatatcaaagcattatcattagctgtgacttctgcactggctctgacttctgcagcattcgcagcgccctccaccgttaacggcggcaccgtacatttcaagggtgaactggttaacgctgcctgcgcggttgatgcgggttctgtagatcagactgttcaactgggtcagtaccgtaccgctaaacttgatgaagcaggcaaagtgactcagaacgtcgatttcaacatccagctgaatgactgtgacactaccgttgcaacaactgcaaaagtggcctttagtggtgtagcagctaacgcagctaacccaaccgtgcttgcagttgcttcctccgctgcgggcagcgccactaacgtgggtgtccagatcctggactcccaaagcgtaccgctgggtcttgatggcgcaaccttcagtactgctatgcagctgaaagaaggcgtgaatattctgccgttccaggcgcgttactacgcgctgggtgcatccactccgggtgtcgctaacgctgaagccacctttgctgttcagtacctataa

SEQ ID NO: 202531 - DNA, 936 bp, Klebsiella oxytoca
atgcatttaatacatttaatgagagtcattattattgcatcagtagcccaactgacatggattaattgtgccagtgcatttacctgttacgatacctcgggaaatacacttgttaatactgagtggggtacagcgaatgtgtatgtaaaccttcagcccaccctagcgatagggcagaacctggttgtcgaccttgcgtcttctattttttgtcgtaatgacgctcccaatactcgagacgataatgtcagcatgctgaaaggatcggcatatggcggagtattaaaaaactttaccgggagacttatttattatggttcaaattattcttttcctctaaattcagctaccggcacacataatttcacatcgggaagttatactccgtggaacactcagctttatctgacgccctcaacagttgctggcggtgtgcttgtggagcagggtagtttgttcgcatctctggtgatgtaccaggtgggttctgataaatccaatggaggcaatgttgatagtcacacaatgatatggaacctgtatgccagtaacagcgtgattattccgactggcacctgtgatgtgtcttcacgagatttgaccatacagctcccggaatatccgggaaatgctgtaattccccttaccgttcactgtgcctcagaccagaatattgctttttatttatcggggaataccgcaaccagcaacgatatctttcgcaatacgtactctggaatcaatagcgcttccggggtcggtatacaattgcttcgtaatggaagcgctatacctgtaaaccagaatgtctcattgggtactgtcggaacttctccggtcagccttggcctgacagcaggctatgctcgcacttctggtcaggttacagccggtggtgttcagtcaattattggggtgacatttgtttatgactaa

SEQ ID NO: 202532 - DNA, 1464 bp, Klebsiella oxytoca
atgactaaaggaaaaggtgaaaaaaccacggcggcttatattttttccccgtgctttgcatccgccgaaggtttaaaagagttattgaaagtacagggttttgactcgagtgttgtgttgctcagcgagcgtaaacccagctgtgaaaatattcaaacgagagaggttaaggatgaggccggaatttatgttttttatatccccagagactcattttatttccttattacattaatggagatagcgcagcgaatcagtaacaaaaatacaagcgcagactttgtgtttgtcagtagcgtttcatgtaactggctatatcgaaacatcctgcaaatgccgggaggggaaagattcacttttaacgcaaggattatatcttcaagattaagtgtgaatcgtcttgagcaatatttcaaacgaataagattaaatcttccttttatatccagagaccactttatgattgatcatggtaatgacagaaatgaaggattgactcagcgtgaaacagaggtcctgctcgatatgttcagctgtaataaatcattacttattcaaaaaaataaaagcgcggcagcaaaaacactttataatcagagaaaatcaggtctaaggaaaatggttgaaaactcagcagaacttgctaaaaaccttcccggtgcatccataagatggaaggcgagacttgctcagtcagaaatgtcagtttatgagaaagactttgtcactggcattgagatgcacgaggtttatcaggtctatcaaccggttataaattcatcgaaagaaatccgtggcttcgagattctgacgcaatggaatcaaaaaggagctatcattcccccggatagatttctgtccgaacttaaatctgatagcgtactgatgttgctgacggcaatgagccttaaaaatgccattgatggtatcaacagatacgaagggaagtttttcttttctgttaacatacatcccggggtttatggcttttcaggtctggttaatatgtgtgctgaagcctgtcgtcagttgaaagatgtacagtggcgaagcagactcttgcttgaatattcggaaaagtcaattttttacaaatcccatgacgttctggatactctcaagtcaatcaatcagctaggattaggtctttaccttgacgattgtttttctgaagagtatgtgttttatccagtcagaaaatctctttttaatggatataaactggataagagtattgttaacaacattttatccagcaaagaggaccaagcattaatcacgtcactggctggctattgttctatgaccgggagatgctgtattgcaaaaggtttggaagacgcatttacatttgaaaaattaaaatatacaggtatcgatctttttcagggggatttctttcacaggcctgttggaattgccgaattaccattattgctacctaaaccacaacattatcgataa

SEQ ID NO: 202533 - DNA, 201 bp, Klebsiella oxytoca
atgataagattaactgattactcaggcaaaacggtgatagtcaggataacagaaatacgtatggtacatagtcacggggataaatcccttgtgtatataaaagatacacatgagccgatgaaagtcaatcacaaacttgaagaaacagagaccctcattaatactcagaatgccacactgaatcttaatgataaattttga

SEQ ID NO: 202534 - DNA, 207 bp, Klebsiella oxytoca
atggctcctccaattttttataagactatcgtggattctgtctttttcagctggagtgttttcaggcacattgacctgatgaggcgggacattcctaaaagagaccccggtatactgaaagaagtagctcctggcaacaaagtcaactacctctttgttccgcatacccgcaataagttagttgataacggatatccgggaatatga

SEQ ID NO: 202535 - DNA, 183 bp, Klebsiella oxytoca; identical to SEQ ID NO: 147957

SEQ ID NO: 202536 - DNA, 912 bp, Klebsiella oxytoca
atgaacgggttaattgcaagcgaagataatcagccgacaaaaggggggacatttggcacacctcttcgttaccctggaggcaaagggaggttaagcctttggttatctcagctaattcgagagaatggcttgaatgacggatggtacgtcgaaccctatgccggaggtgctggagctgccattcttttactttgtggcggccatgttgatcgtatagtgctcaatgacctagacccagcaattcatgcgttctggtgggctgttctgaacgatacagataacctattacgacttattgatgaagctcaaccaacactagaaacttgggaggctcaacgcgcggtccatgcggatcctcaaaaccatagtccaacagaagttggttttgccaccttttaccttaatcggaccaaccgctccggaatcctgcggggaggccttataggtgggaaagctcaaacaggcaaatggttaatgtttgcccgttttaataagccagatctttctctaagaattcgtaacattgccaggttaaaaaggcatatttctctttataacgaagatgcgaaagatcttatatctggcttaaaatcagacttgccagcacgtagcttgatttattttgacccaccatattatcacaagggtaatcaactctatcgcaaccattataaagcatctgatcatgcatcaattgctgcgcaggttgaaaccattacgactccatggttggtgacttatgacaattgcgaggaaattcgacaaatttatgcgggtaaacagaatattgaattctcattacattactcaaccgcaagcactcgcccgctagtcagcgagatcatgttctatggtaacctttcattgcatgctaaacccataatgagcaggcgatttcctcagaggacataa

SEQ ID NO: 202537 - DNA, 2088 bp, Klebsiella oxytoca
atgcatagcattattaaccaagtcactgcgaatcatccactcagtcaattgattggtgatgtcgatcagtcttttgttggatacgtatacaacctccgctatgacgaggcttatgtacaaaccaacgacagttttaagcatgcaatcaatggattagcccataactcatttttagtcgcggcaggcttcaatcctagccgaatcaacactgcccccattatagaccaagaagttgtattgcttcgtgtaattgaacctgctgcattaccacaggatgctgatatggtccgtactcgcattgagcaccatcagcgtcggagggcagaagaaaagttacccaatgatagtaatgatggactcgatccaatgactcgtagcgaattacagtggggtgggttgcgttgccgagtattgggaacattttttatgcaagatgatcagctacgcctcggtagtgatgttgaaacatttatgagtttgcctcgtatgcgagcatacaagccacgaggggatgttttggctaggatagtcaatcatgtgaatccagaagttagagcaaaagcagctgatgaagctaagaaggccggttttagcgacgtacctcaacccattgaaattggttccgttcgatatacatctacgaatagattacaacgcgacagtggtgagtcagttcgggtggaaatccagccagccgattttttggctcgccgcaccgccgtgcttggcatgactcgcaccggtaaatcaaatactgttaagacgacagtttcggctgttgccttagctgctatgaaatcaaacatcaacattgggcagcttgttttcgatataaatggtgaatatgcaaatgctaaccatcaggatgatggtagctcgattgctgatgtttttggtgagcgggttatccgttatcgcgctcttgaaacaccaggattcgaagatctgagaatgaatttctattcagaccctgggcaagcgctgagtttgattcaagcgcttttcaaacaagagaaatccccattctcaggtcaggatctagatgcattcatgtctgcgacactcgaagaacctgatttgtcagaaaagggtgatcacactcgttggaagcgccacctttctgtttttcaatgtattttatcgcgagcaggttatcctgttccctcaggactaaaggtagaagtacctatcccacaagcccttattaatcagatgaatacgttccaacgctcgcaggaaaaccctgaggttgttcctcctgcgtctgacaaaatatctccagctgaagcttcagcatggtttgagcaaattcgaatgatcaaccttggtttgcgagaacagcaggcagaaaaaggaatggctacaataggattacaatcctccacaccaggaaattcgtgggttgatccactacttgagtcaatgctgaatatgctggcccgtgaaacaagcaggaaacaatcatttggtggctggcgtgcaatacaaaaatatcgctcttaccactctcctcgtcgtgttcaagatgtcacgacagaaattgtgcagtatctcgattctggcaagattgtaattctcgatttgtcagctggcccagtagaaatacgaaaggtcttgtctgagaggattgctagacaaatttttgaacgccaaatggaagctctaaatcatggaaaaataccgcaaaatatagtgctttatgttgaagaagctcataatttagttgggaagcaagctgatcttgattcgacatggcctcgtattgccaaagagggcgcaaaagcgagaatagcctttgtgtatgcaactcaggagccatcatctgttcatcctaatatcttagccaacacagaaaattggttcgtcactcatctaaacaatgatgacgagctgaagacattaggaaaattctatgatttcaaggatttcctaccatctcttaaaagtgcccaagatgtgggattcgcgcgtataaaaacactatcagccccatttgttattccaactcaaattaaaagattcactccggatgacatcaaggctcagatatcacagatagtcggacataaagataaggtaggtttctaa

SEQ ID NO: 202538 - DNA, 1368 bp, Klebsiella oxytoca
atgccttatatgcgtgaaagtgctggaaaaggtgggcatgcagattttgtgcgtaatccagatgtgcagagctttctttcgaattgtgattacctgcgccaaccatctgatgaagaagcgttagctctggcatcacgttttcaagcagctccccttcgtatgccaccacaactcccaaaatttgtggtggcttccgatgcgagtaagagcgatacacctattaatgataagttaccaagcactcagatcggattcctaaaagtaagtcatatcttaattaatatggatgcttacgctggcttgttggatccaacaagccattttgcagatccgtttaaagtggctgatatgcatcgctcagcatccccggtaacattcacaatgccgggaagcaatattcgatacaagggtattactagtgtaaaacatggttttcggcatgctttgtttgatcaaatgcaagctaatcgtggtgacaatcaggccccaatgcaactgaccaataccttaagagaattagttggaacaactatttcgattaaggcttgtccatcatgtggacatgatttttgttttgaatttgctgaaaaaaacattgaaaaatgtcctgattgtggcactgatgtatttattacagattggttgcgtctgcatgaaggaattagtgactatggtgataacagcagtgcaatgacgaggatgatgaacgcaattgagcatctcatgcttggtgcatacattcttcaggtattcgaagttcaccctggggcgttatcagacatcgcatttattcttgatggacctcttgccttatttggtgagccagcgaaactttcatttcgtttacaatcgcttatatataaagtaaatacgcggcttgccgagcttaacttgaaatcaatgttagtcattggattgcaaaagacagggggactgatgaaccatgcgcttttgcttgaacgttttcttggtgatgggatgttgcgcgtggttgatgatgattatcgcaatacctacattacgggttcagacaatccctctgctaattttggtaatgaaacctactatgggcaagattttttgtttaagaccgagagaggtcgtatgttcaatttcgcgcttccatacccatttcaggataaaagtcataatggtggtgggcgagcatttgcactagctaaggttgaaattgagcgatacggtgaccaagtgcaacgtgcatgtgatcttattagacattttgaaatggacctatatgacaatgcgattgtgccagtggctcttgcacacagacatgcatcaattagcctcgtgcctggtgggcaggtactgaatttgttggtacgtggtggtctggacacaaaataa

SEQ ID NO: 202539 - DNA, 633 bp, Klebsiella oxytoca
atgatacctgaagacattacgattcatcttacacagtggctttcctcgttaaccgaccaggagaggataagcgcacttaactgcctccaacaatttcttcacccgtacagtccatttcatgacgaaccagtgagctgtattcagtgggttccggcagaaatgattgcagcaaatgactataacccgaataccatgacaccggttgagaaaaaactactcgagctctctttactcaaagatggttttacacaacctgttgtggttacccgttcaggaccggatgcaaaaaattatcaggtcgttgatggttatcatcgttttactctcagccagaaaccaaagttgcgcaagaggcttcttgggtatgtccctattgtatgtattcggacacgatgggatgaacctgccggattgatggctacaacaatccgacataatcgcgcaaggggccagcatcgggtagcagctatgtctgatattgtccgggatctatcccggctgggctggaatgatgaacgtattggcaaagaactgggtatggagcaggatgaagttttgcgcctgaagcagatcagtggtctgactgaattgttcagatctggagaatattcagaagcgtggacggtcaggtag

SEQ ID NO: 202540 - DNA, 1248 bp, Klebsiella oxytoca
atgcgcagtcaactatcaggacaaaagattgctaccggagtgaatgtgctggaagcagctcaatcccggatcaactggatatttgatacctttagtaaagtttgcctgtctttctcgggagggaaggattccacagtactcttccatttactggctgatgaagcaagacgccgcagacgaaaatttggggttctctttattgactgggaagtgcaatttcaggcaactattcaacatgtcagcaatatgaaggaaacataccgtgactgcgtcgagcagttttactggatagctgtccctctgacaaccgaaagtggagtttcgcagttgcaacccacatggactgcatgggagccagggaaaacgtgggtcaggcaaccaccggaaaccgccatcacagatacatccagtttccccttttataaggcaggtatgacttttgaggcattcattccagcttttaacagctgggttatgcaaggcaagccaggcattgttctgacggggatcagggctgatgaatccctgaatcggtttttatcgataaattcccaaaaaaaactccgttatgctgatgatatcccgtggacaacagcctcacccgagggtttttactatacaggctgtccgctttatgactggcacgttacggatatatggacatacacggctaaaaacggattactttttaatcctgtatacgatcttatgtatcaggcgggagttccgctgagccggatgcgcatttgtgagccattcggaccggagcaacgcagaggactctggctttaccatattctggaacctgacacatgggcactggcctgcacaagggtgagcggtgctcattgtggcgctctttattctgaaaacaggcgcggtcgtgggttttacagtgcaggccagcgcgatctccctccgggccattcctggaaaagctatgcctttttccttctggatagtatgccagaagcgaccgcagaacattaccgcaacaaaatcgctgtgtatcttcgctggtaccagaccagaggttttcctcaggatattcctgatgcacaggataaagacacgggcagtaaggatatcccatcatggcgacggatatgccgcgtattgctacgtaatgattactggtgccgggggttatctttcagtccaacacaatctgcaaactaccagcgttatcttgaccgaatgcgatccagacgaaccgagtggcaaataatgtctcctgcggacagctga

SEQ ID NO: 202541 - DNA, 906 bp, Klebsiella oxytoca
atgacagataatgccttatcttcagctacagtaaagcatgtaattgtcttcggcgactgttggcctgttgtcagtgcaataggtggaataatcgacagagcagctcctgaattgacccgtaatattgcaacagatttaccgtctttgattgagttgctgttaataaagcctgacgctgttcttttgctctgcttgcgtccccgggaacatatcttcttattctacgcactcaggcaagaacttatcgaacatccggtgttaatcatcagcgatgaaatgttctttaatgacaggctcacactcagattgtggggaggactcccctggatgatgcaggacgaactgtccggcatgataattcccccggaccagcacgaaaagttcgcatctgaagttgatagtgaatccgataacactctgacccgttttcttttatcaccttcattacctgtcggcttttcggaagttcctatggttttccacctcgaagaacgccttatggactatatgtctcttttgacataccgcgaaatgcttagcaaagggctgacccctttccgcatgcgactgcttcagtacatttggtctggtcgcagctctcaggatgagctctctgaagcgatgggagaaaaccagggaaaaatatggaatgaaaagcacaggttattcattcagcttggaatttctaatcgtcgtttgcgggaaatcctttacggaacacaattttgttcattccttcagcagaccccttttatcgcgccagctgaagtggcaacgatacgttcccgcgtggatgccaacgcgatatctgccagggaaaattctgactgcccggggaagtcgcaaaaggaggaggggcaaaaatgcgcagtcaactatcaggacaaaagattgctaccggagtga

SEQ ID NO: 202542 - DNA, 132 bp, Klebsiella oxytoca
atgtatttggatatcctccgttacattctgattctccgtgattgtcgtttgcggatttacttattgactatccctgcctgcatgtgtaacaaatttttttactggcaggttcttttcctttcctgtcagtga

SEQ ID NO: 202543 - DNA, 528 bp, Klebsiella oxytoca
atggaacgtaccccccccgaacaacgtcatcatttatttactcaaaatgatacaagcacacaagctggcagaaaaaagaaaggaagtcaaagcaaccatgacgagtatgtggtgccagactgtgttgcattctgggccgatgaaccattatacatgctgatttcaagatggtgcatgctgcaggataagtggatcaacaggaatgatatatctgaggcgtttcatatgcccttgagacgtgcttcatatcagcttgcttatatcagcaggaaaaaaaaccgtgtggtttgtaaaacacgatatggcatgaatgaagaaaaccgcaatccgagatctgaaatctgggttgagcgcataattgatgaccctccggtcagggagacagttaccccagagtcggccagcagtgagtcactcagacacccggtatcaaatccaaaaaaaggggttggaagtggcatgaccggaaattcaggattatgggaacgtatgcttcgtggtgtgcgttgtgaacctggaaatgagtaa

SEQ ID NO: 202544 - DNA, 351 bp, Klebsiella oxytoca
atgaaagaaggtatctataacgttgtttttgagagcaacattagttcagttggtgaaggtgtaatagtcgttattggcaaaaatatttatggtggtgatatggctttttcttgtcgtggcacattgaagccgcctgtaattacgctcgaaatcaaccattttaatcttgatataccttccactctgggtatcgaaggtgattatacccttgagatgaggtatcaggaggttcgtgaaggggaatacaaattttcaggcggtagtaaggagtatcctgatcgtcggcttactgcctatgctatttttactgcgcctcttttaacggacagtaaatcactaagtgaatattaa

SEQ ID NO: 202545 - DNA, 603 bp, Klebsiella oxytoca
atgatgaaatcactcaataaattaattctggcttccgcgatttcctgcattgcaggcagtgcctgggcagcagatgtcccaccaacaggaagtgacttaggacatggtacacttcatatcacaggtagcgtcattaatgcgccttgtagtattgctccgggtgatgaaagtattgatgttccgctcggtcaggtagcaaataaagttcttgagtcaggtgtaggttattcattgactcaaccaataactattcatcttcagaactgcgacctgactgcacagacagtaccgggcacgggcggtaataatactgcttatcctgcattctctaaagtagcggtcaaatttacaggcgcagccgatgctactaatactgagttatatgctaacagtggtactgcacaaggcgtagggatccgcctgattgatactatggccggtagtgcgaagcttaatgcgaattcatcttccgccgaagttggtttaactcctggtgataatgtgttgcagtttggtgctcgtcttgagcgcattggtgccagtactcctgttgcaacagggactgtggcagcggatgtaacttatgcaatggattataaataa

SEQ ID NO: 202546 - DNA, 2472 bp, Klebsiella oxytoca
atgagtattaaatccttatatagcgctctattttttgtacttaattttagcacgtgcagagtctggggcgtggaatttaatactcatattcttgatgcagaagacaggagtaatgtcgatctctctgccttcagtcgtgagggatatacagcacctggtgactatttattggatgtttttttgaatggtcgtctgataaaagagcagcagttaattcagtttaataataatcctgacgggaccggcagttatgcctgtctggataattctattgtcagtcgcctcgctttaaaagaagaggtgagcagaaattttaaagtatatgccgggacacagtgtacagacctgaccagcgaacagagtaatgttacctattctgctgatgaccagtcattatcaattactgtgccccaggcctggcttgaataccaggatactaactggatccctcctcaacaatgggaacagggagtgaatggatttatactggattataacatcctgacaggtcgttttatgcctaatcagggtgtgtccgataataattttagtttatacggaacaaccgggctgaacattggtgcctggcgaataaggtctgattatcagtatcagttgaataaaaacactgaacgttcacagtcaaaactttttttcccacagacatatattttccgccccctgccgaaaatggggtcacgtctggtcatggggcagacttacctgaattccgatattttcgactctttcagattttcaggcgtatctctggccagtgacgacagaatgttgccgccttcgttaagagggtatgctccccggataaccgggattgcacatacccatgcacaggttaccgtctctcaggacggacggattgtatggcaatcacaggtacctgcaggcccctttgtcattcctgatttaagtgaaaccgtgcgtggtaacctggatgtcactgttcgggaagataacgggcaggttcagacatggcaggttaatactgccagcgttccttttttggcccgcaagggaaatattcggtacaaaactgctgtgggtaaaccattgtatggaggggcacatcatgccactacccccgcctttacaatgggtgaaattacctggggagctttcaatgatacttctttatatggcggtactattgccaccgatggtgactacagtgctgttgcacttggggtggggcaaaacatggggatattcggtgccgcttcctttgatgtaacccgctctgatgcccgggtacagaatatgcaaaagcaatccggatacagctaccgttttaattattccaaaacttttgacaaaaccggtagttcgattgcgtttgctggttacaggttttcagaaaaaacttttatgtcgatgaatcgttttctggatctgaaaaatggatatacgggttcttatgcggaaaaacaaagctatgtgttgacattaaatcaggcaattcatcccctgaatatgagcatgatgttatcgatgagtcatcagaactactgggatacaggatcaaacaataattatactcttactctcaataagccatttagcttcggaccatttcagggagcaacatctgctctgtccctgagcaaaacgaagactaaggattatgaaaatgataagcaaatatttctgtcagtaacgctaccatttggaacaaaccggcagctcagttactccttacagcatgacagtgacgggcgtatgaaccagacggccacgctttacagtaacccttcctctgatacttcctggaatcttggtacaggtttacagcgagatgacgggcaaaagcagaccagtctgttcagcggaaatattcagaaagtcacaccttacgggcagggtgatttaggtttcagcatgcaaagtggtgcttataagaatgtaaatgcaaactggtatggttcatttactgccactacagagggggctgcttttcaccagaatatggcaggaaatgttccgcgtctgatggtggatgcagatgatgtggctgatatcccagttgacggcggaaacgggattacaaaccggtttggtatagcggttgttcaggcaggaaacagctatgaaaagtcagataccagggtcgacgtatcccgtcttcctcaggatatcagtgtatccggggacattattagcaacgtgctgacggaaggcgccattggttaccgaaaaatttctgcgataaaaggtggtcagatggtagccacgattcgaatgtctgatggccatttcccaccatttgggactgtcgtgaaaaacagcaaaggtaaatcactgggtattattggcgaccagggattcacgttgctgtctggtttaacagaagaagacagaaataatataaaaatcacctggaatggcggccagtgtacgcccaggctgccgcaaattgatggtttacaggccggcgttttgttaatcccctgtcaataa

SEQ ID NO: 202547 - DNA, 735 bp, Klebsiella oxytoca
atgacaacagtgctgcgtcgtacactttacgtgttaatcgtttttctttcttcgcttatgagtaattttgcatcggcggcaatcaatgtggatcgtacccgtattgtaatgagcagcagtgataagtctcttgcgatcactctgacgaatgaaagtaaagatgtaccttttctggcacagtcatggatcgaggaagctaacggaaagcgttcggaaacttatctgctggcactgcctccattgcaacgtattgatggtggtaaaaaggctcaggtaagaataatggcattgcccgggatggaatcattaccgaaagacagagaaacgctgttctattataacatccgtgaagttccgcccaggagcgataaagctaatgttctgcagatcgcaatgcaaagtcgtctcaagcttttctggcgtccagaatccataaagaaagccacgaatgtcaaaactgaagagcaactgacaattgaacgtaatgcaaaagaactcataatgaaaaaccccactccctactatattactcttggttatcttggtgctgataataaggggagttttccgggttttgacagcattatgctggcccccttctcctcacaaacatttaactccggaccttttaatggcaatgagttaaatgtagggtacatcgatgactttggcgggcttaagataaatatttatcactgtgccggtgcgttttgttctttaaagacacagaggtaa

SEQ ID NO: 202548 - DNA, 597 bp, Klebsiella oxytoca
atgtacaggaagggggcttattgtatctggctgatgatgttctccggtttatgctctggcgaaacgattaatccgtggcttacagagggtatgcatggtcagttcagtgtccgtggagcagtagcgcattcagcctgctctgtatcgtttgattcgctcaatcagaccgttgattttgggcaaataccgattagtaaatttaatcttgcagaatcggaagtcgcaaccgttccttttaagattcgtatagcaaactgttcactggacggacatgcccgtccggacagatattcgaataacagcattgcgtacgctggcggatatactgttcttgccagattttatggacagtcagtggataaagaataccctaatttactggatagtgaattggggatagaaggcgttggtttacagattcatgaggctcataacaatagggcgcttcctgtaaatgacctcagtccgcctttaccgctttttaaaggcgatggggaattgttgttttatgcttctttggttcgatatgacaagtcaaaaacagttcatacaggtaatttctcctggaatatcaccttcgaaataatttatcagtag

SEQ ID NO: 202549 - DNA, 981 bp, Klebsiella oxytoca
atgctgcgtttttcaaaatattttttgatactattttttttgcttaaacttcccgacgcatttgctgccgccaagtatgaatgtaaattttcaacaggttcaacttatattccgactattccacaaatggcggtgccgagtgacctccctgatgggaccgttctctataaatcttcagaagttcagctccagcttgaatgctcgtatgatccaggcaacggaatgtatacaagcggtgtccctattctctattccactacctcagcatttgaagctttgcaaaatgagaaaaatggtataagggtaattatttatataaatgatcagcctatctcttccaggtcgacgaatgtcaatttcggtgtaacaaattcgggttatatttctacagcgaacttacctgtcagagttcgttacgaagttgttgttgatagaagcaggggtactatcccggagagcggacaattagccggtggttcttacgaagcgttgtatttttatcttagaattatatctaatcttcccagagcagttatcggcttcaagacaccaagaatcacggccatcccatgctcaatggatatgatgatttcgccgaatacattgaactggggggcgatacaaacttcaaagcttgaaagtggtcaggatttttctaaaaacttttctatcattttaaagaaaaagaacacatgcaccataaacagtgctgccccatttggtgtaaatatctggtttgaccgggccggagaaagccttaaccctgatggttctcttgatttgaaaaatggtacaggacttagcataaaggacaattcaggtaccgtagtggcatatgatacatattatcagatccctgatgttaaggtagagtcagttttaaccagaaatttcacagcgcagatacaaaaaacaagtggtaaagatctacaaacaggttcattcagcactgtgctagtaataagaatgaactattattaa

SEQ ID NO: 202550 - DNA, 273 bp, Klebsiella oxytoca
atgatgtttggttttagttttggcctggttatgctgatgttcgttgtgtttttcccggtagcatatttggtaagttatgctgcaacttcgttcgatgcgtggcgactggggaaggaaattccgaaacataaaattaaagtaaacattattattagtgtaatcattgggattgtctttggggggatatttcagtatttttgggatgaacttagcatgtgtatgcaggcaggaaatgacatcggaaagtgtattttaaaactaaatactaaataa

SEQ ID NO: 202551 - DNA, 1416 bp, Klebsiella oxytoca
atgttacttcctgtgattatggcgggtggcacaggtagccgcctgtggccgatgtcccgtgaactctatccaaaacagtttctccgactgtacgggcagaactccatgttgcaggaaaccatctcgcgcctctccggtctggatacccatgagcctatggttatctgcaatgaagagcaccgcttcctggtggctgaacagctgagacagctcggtaaactgtcaaaaaatatcatccttgagccggtgggccgcaacacggctccggccatcgccctcgcggcgctgcaggccacgcagaatggcgatgacccgctgatgcttgtcctggcagcggaccacatcatcaataatcagcaggtcttccacgacgccattcgcgtcgcggagcagtatgcgcaggctgaccatctggtcaccttcggtatcgttccgaacacccccgaaaccggctacggctatatccagcgcggcaatgcgctgggggaaggggagcacacgccttatcaggtcgcccgctttgtcgagaagccggacctggagcgtgcgcaggcctatctggcctccggagaatattactggaacagcggcatgttcatgttccgggcgaaaaagtatctctccgaactggcaaaattccgcccggatattctcgaagtctgcacggctgcggtccgcgccgccgacagcggcagcgactttatcagcatcccccatgaggtgttcagcacctgtcccgacgaatccgttgactatgcggtgatggaaaagaccgccgatgcggtggtggtggggctggatgccgactggagcgacgtcggctcctggtcagccctgtgggacgtcagcccgaaagatgagctgggcaacgtgctgaccggcgatgcctgggtgcacaacagccagaactgctacatcaacagcgacgaaaagctggtggcggctatcggcgttgaggacctggtgatcgtcagcaccaaggatgcggtgctggtgatgaataaaaaccgcgcccaggacgtgaaaaaggtcgtggagtacctgaaggccaaccagcgcagcgaatacaaacgacaccgcgaaatctaccgtccgtggggccgcagcgatgtggtggtccagacgccgcgcttcaacgttaaccgtatcaccgtcaagccgggcggggcgttctccatgcagatgcaccaccaccgcgccgagcactgggtgatcctcgccgggacggggcagataacggttaacggcaagcagttcctgctgactgaaaatcagtcgacctttattcccattggtgccgagcactgcctcgagaacccgggacgtatcccgctggaagtgctggagatccagtccggctcctatctgggcgaagacgacattatccgtattaaagaccagtatggtcgttgctaa

SEQ ID NO: 202552 - DNA, 939 bp, Klebsiella oxytoca
atgcgaatgcctaaaaaattatttaaatataaaaaatttaacgatgattgtatggagttgataattgatgattatttgtattttgctaacccagcccaatttaatgacccgctagattgtaaagtcacaatatttgatgatgtgaatgatgaggagcagttacgaaatattctttcaacgcttcttcagcaaaattctgaaaagaaatttaaggtagctgcgaaaaacctacgttacaatggccccaaaaccactgaaaaaatttctcttttaagcctaagtgaaacggataaaataatttcaggtatctattctgaattttcatttggactaaacgactataatactccgacgatcgagcaagtattagccaatacgattgggagtattatattgtcagggtataataaaggggtgctttctttgtccaaaaaagataaatgtccgttgatgtgggctcactatgctgataaccataaaggactttgcttaggttattctatacctgaaaacgttgctaataaaataagcccaataagctatacaagtgaatctagagagataaggattagtcagataaataggatgttagcgggagatgaaaaggcaaaggcagaaatagagcatgatatatttttgagaaaagccagtccgtggaagtatgaagaagagtggcgaatgttatcggatgttggtttacaaaattcatctatatatttgtctgaagtaatttttggtcttcgttgtaaatatacaactattttcagtgttatgatgtctctctctaaaagagaggctccggttgatttttatagaattgtcgaagtcccgcataaattcactctcaaaaaagaaaaaatatcatttgatcatgaagggttgcaaggcttgcctagatgcatggaaagccttgttcaaatgatgaatgatgatgagtaa

SEQ ID NO: 202553 - DNA, 681 bp, Klebsiella oxytoca
atgaccaataaccagttaacagatgagcaaattgctcagttgttgggtgatgcgtgcatggtgataggcgataggttcgcgactgttgacgaactgactgcagcgaaggcaatcagggcgttagctgtggagctacaggaacgccgcaaggccgagaagaacagcgagccggttgtgttgacagatgaacgaaaccttcatcatattgctatgggccgagaaacctctctgatttggggtaagcagaactcagaggcgggagatattccgctctatcgccacgcgcagacagcgccggaacgtgaccaggtacgcaacgagcacgccaagtggtcacaggccacgttcggcaacgtcggaccgatcggtccgctgaaacacctcagcaaagaagcgctggaagcagcagcagaaacaggcgacctcagcgaatgggctgatatgcaattcctgatgtgggatgcccagcgccgtgcaggcatcaccgacgaacagattacccaagcgatgatcgaaaaactggcggtgaacaaacagcgcgaatggccggcgccaaaagacggcgaaccaaggcagcacattaaagaacgacctcgtaaaaaagtagaccgctgtgatgtttgtactgaaggggctcgcggcgggtgtggaacgtgtatttttaacggtaaatttgaatga

SEQ ID NO: 202554 - DNA, 183 bp, Klebsiella oxytoca
atgcatatgacaaaagaagaaaaagttaagtttttaatgcgacttgcggttgaaacacacaacgcatatcgctctgggcatcttgcatctggtaaaaaacttacagatcacaaccccatcgagacaatcgaaaaaatttacggtaagtacgaagagttacttgataaaaaactcgctgagtga

SEQ ID NO: 202555 - DNA, 1053 bp, Klebsiella oxytoca
atgaaaaatactgtaaaaatgtccagtattgagttggttaatgccgactgcctgcaataccttccttcgcttcctgataactccattgacctgattgttaccgacccaccgtactttaaggttaagccgaacggctgggacaaccagtggaaaggggacgaggattatttacgttggcttgatatgtgtcttgttcacttctggcgggtactcaaaccgaacggtagcctctatctgttctcagggcatcgccttgcgtcagatatcgaaatcatgatgcgtaaacggttcaatgttctgaaccacatcatctgggcgaaaccatccgggcgctggaatggctgcaataaagagagcctgcgggcctatttccctgcgacagagagaatcttctttgctgagcattatcaggggccgtatcagccgaaagataatggttacgcagagaagggctgcgaactgaaacagcatgtgatgacgccattgatttcctattttcgaaatgcacgggattcactagggattacttccaggcaaatagccgatgctaccgggaaaaagaacatggcttcccactggttcggcatgagccagtggcaattaccgaatgaaagcgattatttaaagcttcaggctctgttttcgatgattgccatcgagaagcaccagaacaatgagctagcagcccctcattacgagttggttgaaaaatggcattcgcttaacaagagatattctgaattgctggaagaatataaatcccttcgtaggccattttcagtatcagcgctggttccttatacagatgtctggacacataagcctgttcagttttatccaggaaaacacccatgtgaaaaacctgcggatatgctccagcagatcattacctccagcagtaagccgggtgatgtagtggctgacttcttcatgggctctggttctacagtaaaagcagcaatggaactcggtcgcctcgctattggtgttgaactcgaaactgaacgcttcatgcagacggtcagcgagatagaaaagattaataaaatataa

SEQ ID NO: 202556 - DNA, 318 bp, Klebsiella oxytoca
atgcacattaaacgaacggtaaccacacgcgaacaagttaattttaatgggatagttcgagagagaacagccacccatatagcagctgatgcacatggttatgtaacattttgcaccagtggccataatataaaacgtgacgataataatgaaattattgttgacttcgaaattcttaatgagaatcagtttcctgtaacctgcaaaacctgtttcattctctggcatgctgttagtttgtttaacattagtgatttcatgccagaagaagaaagaagcgacttcaaggatactgacttaattaaagtgaagttatga

SEQ ID NO: 202557 - DNA, 324 bp, Klebsiella oxytoca
atgaatgggtatatcgtcacaattattattgcattcatttttggtcccattctggcgttaccgatattgatcgtcggtttgtttaatataatggatttgatgctgttttcatctcccatcatattcttttgcattcagggttataaaaaagaaagaaaaattaaagatgcttttaagggggtaattcctggcctgattgtatctctgatgctgatggctgtagttcaatttgttaagaatgaaaacgactgttcgaataaatatgaatctcgcgatctgccagctgcagtgtgtgagacacttaagggaccaggattcagataa

SEQ ID NO: 202558 - DNA, 945 bp, Klebsiella oxytoca; identical to SEQ ID NO: 138229

SEQ ID NO: 202559 - DNA, 393 bp, Klebsiella oxytoca; identical to SEQ ID NO: 138228

SEQ ID NO: 202560 - DNA, 366 bp, Klebsiella oxytoca; identical to SEQ ID NO: 138227

SEQ ID NO: 202561 - DNA, 129 bp, Klebsiella oxytoca
atgctggcgaacatcctgctcgccggggaggtctgtcagacgttatctggaccagctgacgggaatatctgctctgtattcctcatactgctcatagatcgcatgctgaagcatcgtaatacgttctga

SEQ ID NO: 202562 - DNA, 576 bp, Klebsiella oxytoca
atgtctataataaagtctgatttaggctggtatccaccgcagggacgatggctgacacgctttgtttttatcgctgcggcgatattgctggttggttgtgacaggcctgccagagaaaagaatgttagcggcggcagcggtaccatagaagcggttaaccatacccactgggcgataaaccatttcagcgtagatgggcagtcagggctggatattatcggcccctggcaggggggcggcggtggctgctgttacggtgtgccaacgaaatggaaaccggggatgagggtgaaagttgagtgggaaaccggtgtgggagggtctaaaggttttcctggatttgctaatacagataagtacttagaatgggaaaaaaaaatcaaagctcaaaaccggaaacatagccagacagtatcggttcctgactataccgggcaaaaaacctgcggaataaaggttcactttttaccctgcgatcaaataaaagtcaccaccagctgctacgactacggcaacccaaattatccgattaaagatccgatcaaaatggaggaacccaaagtatgtccacaatga

SEQ ID NO: 202563 - DNA, 249 bp, Klebsiella oxytoca; identical to SEQ ID NO: 139642

SEQ ID NO: 202564 - DNA, 213 bp, Klebsiella oxytoca; identical to SEQ ID NO: 139643

SEQ ID NO: 202565 - DNA, 225 bp, Klebsiella oxytoca
atgcaaccgtggttaaagaagatgttgacaacttgtggtgttcccgctgacggggcaaagcatgtacgtcgtaaaataggcggccgtttctgccttggcgctgtcttttttgtcattcctgctatgttgctggatctcccattatggggggtgttgcttacccaaatactctatggcttgtctatgtatatcggtatttcgctggcattcgataagaaaaagtag

SEQ ID NO: 202566 - DNA, 600 bp, Klebsiella oxytoca
atggactccctgttaacagaaaggattctcatactactgaatatgaatttttatattattacagacaacacatacctgtttgcaggggtaaaacatttactctcggacttgcaagtttcactacatagagtagcgactaatgatatacattctttggcgtatccaagggatgcaatattattgcttgatggtgctagccataatatatcggttcgtgaatataagcatattaatcaactaaacacacctgtttactttatcctcaatataagaaatgaaattttatctcatcttgcatgcataaatatacttaacgcgtatggaaccgctgaggggctgagaagaagactgataaaaattttatgtggagatattccttcacataatcatcgtgtttatttaacccgcatggaatccgtcattcttcagctatatgtaaacgggttgtcagctttacagataagtcaggaaattactgtaaagaaaagaaccgtatccactcatctacaaaacattctccataaaaccggtatcaaaaagacataccatttgatgctgttaaaaaacatcatcagttttcacctggcacaatacagttaa

SEQ ID NO: 202567 - DNA, 513 bp, Klebsiella oxytoca; identical to SEQ ID NO: 139306

SEQ ID NO: 202568 - DNA, 243 bp, Klebsiella oxytoca; identical to SEQ ID NO: 139307

SEQ ID NO: 202569 - DNA, 2010 bp, Klebsiella oxytoca
atgtccgtgaccgagtctaaagcaaaaacatctggcaaaaccagcaaaaaaaacgtcaaacctgccgaagcagcagctctgaaagaggcgcttgaagcagcacagattgaactggtgccgctgtctgcgctgattaaatcgccactgaacgttcgcactatcccgtacccggttgagagtgtccgggaactagctgaatccattgagaccattggtctgattcagaatctggttgtgcatactctcccggaaggtatgtcaggggtggctgcaggtggtcggcgtcttgcagccctgcagttattactcagtgaaaaccgcatcgatgccgggtatcaggtgatcgttaagcgggttagtgacgaactcgcggttgtggcctcaatggtggaaaacaaccagcgtgtggccatgcatccggcagaacaaattgccggattccgcaaactctccgaacaagggaaaagccctgcgcagattggtgaccagttggggtatggaagtcgccacgttcagcgcatgctgaaactggctcatctcgccccggaaatcctcgaactgctggcaaacaatacccttgatgtggagcagtgccaggcactgagtctggaaagtgatcaggcgcgtcaggtgcaggtatatgaacaggtgaaagctgcttacagcacggtttcggcacatctcatcaagcgggtaattacggaaacggaaatttccgttacacatcctcgctttgtcttcattggtcgggaaacctacgaagcagcaggtggtgtggttcgtgaagatttatttagccaggaggagaatgacggtactgcagatcgtgtgctcatagaccgtctggttatggaaaaactggagactgctgcactggcaattgaactgaacgaaggctggtcatggtcaatagggcgggaaaacccactgcagaactatggtgaagatcgtgaaaattaccttctgcttcctgtgccagaaccgcagtacacgccggacgaacagcaacgactcgacgagttgtacgctacacaggcggcaacggaaacctacgaggatgaagccgctattcaggttctgatcgacgaaatagaaagtcaggcggcacaccgtcaatggactaacgaacagaaggcaagctgtggcgtagtagcctgtctccataatggtgagctttgcattgtgcgcgggattcagaaaaaggttaaaacgaccggggaggcggatgccgctgcgcaggcgaccagccgtgacctgcatgtgatcgaccgtaaagagccggatgccgcagaagggatcagtctgcccttactcacaaaaatgtcttccgaacgcacactggctgttcaggctgccctggtacaacagccacagaaagctgtagccctgatggtctggcggctgtgctcctgcgtatttgaatactgccttaccactcgtcacccctttgtaatgcggatggatgttcatcacagcgggttggtcagcgaagccccgaccggaaaagacggtctggcgtggcaaactcttatgcaggagaaaaaccgtctggaaggcctgttaccgcaaggctggaagaaggacttttccacatttttcacactggatggtcagaccttgatggctctgatggctttctgcacggcctgttccgtggatggggttcagacccgtgagcatgggcataccagccgtagcaaccttgatgaggtggagacggcgatcggcttcaatttgcgtgactggtggcagcccactgctgaaaacttcctcggcctgctcagtaaaaaccagatagtggaggcgttacaggaggctgggctggattcagtcgccgtcgaagcggcgaagctgaaaaagggagatgcggcgatccttgcagagcgttctctgtcagatacccgctgggtaccaggctggatgcagccacgggatacggaaaaatcgggttcgacaacgacgcccgagcccgatgctgacaacgaagacaacacggcttgcgccgcctga

SEQ ID NO: 202570 - DNA, 432 bp, Klebsiella oxytoca
atgaaaactgtgctgaatcttgatgttctgaaaaccatgtctaccgaagaactggaagactatcgtaacgccggtgaggattttcgtcgtgaactgagccatgcagtcatgcgcgatttaacggtaccggatggctgggtagtaaatgcagaataccgggccgaatttggggggttctttcctgtccagctccggtttagcccgtctcatgaccatttcgatgtagcagtatgcagtccgggtgatctcagtcctgtgtggataatcgtctttattacccgtggaggccagcctttctctgtcgtttgctcgatggccagatataacccggaacggattaaccatgcgctgtcccttatcgcgcgcctcgatgaggacggatattcatttgccagcatcatcaacaccctggaacaggagggcgaacaatga

SEQ ID NO: 202571 - DNA, 723 bp, Klebsiella oxytoca; identical to SEQ ID NO: 139625

SEQ ID NO: 202572 - DNA, 168 bp, Klebsiella oxytoca
atggctgaagagtcattatattactataaatttgattttgagggtaatgatctttctcaagttattacacaggcggctataatgagaggaatgaataaattaagtaatccaaatgatttttcttacgatgtatataaagaaaacatccggaaagtatatattgaataa

SEQ ID NO: 202573 - DNA, 699 bp, Klebsiella oxytoca; identical to SEQ ID NO: 86299

SEQ ID NO: 202574 - DNA, 189 bp, Klebsiella oxytoca; identical to SEQ ID NO: 86300

SEQ ID NO: 202575 - DNA, 825 bp, Klebsiella oxytoca; identical to SEQ ID NO: 17388

SEQ ID NO: 202576 - DNA, 183 bp, Klebsiella oxytoca; identical to SEQ ID NO: 16564

SEQ ID NO: 202577 - DNA, 1500 bp, Klebsiella oxytoca; identical to SEQ ID NO: 86306

SEQ ID NO: 202578 - DNA, 174 bp, Klebsiella oxytoca; identical to SEQ ID NO: 16562

SEQ ID NO: 202579 - DNA, 309 bp, Klebsiella oxytoca; identical to SEQ ID NO: 86308

SEQ ID NO: 202580 - DNA, 558 bp, Klebsiella oxytoca; identical to SEQ ID NO: 86309

SEQ ID NO: 202581 - DNA, 1056 bp, Klebsiella oxytoca
atgagtagccgaaacagcggtcttaagcccataggcgcaataggcgactctggcgggctactggaacgccttgaaaatatcaggaagcggaacagtgaccgaactccggctgctgaacgcggtagaccgtctaacgtctcgaccgtgcatgaacagatggaaagggcaaaagagcgggacaaagcgttgtcacttgtccgcaagcctccacaaggcgacgctcagccagatttttttgcgcccagcctttatgacgtgggcggccgcgacaatcgcagcgtcatggatgtggccgtgttccgtttatccaagaaggacaagcgagccggagaactgatccgctacgacctgccggatggatacgtggaagtgtccgcaggagcgcacggaatggcctccgtttgggactacgacattgtgctgatgatggtgtctcacttgaccgaagctatgaaccgctatcgagaaggaaagggtggcaagccggggagagtgtttcggctgcatgttagcgacatcctcagatttgcccgacgtggtaacggtagtagtcaggttaagggagtggaagccgcgctagatcggttgcggggtactaccatcaagacagtgcgcgaaagcggcaagttccggacaaccgaagccgaggggctgatcgcgcgctatcgtgttctgtcacgcacggacaccaagaagataagttctgtcgagattgaagccccggagtggatttatcgagaagtcaccgagggcaagcggccggaggtacttacagtacaccgggactactttctgatcgagccgggcataggacgctttatctaccgactggctcgccgtgccgcaggcagggatagcgctaaatgggctttcaagaccctttacgaacgcagtggaagcggtggctcgttcaaaaaattctgtttcttccttcgcgggatcatcaaagccgatgacctgcctgaatatgccttgtgcgaagaagcggggaaggatggccctctactggtcatgaggcaccgcaattcctcgtcggaaccgctgggcggttcctaa

SEQ ID NO: 202582 - DNA, 2481 bp, Klebsiella oxytoca
atgtcggtaccgaaccagacaccctataacatctatactgccaacgggctgaccactgtctttgcctatgagttttacctgatcagcgccagcgatattcaggtgacaatcaacggtaacgaagtaacgtccggctataccgtctctggtgtgggtaatactggcggtggcgaggttacttttttgagcgcgccggccaatggcgctacggtcatttttgagcgtgtaacgccgacgtacaggctcaccgattaccaggacaacggcgacctgctggccgataccgttaacaaagattttgaccgtctctggatggcaatccagcgcgcgtttatatatctcggcgttgcgcttactcgccctttgtttggtggcgggccgtttaacgctaacggctaccggattgctaatctggctgatccggttaacgaccaggatgcggcgacaaaaatattcgtggtggagaacgggaaaactaatcttgcacgtacgctgcgtgttccagaatctgatattactccgctgcctggagtcggtgggcgcaaaaataaaatactggcatttaacgacctgggaaatcctattgcagtactgccagaatctggatcagccgctgatataatgattgagttggcagccagtgacggcgcaaaactgatagggggtcttgattttgttactcctgaaatgatgggtttcatgcctggctctttagatgacgcccaaccctatattcaggcagctatcgattacgccgcagaaaatgacaaacgggttattctgcagggaacttattacgttaagtcgttgccatacgatgcgtaccttccgtatgacgacggtacggtatatccagcatggataaatgctggaacagatgctaatttaccccccgaaactgcgtatactataaaggcagcttttaaagtccctaatggaatttttattgagggtattgatcctgaacgtacagttatcgaatgggcgggtgatgatgaatggaactacatcaagccgacctttacaaataatggcccgctatgtttttggattcatggggataaaggtgttagtgggctggttagataccatctccacaagctttgtattaaaagctttatgattgggcgtcttgttgagggcatcagtgcatattctacagaagactatttgcgcatcgaacagtgcgggatttcaggtctgatttttggcgaagataccgtatttaaggggtttatacatatcagggattgctggacaggggatatttacggcggatggtggacgcagcgaaatcatacgcaatcagctgaccacttgcctccatatcccgccggtgatgtttatttgttaggttgggtagatagtagctatatccataaatatcatttttatcagtatctccataagtggggaagttatgatacggcattagattcgtggtttaacgcatatatttaccgctctcaaaattcagtagttacagcgagcggcgggcgattgactaacggatacacatcatccactcctctacctgattataatggcgtcgctgggcgcagtatcagttttttaaacaggtataaccgggcgatcagttctgttgttatcgaggattttaaatgccttggctcacaacgtgtaccgattaatttaattacaggctcagccaactacctctaccgcaatattgtaaaacaggcgtacgtagagcgtgttggactcttagatacttcgttaaatagctctgtgccctcaaacttgttttacgaatcaggagcagaaaccctgagccccgagacaactctaccgagcatgtcaaccgagggtaatatcgcatgctggcgtgtcacgcagtctggtgcagtcccaaccagcccgtacaatgggaatccgtttgttctgacgggaccggaaatcctgacaacaattcgcaaagatgccgcgttatatgaaatatggaaggtcagcgaatggaataccgtagttaatgccgagagggcgtggtatagattctataacggctacagtatccaaccagcgatttattttgacaatgatggttactcgttaacatcgggagggaagttttattacaacaacaaaacgtttacccccgttgtaactgttggtggcacgccggtgtccctgacaaatgctaacggccgatataatataaatggtggccttctaactgttcatttcagaataactattcctgctgcatcggtaacggccaacgcgatacagatcacaaacctgccatctcagtcagctacggcatcttctggtcagtcatcagcacctgttactgtgattcaaacaggcgcggcagttgggttaacggtattcgctcgcgtcgaagtcggtacgcaaacaatatcatttgtcaccgatagcgtggggacaacatataagccagaccctggcgtcactctgacgttgcttggtacaatttcatatcagctaaactcgtggtga

SEQ ID NO: 202583 - DNA, 465 bp, Klebsiella oxytoca
atgactaaacatattggcgtcaaattaattaatgcgttccctatgacccgccaggcatataacgattttcgcggctggcaacttcctgccgacgagaacggcgcggatgaaggctatctggttgaatatctggacggcggaaaacctaacaccgatcgctttgatggctatgttagctggagccccaaagaggtattcgaaaaggcttaccgtccggtatcagggctaagtttctgccttgccattgaagcgctcaagcagggtaagaaagttgcccgcgctggctggaatggaaaaggaatgtggctcaagttagttcctgccgatatcgctgacaaagtggcgtttgagtatgaggctctcgacggtgctccttggatcggcatgaagactgctgacgataagtttgttccgtggttggcgagtcagactgatgttctggcagaagactggcaaatcgtttaa

SEQ ID NO: 202584 - DNA, 285 bp, Klebsiella oxytoca
atggatattagaaatttgctggaaagaattcgtgaagttaaagatagcctagaacgagcaaacagaatcatcaacatttgcggtaatgaatgtcgctcctcagggattttggcagatggaagaaatggcgagtgctatctcaaggtcgattcatcagaaattaaagagctggcggaaagccaaaaggttcatctcgaaagcgaactagagcggcttgtagaagctaaaaataccgcagatagagtggttgctgggctactacccgaaattaaacaaaacgcctaa

SEQ ID NO: 202585 - DNA, 186 bp, Klebsiella oxytoca
atgctcaaaatcaccctgaagcgaggggatgccattcatgtggtttttccggacgggaccaacgggattatcgaagcatgcgcacgctgcgaattcgattttcattttccacagagcgtcaaaattacccgcgagaaccgcgcatttcaggataaaccaaacctgattaagcctaatcagaaataa

SEQ ID NO: 202586 - DNA, 1494 bp, Klebsiella oxytoca
gtggatctgttcgccgccattggccgctgcgaggtgaaagcggtgtggattatgggcaccaatccggtggtgtcgctgccggacagccatgcggtaagcgaagcgctggcggcctgtccgctggtcatcgtttccgacgtcgccgccgctaccgataccggacgctttgcccatatccgctttcccgcgctggcgtggggagagaagagcggcacggtaaccaactccgaacggcggatctcacgccagcgcgctttcatgccgccgccgggggaggccagagccgactggtggatcgtcgcccgcgtggcccaggcgctgggcttcggctccgcctttgcctggcagcatccgcacgaggtgttcagcgaacacgccgcgctttcaggatatgaaaacgatggccagagggcgtttgacatcggcggactggcggatctcagccgcgaagcgtgggatgcgctggaaccggtgcgctggccggtgagccgcagtcatgcaagctggggtttgctcaaggggtggcaccgcagcggcaaactgcgcatggtcccggtgaccccacagcccactcgggcggtcaccgatgcgttctatccgctgatcctcaacagcgggcggatccgcgatcagtggcacaccatgacccgcaccggcacggtgccgcgtctgatgcagcatattagcgaaccggtggtggaagtcgcgccagcggacgcgacgcgctatcagctgctggaaggtgaactggcgcgggtccgctcaccgaatggggtgatggtagcaaaagtgacaatcagcgctggccagcgtcccgggtcgctgtttgtgccgatgcactggaatgatcagtatgctcgccagggacgggtgaataacctgctgagggcggtcaccgacccgcactccgggcagccggagagtaaacaggcggcggtagcgatagccgcctggctgccggcgtggaaaggcgagctttttgctcgccagccggttccgctccccgcctcgctgcactggcggcggcgggcggcgcagggcgttatccatctttcgctggcggggaatatccgctcccgcgactggcttgtgggctggtgtcagcgtcagggatggcagatgcaggtagccgaaggcggcaacctctggaacctgctggcgtggcaggggggagagctgatgctcggctggtggagcgacgccagcgagccggctatcgatgccgagtggattcacgccgcgtttcgcaccccgccgcagaacgccgcccggcgccacgcactattgagcggcagaaaaggcggcgatgagatgccgcgcgggcgcattatctgcagctgctttagcgtgggcgaacgggcgatagacgaagcgattgccagcggctgccgtacgcctgccgcgctgggggcaaaactcaaatgcggcaccagctgcggttcctgtctcccggagcttaaggcgctgctggcggcgaagcgggttcaggcctga

SEQ ID NO: 202587 - DNA, 234 bp, Klebsiella oxytoca
atggctgaacgatatgacgtacacgcgtttaaatgcgaagacaactgggtgctgttcatctggataaatgagaccggcattaagtttatcggccgccatgctcagagctacgatgaagccaagtctgactttttaaaacaggctgatgctcaacgactttccagtcagtcaggatttatgcagcctctcgctgatttcaaaataactgagaaggtagaggtcttcacgctatga

SEQ ID NO: 202588 - DNA, 531 bp, Klebsiella oxytoca
atgaaatatccaatagtatcagtaaatggcgtgtccgttcgtgttgacgacgaggggcgctacaaccttaacgatctccatgcggcggccgtaaccaatggcgaagcaacggaatcacaggggccgagtaactttttaagaagtgcgcaagttaagcggtttgttttagcacttaaagccaaagctcaaaaaagagctttggaagaaattcaaccgcttaaagtaataaaaggcggttcggaatctggtgcgtggggtgttgaactgcttgccattcgctatgcagcatggattaagcccgagttcgaaatcgaggtgtatgaggtatttcggacggtcgttcgtatgggcattggcgctatgtcccgcctgaacaaaatcgaccacatcatcaacacagaaacaaaggctatcagtcagtgtgcaagccagatggcgaagtggggtgttggcgggcgtaaacaattgctccatgctgcgcgtgatcgggcagctgatgaggttcaattgtatttgccgggcattgcatga

SEQ ID NO: 202589 - DNA, 162 bp, Klebsiella oxytoca
atgaaaattcattctgctgtatttcaccctaatgggtgttttattgatgcactgaaccagtctgatttctgggtgctgcttagccgcactttggggtgggcaggttctaactggtgtgcgaatctgatgaatttaccccagatggaggaatttttgaattag

SEQ ID NO: 202590 - DNA, 507 bp, Klebsiella oxytoca
atggataagttcgacagagaattacagctgcttatacttaaggccgctgtggatgcataccccaaaacaacttcacatgagcaatttcgtaagcatatagaattttactctgaagaacactcgcaaaaagtcctggcaaatataagctaccttgttgagcatggcttaattaggatgttttcccacaatcacttggcaacaacaagcgtggcgcttggagggatgctcgccacaaaagatggaattgatttcttacttcaggatggcggactaggtgcgattttgaaagttcaaaccatcaaattgcatcgagaaacacttacagccattgaggattttatctctctggcaaacattcccgaatctgagaaggagagtatcgtttcaaagcttcggcagcttccggcaaacgccatagaacatttgacgaaggaattagtggtgaaaggggctctgagcctgccggtagcacttccactaattcaaaaattcctccatctggggtaa

SEQ ID NO: 202591 - DNA, 669 bp, Klebsiella oxytoca
atgagcatctatcaacgcatcaacggcgctgactggcgcaatatctgggttgttggcgacctgcacggctgctacaccaacctgatgaaccggctggacggggtcgggttcgacccagcacaggatctgctggtttcggttggcgacctcatcgaccgcggatcagaaaacgttgagtgcctagagctgatcacaatgccgtggttccgcgccgttcgtggaaaccatgagcagatgatgattgatggcctgtcagcgcatggcaatgttaatcactgggtggcaaacggcggcgggtggttcttctatctggactacgacaaagagattctggctaaagcgctggctcacaaagccactgagctgccgctgatcatcgaactggtgaccggcaaccgcaaagtggtcatctgtcatgctgactacccgcataacgaatatgagttcgacaagccagtaccagaggaaatggtcatctggaaccgggatcgggtgagtgatgcgcaggacggaaacgttagtgaaatcactggtgctgacctgtttatcttcggtcacaccccggcgcggcagcccctcaagttcgccaaccagatgtatatcgacaccggggctgtgttctgcggccgcctgaccttggtgcagatccagggtggtgagcatgcgtaa

SEQ ID NO: 202592 - DNA, 135 bp, Klebsiella oxytoca
atgagcatatacgataaaaacccctccggagaggggtttgagattagcatgtggctttgcgttctgcgggtgatttgctcactgttttatcccctgctcagtatttttcaggtcgttttctgcgaagaggattga

SEQ ID NO: 202593 - DNA, 195 bp, Klebsiella oxytoca
atgtcaaaggttgctgattttgtgaaacgcatggagaagcaaggtcgccagcttgaagtgaacggtaactttgttgttatctcgccgactaatggacttgaaatgtccgacctgattgagatgcaaaacctaaataaaaaatgcgaacttgcggattatatttccaagcagctgcgcgaggtggccgacaaatga

SEQ ID NO: 202594 - DNA, 369 bp, Klebsiella oxytoca
atgactatcacactacagacagtaaacgagctcatcgcctccctggagagcgcaggcgagctgtcgatcaaagagacaaaggttatggcgctgacgaaagcgtttaagcagctggttgcggagaatgtggagctgaaggcggcaattgatgcaaccataggatggcagcaatctaccgatgtggaaaacgttgaaagcgtgagaatgttgctcgatatcaatacccccgccaccgatcgcatcgtagccgggattaagtctgatggggtggaggagtttgccgcgcatcttgtgtcaatggaatgtcatctagaggctgagtgggcgaagtctttcgttttggaggtgttaaatgtcaaaggttgctga

SEQ ID NO: 202595 - DNA, 225 bp, Klebsiella oxytoca
atgatttttctcaatttaagtcaaaaggcaacgataggtcgccagggcaagtatggctgggaacaagaaacagtctacgagcctgtgtttgttgccgcagaccacattatcagtatgtttttcgccgggctgacagtcctgaaaatgacctccggagagcgcattgaagtgaaagaaaccccggaagaaatcatcgccatgcttaccgaaggagccgccaaatga

SEQ ID NO: 202596 - DNA, 132 bp, Klebsiella oxytoca
atgttctcggatcatctcttcacctttgcctttgccttatcgcggctaacggagcgttgttacctattcccggcgccaacgatgttgtttggatgggttaaatttagcgtaatgctaaataaatggcaatag

SEQ ID NO: 202597 - DNA, 663 bp, Klebsiella oxytoca
atgaaagaacgcggaatgatttttaatgagtatcaggtgcgcgccttgcttgatggcagcatgacgcaggttcggcgccctatcacatggcgtcagactcgggctactgaaattgcagagcgcgacgatggaagcatgtggccatggagcgaagatgcggagcacgtatgcgattactggcatccatgtccattcggtgcagttggcgatgcgatttatgtcagagagtcattttcgcggctcgacgcatttaatttctttgatccagcagttcctcacgaagtcccggacttctggtattgggccgatggcgagccagaatggggagactggacacgtccacaatctggcgcagtaatgcctcgcgccgccagccgaatcaccctggagataaccgatatccgggtcgagaaacttcagacggctaatgaatcagacttgctgaatgaccttggcgacatgctcgaacactgcgaaaccgtagctggacgagccttcaaccatgccgagcattatgcgatcgctggcgttccggtagggctgtgtccagaaatgcacggctttaaagcgtggtgggataaggccaatggcgctggtagtttcgactccaacccatgggtttgggttatcgagttcaaacgcattgaaggcggtgcagcatga

SEQ ID NO: 202598 - DNA, 255 bp, Klebsiella oxytoca
gtgacggaatatctgtttttatttcactcaacggtgggggtagtgcggatgcgcaaagccctgcaggcggcgggagcgtccttccgggtgaaggacattccgcgccagctgcgcggcggctgcgggctttgcatttatctgagctgtgagccgggcgaagaacagaagtggattctccccggccaaacggaagctctgtttcgcgtcgccggggatgattatcagctgctggctcagtttccgccgcaggcgtaa

SEQ ID NO: 202599 - DNA, 177 bp, Klebsiella oxytoca
atgatgatctcatatcaggaacttgttcgcaccttccctaagtcagacgtcagccagcttaaacgggtatatgacgcgatgagtccggatgaaaggtacaaattcgcccgtgctataagggaaaacacccgattcagggcacaattcggtgagggaaataaagatgaagataaataa

SEQ ID NO: 202600 - DNA, 159 bp, Klebsiella oxytoca
atgaagataaataacccagtcccggacgaaaccggtcaaaccgttatagccgtttctcagactgatttcaggcaactgaaacagacatatgacgcgatggagaaagttgctgaagcggtattcaggaacagtaactggaaattcatttttaatagataa

SEQ ID NO: 202601 - DNA, 279 bp, Klebsiella oxytoca
atggacaatgataaggctctgctttctttatgtgtgttgttggtcgtagtggcgatccctgtgttaattttaaaattaacccgacccggcaatgacgatttaattaaagacgggaagtactggaccactgcgtgttccctgaaagaggttgatatccccacaggaatgtttaccagtaacattaatcgtctggattgttcaggtgttgttgtgaatgtggtgacggacaaatacgatcaggcagtatccgcgtataacaaatctaaaaatcagggatga

SEQ ID NO: 202602 - DNA, 189 bp, Klebsiella oxytoca
atgattaactttaaagactttcctggtgttaaagagggtacattttttatctctcaggatgaaaagcaagcgactgttgatatgaatgaatggattgaaaacaatgcggtttcaataatgtcgattgaaacgatacagagagaggggttattcatttgtgtcaggctctggtacaaagaggaacgttga

SEQ ID NO: 202603 - DNA, 672 bp, Klebsiella oxytoca
atgataacaaatgatattgttaatcgcgaattgggaattttaaaaagggtgttgagctataaaggcttaaggaaactctcaatatggcattgtttgtggccagggatcatgatgtgtctttggtttgcactgtggcctcttttaatttttagtgtaaagctgcatttcagtgagttggttagtgaggagaggcttggtttatttgtttctactattgctgttgttattcttggttttttttcgattgttttttcattcaacgcaagatcattgtatctctctgttccttacggtttcataatatattctgagatgtattcatttttttctaaaaaactaaggcgttatgtctccacctttcttttgtggtatttgttagttgttgtattttgtgctcttgctccttttggttttgttttttttacattgattacaatagggtctgtaatcgttttgagcgtatgtgtaaatattgggtttaatgcttataaacttaatgcaatggcctctattattacatcatttaaatccgtaggtaaaactaaagcattgaggaatgatgacggatatgaaagcataaaacttgatgagcacaatcctgctacgggtcttcctatgattgggggcgtagacgttgggggtaatccctatggttacagtcgacatgaatag

SEQ ID NO: 202604 - DNA, 126 bp, Klebsiella oxytoca
atgattattgccgccgaagtaaaacgtgatgagcagggataccggacgcatcctgcgcttgcgcgcagcggctgtgaaaccgcggctgaattcagcaactggttccgtcagaccacaaaagcctga

SEQ ID NO: 202605 - DNA, 558 bp, Klebsiella oxytoca
atgaaaataaaccgttctgtccgcagatggtgtctgcccggtctggtcacactgagcctctgcacacccgtaccgatcgtttatgccgcgagcatcgataccgggttttccccggagggaactgccctggagctggttctgaagaccattgatacagcgcagcaggaaatccggctgatggggtattccttcacctccccggaggtggttcgctcgctcatcacagcgaaacgacgtggggtggatgtgaaggtcgtgctggaccataaagctaataccggcgaacgcaacaatgcaagccgtgccgcgataaacctgctgaccagcgtgggcattccagttcgaacagtcagcgcctacaaaattatgcacgacaaagtgatcgtcgctgacgggcgcaatacagagaccggctcgttcaatttcagccgtgccgctgatcgttcgaattcagagaacgtgctggtagtctgggatgaccctgtcttagcccgcagttacctgaaccactgggcctcccgctggtcgcaaggaacggactggaaacagacatactga

SEQ ID NO: 202606 - DNA, 915 bp, Klebsiella oxytoca
atgagaactcattatgataacctcaaggtatcacgagatgcccctgtagaggtaatacaagcagcgtatcgtacattggctaagaaataccaccctgatgtaaataaaaacaatcctgaggctgtcaggataatgcaaattattaacgcatcgtatgatgttttaatcgatcccataaaaagaaaagaacatgatcgctggattattaaagaaacgtggagggaaagggctgaggccacattagcacgaaattcggaaacaaatactaacgttcaagcaccagttgaaacaacaacagtaagaaaaccgaagtcattaatgacaatgatgggtatcatattttttcctttattttctatattgagatctattgctggcctgtgtgtaataggatttatagcgtacgcaataattaacaatatgaatgaaggaggctcttcttcaaataaaacagcggccgtaaacaacacttcgcctttaaaacccgaacgtttaacaaacaataacggtatttgtgattcatccgtgcaacaacatcaatggcctactatcccaactgttttatctgaaaaagatcgtcgtagtggtttgtcctcacttagattagataatactcaaaataatgaagggttacgggtccgattgacattggataatgcatacatcaaaactgattttgtacgtgaagtcttcgttcccgcggggagtcaaattactcttgaacaagtcccatctggaatatatcgagtaaaaacacaaaatattaaaaatggatgtgcacaaatatctgaaccaatcaatatgattgaaagaaaaacttcaacgggaacagagtacagtgacaactctttaacgttttatcctgtggccaatggcaatacacatttcctgtcattatcggcttctcagttttag

SEQ ID NO: 202607 - DNA, 981 bp, Klebsiella oxytoca
atgactctcattatcggcgggtatgaaataaatgaatttgaagacggggcgacatttataattgctgatagcgctataacaaggatgacaacttacaaaaactctactgataacaagaagacgacagaagttaaaacattacttaacggatatcgcaaattttatgaaattgatttgaaaataaaacaccctaaatttaacaattcaggtttttttgaaaaataccataaaatcgaaacctatggaaagtgtgttatcgctttcgctggagggaaagatactgcacatcatataattaatagtatagaattgagtttatcaaatttaaaaattgccctaggtgatagcatctcaatatatcttgttccgatgggcaacaaaacccctcaggaaataaatacatcatatggtcagtgttgggatgttgatttttataactttagggacgtacatttattgttagataaaaattttatatcaaccttaattaaggatgtgatatctgaatctgtaaattctgcaaggaaatacaaaattgacgaagaaggtataaaggatttggagtgcgagtttttagtttcaatttattgcgaaaaaacaagaagaaattatttattcaagtatacagtaaccaagcaaatgagtggtgatatatttgtgcctgccgttgaaatgagggaggttggacgtaatgaattggtgtatataggcgtccctgaatatgggaacgaaatgattaaatgtcatcatgaattcataaatagccccgacttctcaaagttgacccaatgcgaaggcttagactctgataagttggagtttgttgagaataaatccatatttaatttcatgataattaaatttatcgatgtagtgaaaggttgtagcgatgataactacaaaataatcgacttccccgtgtttggattgaatattgacagaactaaaattgaactaaaaacatataaatatgaagattaa

SEQ ID NO: 202608 - DNA, 411 bp, Klebsiella oxytoca; identical to SEQ ID NO: 92378

SEQ ID NO: 202609 - DNA, 153 bp, Klebsiella oxytoca; identical to SEQ ID NO: 92382

SEQ ID NO: 202610 - DNA, 360 bp, Klebsiella oxytoca
gtggactaccgccatgaaggggcttatgtccttgccaaaggccgcccggtgccgcccctcagaccgctgccggatgtgatgccttttccgtataccggcaacccactgcacccaaaccagaaaccggtagaggcgctacagccgctgattgagtcattcagcgccccgggcgcgattatcctggacccgtttgcggggagtgcctcgacctgcgtcgccgcataccgcgccggacgccgctacatcggcattgaaatgctggcgcagtaccaccgggccggaaccgagcgactggccgccatgcaccgggccgtcaacaccccggcggcgaacgatgaatggctcccggaggtggcgtaa

SEQ ID NO: 202611 - DNA, 2001 bp, Klebsiella oxytoca
atgtcagtgaccgagtctaaagcaaaaacccccgcgaaaaccagcaaaaaagtggtaaaacctgccgaatccgccgccctgaaagccgcgcttgaggccgcacagattgagatggtgccgctgtcggcgctggtcaaatccccgctgaacgtccgcaccatcccgtatccgccggagagcgtccgggaaatggctgactccattctcgcggtcggcctcattcagaatctggtggttcacacgctgccggacggcctgtcgggcgtcgcagcgggcggtcgtcgtctggcggccctgcagcttttacaacgcgagcagcgcatcgatgccgggcatcaggtcatcgtgaagcgtgtcagcgacgaactggcagtagtggcttcgatggtcgagaacaacaaccgggtggcgatgcacccggcagagcaaatcagcggtttccgcacgctgtctgagcagggcaagaccccggcgcaaatcggggaccagctggggtacagttcgcgccacgtccagcgcatgctgaagctcgccagccttgccccggaactgattgccctgctggcagagaacacgctcgatgtggagcagtgtcaggcgctcagtctggaaagtgacccggcgcgtcaggtggagatttaccagcgcgtgaaggcgcagcacagctacgctccggctcacatgctgaaacgcgccatcacggacaccgaaatatcggttcgcgacgcccgatttatgtttgtcgggcgcgaagcgtatgaggccgcagggggcgaagtgcgcgaggacctgttcagcgcgcaggagggcgacggaacggcagacggggtactggtcgggcgtctggtgcaggagaagctggagtccgccgcgctggctgttgaaatgcaggagggctggtcatggtcactggcacgggaaggggcggtgcggaattacggtgacgaccgcgagcattatctggtcctgccggagccggagggtgaactcagcgctgacgagcagcggcgtctcgatgaactgtacgccacgcaggaagccacggcgacgtatgaagatgaagccgccattcaggtgctgattgacgagattgaagaggcagcatcgatccgggcatggacaccggagcagaaagcggcctgtggcgtggtggtcagtctgagtgacggcgagctttgcatccagcgcggtgtgcagaagaaggtgcaggcggcggtcgctgacgcgcaggaaagtaccgtctctcaggcttccatccatgtggtcgccagcagcaccccggatgtggcagagggtatcagcgtaccgcttctgaaaaaaatgtcgtccgagagaacgctggcggtgcaggcggaactggtgcggcagccacagaaagccgtggccttgatggtctggcggctgtgcagttgcgtgttccactactgtatcaccacccggcacccgttcgtgatgaatctcggggttcaccacagcagtctgaccagtgaagccccgaccggagaaaacggtcaggcatggcagtcgctgatgcaggagaaagcccgtctggaagccatgctgccggagggctggaagaacgatttcaccaccttttttgccctcgacggacagaccctgatgtcgctgatggccttctgtactgcctgttccgtggatggcgtccagacccgcgaacacggacataccagccgcagtgacctcgacggtgtcgaggcagcgctcgggttccatctccgtaactggtggcagccaacagcggataacttcctcgggttactcagcaagaatcagattgtggcggcgctgaaagatgccggactgaccggggccgcctcggatgctgaaaaaatgaagaaaggcgatgccgccagtcacgccgaacagtggctctccgggacccgatgggtgccgggatggatgcagtccccggatgccgcaacgccggaagaagcagacaccacgcctgacactgacgaacccacctcacacgctgcctga

SEQ ID NO: 202612 - DNA, 1422 bp, Klebsiella oxytoca
atggccaacttcaatacgatcatcaaacgtaagcagtacctgtggctgggcctcattctggtcggtggcgcgggcgccatcggggggggaatgtatctttctgacctgaacctgagttcggaagaagaggcccctgtgcagggagagccggctccggatatgaccggtgtggttgacagtaatttcaacagcaaagtggagcagcatgcgacaacggagatgcaggccactgctgcggacctgaacaagcgctttggcgcgctgcagggcgaagtggacatactgagtaagggccgtgctgccgatcaggttcgtatcgagcaactcagcaatgagaatgccgcgatgcaggagcaactgaggacgctgggcgtcaggccatccgttcccggtggagaaccggcgccgacccctccctcgccggcacccgggccggaaggcgaaccgcaaccggcaaattatccgccacagcctggtggtgcggtaccaccgccgaccgctttctatccgggtaacggtgctgtgcaacccccgcaggtcagttatcagtctgtaccggtaccgaaccagattaaccgtaaaacgttcatctacaacaaagggaaaaagggcagggagctgccgtatatcccgtcaggcagttttgcgaaaagcagtctgatcgaaggcgctgatgcgaatgcttccgtgaccgggaatgaatcaaccgtaccgatgcagttacgcatcatcggtcgggtggaaatgccgaacagtaaaacctatgacctgaccggctgctttgtcggcctggaagcctggggggatgtctccagtgagcgcgccattgtccggacccgcaatatcagctgcatcaaaggggataaaaccatcgaccagccgattaacggtcacgtctcatttatgggcaagaacggtgtgaaaggcgaagtggtgatgcgtaacggcaaaatcctcggctgggcctggggcgcaggctttgttgacgggattggtcagggcatggagcgggcttcgcaacctgctgttggcctgggtgcaacggcatccgttggcgccggggatgtgcttaagatggggattggcggcggggcatccaaagccgcacagaccctgagtgagtattacatcaaacgcgctgaacagtatcacccggtcatcccgattggcgccggtaacgaagtcacggtggtgttccaggatggtttccagctgaaaaccattgaagagctggaagcggaaaagaacgggcaacagcaggcgcagaaccaggcacaacctgaacaatccgggagcaggtcacagcaatccggcgggaacctcaatggttttaataccgatgagatgctgaagaaactgggcaagcttgacccgcgcgagttctcgccaggggctgcatctcagggagaaaacaatggttaa

SEQ ID NO: 202613 - DNA, 216 bp, Klebsiella oxytoca
atgcggagagtgaatcattgccaccctctgcttttgatcgtcgggcagggcaaaaaaggcgcgggattgctgctgcacggcctgctgcagcgactcatcgacgccgtggttgatcagataaaagaaaccgatatcgcgggcggcgtggcgcaggtcggcgagaaacgccgctttttcagcggggtccgcgtagcgggccagatccagtatcggtaa

SEQ ID NO: 202614 - DNA, 276 bp, Klebsiella oxytoca
atgcagcacccaaacgatcctctgcacggcatcacgctggaagcgctgttaaacgcgctggtcgcgcgatatggctgggccgaactggcgaaacgcatcaacatcaactgctttaaaagcgagccgagtagtaagtcgagcctgaagtttttacgccgcacgccgtgggcgcgtaaagaagtggaagcgttgtatatcgattcgttgtccgataccgatacggcaagagcggaagcgccggcgaataatccgtgggcacactggcagaaaaagtag

SEQ ID NO: 202615 - DNA, 189 bp, Klebsiella oxytoca
atgaaaaatatcggcgtagtcaccgcactgctgttagccgctacactttcgtccggggcgattgccgcagagaatagctttgcgcgtccggaggcaggttcaaatatcgacacgtccgtgcatcagaatcatattgatgtcagccatgcctttgataaagagagcctgactgcaggcaatcttcagtaa

SEQ ID NO: 202616 - DNA, 741 bp, Klebsiella oxytoca
atgataacgctcaataagatcagtaaaagcttctccggtgaaagagtgctaaaagaggtatcgctcagcattcattccggcgagattatttgcattattggccccagcggctcggggaaaaccacgctattacgtacgcttaatttcttagagcctgccgatagcgggcaaataagaatagatgatgtggcgctggattgcgcaaaagcgggaaaaaaggagattgaaaaactacggtcaaaaaccgctatggtttttcaatcgtggaatctttttcataacctcaccgcactgcaaaatattaccgaaggattgatatacgctaaaaaacgcccgcggcaggaggcgctggctattgctgaacgactcttaaagcaggtggggttgctgcataaaaaagaccactatccgcacagtctctccggcggccaaaagcagcgtatcggtattgcgcgtgcgctggccattaaccccgccgttctgctgctggatgagccgacctcagccctggatccggaaaaagtcggtgaagtgctggagcttattcagaccattgctgccgcgggccagacgatgatcatcgtgacccacgaaatggcgttcgcccgtcaggtcgcttcccgggtggtatttatggaaaacggcgaaatcgttgaacagggcccggcggaacagatatttggcgcggcgcagcagggccgaacccgggcgtttcttgcgcaactgcactatcatgcctga

SEQ ID NO: 202617 - DNA, 843 bp, Klebsiella oxytoca
ttgaaaaataaaattttactggtgagtgcgctggcgttggcaatgggaatgaacgccgcgcaggcggttgaaaaaagcgcaaacgcgaaaacggttgaggttgtcgtcaatgctaacggttttccctttagctttgttgacgataacaacaatattaccggttacgatggcgacctgttaaaggtgctggaccagcgtttaaccgactatacgtttcatttcaatgcggtctcgcgcgatgcgatgatcgtcggcctatcgaccggcgcctataccctcgcggcggatcacttttatctcaccaaagagcgggcggaaaaatacgaccactccggcgagccgacagggatcagcgatttgcgcctgattgtgcgtaacgatgagaacgatatacataatctcggcgatctcgccagcgggaagaaaaagctggtgccgattcatacctccgacgcccgttatacggtgattgaaaactacaataaaaaacatccaggccaacaaattaacctgcagcccaacggcgagcagtccgccgccgatatctttaaagcggtagcttccggggaatacgatgcggcgatttaccccattggcgcgctgctggcgttaaataaggcgctaaatcttaatctgaaagcgtcggattccgtcggcctgtttcctaacgtctatttgtataaaaaaaataccgatccgcagctaatcaaagcgattgacgcgcagctggttgccctgaaaaaggacggcacgctcgctgagctctcgcggaaatggtacgccgaagatgtgtatgccctgccgggcgccagcgacgtgaaagtgaataccgactgggaataa

SEQ ID NO: 202618 - DNA, 789 bp, Klebsiella oxytoca
atgaccagggtccattttattggcgccggacagatggcggaggcgattattcgcgcgtcattaagccacggtgcgctgcgggcggacgcgatctcgctggaggatatcgacagcgcgcgagtcgaggctctgcgcgcccgttatcggctgtcgggcgacggtggcgtaaacgaagccgctttgctggtgctggggatccgtccgcaggacgatctggcgggggtggcgaaccgcgtgcgcccgcagctaaacggctcgacgacggtggtttctctgatcgcgggggtgaccctggaaaagctggcctccctgtttggtgcggcaacgccgattgccagggcgatccccaataccctgaccgataccggatttggctatagcggcgtgaccttaaacccccacgccagcgcggctgagatcgagccgtttctgctcggctttggcaaagtgctgtatctgcctgagcggttgatcgatatctttaccggctttggcgtcgcgggccctaactatatttactactttattgagtcccttaccgatgctggcgtactggcggggctgccgcgaccccaggcaacggaggtggtgctggaaaacctgctcggcgcggtcgagatgctgcgccaaagccagaagcatccgcgccagcttctggatatcaacaactccccggcgggcgtcgggatccacggtctgtatgagctgaacaacagcgattttgccgcggggcttcagcgcagcgtactggcggctgtcaggcgcacccgtgaactgggacagtgctaa

SEQ ID NO: 202619 - DNA, 957 bp, Klebsiella oxytoca
atgactcagcacgccctcgatctcaccagcgaacttctgcgcggcatgcgcctttccggcgtcaactaccgccgcatcgaaacctcccgtccttttggcgtcgaattcggcttcgtacctggtaaagcgcagttccactttatcagccggggaccggtactgctgcgcatggtcagcggtcagcgcctgatgctgcagagcggcgatgcgctgtttattccgaacggcgatggtcacgtgctgctctccgatgaccaggcaacggtggttaacgtgtccagactgcccagcgaaccggtttgcggctcggtaagctgcgtcaaaaacgcctgcgacgacgcgaaaagcgacagcgccattatcttcagcgcctgtatggactttgagctgggcggtatgcagccgctggtcaaagcgatgcccgaagtgatgctggtcagcagcctgctgaccagccgtccggagatcccgccgatgctggcggccatggaacgcgaaagcctcactcgacaggcgggctacgccggcattctggcgcggctggccgatgtggtcgccgcgctgattgtccgcggctgggtggagtgtggctgcggcaacgccaccggctgggtacaggtgctgcgcgatcctaagctggctaaagccatttacgttatgcatcagcagccgggcattaactggaaagtcgaggatctggcccgagaggcgggaatttcacgttcggtatttgctgaacgcttcctctccgccaccggcaccacccccgcccgctatctcaccgagctgcgtatgcgcctcgcggtgcagtacatttcccatgagggtcaggcgctggaaaaagtggccttcaggctggggtacagttctcatgccgccttcagccgcgcctttaaacgcattatcggaaaggcgccgggcgcgctgcgcgatctgtcgcgggaagaaggattttag

SEQ ID NO: 202620 - DNA, 1200 bp, Klebsiella oxytoca
atgagttcctgcattgcagctgaagagagccagaccaacgccaggcccgcgtggcgcgccgtctatgcgctggcgctgggggtgtttggcctgattgtcgccgagtttcttcctgccagtttgttaacgccgatggcggcaagcctgggcgttagcgaaggtatggcggggcaggcggtgaccgcgacggcgctggtggcgttagttaccgggctgctgatcaccaccgcgacgcgaaatattgaccgccgctgggtgctgatgttcttctccgttttgcaaattatctccagcatgatggtggccttcgccggttcgctggagtttttgctgcttggacgcctgctgctgggaatcgccatcggcggcttctggtcgatgtcgaccgcgaccaccatgcgtctggttccggcggcgatggtgccgaaagcgctggcgattatcttttccgccgtttccatcgcgacggtggttgccgcgccgctgggcagctatttcggcgcgctgatcggctggcgcaacgtatttcttatctgtgcgctgccgagcgtggttgcgctgctctggcagctgtgggttctgccttccatgcgtccggagagcgtcggcagcttcgctaccctgtttaaggtgctgcgtcggccaggtatgattggcggcatgctcgcgacaatcctgattttcagcggccacttcgccttctttacctatctgcgtccgttcctcgaaaccgtggcgcaggccagcgtcgaaggggtttctctgatcctgctcggttttggggtagcgaactttatcggcacctcgattgccggacatctgttggcccgaagcctgcgcctgacgctggcgctggtgccgctggcaatgagcgtgctggcgctgatgatggtaacgttcggccacgtcgcgctgctggacggtctgctggtggcgatgtggggctttgcttttggtctggtgccggtgggctggtcgacctggcttgccaccacggtgccggatgaagctgaaagcgcgggcggcctgctggtggcgtctattcagctggcgattagcgccggtgcggctggcggcggtgcggtattcgatctcaacggcgcgagcggcgtttttgtcggcagcggcgtgctgctggtcagcgccatggtgatagtgctgtttgcggtaagagtcaagccagtcgtgagcgaggagtag

SEQ ID NO: 202621 - DNA, 300 bp, Klebsiella oxytoca
gtgtatcgcgccttgtttattcgcgctaatctgcattttccagacaatgaccagcaggcatacgccggcaccgctggccagccagaaaatcatgttctggtcgatcccgtagagcttgcctgccgcgaaggtgccgatagccgcgccaatgccgccaaacattctggcgcgaccaaactcaaaaccggaagcgcggctgactttatcaatgtaagcttcgcaaataccgcagcctgcgccataggccatgccaatatagatgccgcccgccagcgccccgagaaaaacgttaacttttaa

SEQ ID NO: 202622 - DNA, 246 bp, Klebsiella oxytoca
atgatccgctgccatctcgcccgaatgatgggtgaacacaagatgcgtattgctgacgttgccagagaaacaggactcagccgtgctacggtaactttgctctataaagagactgctcaaaaagtggatttggacacgatagaaaaactctgtctattgttcggctgtggcattggcgatctgctagagcttcagactcagggaattaagaccaaaggagaggaattaagggatgcagatcactga

SEQ ID NO: 202623 - DNA, 2964 bp, Klebsiella oxytoca
atgcagatcactgagtaccacgcaaaatactacgctcacgagctcacgtgccttcactcggcggacagtgtagatcgactctcacaatccctgttcgacgcaacagtagatttgaatcctcatcagattgaagcggcactttttgcattgcgaaaccccttacagcaaggtgtgttgctggcagatgaagtcggtcttggtaaaaccattgaggccgctctcgtcttttgtcagcactgggcggaacgccgacgtcgcttggtgatcgtttgcccggccgcattgcgtaaacagtgggcacaggagctggctgaaaaatttgcactacccagtactgtgctggacgcagctgcgataaagtcaagtgggctttcgccaagaacgtatcttgcgaatactgcaggcaaaaagttaataattatgtcttaccattttgccgccaaattagccgacgacttagtgacggttccttgggatctcgtcgcgattgacgaagcccacaaactaaggaacgcccatcgagcgagcaatcgcatggggcaagcgctaaagttggcatttaatggtcgacgcaaagtgttgctaactgcgacgccactgcaaaattcattgatggaattgtatggtctttcgacgctgctcgacgaacatttgtttggcgatgaaaaggcatttcggaaacagtttattcatagtgaaagcgacacagatgaactgaagcagcgattagcaggttttgtcaagcgcactttacgtagccaagtgctagagtacgtgccttacaccaaacgtcaagccgtcactcagccatttaaacctacagacgcagagcaagacctttatgaacgcatctctgcctttttgcagcgtgaaatatcatttgcgctacctaagcgccagaggcacctaaccggcttgatattgcgaaagctgctggcttctagcccttatgctatcactgggacattgcaaaccatactcgaacgcctacataaaaaattgaatggagatgacctttcagacaacgatcttagtgatgaaaagttggtggcccgacttattgagcaagaagagattgaagacgaatatctggatgttgaggatgaactgttagaatatgaatcaaatggtcaagatactcaaaccgatgctgtgaaccacaatggacgagatgaagctgaagaattgcaggcagaaatcgcagaaatcgaatcattcattcagcaagcccaatccttaacgactgataccaaagcggaagcgctgctcactgcgctagatttaggctttgccaaaatggcagaacacaatggtccgcgaaaagccattatatttaccgaatccaagcgtactcagcagtttttgtcagactatctctcaagtcatggctatcaaggcaaaatcgtcaccttcagcggcacaaataccggcgctgaaaccaacgaaatttaccaactctggttgcagcaatatcagggtagtgaccgtattacgggctccgcgcaagtcgacaagcgcactgctctaattgacgagttccgcgagcgcgctgaaattatgattgccactgaagcggccgccgaaggtgtaaacctgcaattttgtgcattgctgatcaactacgacttaccttggaacccccaacgcgtcgagcaacgaattggtcgctgccatcgctatgggcaaaagcatgatgtcgttgtcattaacttcctaaatactcgcaaccaagccgatcagcgagtgcttgaactgctcactgaaaagtttcaattattttctggtgtttttggtgcatcagatgaagtgttagggcgaatcgaatccggtattgattttgaaaaacgtatcgcccgcatctacgacacctgccgtaaaccggaggagattgagtcggcgtttgaagaacttcaaaaagagctagaaacagacattaacgacaagctcaaacaaactcaaagccagctgatggagcacttcgatgaggacgttcactacaaacttaaacttcagttggatgccacccaggcacgtctcgacaaagttagcctttggttttggggcgtcacccgttttgcccttggtggtaaaaaagacgatagagaaattgccaacaaattgggagcgaaagcccagtttgatgaacacaattacagtttcgcactaatacaatcgcccattttcaatgcacctaccggccgttatcaactggttcgagcgaagcaaaaccagcagcggcaacaggattttatggcgcatgcttaccgcctgaaccacccgttaggggaatggtcgctggataccgccaaagccaacaccactccagtggcggagttggtctttgactatgcaggccatgaaaccaaattaagtgtcattgccgatctagttggaaaatctggctggctacgcctcgacaaactcactgtgagtgctttggacacggtagaaagtttgttgtttacagcaatcaccgatgatggcaaatcgttggatcaagaagcctgtgagaaactattttctgttcaagccaaaaaatcgagtaacacaacactcgccgaaccaccgccgttattagccaacaatcaacaacggcgcattgaagcaagcctggcgcaatttatagaggaaaaccagcgcctgtttaatgctgaacgggaaaagctggagcgatgggctgatgacaaactgctggccagtgaagaggcgttaagagacaccaaagccaaaatcgcccaagtgaagcgcgacgcccgcaaggcaccaactctggaagaacagtccgatctgcaaaatcagttgcgcaacctagagcgccaacaacggcgtcaacgtcagcaagtttttgatgtggaagatgaaatcatggccaagcgcgatgagctcattgaagcgctacaagaacggctcacgcaaaccactgaaacagaacacttatttaccattcgctggcaagttgcttaa

SEQ ID NO: 202624 - DNA, 3141 bp, Klebsiella oxytoca
atgagcaagtttaacgagctagtcaccaaactcagggaagtattccagatcgatcgccccgaactggattttggtgtttatcgcatccttaatgcgcgcgccgatgagatcaatgaatatctggaaaaacgcctcaagggaaaagttgaacaggcgcttgcatctggcaatgcggctaacatcaatcaattaaaagaagaactgaaaaaagctgagcaaggggcgcaagcgctaggtgtacctgccgattcagtgccaaaagtgcaagagatcaaggccaaaattacacaagccagtggcggcaatgccgaacatgaaaacgccgtgttcagccacttgctgaccttcttctccaggtattacgacaacggtgattttatcagccagcgtcgctacaaaggtgacacctacgccattccctatgccggcgaagaagtcatgctgcactgggccaataaagatcagtactacatcaaaagtggcgaaaatttctctaattactcgttcaaattagaagatggccgtgtggtgcatttccgcctagtggccgccgacaccgctaaagacaaccgaaaagataatgacaaagagcgtcgctttgtattggctgagcagaagatcattacccgcattgatgacgaaggcgatgagtacgatgatgagattttgccgattgaagaaatcacaaacaaagacaccaatggcaacgaaaccaaagagctgattatccgttttgaatacaaggccatgccaaaaggcagcaagcaagatagtttggtctcatcggcggttaaagcggtgttagccgctagctctgtcgccagccgttggctgaacttaagcaagcgtgagccgacggaaaagaaccccaagcgcacactgcttgaaaagcacttaaccaactacacaactaaaaataccgccgactattttatccataaaaacctcggtaagttcctgcgtggcgaactggatttttatattaaaaacgaagtcatgcacttagatgatgtgcagaatgccgaaacctttagcgatattgaaaagaacctgcgcatgatccagtgcttacgcagtattgcgttggacttgattaaatttctggcgcagctggaggattttcagaagaagctgtggacgaagaagaagtttatagcacaaaaggattacttgatctcagtggattacttagaaagcgatcagcttgaaactgtatgccagaatgaaaggcaaatagcgcagtggaaaagacttggggtaatttccggaggtaatattaaggcagatgttcttgcaaaatccaaaggtctaacgatagatacttctctgtttgacgatgatttcaagaatttactactaaaccaaattgacaacttaagccaaaagataaacggcacattaattagtggtgataattttcaagcgctgaggtttctcgaaggaaagtacaagaatagtatcgatgcaatttatattgatccgccctacaacacggacgcatctgcgattctttacaaaaatgactttaaagattccagttggctcagctttatggaaagtcggctggaagttgcaaatagactgatgaagcctaacacactgatatccgtcgccattgatgatgaggaagtctcgcctttgcgcttgttaatgagcagcctgtttccaaaggaggcaggtgttggagtggtaaaagtcaatccgcaaagtagaaaaacaaaggggaaattttcgccagttcatgaatatgcgcttttttatggaaactcaagcgattctcaaccggcctcaatcggatatgacgatgcaaaattcgatcgttatcctttagaagatgatctaggccgatatgcttggatgaactttattcgtgcgggaagcaatgataaacgttctgataggccgaaactttactaccctattgtggtaaccgagaaagatcagatacgcgtacctaaaatgtcgtggaatgatttaagccaatgctatgacgttctagaggatattgccgccggagaagttttagtatatcccgacaagtttgaagatggcgttaaaattgaaaaaaactggcaaagagggaatgtgagggttgcgacggaatatgacgagtatcgtgtccgaaggaacattgatggagaaattagcattgatttcaagacaagaatggatgctaacgctcttcctacaacttggtgggataagaaagaatacgcttcagcaaattttggtgctgctcatcttaaagatttatttggtgaaaaaaactttgatttcccaaaagcaaaaggcctagtcaagaatgcaattcttgcatgtaccggaaaggatcagaatgaaaaggtagttcttgattttttcgctggttcaggaacgacagcacaagcagtttctgagataagacgagaaataaaccctgaggcaaaattcattattgttgatcagggagagtatttcgatacactgataaaaccgagggtacaaaaagtcaatttttgctcctcttggaaaaatgggaaaccggttaatgccagcgaaggtctctccagtatttttgaagttattaaactcgaaagctacgaagacgccctgaacaatttggaactgaaaaaaccaaaagtcgacctattcgataataatcccgaactcaaagacgactacctacttaactatatgctggatgtcgaaagtcgtggctcactgctctcaactgacgactttaaaaagcccttcgactacaccatgaaaattgccgtggattccgctggcgcctttgaagaacaaaaagtcgatctagtggaaacctttaactacctgatcggcttaacggtaaagcatatcgatgcgcagcctgatcgcgggtttgtgacagtgactggtaccttgcccagtggtgaaacctgtttggtgctgtggcgtgactgtgaaaaaatcgattacgaaggcctgagcaaactgtgcgacaagctggagattaacccggccgataacgagtttgatgttgtctacatcaatggcgaccacaatatcccaaccgtgctgactcgaacagctgaagaaggcggtgaaactcgcgtcttaaagctacgccaaatagagccggagtttttggaacgtatgtttgctgaggaggatatctaa

SEQ ID NO: 202625 - DNA, 1050 bp, Klebsiella oxytoca
atggcctctccaaaaacagcaggaaagacaaagcaaaagaaacggagctttcatcaagagttggtgctcaatcgttgggtgatgcggttttttaaaggcaatgagctggccgcactcaagctgcgcttgggtgatgatcagcacgaaggcatcgatgaagacggacaaaccctgttcttccatgagctgacacgcaacctgtttgaagtagattggatttccgaggccgatttacgccgttatgacttgcatatcgttgagcactggcaagccatcaccaaacatcgtaaccagctggaagggcatgtgctgaacatgaagtacttccagtatttatcgttattgtttactgaaatttatctggattggtacttcaccaagcctcaagctttactagatggcctgaacgaagagctggcaacgtatagcaaagagcaaggtgcagaaatatttcagccctatatcgctagcgatttgaataagattgcgttttggaatgctacaggcagcggtaaaaccctgctattgcatgtgaatatcaaacagtatttgcattatttccaggccggcaatagcaacctgtacccagacaaaattattctgctaacacctaatgaaggtttatccaagcagcatctggaggagttagaactttcaggtttcagtttcagtcgcttcttcgataagaaccgaaccaacacgtttaaaggcaccatcgagataatcgacatcaacaagcttggtgacagcatgggcgataaaacggttgccgttgaagcctttgaaggcaataacctggtactggtggatgaaggccaccgcggcaccggtacagccgcaggtgcctggatgcaacgccgtgatgccttggtgcgcggtggtttcgcctttgaatactcggcgacttttggtcaggcggtggccaaaggtaataccgtcgccaaagccgaagaagagctcttgaaaaagaaagccaaaacgctgtttgagacaacggcattaaagaagttggatgacgcacaactagggaaggtgcgaacaagttcctga

SEQ ID NO: 202626 - DNA, 147 bp, Klebsiella oxytoca
atgaagcttaataaagtcatggctgtgatggtcgtcagctctgctctggtgttgtctggatgtagtgcaatgggaaccgccattaaaaagagaaatctgggtaaaaacccagatgagcgaaacaatctggctggaaccttcaaataa

SEQ ID NO: 202627 - DNA, 903 bp, Klebsiella oxytoca
atgaaatacgagattggagagattcttaaccaggcaataatgactggaacaattagcctggtggtagaaggtattgatgatatcaaaatttacgagacaatatctaatgaagttggaaaaaatgttatcgtatttcctattggatgtgttgaaggatactcaccaggttgtggtcatgttattcctgcaatggatgcaatctgtgagttaccagaaggtgataaagaacacaaaaaatacatacttggtataattgataaggacgtaaaagactttaggggagaaatacctgtaaatccgttggttttaacattgagatattattcattggaatcacattttataaacaaagaagtagtaaaagaatctctttctttaaatacaaagactccaccatcactattaacggatgagtttatatcattgatttttaacgatatattctatgaaagtgaaagcttatacctgatgtctttagaagcattaaaatgttcaattgataacacttatgactcttgtttccagtatagtttttcagaaggaaggattttctcaagtgatgaccaaagaaaaatattagagaaaagagatgacttgatatctttttctgagtcattgggcataacagcaacagtagaaaacttaaaaatcataaccaaaggaaaatggcttatccattatgttagtcataaactggcaaacgcgtgctcgacaatgcatactaattgcggagttccaccgcaatcacattgtgtagtttgcgaaagtggatctgataataaaagctgtctttatagaacaaaagatggtgtaacaccaaagtcattcaaaaactcattgtttggaaatatgaatagcccagacattcaatatatcaaagatagaattagtgttatggcataa

SEQ ID NO: 202628 - DNA, 1311 bp, Klebsiella oxytoca
atgatcagattagagcgaatttatataaaaggttttaaacatccaaattcaaccttgaatttgatattctcgccgagtaatatatcggttatatatggtgacaatggctcaggcaaaacaactcttttaaaaatactacatgcaatatttgaaaaggatgagtccgtattaaagattaatgaagttgtaaccgttgatatgtattattccgaaaacgaaagttacgacagagttacaattaagaaaaaatacgagaccatcaagcgtgaacttattggcactgaagaaatagaacaatatgattggacaagttatgataaatctcccttatctaatctatcttcactattactaggagtagagcgcggagtcattactcaggctacaagaattgaccctagacttgtttttgattttttccgaacgaggaaactttttttaaacaaagaaagagaaatgttcagtatagctaatgagatggccacttacctaaaagctcactcaggcagatatacagcaagagcagagcctcataggtttgagtttttcaaaaaaaaccttaatcttcaatctgttaagatggagaatatcgagagcctaatagctgaaaaatacagacaggctcgtataacagcaacaaaaaggatacagagtgccttatttgataccctttcacttgctataagtttgaatgaaactgaaaacaacaatggtccagtacaacatgttcgaataccaaacgatttcgggcgattacttctagagaataaagaaagaattaaagaagcactagatgatggtgaggaaaataaattcaagaatacggtggttgaaattttatcgagtaaaaaccttgaaagcgaagttgaaaaatacaaacaacacccaattttgagtcaattgtttataaatatgatcaatgaacttaaattagaaaaacagatgttaagttctattaatttacttatagacacgtttaatagcttcctcattaatggtaaggaattattagtaaatgaaaaccaagttgttgttaaagctggttctgtaacccatggtataaatttattatccagtggtgaaagacatatactcacatttttatcaataatactatttgaaggtagggaacgcgatttccttattatagatgaacctgaaatatctctgaacattaaatggcaaagagagctaatgccgctactttctgagcttttaccaacaacacaaataatagtcgcatcacacagcccatccctggcaaataaaaacccacattttcttagagaacttgaattaaaattaggctaa

SEQ ID NO: 202629 - DNA, 1218 bp, Klebsiella oxytoca
atggatgattttgatattgaagagaatgctttttatgacatctgtaatttcattgaccaagaaatttatgtattagctgtaagatcttcatttttagaggaatatgaatcagtagttaagctagcaaacgatataaatgaagcattgcattcaattaaagatgaatttaatgatgactccaaaattgaagaaattattgagatagtagtgaatgctgtaggtacagggataacatttgaatcgctacatgataatttaatttattacatagacagcgaatattctcttcccgaagatgaaaataaggatgatcatattgagtatatcaaagaagtggaagatttgaaggccaagacgatttcatgtatatcagaagtgtacaagtttcatggaggattatcatttacatttaagcatcaatatccaccgtatgtattttgtctggataacgattatttagatgcactacaatatttctacaataaagagtacctccctaaaaagagagaatttaaagggggagttgaaataacaaccataagggctccatatagaatactgaagcgttacaataactcaagatatagtactagtatcaaacagtttgaagttaatgtgcctgaaaaaaatcttaaaaaatccatagaaagtggagagcatgaaatttgtttgcctaatgaaaatgaaaatttaattacagaactttttaagctacttgcattaaacgacacagaccgtgtagcttatactaatgaattgcaaataagcatcgacacatcatccccattaaataattatgaagttgataaaatactggcaatgattagattcgagctctctacaatacaaaagagaaataaacactctgaatacagaatggcaaaggaaataaaagacatagagcgagcaataaaaatccctgaaatttccactgacaactatgtggttttaaaaaaattacatacaccacaaatagaaaaactaaaaactgaattaaacgcgaagaactatctatgtggattgataattcttcaccgctattcatttgaaaagtctgacactcccccttcattagagaaattatgttctgatctttcagaaaagttgatgttttcaatgaacatagccgattcaaagttttcatcaaatacaatacttcgagggtataaacaggtcaaaaagatatttaaagaaaaaattcgaatgctcgctaagtaa

SEQ ID NO: 202630 - DNA, 147 bp, Klebsiella oxytoca
atgaccagcaaacactttgttgtgattctcttggttgtgtttactcgcatgagcaatgttgaatcaccagcaacgaatattctttccagcaacaatattgaagttaatatcacggtgaccaccatccctaggggcgggggaatgtaa

SEQ ID NO: 202631 - DNA, 828 bp, Klebsiella oxytoca
atgagaacattaaatataatatatacgttccttgtgttttttctggttattggttttttattttttattttcaaaatttctatacattaccctaattcgatgaaagatgtgaagataactgactggctgtcagttgcttttaactttattatggcattactagccatttggggggtcttttacgccagaaactggagagaatctttgactgaaagtaaagcactggaggaagcgacaaatttaaagtacaaagtacttatgaatgccaatcaagccttttttatcctcactccctcaggtatacaacattacttacccgatcatgaaaatagccctgtatttgatgattataatactgaaggattattcaattcactccatgatatgtgcaaaaaactggattgcgttagggatgcgatttatgagttgaacgtgtcgcgtgaaaagttagttttctttggctgggacttctgtactgataaaaaaaatgaatttataaaagtggtaaaatctgtcgataatctttatctatcacgctttgaacttgaatatattattaatacagttttgtctaaacatggagtggtttataatgatagtttcggttttccagtttataaacataatcgagaaaaagtcgatttagatgatttaataaaaattttaaatggtgactttgtcacttcgaaaaaattagatgaattttcacacatcctaaaagaaattatggatattaggaatttatctctaaacgctatagaagttcttagaaattgtaatgatacaattcacgatttaattgagccaataaacatattcagaaaatga

SEQ ID NO: 202632 - DNA, 1071 bp, Klebsiella oxytoca
atggacctgtctgcgcaggaagaattactgattcgcctcaaatcactgtcaattgctgaaaaaagtgaagccaatatcttttcgctgggtgcccgcggacactacgagaacccggtcagcgatttactcgcgttttttattgatccggatgctcctcatgggctaaatactttagttcttggggctcttttggaatgcctatcgtcccctgttgacccatcacttttatcaccgccagctcgtgaagtcatgacccaagaaggaactcgaatcgatttgctacttgaatcagaagaatgggccatggcgctggagaataaaatctggcacaagcagaataaccccttcactgattacagcaggtatctggagcaaaaatatccagataagaaaccgtacctagtggttttatcgccagagggccatgcccctgtcggttgggctggaataagctacggtaagtttatttctgttctggcacccaagcttggcatggtctgtatttcttccccagtcaataaatggcaagttttgctgcgcgaattcatgttacatctggagtcactgatgggtaaaaataagattgcagctgaggctgaaaccttcgttctcgaaaatttgctaaatattcaggaagctgtgttgctgaaaaatgcggtggtgaagtcacttcaggaagaatgtctaaggtttctgacagaacacttttctgatagggattataaggtcaccacagcacttaatcactgggaaggttacccggcgctgcgcttcgggttttctcattgggtgaatgagtctgatgtggtgctttttctggacagaacaccgggaagacagtttgaagtacgtacatacatctgcaatctgacgactccaacattgcagcatgaagcaagacagatgctgataccagcacagcatgacgattgctggacagagaagagcgagagtgtgtttaccatcgtttctcgtctgtcacgagcgcatgaagaaaaatacctgatgttccaaagagtagcaaaagcgttggagcagttgaacgaatttgagcgatgtcatgagagatag

SEQ ID NO: 202633 - DNA, 501 bp, Klebsiella oxytoca
atgggaaattattcagattttgagaccgattttgttcagcgaacactggcgcttatcgatcaatataacgaaatgattgaggagctgggcaaaccattcagtgagcagtacaactacacgttgaccctgaattgccttctgggtcttatcgtgttaccgaaagagagagctctctctttcctgcctgcagaccgtttaacgcggcaactaaaagctgaaatgggattacatgagtcacagctgcccggaccggagatgaatctgcggcagttgatccataagatgcggaattcagtggctcatttctgtgtccaggtagagtcagtcagtgatgcacaccttgtagactggattgttttcagggaatcccagggagacggggatgtatacgccagcttcagcgctccggagcttttaccctttctgaaatattatgcgaccctgctgctcgacaatatcgcccgccgtcgagctcaagttgttaacgtattggatttgtaa

SEQ ID NO: 202634 - DNA, 780 bp, Klebsiella oxytoca
atgttgaatctcgattgttcctcacgatctcaggcgctgttttcactttcttccggttttggttgcagtgtaatgcagctaaaaaaggttttgttatctctcgatcttgaacagatttacgagacggatcattctattatgatcgactcgcaacaatatctgcgagagtacgtatgtagggaactgggttctccgggcaagttctcaaccgcatactggtttcacggtacccggacatctgctgacaatacttttgaaagtggtttacttccgctgaaccagactgagtcactggtgatggatatgctggtaaatctcgcaccagacgctgtggtcaaagagaaattgcaggcctggaattttcatgctggcgtacctgataatctcttccggatgcgcaccagaaacgaaatgcactgggggccatacggtcaccttgtacgggaggttcatcttcatgcccgcaaactctggcagcacaattatctgcggctaccggagctggtagaggatgtctgcaatgcttaccagaaaaaatatggtcaggatcttacagaacattatcttaaggtactgaaaccctgcatcgtctgtttcagggcagatattgagtatgaaaaaggtgcgcttgaagccgcgctgagttacgcatacacgtccgttagagatttgccaccggacagcggtgcactgttcggtattgatcgacatggtatatctgtttctctcgatgaaattgtgaacatcgaattcacgaattggcatgagcttgatggctga

SEQ ID NO: 202635 - DNA, 1593 bp, Klebsiella oxytoca
atgacatcacttatagttacttcgttacgcaataccggtccttgccttagctctgtacttgtagaggaaatgctgaaaacccaggcagttaatcgtgataccgcgcgcaaacagatttcccgggcggcttctgcagggcagatccactgtgttgacaagcttttccccaagcgtgaacgatttatttatctgaagcagcagtatggtaccgggcgcttctggtccagtctcaatacagccctccttgataccgggtcggcctacggtctcgccctgagttgcctccgggctcgcggggggatcctaccggtcaggcattttgctgctgcctgcggttcaccggtagcaatgaaaaacagattatcatggaagtcagttctggacggtctgcttcagtacaaaatggtcaggttcgttacgttaccaggtttgggagagtgtgtggccctgacagaaaaaaatgataacgggtatcagcgtgcgctccatcccctcaaagccaggctgcttacagagtccgttctgatgaaatccctgagtcagtgggtccgacataacggtatcatcagttacgacacgctgcgcacacgggaagaactcgattcagatcgggcgccctgtgtggcaaattttgattttgacgtcactgctgcatcctatcttaatcctcttctgcagttctcccggtcaggggaaattcggcctggtttctttgtctgcgacatgcttctgggctgtaagctcagtcttgtgcacctccagccctttattacaaaatgtcgttcaataaacagcctcaggaacagcccaagatgcctgtttatgtttgttgccgacgaatacagcgaagaagcttttctggaaatgaagcgtgccgggataatacccgcgacaccggagaatctgttcggaaaagactttgctgatgcactctttcagttacgggatctggttggttcaataacgttcagcttaaaagataatatagtcgcaatagatgacatcatgtccaagcttgagagtattgccggagtaaccagtcagctacagggggatttatttgaatatattgtcgctgagaccgtgcgcataaatagtaatgatgttgaggttggtaaaatatgtaagtcagagaggaaggggactgcagaatgcgatgtcctgagccgacagggaaatgcaaaaatcacctttattgaatgcaagggttataagccctattcgacagtgaaacatgaagatgtgaaaagatggattggtaaacaggtgccggtattcttcgattatgccaaaagggaataccccaatgctgaaattaatgttgagttatggactactggaaaactcggcgatgattccagagagtctcttcgtaaatttcaagaaaacaactcaactaatcagcgttataatataaccgtcatagagccgcatgaggtccggataagaataaaggcgacctggaatgacgctcttatccgggtttttgaaaagcatttcctcagctatccggaaaaaatcgttcgccgtaaacatgttcccgaaccggtcagacttgcaggtcacgatgaggcaacagaattcgacttctga

SEQ ID NO: 202636 - DNA, 1128 bp, Klebsiella oxytoca
atggactacacaaaaaatcagcatgtactttcacagtgggtgctacgtaactttcgcagcgatgacacagccctgtctgcaaaagaaaagcagcgagtatggtgtcacaccgtgtatataacgcctgataaagaaaacgttctccacacgcaacctctgccaatatccagtgtggcagtatcgaaaaactgctttcgtcttattgatgctgagacagggcagcctttcgatattgaagaagaactgggtgtctacgaacgtctgacagccgggatcgtgaacgatatcattcatgagcacaatttctcacgccttcgtcacgcacaacctgatgatttcccggtagagaagctcaccagtttcgctgtcatgcagttaatgctcaatctgcacaacccgcaaaataaaaacccgtttaagcatgaaatgcttgaacagttccattctgatatacaggaccatttatctgaatacgtccattctataaatcagttaccccacactaacccggagttaatggatgaccatttctatagtaaaatcctgcgtattgcaaactcagcctcttccggtgaggataaaagcagatcgctgtttgtgctatttggtcttttatccatactgaataagccaaccctttacgataaaattaataaattaagaaatgttatttttgctggtatccatacaattgaggtcatccatacaggtcatgacttcgacagcaccgaacccagacctgcattcgcaatagcccccaatatattttgtctttataaagatgaaaacagaatttatcttccgttgtcccataactttaccctgtgcttcatcactggcgaaccatcacatttcagaccccgaatgaacatcttctcccctcgccccgaacggctgaaatgctgccatgatcggagccttaatttctttaaagtctcttttgattatatagataatgtcatgacgactatcgatatgtacaatgtaggtaactccagcaccttttattctgcatatcagttaagcaagcttgaagaatatctggataagcaggaccaggatcctgactattatcatacgccagaaaatcctgttctgtggcagccagcgcaggctgattcattatga

SEQ ID NO: 202637 - DNA, 291 bp, Klebsiella oxytoca
atgaatactgataataaacagtacatccgggagctgatcgaggccggagagtttaacggctatacgctggtcagtggagaaaactggaagccacccacggtggacgatatcgcagtcgtccgtgggctgatccccctgactgatatccggctggccaaccggctggatgtagatgaacgcaccatccgcaagtggaaaaccggccagacccggatggtgttcaccacctggtgctgcctttgctgggtggccggactggggatgccgctcgataacattatcagtggctga

SEQ ID NO: 202638 - DNA, 198 bp, Klebsiella oxytoca
atgactgtatttctcatggccgttgtctatggcctcttaaaaactggctctctcattgccctatttgttggtgcctataaaggctggaccttgttctggaagaactatgaccgcctgccccatatttaccgctcacaatggcgataccagagacgattcattctcagacgcatccggaagcggattttcagccactga

SEQ ID NO: 202639 - DNA, 276 bp, Klebsiella oxytoca; identical to SEQ ID NO: 182616

SEQ ID NO: 202640 - DNA, 2364 bp, Klebsiella oxytoca
atgacctgcttattcgcaccttccctagcgcagttagtcttaacacaagtggagcagcgccaagcgcgcgtgacagcgacccgcgagacctacgcgaagtgcattctgtttgactattcctacaaatatttttacgacgatggctatggcaaagaatcgctcatattaaatatgaatggcgaggcttacgaacaagccgataatgcgcaaaagtatttcaccgcctgtttattgagtttttaccagcaaacctggctttggcagaatcatcatggcaagctgaatgactttaatattgaaaaacctctctgggtgtttgtgggtaatacggtgtctggtgaagattccgacattctcgaagtcgtgcagtttttaagtttcttcctgaatgatgagcaaaccataaaaacttggcttaaagagttggtcgatgacaaggcgcaactgctggacgttaaaggcaacaatatcttccaagggcgttttaatcctttaatgggctttagcgataacatcgatggcctatacaccgacattttacacaagctgttcaatgccaatgccaggcagcgtttaaagctggtgaacatcaagaacagtaaaggcgagctggcactgcgtgttggcgacgccgagccgtttgggctgatttcgattggtgatgacagtggcttttataaaactgcagaggagctggaaagcttcgacagtgaagctgacgattttggcggtgcactatttggcacactgaacaacaaagacagcaaattgaatgtgctgattggctctcgcaaatttactgaaggctggagcagctggcgtgtatccaccatgggcctgcttaacatggggcaaggggaaggctcacagatcattcagctgtttggccgtggcgtgcgccttaagggaaaagacttctcgttaaagcgtaccgagccaaatcagcgcccaaaaggtctgcacttggataagctggaaaccttgaatatttttggtgtgcgcgccagctatatggcggcatttaaggattatctgaaggaagaaggtatcaccccaagtgatgagatcatcgagctagacttcccgactcagccaaacctgccgaccaaaaaattaaagacactggcgttaaaggatggctacaaagacaaccaaaagttggggtttaagcgtacccactatccttggttgtacgaaatcccagccgagtttgacggtaagataaaaacaccacatatcgcattggatttgtacccaagattagaggcaatcagcacaacggaaggcagtgcagcactgcaattgaatgtgcgctatgaaggcaaactcaatcaggcgcattttgcattatttgattttgaccgaatttacctcgcgctacaggcattcaaacaacaacgtagttggagcaacttgcgtttagacaagcaacggttaatcgatttctgtctggcagaccaaagctggtacaccttgtatatgccaaagccggaatttgaagcgagaagctttgcagacatcaaacgcctagaagatattctgattcgtttgctgtgcgattacaccgatcgtttttataaggcactgaaaaccggttacgaaggccagttctacgaagtgattcccatgcatgatgagcatggctccatgctcaagctctaccacttcgaaattgatgacagtgatgatggtcatgaatatttgaagaaactggaagtgctgaaagctctggttgctaagggtgacttgggggaagccagcaaatggaatgcaccgcatatggtcgccatcagctttgaccggcatttattctatccactgttgtctttggaagataaagacgcagtgccattaaaaatgcgcccactggcgtttgatgcgccaagcgaaattcagtttattgaagatttgcaggcattttacggctcgccaataggacgagacgctattggcgcgcggagcctatatttactgcggaatgccgactcaaaaaataaaggtattggtttcgccaccgcgggtaacttttatcctgattttctactttggttggtggatgatgcaagcggtgagcaatggctttcttttgttgatccaaaaggtttaaagcacatggatttgaatcatcccaaattagggctttataccgaaatcaaaaagattgaggcagacttaaccaggcaggcttcaactggcgagcccgccctgacactgaatgcttttgtgctgtcaccaacaaaatatgctgatttgcttaacgtcggcgataaagtgaagaaacaggagctggaagataagcacgtactgttcatggaagatggtgcgaacagctaccttaaaaaaatgtttgatcggattaattaa

SEQ ID NO: 202641 - DNA, 2646 bp, Klebsiella oxytoca
atgctggagctgaataaacgctatggcatgagtaaatttattattgtggttccttcagttgctatcaaggaaggcgtttataaaacactacagatcacggaagagcatttcaaaagcctgtatgcgggtatcccatacgaatactatctttatgattcggcaaaacctgcggatgttcgaaattttgcaaccagttctgttatgcagatcatggtaatgacggtgggtgcgattaacaaaaaagatgttaacaagctctatcagtccagtgaaaaaacaaccgtggacgatctggataagcccattgatttaatccgtgctacacgtccaattattattgtcgatgaaccgcaaagtgttgatggtggcttgaacggtgcgggtaaaaccgcacttgatgctatgcaccccatgttcaccttacgctattcagcaacacatattcataaacaccatatggtgtaccgccttgatgccattgatgcttacaaccaaaaactggtcaaacagatcgaggttgccgggcttgaagtccagaatgcaagtaatagcccctatgtaaaactggtcagtattaacaataagaagaatagcattagcgcgactgttattgttgatatagccgataaaaaagggggcgtaaatcgttctgaaattaccgtgcatgacggtatgacacttgatgacgaaacggggcgtgatatttatcagggttaccggataagcgagatcagaacaggcaaagagggttatcttacactggaaacaccttctgatacctactatatgaaagtcggtgatgtcgtgggtgatattgaccctatgcttatccagcggcatatgattagacgtacaatccgtgaacatctggataaagagcttcgccttaatcctcagcaaatcaaggttcttaccctatttttcattgataaggttgatttctatcgccagaataacgaagaagggcttcgtgaaccgggtgaatatgctcgtatatttgaagaagaatatctcaaagcgatcaaaagcccagcatataaagatttgctcccttctcatccagaacatgctaaagatgttcatgatggttatttctctattgataaaaaaggcggatgggctgagacaagtgaaagtaataatgcaggccgcgaaaatgctgagcgtggttataatctcattatgaagaataaagagaagcttttaagtttctcgaatccggtgaggtttattttttcacactctgctttgaaagaaggctgggataaccccaatgtattccagatctgtagccttcgagagatgggaagtgaacgagaacgtcgtcaaacattaggccgtggtcttcgcctgtgcgttaaccaagagggggaacgtgttcgtgatgacagcattaacattctgactgtcgttgccagtgaaaattatgaagcctatgccgaacgactacagagcgaaattgagaacgaaacaggcatccgttttggtatcatcgaaaaagatgcgtttgcccatctgatcttctctgattcctcacaagctgtgggtattgccggttcacatgagatttgggctgaactacagaccgaaggatatctggaaaaatcggggaaaatcacaaaagccctgaaaaacgtgttattcgaagacacttttgttgttagtgagaagtatgcgtcactacaggaacaaattgaaactatcctgcgtaaatcagcagggcgactcaatataaacaatgctgatgagcgtaaaacaatcaaataccggaaagaagtcttaaacagccctgaattcgaagcgttatggcagcgcatttgtcaaaaaacgctgtaccgactggcatttgatgaagaagaattgattaaatcctgtacgaaatcactttctgaaatgcagcctgtagcaaaagcaatggtcagtttcagcaaagcaacaatcaaacaaagtcaatctggccttgatgttaaagctctgtctaatgggacaacaagcactgtaattgatgttgcagagcagccattgccagatattcttggtgttctacaggaaaaaaccggactgacaagacgcagtttaagcaccatcctgaaagagagtggaagactcgctgattttgctaaaaatccacagcagtttatcagtgaagctataggccgaatcaactactgcaaacgcctgtcaattgttgatggtattaaatattatccactaaaaggagaggtgtatgcgcaaagtctctttatggataaagagctaacaggatatgcccgtaatctttttgaaacctcgtctaaatcagtttatgaatacgttcctaaagattctgaagtcgaaagccatttcgctcaggaactcgaagaacaggatgaggtgaagctttatgtgaagcttcccggttggtttaaaatcccgacgccactgggaacctacaatcctgactgggccttagttatagaagacaatggtgaagaacatatttactttgttgtagagacaaaaaacaaacacattggtcttggtaatgaagaagatgcgaaaattacttgcggtaatgctcattttagctcgctcaaagatcagatgagtaatcctgcgagatatatgcgtgctacaaatataaatgaagttttaagtggcaaataa

SEQ ID NO: 202642 - DNA, 378 bp, Klebsiella oxytoca
atgaatcccgtttaccgcctgcaccgcgtgcgacgcggcatccagcgcgttaacgcccaggtgaggccgggcggcatgcgcggctttgccgtggaaatcgaccatcaccgtcgccgaggcggagtagtacatcgccggcaccgccttgcccatcggacactcctccagcggcctgaggtggaagccgaacagcatctccacgtcgtccagcgcgcccgcgtccgtcagcgcgatcgccccggtgcccagctcttcggcgggctgaaagagtattttcagcttcccgcgcttcaccagcccttcggcgaggatctcttccgcggcggtcaacaccaccgaagagtgaccgtcatgaccacaggtatggcgagcctctaa

SEQ ID NO: 202643 - DNA, 288 bp, Klebsiella oxytoca
atgtcatttacaaaaaccattcaagaaactgtatttaagaatactgccgatggcacatctattggctcagaagttcaaagtatagatgtgatttatagcgtgaaagccgtaaatatcactgaatcgctggcatccgctgacttatacaaaagttatgatacaaatacatggcagttatatcagtcatatgagttcacaccagattactcatctggtgttgaagttcttgctcaggccgaagctcaaattatgggactagaagagttttccggcgaaattacggtgtga

SEQ ID NO: 202644 - DNA, 2112 bp, Klebsiella oxytoca
atgtcggtaccgaaccagataccctataacatctatacggctaacggcctgacaaccgtttttacgtaccagttctatatcattagtgccagcgatctgcaggtaagcataaacggaaatattgttaccagtgggtattccgtcgcgggggttggaaataaagatggtggtgatatctcctttctgacgccgccggcgaatggcgctgtcgttatgttacagcgtgttgttccgacgttccggttaacggattatcaggataacggggacttactggcggatactattaataaggactttgaccgtatctggatggctatccaacgggcattcctcgaactcggactggcaataactcgcccgctgtccggtgggccgtttaatgctcagggatacagaattagcaatttactggaccctgttgataatcaggacgccgctacaaaaaaatatgttatccaaactgaacaggtaaacttttcccgtacgttacgcgttcctgaaaatcaggtaggcatgctttatccagtaactccgcgttcaaatatgcttctgggatttaatgaccagggcgatcctgtccccattgccggccagacgcaaacggcagatttggctatcaagctggcatctgtcgatggagccgacttggttgctacagcaacaggcagaacagtaaatgcgtcaatccgggctgcatcgggcgcttctcaggggcttttccctctcctgatggataagttaactaagtaccgtcatggtgtttcggggtaccaaaatttattcagggcttatggcttcgggtcttctgtagaggttggtgccacactgccggatccatccacgcaagcgcctatagctaaattttttgaatatcttaatagcactgttaataaacaaggaatttacccactctcttttgttaataaaggggttaatggctcggccattaatgattttctgttgacgcaatggcctgctgttgtcgctgaaggggtttatcccgacattgcactttttgtttacgggatgaacgatttcccaaccgctctttataacgccgggcagacattcggcgataacggctttaagcagcgactgcggacggctattcgtaaagtgcgcgacgctggcggcgatgttgttttgacgacaacgccacacccgtatattgaaaactatagctggagcatgccgcctgccgtttctcagacatggccgtcagcatcaccagcccccgtttctgatgaaaatattattccttcagcatctgaatctgttgttgaatttgtctggaatggagtaaagattaaagctggagttcgcttccttcgcggcaatgacgcaatcagacaaatcgctgtagaaatgggttgcgtgcttattgatgtggaaaaatactggtttgatgccgtggcgaaatatggtgagtctgcgttatttaatgcgggtcagactgtccacccaaatctgtttggccatcagaaatcttactggctggcatttgaagagttttttgctaatgtcgatcgtaacggttggatagcgcccgatgcgtgccactatgacctgtttgatgttggtggaaatgccctgtacccacagccacgcaccgctgatgttgatttgatggcaaacggtacgcggtctaatgcgtttatccggcgtgatcagttcgcacgtgcactggaaacaattgatcagttaggggcggtaacaaagatttcgtatacgtcacaatctccaacggtatccgcaccaggttataacctccaatggaatgagtatcactcccgtacaaaggggctttatgcagcgggggaagttcagtctattccgatcccgaacagaacatctaaaaaactgttcatagacgtgtggacgtcagcacaaacaagctgggcacaatttatggaattgttggttacaaacagggagggtgttgtcacatacacaatcgttggtgatcacgatcaaacggcgccagcgggtgggggtacaacaggtggccgtcggctattcactgtatctacgggatctgggcttatcaatgtaacagtcaacactgataactcatcgctgaaatatcgattaattggttttggtgtataa

SEQ ID NO: 202645 - DNA, 1665 bp, Klebsiella oxytoca
atgagatcgaaaagatttgaagcactggcgaaacgccctgtgaatcaggacggcttcgttaaggagtggatcgaagaaggctttatcgcgatggaaagcccgaacgatccgaaaccgtcgataaaaatcgttaacggcgcggtgaccgagctggacgggaaaccggtgagcgattttgacctgatcgaccactttatcgcccgctacggcattaacctgaatcgcgccgaagaagtgatggcgatggattcggttaagctggccaacatgctgtgcgatcctaacgttaaacgcagcgaaatcgtcccgctgaccaccgcgatgacgccggcaaaaattgtcgaagtggtttcgcatatgaacgtcgttgagatgatgatggcgatgcagaaaatgcgcgcccgccgcaccccatcccagcaggcgcacgtcaccaacgtcaaagataatccggtacagattgccgccgacgccgccgaaggcgcatggcgtggatttgacgaacaggaaaccaccgttgcggtagcgcgctacgcgccgttcaacgccatcgcgctgctggtcggctcgcaggtaggccgtccgggcgtactgactcagtgctcgctggaagaagccaccgagctgaagctcggcatgctgggccacacctgctacgccgaaaccatctccgtctacggtaccgaaccggtctttaccgacggcgacgacacgccgtggtcgaagggtttcttagcctcctcctacgcctctcgcggtctgaaaatgcgcttcacctccggctccggctccgaagtgcagatgggctacgccgaaggcaaatccatgctttacctggaagcgcgctgcatctacatcaccaaagccgcgggcgtacagggcctgcaaaacggttccgttagctgcatcggcgtgccgtctgcggtaccttccggcattcgcgcggtgctggcggaaaacctgatctgttcgtcgctggatctggagtgcgcctccagtaacgaccagaccttcacccactccgatatgcgtcgtaccgcgcgcctgctgatgcagtttctgccggggaccgactttatctcttccggttattccgcggtgccgaactacgacaacatgttcgccggttccaacgaagatgccgaagactttgacgactacaacgtcatccagcgcgacctgaaggtggacggtggtctgcgtccggttcgcgaagaagatgttatcgccatccggaataaggctgcccgcgcgctgcaggccgtttttgccggaatggggctgccgccgattaccgatgaagaagttgaagccgcgacctacgcccacggttcgaaagatatgccggaacgcaacatcgtcgaagacatcaagttcgcccaggaaatcatcaataaaaaccgcaacggcctggaagtagtgaaagcgctggcgcagggcgggttcaccgacgttgcccaggacatgctcaacatccagaaagccaagctgaccggagactatctgcatacctccgcaattatcgtcggcgatgggcaggtgctgtcagccgtcaacgacgttaacgactatgccggtccggcaacgggctatcgcctgcagggcgaacgctgggaagagattaaaaacatccctggcgctcttgatcccaacgagattgattaa

SEQ ID NO: 202646 - DNA, 1380 bp, Klebsiella oxytoca
atggcagccaggcagcacgcattcattcttgcaggtaccggcagcggttgtggtaaaactacggtcacgcttggcctgctcagcctgttgaagcagcgcggcatgcgggttcagccctgcaaagtcggcccggactacctcgacaccggctggcacaccgccgtcagcggcgtcgcttcccgcaacctcgacagctttatgctcccggagccggtgcttaacgcgctattttgcgaacagatgcagcgggcggatatcgcggtcattgagggcgtgatggggctgtatgacggcttcggtaccgaccctggctactgcagcaccgccgcgatggctaaacagctcggctgtccggtcattttgctggtagatggcaaagcggtttccacctccatcgccgccacggtgatgggatttcaacacttcgaccccagtcttaacattgccggcgttatcgtcaatcgcgtcaacagcgaaagccattatcagctgctcaaaggcgccattgaacgctactgcgagctgccggtgctcggctacgtaccgcgagtggaaggggtggcgttacccgaacgccatctgggactggttaccgcccgcgagtcgctggttaaccagcagccgtggcgcgattttgcccaaacgctggcgcaaacgctggatatcgaacagcttcttaccctcagccagctctccatcctacccgccggggagtggccgacgctgccgtcccctgatgctggcgcgggcctgacgctggcgctggccgacgacgaggccttcaacttttactacccggataacctctcgctgcttgaacgctgcggagtgaatatcgtgcgcttcagcccgctgcacgatagcgagcttccaccgtgccagatgatttggctcggcggcggctatccggaaattcatgctgccgcgctggcggccaatacgccgatgctggcgcagctgcaggaggcgcaccggcgcggggtggcgatttacgctgaatgcggcggtctgatgtatctcggcagctccctggaagacgccaacggtgatatctacccgatggccaaccttattcccggccatagcaaaatgggcaaacggcttacccgctttggctactgcgaggcgcgagctatgcgcaaaacgctgctggcggcgccgggcgaaaccctgcgcggacatgaatttcactactcggattttactcccgagtccccggcggttctggcctgccgcaaggtccgcgacggtatgacccttcagcagtggtccggcggctggcaggtgggcaacgcgttcgccagctatctgcacctgcactttgcgcagcgccccaccatgctcaaccactggctggctgcggcaaggagcgcgctatga

SEQ ID NO: 202647 - DNA, 264 bp, Klebsiella oxytoca
atgatgatctcatatcaggaacttgttcgcaccttccttagcaatatttttgcatgccatggcgctggcataattgcgaaagccgcgcgtgagcaatgcaattctgagttatttaatgacaataatttgttattgatgcccgaattttccggaggctgccgtcagcaggttgccaacaatttgcggacgggagttcatatagtggtgcccgttgtactctactgccagcaggatgttggctggtcaggacacgaactctgctaa

SEQ ID NO: 202648 - DNA, 2163 bp, Klebsiella oxytoca
atgtctccagttacaaaaaaaactgttgtgaaagatacagatgaaattgatttagggcgtttgattggtgagttaatagatcatcgtaagttgattatttcagttacggcattatttacaatgtttgctctgacatacgcacttttctcaacccctatatatcaggctgatgcgttgattcaggtcgagcaaaaacaaggtaatgcgattcttaataatttgagtcaaatgctccctgacagtcaacctcagtcggcgcctgagatttcattgttgcaatcacgaatgatcttgggtaaaactgtgagtgatttgaatttacaagctcgcgtaatacaggattattttcctatttttggccgaggtttggcacgattacttggtgaaaaaaaaggtaaagtatctatctcaaggttatatatcccgaaacacgatgatgacatacctgagctaaaacttacgatcaaagatcaaaagaattatacagttttctataatgatcatcaaatggatggaaaattaggcgagttactagatgaaaatggtatttcgctgaaaattgatgatatagatgcgaagcccggaactgaattcaaggtttattatgttagtaagttaagagctattactgatctgcaggattcattcactgtagcagatcagggaaaggatactggtatgctaacactttcattagccggcgataatccagagctgatagaaagcattgttgacagcataagtaacaattatttagcacaaaatattgcacgacaagcagctcaggatgctaaaagtttagattttttgaacttacaactaccaaaagtacgtgcggagcttgatgttgcagaggaaaaactgaatcagtataggcgtcagaaagattcagttgatttgtcactagaagctaaatcagttcttgagcaaattgtaaatgttgataaccaacttaatgaattaacttttcgtgagtctgaaatatcacagctgtatacaaaggaacatccaacatataaagcattgatggaaaaacgaaaaacgttacaagatgagaaagcaaaactcaatgaacgtgtttctgcaatgcctaaaacgcaacaggaaatcttaagattaagtcgagacgttgattcagggcaagcggtttatatgcagcttttaaaccgtcaacaagaattgaatattgctaaatctagtgccatcggtaatgtcagaattattgataatgccgttacacaacctaatcccgtaaaacctaaaaaagtaatcattttacttgtaggttttatcttgggaggaatggtttcaattggtttggttctgttacgcgtatttttaaggcagggaattgaaagtcccgaacagttagaggaaagaggcattaatgtgtacgcaagtattcccatatctgaagcattcactaaaaaggcggtgcaaacgtatggcttgcgtaaaaaacagcaggacgaatatcaaggatttcttgcaattgaaaaccccgctgaccttgcaattgaagccatgagaggcttacgtacaagtttacattttgcaatgatggaagctagaaataatgtactaatgatctcaggggcgagtccaaatgcgggtaaaacttttgttagcaccaaccttgcctccgttataggacaaacgggtaaaagagtccttctcgtcgatactgatatgaggaaaggttataaccacaagttatttaatgtctcaaatgaaaatggcctttcggatttcctttcaggaagaactgagttgtctaaagtcattaaaaaagttccccaggtcgggtttgatttcatttctcgcggagttgcgccacctaacccagcagaacttcttatgcaccgtagatttggtgagttaataacatgggcaagttcaaattatgatattattatacttgatacccctccaattctcgctgtaacagatgcggcaattattggtaattatgcaggtacaacgcttcttgtcgctcgttttgaacagaatacagctaaagaattagaggttagtttcaaacgattcgagcagagtggagttttggtaaaagggtgtattcttaatggggttgtgaagaaagcaagcagttattacggctatggttatagccactatggctattcatataccgacgataaataa

SEQ ID NO: 202649 - DNA, 297 bp, Klebsiella oxytoca
atggcaacaaaatcagaacaattcagacttcaggtcacgccctggtttttccattactgcaacggtcggttgtctgatgcccagcgcctgcgccatttccacctgagttttctggactttttcacgcagttcggcgaggtggatattgagcaggatgtctgccgccatcgcctgagcttcggccgcgacttcgggtttttcgttccagcgttctgcccatcgcgttacgccttctctttaagtgtgttcaaccagctcgtaaactcccgatcggcaatcgggagcatctcatcgtaa

SEQ ID NO: 202650 - DNA, 135 bp, Klebsiella oxytoca
atgccgtccttttcgcacgctgccaacgtgctgcaacaaaaccatattcgggtcgtcaacttctctttagaaagcgcggttccggaaacgattttcgaaaaggtttcttttgatgagtactttaaaaataagtaa

SEQ ID NO: 202651 - DNA, 699 bp, Klebsiella oxytoca
atgagtgacatttcacgtcaggcctatgccgacatgttcggccccaccaccggcgataaagttcgcctggcggacaccgagctgtggatcgaggtcgaagatgatttgaccacctacggcgaagaggtcaaattcggcggtggcaaagtgatccgcgacggtatgggccagggacagatgctttccgccgggtgtgtggatctggtgctgacaaatgccctgatcgtcgattactgggggatcgtcaaagccgatatcggcgtcaaagacgggcggatcttcgcgatcggcaaagccggcaacccggatattcagcccaacgtcacgatcccgatcggcgcggccacggaaattattgcggcggaaggcaagatcgtcaccgccggcggcgtcgatacgcatattcactggatctgtccgcagcaggcggaagaggcgctggtctccggcgtcaccaccatgatcggcggcgggaccggcccggcggcgggcaccaacgccacgacctgcacgcccgggccgtggtacatctcgcggatgctgcaggccgcggacagcctgccggtcaatattggcctgctgggtaaaggcaatggttcgaatccggatgcgctgcgtgagcaggtcgcggccggggttatcggcctgaagattcacgaagactgggggcgaccccggcggcaatcgactgcgcgctga

SEQ ID NO: 202652 - DNA, 990 bp, Klebsiella oxytoca
atggacgtgcaggtcgcgctgcacagcgacaccctcaatgagtccggattcgttgaggataccctggcggccatcggcgggcgcactatccatactttccataccgaaggggcgggcggcggccatgcgccggatattattaccgcctgcgcgcaccccaatattctgccctcgtcaaccaacccgacgctgccctataccgtcaacaccattgacgaacatctggatatgctgatggtttgccatcatctcgacccggatatcgccgaggacgtggcgtttgccgaatcgcgcattcggcgggaaaccattgccgcggaagacgtcctgcacgatctgggcgccttctccctcacctcgtctgattcacaggcgatgggccgcgtcggcgaagtggtgttgcgcacctggcaggtagcgcaccggatgaaggtccagcgcggcccgctggcggaagagagcggcgataacgacaacttccgcgtgaagcgctatatcgccaagtacaccattaatccggcgttaacccacggtatcgcccatgaagtcggttcgattgaagtgggtaaactggcggatctggtgctgtggtccccggcgttcttcggcgtgaagccggcgacgatcgtcaaaggcggcatgatcgcgatggcgccgatgggcgacatcaacgcctctatcccgacgccgcagccggtgcactatcgcccgatgttcggcgcgctgggcagcgctcgccaccgctgccgtttgacctttctgtcgcaggcggcggcggaaaacggcgtcgctgaacggctgaacctgcacagcgcgacggcggtggttaaaggctgccgcacggtacaaaaaggcgatatgcaccacaacggcctgctgcccactattaccgtggattcgcaaacctacgaggtgcgcatcgacggcgaactgataaccagcgaaccggcggacgtgttaccgatggcgcaacgttatttcctgttttaa

SEQ ID NO: 202653 - DNA, 579 bp, Klebsiella oxytoca
atgaaatacttcatgatgaagcgtgtattgctggcgattgcactccctgtccttgttgcttactttgggggttctaaagtgatgtcagtatattgggttcctctttttttcatcagctctatgttgtgtgcaacagcttttggtaaatatgttgtcaaaagaaataactcggcaactttgaattatctgaatgataataatgatgggatctattttcataaatttaatgaatcagaaatccggttagacacaaataaacaagaggttttcctcaaaaatgatgaaggtgcaaaaacgtattctttcgaggaaattaaagagtggagctacaacattacatacggtggtgaagtggcaggtaccggattaagtagtatcagagaaaacggtaaaacattaagtcaaaacatcgcagaaactggtctttttatccgtgtaaaagacgttagtaaaccagagtggcatatccggttctatcctcgtaatgatgctttcaattcgagtaatgggttaaatgatttgaagacgcagctcaaccaatggatggagatctttgatcagaacttgaatccagcatga

SEQ ID NO: 202654 - DNA, 168 bp, Klebsiella oxytoca
atgatgatctcatatcaggaacttgttcgcaccttccttagctttacccctctcccgagctgccactatcagaaatacgataaacgtcatacggctcacaaacccgcgccacgcctggctttaaccggtttggttagcaagagtaaaacaaccgaatttctgccgtaa

SEQ ID NO: 202655 - DNA, 225 bp, Klebsiella oxytoca
atgcattttgacttggattttagagctgctgatatctatcctgaagcaggagcggttgatcaatgcgtattactcattaatcatgatggggattatgtggttggaacgcctttcttcagcgaagatatgaaatttatttgcgttatgagtagtatcgggccaattcacccaaatgattatagtatgtgggcacttctgcccacaccggaagttagaattgattga

SEQ ID NO: 202656 - DNA, 915 bp, Klebsiella oxytoca
atgctttacatgaaagaaaacggtgtattgatcaaactggacagctgggaacaggtttattcaagacccaatttcattaaagatttagacctcaaagaaaagaaattaaaagcacttattggctattacaaaaatgagcctccccgtaaatgtggaatcaaaagctgtcatagcagccacatgaaggggggcatcgtactgactgaagatgattttgaagcctctatcggccatatgtgtggtagtaagatttttgaagaaaaatttgacgatcttataaagcaacttgaaaaggaagtagatttcgaaatctataaagaagccgtagcgagccggaaagctcgtgtgttcgagtactggaacaaggctgcagcacttacttccggaaaaaatggtgttcttagacttgctgaaaaaatcactgctcttaaggaccctttggttgctgggcgattccctgtaatggaattgggccgtatggcagctaaccagcaaacaaaagtgaccaaagaaatctgggtagaaaaaaagaaaaaggaactcactgaagaagaagcaaaaagcggtgagaaaaaatataaattagaaacagtagtctgtggtcagataaaaaatacagaagtcctgttatcagttaatgatttaggtaaaatttataaagaagatattgaatctgtgattcagggccttgaaaagttagatttacaaaaggctacagcaagacaaatccaaactataggacgggcagcttcagccctggatgtccgacttgaaactgcatctaagttaaaggctcttgcgacggattttttaacccgtgaaaatctctacccaatgtacgaaaaaatgttctcgatggatacgattagccggaaagaccttcagctgtacgaagagctaatcaatcaattctaa

SEQ ID NO: 202657 - DNA, 1023 bp, Klebsiella oxytoca
atgtacgagttgggttgctctcgaaaggaagtatctagggcgggggagcgtttagtggactgttttacgcaaaagaagtcatacgatgataaagatgtacaaatactccatgattggcgtatgtgccatgtataccctttagaacagcttactaaatacttagaaagagaagccaagtctctgaactcaaatgccattatatcttcaaggataaagaggcttccatccattgttgaaaaattagccagattcccaagtatgcaacttggtcgcatgcaagatcttggtgggtgtcgtgctatagttgataacattgaacaagtctacttaataaaagaagaaatattatctctaacgtttaaacatcaattacataaaattcacgattatatatctgaaacaaaagattctggttatagaagtttgcatattgttcattcatttcaaaatcaaaagtatcctgacttaaatggacttaaaattgaaatgcaaataagaacagcgattcagcatagttgggcaactgctgttgaaatggttggcatttttaggagagagtcattaaaatccagcatgggagatgctcgatggttaagattttttattttagtgtcagagctattttacagaattgaatcaaaagaccccacattaaacaaaagtcacaatgcaatttcagatgaattaaagttattatcaaaagaacttaatgtcactagtgtactaaatgcatttagtcaaattgctgatcacattacaaaaagcaagctatataatagtgggtattgcgttattgtagtagatacaaaaaaaggaactatatctgtaactggcttttcaaatcaaatgataaaaaaagcatcagaattttatataaaagctgaaaagaaatgcgccgaaaataccaatcaggttgctgcaatggtttcagtaaattctattaatgatctaaaagctgcatacccagcattttttttggatactaaaacattcttaaataacttaagcagatttattatatag

SEQ ID NO: 202658 - DNA, 141 bp, Klebsiella oxytoca
atggcggtgggcacaacccacagagacgagataaagggagttcgtggcgagtttgaccggacctctccccagcagtccctcatccacagcgtgttgtttgccggggctgtggcccgttgcgggtgcggttgtcacgggtaa

SEQ ID NO: 202659 - DNA, 1020 bp, Klebsiella oxytoca
atgacttccgctctgcgccagctggttgagggtggcgttatccagctcacgctgcgtcaccgacgcaaagaccgttgccgtctcgctaaccgacctgccgggactttccacccagccgtggccgattttaataccgtcaaacacgcccgcgcccacggccagggtctgcgtggttttctgccccggccgctgtaccgtcagctgcccctcctccactttcatcaccgtgatgctttccccgcctttcaggcgtgtgtccggtatcttcccgagcaccgccagacgttccccctctgccaccggcagtgtttctgcccggaacagcgtccactggctgtcgaccgcggaaaccttcagatccagacggcccccttcccggtctttcagggtcagcatattgctgctcgcggtcacccggtcaatgacaaagcgatcgtgcgtccgggtctccggatcccagcgttccatcaccatcccctcccggtaataatcccgcacgccccggcttttgctgtccagccacaccggcgtcagggctgtaatagtcgtgtctttctcacccagcaccccctcctgtctgagggagtcacggatgaggccgttgagtacgctctgttcacgggtcccgctgatttgggccacgctttcctgcccttcacgcacgctgacggcaaactcctgtgccagccggctgtagcgtgctcctttatccggttcactgatgatgtcggctgtggtctgatggccaccctgccagcgatacgtattcacgccgctgtccttcagcaccgtcagcgcgctgccggtcccgctgcgcttcccgctgtcggagagcaggacctgcacgttatggcgcatcgcgccatcgagcagggaaatcgtttccttcaggctcagcttctccgcctgatccacgatgagtgttccgcccggaataaacgccgtcccgtcctgcagggcggatttaccggtcaccgtttccccggccagacgcacatcaccggcgagaaaatcacgtga

SEQ ID NO: 202660 - DNA, 1230 bp, Klebsiella oxytoca
atgaaaaaaatgttaatagcacctgcaacaattatagttttgaattacatttcagtagtccatgcatccgatatcggcaccatgggtaggataactactgagcggaaaggagatattataactgaggggctttatgcatcaaaagatacatatggtatgcgtgccagtgccgttgctttagctattagagcgaatccagataaaccctttgagtatcctatcaacggtttttcatggactaaagccctttcaggttataacaatagagactctgtcggtttatacgcagacaacacttcacctccgttccgaaattgggagattatcaacaaagctcagtacactcccacatcttttacatcctcacatattgatacttcaaaactaaaaccagggatgttgatcgatacagatcattcaccaaaatggtcagcttatatagtatccgtaagcggtgatagagtaacaactggaggatgggtaaacacagccacaaaaaaaatgggaacaccaaaaaatggtgttggtttaaaaataaatcccacatctaaaatttgggcaacgaattttaatattttccttgcacaaaatggaagagctaaagctggcgtaattcaagagaatggtgttattaataatgcaatagcaaatccaaatgaggttaacgggatcgataatgttatattaccagcatcaaaatttggtggtaccgctgcctacctagcaagatcagcaacatcaggaaataagcaacagtggtctattggctatatgtcacagggagcaaaaactgccaatttttatagctccgataatacaaaaaatataaacactgaatcgggatttcttgaaaactctcatgctaatactggattagcttttacaggaaaaaacaaaaatagttcaattgagtggtactcttcaggaatactctcagcaaaaatttctcccgaaggtcagattgaaaagattgcatataagacaaagttaatttcatcggatactcatttaacagataacttcgctaggtatattattaacacctcaaatgatattactttatatcttccagatcaaaaaaaattagtagatggatatacactagaactctataatataagcaatcgtaaagtaaatattaaaacggaaggacggataaacaatactgtaaaaggtaatgaaaaaagaataaacttgatttttactaacggagaatggtttattctctaa

SEQ ID NO: 202661 - DNA, 1260 bp, Klebsiella oxytoca
atgaaactaatcaaaccgaatcttaataatatttctcagttatcgatagcttttttcatatttttaatagtttttcttccttcaggaagcatcggtgaagtgaacgtgaaagttctctctatgttactaatgctgggaagcgtattcttagtattactatctggtcggaagttaagaagtaaaagcatatttttaattttttcaatcatagttagttttctttttgtcctcataaattacatgagtgcttcaagtatttccttatcaaaaggatatgcaattgctgaaggagggttatttttaacctattttatatgtactgctgtattatttattgttattcttgaagggattgcatcaagggaattagtaataaaaactatatttaactcatgtcttttgtattcgattgttaagatatttattaccgcactgtccttcttaggaattatttctattaatgaggtagcccaggttatatattcaacatatggtattaagccaatgttattcccaattacggataaattgagccgtttccagttggcgaacgattatattgtatgttttgctttgttctttataatatgtaaaaaagagtctattgatttcattacaaaaaggaccttgtctttttcatattatattctcgtcattagtgtgctcatttcattttctagatatatgatgctagtaatggcgattggcttgatgattaaagttttttctgtcagaaaaatatctgccaaaggtattttagttgcttctgcatcactttttattttttcaatgatttatatatcgaatatggatgaaataaacgatgcgatagctctacgtttcatctccgatgataatagtgtttcagatgcaacaaggcaactgcaaattgattgtttatctaatgctttcgaacagaaaccattgctcgggcatggtggtttaggtgactattcgccaaattgtcctggcccaagggatgcagagttttcatatgaagttcagtaccttgggtttttatatcgctatggaatcttgcaaacattatttttggtcatgttatatgtctcacaatatttggcggtaatggagcgtccaattttctctaaaggaaatctaccttcactcttggccgttgctgtgtggattttaattggcttttttaatccttatttagtaagcggttatgcatcagtaatcatggttctgtgctcatgtttcactgtgattaaacaaaaagaaatgaacagagataaataa

SEQ ID NO: 202662 - DNA, 147 bp, Klebsiella oxytoca
atgtattttgtgtcatataatatctttaacgggcggcccatttgggcacttattgtagtggataattttagtcaggaatatctgatgcgccatggcgaaaagtttctgagagaagaggatgtggttagggtcatggaagcactttag

SEQ ID NO: 202663 - DNA, 1251 bp, Klebsiella oxytoca
gtgtctcagggggaccgaatgcgtttcagcaaaagtgacccggagcgcggctatgtggccaacagtatctgggaggtgcagtctgtttcgggtgacagtgtcacgctgtctgatggcaaactaacccgcacgctgaccccgaaggcggatcaggcgcagcagcatatcgacctcgcctacgccatcaccgcccacggcgcccagggggccagcgaaccgtatgccatcgcgctggaaggggtggccggtggtcgggaacagatggccagctttgagtctgcctatgtggctttatctcgcatgaaacagcatgttcaggtctacaccgacagccgtgagggctggataaaggccatccagcattcacctgagaaagcgacggcgcacgatattctggaaccccgtaacgaccgggcggtgaaaagcgcagatctgctgttcggtcgggcaaggccactggatgaaaccgccgctggccgggcagccctgcagcagtccggtctggcacagggaagttcaccgggaagattcattcctccggggaaaaagtaccctcagccgcatgtggcgctgccggcatttgataaaaacgggaaagccgccggtatctggctcagcccgctgaccgatcgggacggacggctggaggctatcggcggagagggacgaattatgggcaatgaagacgcccggttcgtggcgctgcagaacagccgcaacggagaaagcctgctggccgggaatatgggggagggcgtcagaatggcccgcgacaatcccgatacgggggtggtggtgcggctggccggtgatgaccgcccctggaaccccggggccatgaccggtgggcgggtatgggctgaaccggcgccggtggctccggtaccgcaggccggggctgacattatcctcccgccagaggtactggcacagcgggcggcagaagaacagcagcgccgggaaatggaaaaacaggcggaacagactgcccgggaagtggccggggaggcgcgtaaagccggcgagccggcggaccgggtgaaagaggttatcggggacgtcattcgcggactggagcgtgaccggccgggtacggagaaaacgacgctaccggatgatcctcagttccggcgccaggaggaggcgattcagcaggtggcctcagaacgtctgcagcgtgagcgtctgcaggctgtggagcgggacatggttcgtgaccttaaccgcgagaaaacactcgggggcgactga

SEQ ID NO: 202664 - DNA, 531 bp, Klebsiella oxytoca
atggaaaaccgaattacacattttccagaccatcagcgcgacggctttctgcggctgctgcaacagggccgcctgaaccgccagtgtgcgttcagaagaaaggcgggtcagcaacgggacactgacggcgtccagcggatcgactttttcaggagcctgatcggtggatgcatccttctcctttattttttcatcggcgcacagcaccacaccgcgctgtactttcacctcctgaccagtccaggaaaccaccactccggcggattgcttcatttcatcgggccatgtccggtgttcagcgcgaaactcaatggtctgctgttcatgccagacctcattgagttcacctgcaacacgctccccgtcatccccggtattttgtacttcgagttcttcttcgcgttgtgcaaggaaggcaagtcgttccgattcggcttcggtatatgccacaggcgggacagcatgcagacgccagattttagtatccttcccgtagtgagaaatcggttcaaggcggccatcgcaccatga

SEQ ID NO: 202665 - DNA, 189 bp, Klebsiella oxytoca
atgtttacagacagacagtcgctatatcgtgatctcgaaagggagcgcgggtcgaaagttatcacttatgtaaccggtgacagacctggcatggaaacgaaaatccactctgaagtttatgatttctttgtgaatcatctagggaaggtgcgaataagcaggtcatttcttcccaagctgactcgctga

SEQ ID NO: 202666 - DNA, 180 bp, Klebsiella oxytoca
atgacccgattaacacgacctacctttagtcccgagtttcgtctcgaatccgtacagcttgttgttgaccaaggctataccattagagaggcggctgaagccatgaatgtgggcaagtcgacgatggataaatgggtgcgtctgatcctacccgcgaatagtggacacgcgactaagtga

SEQ ID NO: 202667 - DNA, 978 bp, Klebsiella oxytoca
atggttatttacaccccgccatctgtggcaaaagatattcctgttatcgacctcgcagaaagcttttcacacgatattgaaaaaagaaaagctgttgcgtgggaaatacataaggcagcacgtcaaactggcttcttttatataaagaatcatggtgttccagttgaattgcaaaaggcatatttcgatttagccaaggaatattttgcgtccccgatggacgaaaaaatgcagatcagttccaagaactctgtctacctgcgtgggtacgaacctattgctgctcaaactctggatgaaggatctcctcctgatttgaaggaggggtttttattgggtcgggacctaacagaatctcatccttatgttaagaataaaacaccgtaccatggccccaatcaatggcctgaaggcaatccacacttccggcaacaggctgaggattatatgcgccatatggagcttttaggccgtaagcttgtgcgcttattagcactctcgttggagttgccagaggacttttttgacgagggtctgaaggagccgatgatcatttctcgtatgctctactatcccagtcagccgaaagacgctcaggtaaaccaattaggggcaggtgcgcatacggattggggtcttattacattgctactccaggatgcagtcggagggttagaagttcgaaatgtagatggagaatggctgaaagccccttgtatagaaaataccttcgtagtgaatctaggtgatatggtgccagtgcttactaacgggttgtatcactctacaatgcaccgcgttctcaacgcatggaaggaaactccacgttactctttcccgacattctttgaccttgactactattatgaggcttcagttgttccaactttgcgcaagcccgacgaagagtaccccgaacctatcacagtaggcggtcatattgctgagatgttcaataaaacatttggcgtaaaatag

SEQ ID NO: 202668 - DNA, 732 bp, Klebsiella oxytoca
atgcggcgcgtgtttattgacgcgatgctggagcacaattttgaggtgatcgggcaggttcgaatcgacaccaggctctacgacgcacctccgacgcggaagccggggcagcgaggtcgaacgcgaaagtacggagaaaaagtgacgccggagcgcattgcccgatttaagcgaacggtcaccacgctgaatctgtatggtagggaacaagccgtgcgttatcgcagcaagttggcaaaagcgcgctttctggacggccgcatggtgcgagtagtttggtgtgagtttcggagcgaacgtggggagtggaagtcgacctgtttgctgttgagtacggatacctcgctcacgcctgaagaggtcattgagagttatggtttacgctggtcgattgaatccatgtttcatcaattgaagctcgcttggggtatgaaagaagcctggcagaaaacacgacagacgttgcatcgctgggtacatctgaccatggttggttatggtctgactcagttgctgagctgcgtagagagtcccgccatctcggaattgtgtcgccactcgccgtggagaccggaaaacccgaggacggctggtcaaattcgaaaggggctggttcgtcattttcgacatgttgctgttaggcggtggtggagcagtaaaggccaaaaattccggcctcccgatgagagagaaaggatagattttgagtataagcagcgtaaagtcgcgtaa

SEQ ID NO: 202669 - DNA, 639 bp, Klebsiella oxytoca
atgattaaactttacgactatgagctttctggaaactgttttaaagctcgcttactcctatcaatgcttggtgtttcttatgataccgagattgttgagttttatcctggacgcgaacataagagtgctgattttcttcgcattaatccacttggccaacttcccgttttgcaaaacggagacaaagttattcgtgaatcccaagccattttggtctatctcgcgactaagtttgatttgggcaggaaatggtatccgctagatagtccagatgctcttgcagatattcaaatctggctagctttttctgacggcattacggcgtctatttctgctgcaaggctacatgagctttttatgtacgactttgatgtcgaggaatgtcggaaccgtgcttatgtgctgttagaggtaatggacaaacatttgtgggtgaatcgtcagcaaggctttgattttctgtgtcccatggagcatccgacaatcgctgatattgcctgctttccatatatagctatggctgacgaagcaggcatttcacttcaagactatccctcagtcagactctggctagatagtgtgaagcgtattcccggttttatagcaatgtcgggaatattccctacaagcaatacctaa

SEQ ID NO: 202670 - DNA, 1758 bp, Klebsiella oxytoca
atggatttgttaaatcaggagtggcatgtcattgccaactccgaagatataccgtttagacacgtgtaccaatcacgccttaatggtcaagaactcgcagtatggcgtgactataacggagatgtgaatgtttgggaaaaccgctgcccgcaccgtggtgttcgactaacactgggcgaaaatgtcggagaccaattgcaatgccagtaccacggatggaaatatcagtctggtacggggcattgctcatttgtaccagcacatagaactgcacagcccagtaatgcctgtgtaaagacttatctatgcgcagagttagaaggtctgatatttgtaaaactggatacaacgaacgggaccgatgctccaaagcagctatctctcgttgactctcttaattccagcaacctgcgaagccaggtgattgctgtagatgcccagactgcgatcgatacaatcaagaaaggagcttctagctttgccactgttttaggcaatcgcccagaagagattcagtttatggacgacggcctaactatcgtccttacatgtacggggttggcggaagctttacgtatttttgtccagccagaatctgaacaaaaagtggtggttcacgcccgtttatacacggatactcctgtggctcttcaacgtaaagttatgttcatgcacgtgctgactgagctgttcgctcagacggagcttagtaccagcatttctgattcaaaaaatattatcgctactgatagtagtacacatgtaaaactgggcaatcctgaagtagacagcgctcgaaagcagattatatgtactgtcatcgcccgaaatactgagacgcctgatattgattctttctggcttaagccggaagaagatcaagtattaactttggaaccaggtatgcatgtcggtttgacaacgccatccggtcacttgcggcaatactcaatcgttaatacacccgaggagcgagatgtcctggtcataggtgtaaaacttgaggccaattcacgaggcggctcgcgtagcatgcacagtgatgttcgagttggctctaaagtgtcaataactcttcctcgcaatcaatttcaattacaaccatctgagcgtaaggctgtcctcattgccggtggtattggtgtgacacccctgctcgcaatggctcttttccaagagcaaagagaccgtacctaccacttacattactttgtgagaggtaatgagcacattgcctttaaagatcgtatttcggcgcttggaaataactgctctacctatattggcttaggtatagaggagactcagagtgcaatcactgagcttctacaagaattaaatccggaatcacatgatatttacgtctgtgggcctcaggcgatgatcgaacttgtctccacaacggcaataaagtccggtttttccgcagatcaagtgtattacgagtatttcggattaactgatcacgcaacatcacgcgcccttagtgaagggagctatcaagtgactattcaatccactggacaagaattcactgttgaacctggtagaagccttcttcaagcatgcttagaagctggggttgaaatcgattactcctgtgaacagggcgtatgtggtgcatgcatgactaaagtaattagcggcgacttacaacatgaagatgtttatctctcttccaaggaaaagatcgatgggaaattaatcatgccatgcgtatctagttgtaaatcagcaaagctagttctggatatttaa

SEQ ID NO: 202671 - DNA, 846 bp, Klebsiella oxytoca
atgttaaatgagaacagttttgtttttgacgactggcaccccgtaggcgcgctagctgatacctcacttggtaagaaatacttttcccgagttttggctgtcagcattgaatatacgctcaccgaggatggattgcgggcagaggtttcctctacaggcctaccgctaaaaaccaaggtgatttatggactattatgggtgtctctctcagataacccacgagatgttgtagccatccccgaatttgatgaacccgatcgcagggtgatcagcgcaggatcaattcgagtgggaacctctgggttacgagtcgtagaaaacttccttgatatggcgcatttcccgtttgtacacacagatattctcggcgcagaaccactaactgaagtggctgcatatgacattgaaatcgatgaagaccgagatgaagtgctggctattaattgcagatttccccaaccgaaagggtcggcggcagctactgagccggtggacatgcattacgtctaccgagtcgcccgccctttcacctctatcttatataagacgtgtgtgattgaagatgatcgccttgatgttttgggtctcttcgtccagcccctagatgaagaaacatgcgttgcccacgcgatcatgtgctacctcgatgacattaacaccgacaagcagctaaaggacttccagcagagaatttttggccaggacatcatgattttgctgaaccaaattcccaaaggattaccccttgatccaaagcttgaaacccctgtgcgggctgatgccttgtcgagcgcctatcgtcgctggattaaagaaagaaatgtgacgtttggcactgctcactga

SEQ ID NO: 202672 - DNA, 1086 bp, Klebsiella oxytoca
atgaaaaagatgttcaagttaggttgtgccgggctcggcatccaagcgtcgtctatagaaaaccctgtctcgcttaacgagctgccaatcctcgagcagtttaagctggtaaaagaggctgaggtgtgggacttcatcgaccgtgttcccaataactaccaagagctggacgagtacataaagggcagtcagatatacgacttgccggtgctatccggcagtggctgctacacgttaggttttgatgaagaccttattaagcaaaatataaatcttaccgctgaggtcggtggtaaataccataattttatggtctgggctaagcacaaggacggtcactacgtgaccaatgaagaagttgctgagagctatctagacgccttcgagtacgccgaaaaagccggcgtcatcatcaccttcgagaaccatgtggatatgtggtctgaagactatcgtcgagtttcgcaggttgctgatctggttgaggcgagaggagtcaagtttaacgtggccatggactacagccactgcattttcaaaattgaaaatgaagttgagcatgcagtttctcagatgcgtggtgacaatgaggcaattgccaaacttgatccgttcaatgacgatagttacgcagatgaatggctcaaccgcaatctagttcactgggcgcagatgcgtcccgcagcaccaaacggcccacttaactggtgggggtttgaaactggcccatgggatgcaaaagggacagaccgcccaggacgttccattcaatacccattccagcgccctgccaaaggcgaatggcacacagaaatgtggcatgcccacaagctggcatgtaccaaagaaattacgagaaaggtcatcgatgcgtacttacaaagcgatgataccaacctctcattaatgaccatcgacaacatcaaccttaatgcttacggattagggtggaagtacaacatgttcgccgatagctgcgcttacgctcagtatgtccgtgatatctatgctgaacgtgctgctgttcatcaggcacgaagctccatgtcagcttctgaatttgtctcccaataccgggcagattga

SEQ ID NO: 202673 - DNA, 1068 bp, Klebsiella oxytoca
atgcgctctcagtgtaaacccctaattgaagacaaaggctatctgcgtcacttctggcatcctgtatgtactttggccgagttcgaaaaggtaaatagctccgggcatggtccaatgtcggtgaaattgctaggtgaaaacttggttttagccaggttagatggagagatgtttgctggggatgatcgctgtattcatcgttcggcacagctgtctctcggtcaggtttgcaagcaccaaggtaaagacacccttcaatgcccttaccacggctggcgttataacgatgaaggtaagtgctctctgataccagcatgtcctgatatgccgataccttcgaaagcgaaaatttcaaaatatgattgcgcgattcgctatggcattgtctgggttcgcttggataactcctttgactgcaccgagattcctttcttaggtgattgggacagtgagggtatgaaagtagtggtggctgattcgtacgtttgggagaccactgccgaacgccgttgggaaaacttcactgacttttctcacttcgcattcgttcatcctggcactttatatgacccattcttcgccactcatccaacagtcaatgtcgatcgcattaacggtgagatgcgcttccagcttgctccacccaaagaaatgtatgagaacttgcctgaggaagcacctatgggcgattttacctaccgttgttcaatgccctattcggtgaacttagaaatcaagctatggaaggatgactctaaatttatcctgtggactacctcgagtccggtcgatgacacaacttgtcgtaattttatggttattgtgcgcaccgaagatcaccagcctgaccatactcatctcgccttccagaagcgtgtactggaagaagaccgtcctatcattcaatcccagtcacctatggatttggatagttcagaattgtccgtatctacagacaagatctccattcaataccgcaaatggcatagagagctctcaatggcagcattggaaggtaaagaagaatttaaatcagtccttctcagtgaagtgactgagagtagatag

SEQ ID NO: 202674 - DNA, 846 bp, Klebsiella oxytoca
atgtatgtcaatgatcctaaagttagtatctacatttcgacatataatcggctggaaaaattaaaaagagccataaattcagtcttcgcgcaggattatgctaactgggagttactggtatgcgatgatgcctcagatgatgggacctttgaatttatgtccaatcttgtagcgaacgacagtagagtcctttatttaagaaatgaatgtaacaaaggagcatgtgaaacaaggaatttaggtataaataatgcttccggagtatttatcactggtcttgatgatgacgatgaatttacaacggatagaatatctttttttattaataactgggatgataaatactctttttcatgttgcgattttttgaataaatatcctgacggagtttctgaaaattactataagcaaaatgtaaattctctaatcttcgattttaaagatatgctttatgaaaatgaagcatcaaatcaaattttcactcttactgagagattaaaaaatatcgatggttttaataaggaggttagaagactacaagattgggatacatggctccgcttatcttacaaatatggggaatttatacgatttagtaaatcttcgtatatcatgcatcatgatcatgctcctcatgaaattcgagtttctcaaaatgaaaaaattgctgcttcattgctatccttagctgagaggaataagaatttatattcttctgatgagtttagatttatgaagtacattgtagatgctatgaataaagagtcttcacttgcagaaagtatatattggtcgctgaagaagaaaaacccaaaatatataatcaaacattttttaaaaagataa

SEQ ID NO: 202675 - DNA, 948 bp, Klebsiella oxytoca
atgaaaattgatgtgttacttgcaacgtataatggtagtaagtttgtaaaggagcagattgcttcagtcctaactaactttgataaattgtcaggggttaattgtcgattattaatttcagatgatggttcatcagataatactgtaactattataaatgaattggaaagagatgattcacgtataactctagttgataaggctaaaaagggaggggttagacaaaactttaattatcttataaataattgcgatgcggattacatttttttttgtgatcaagatgacttatggttaccaaacaagatgtcaatttttttagatagatttttattaatagaaaaagattatacaggtcctgtacttgttcattctgatttatgcgttgctgataaaaacttatctccagtgaatatttcaatgtttgactatcaaaaaattaataaaatgccaagttttacagaattaattgtcagcaattctgttactggttgcgtaatggcatgcaatcgttccttgctaaaggatattaaaaatagtcagatatctaactccataatgcatgattggtatgttggaatctatgccgctgcttttggtcgagtttcatttattgataactccctaattctctacagacagcatggtgggaatcaagttggtgctaaatctttttcgacgaaggatatttttaatatagtcggagttaaagataaattatcagcagctcgattatctgttcagaaaacacatgagcaagcaatattattttttgatgaattcggagagaagctagagtcaggtaaacggaaagatttacaggattttatcgcttctttccatactgattttctttgtagattaaaattattccttcggagaggtttcaggaaaacaggtcgattaaggaattgcatattctttttggtctatgtattaaaattttaa

SEQ ID NO: 202676 - DNA, 498 bp, Klebsiella oxytoca
ttggaaacggtggggatctttaagctgtgtcgggtttcgcctactcttgatttgagcgcctttattgtgatgctcgtcaggaggggcgaagccttctgtaaaggcttctgtctctacgtttttttatgcctctgtgggggtgctatgagttttagtaggtttggtcaaactcttaaggatgttgctagtgttgcctcaaataaattgcaggatgccatcggggatgagtcattatccaccatagggaaaaaggttggtaacacggtttttcagggctctattactcttgcaaaaggcgctttttccgctattgaagcccgtaatgctgagattgttagcttgcgggctgactacgcaggtagagattccgaagagcttaagtctattgtacggtctaatggttttttatcctcgagtagtatcgaaaaagctgtagctcttcggatattagatgagcgcggtgatgcttctgaattccgtccacttaaaggagattaa

SEQ ID NO: 202677 - DNA, 198 bp, Klebsiella oxytoca
atggaaagtaaaaccactgatttttttgctgatcttgaacgcgaaaccgctgaaatgactatcgcacttaattatcttctggcagaaagtgaagaggataataaggcgtttcttgcctatctcgaagatgagccgctaccggagttgccagagttagatctagagattcctgatgagctgctggattgcgtctggtaa

SEQ ID NO: 202678 - DNA, 639 bp, Klebsiella oxytoca
atgaaatctaatcgtgtttactcatatctccgcgcctccacatcggaacaggacgccagccgcgctaaggaagcattgcaggagttcgccaaagaacacggttatacaatcgccgctgaatttatcgagaacgaaagcggggcgagtctcaggcgtccagagctgtttaacttgctgaaagtggcgcaaccgggcgacgtgctgttagtcgagcaggtagaccgtctgagtcgtttaaacgctgaagactggcagaccctgcgccagacgataagcagaaaaggaattagggttgtagcgctagacctgccaacttcgcacatgttgcttaatactggtgatgaatttacgtcacgtatgtttgaggcactcaattcgatgatgctcgatatgctggcggcaatagctcgcaaagattacacagaccgccaacgccgccaagctgaaggtattaagaaagccaaagaacagggcgcatacaaagggcgtccagtgaacgagaagctacacaagcagatattggcgctgcgtgaagctgggcgctcgtatagccagatacaggagctaacaggagcagccagaaccactatcagtaaagtccttaatggcaaaaatggctctattgacccatccaattaa

SEQ ID NO: 202679 - DNA, 438 bp, Klebsiella oxytoca
atggcggtacacacggtcactgaagccgctaagctagcgggtgtcactagaaggacaatataccgttatatcaagcagggtaagctctcatcagttgtaacagacagtaatacaacccagattgagaccagtgaactattgcgagtttttggcgccctgtcacaaccagaaggctctcaagtatccactggatcacaggttgaagagcctgagtatgtcacacgtttaatggcggaaatgtcacagattagggatttggttcaagggcagcagcagttattgcttgaggataagattgagactcaaaagctgcgagaacaggtgaccgggttgcagaatgaacgtgattcagttgctcaagagctggataaggtaaaggcggaacttgaggctgaacgtgggaaaggtttttggaagcgtttgtttaggcaaggctaa

SEQ ID NO: 202680 - DNA, 306 bp, Klebsiella oxytoca; identical to SEQ ID NO: 200797

SEQ ID NO: 202681 - DNA, 1422 bp, Klebsiella oxytoca
gtgaaaataaatagagaaagtaaagaccttagaaatccatttattacttcaaacagtcattacgaattcttcaaaaacgaagatatatggattttagataagaatatcaagcttaatatgttaaatgttttaaatgtattagatgaaagacatcatgagtacttcttagatgttttagccaattttgcaattacaaggtcatcatcctatacaaagaaaatgttctgggcattttatgattatattaagacaacagataaaggcgtaatcactgatgagtctgttagagaataccatagtaggaatttattaaaaaaaccggattatattaatagtataagagtttttttccgtaagtggtttaatttagaacttccaggtgtctcagaaaatcaagtgaactgtttatatcaaggcaaacctaaaagaagggaacttggtaaagcggtaaaagttaaagatatgaaaaaaggaccatttagtgatgatgaggtaattgcctttaatgaaggtgccatgtggttatatgattctggtgaaataacactcgatgagttggcaatggcgctgataacttcatacacggggaggcgacccatacagacctcacacttgaaattgaaagatatcgtgagtctattccagaatgtagaaaccgattattcaataaattttccaagagctaaacatagtggagtatttcgttctgagtttacaaacttgaaaataactgaagacttgcacgatattatcttgatattgagtgagagaagtattaatactgttgaaaactatcttggcagatgtgttgataattatgaattagacatatttcatttaaaatctaatgtaattactactaccatacagaaaatatcgataaaaactggttttataaaggatgattcttctattaacgcaagacgctttcgctattcacttggtacaagagctgcccaagaaggatatagtgagtatatcatagcgaagcttttagatcacagatcaacgagacttgttagctgttatgtaaaaaatgtaccagagtatgcagaaaggattgatgaggttatgacaacggaagttataaagtatgtgaatgcatttaaagggcatattataaataaaaatgatgctcaaaagaaaataaaaaatcacgagggtatagattcaggaaactgttccaactgtaagagttgtgctgctatgattcctatcccctgctatacatgcatttattttaatccttgggtagatgcaccccatcaagatgtctatgactatctaataagagaaagaaaaagaatagctgcgattacaaaagatataaaaatagctacatctcttgatagaacgatttctgctgtaagagaggtggttattaaatgcaacgagattagaacaataggaggaataatatga

SEQ ID NO: 202682 - DNA, 744 bp, Klebsiella oxytoca
atgcgttttgtccctatcaaatcgcttgcgcaacaagacgtccaatgcctgcaccgttcaagggaaagaatcattaaggcccgcacgagtttggtcaaccagatccgtgggctgctggctgagtacggcattataatcgctcggaacgttagcagtgtccgaagtggtttgcctctcatccttgaagacgccgagaacggattatcccctatcagtcgagagtgcttcgctgagcttcttgacgaactccatgacctcgatcgcagggccaaaatgtacgaaggcaagatcctcgagataaacaagcagaatgaggtctgccagcggttaaatgagatcctgggtgtgggtccaatgatagcaactgctgtctttgctgctgccggagatggtaatgacttccagaatggccgtcatttctcatcatggctcggcttggtaccacggcaacacagtagtggcggaaaaagtacgttgttaggcatcagtaaacgcggaaatacatatattcgaacgctactgatccacggtgcaagagccgtcctacgtgtttccacaaacaagaaagaccgcctgagtcgttgggctcaagggttgcttgagcgacgaggtcataacagggcatgtgtcgcccttgccaacaaattggcaagggttatttgggtgatcatggcccgcaacgaacgctatcgagtccagctatatgaagtcaaacagttgattaggaagaagaccaaccggtga

SEQ ID NO: 202683 - DNA, 234 bp, Klebsiella oxytoca
atggatcagcaacttacattcgcggacagcgagttcagcaacaagcgccgtcagacacgtaaggagaaattcctggtccgaatggacaagctgatcccgtgggcgcgtctcgaaaccgttatcgagcctcactatcccaaggctggaaacggacgtcggccataccccttgtccaccatgttgcgcattcactgcatgcatatatggacctttccccgtattgcaagaaaatga

SEQ ID NO: 202684 - DNA, 666 bp, Klebsiella oxytoca
atgcttacccagaaaattgttacagcagtatctgatgcgatataccaccggcgcttgcccccaggtacaaagctcaatgagcgtgaaatagcggatttgtttgaagtgagcaggactgttgttcgccaagcattgatccggttatcacaagagcacctagtggaaatctcaccaaagcggtcttcatcagtaacatgcccgagcttcgacgatgcttatcagctctatcaaatgttgttggtgttagagagtggggtgattgatcagttgacgaaaaccatcacccgagaggaactggatctattgcgcgcccacacagtcaaagagcgaattgcgcatgaaaaccacgatgatgatctcggcgacgaactgggcagggggtttcacactcttcttatttcattcatgaagaatgaaatgcttaacaaaatccactcacaacttcgtcgtcaggaagcattgataaatgctctatatcgttcaggcttcgattactgccaactacgagatgagcacgctagactcgtggactgtatcgatcgacgtgatgctgattcggctaaggacttacttgcttctcactacaatcttgtaattaaaggttacaagttcaatatgtctgcgcctccagacattgatcttaaaattgcgcttggtctgggatga

SEQ ID NO: 202685 - DNA, 846 bp, Klebsiella oxytoca
atggcaaaacgggcatctgccagggggatacgccgcgatgtctccggtattctacgtgccccacgtcgtatgcaggtggccgatgcggtcagctcatatatgcgtgtgccgatgggggcgggtaactccgtaccctgggaccccaatctggccccttatattattgagccgatgaattgcctggcatcccgtgaatatgatgcggtggtatttgtcggtccggcccgaaccgggaaaacgattggcctgattgatggctggattgtctataacattgtttgtgatccagccgacatgctggtcattcaggtctctgaagagaaagcgcgtgaacattccaagaaacgcctcgaccgcacattcaggtgtagtccggaagtaaaatcccgactcagcccgcgccgtaacgataataacgttcacgaccggactttccgggccgggaactacctcaaactgggctggccgtcagtcaacattatgtcgtcgtcagactacaaaagtgtggcactgactgactatgaccgcttccctgaagatattgacggggagggtgatgctttttccctgggttctaagcgtacgactacctttatgtccagcgggatgactctggtagagagttcgcctggcagggacatccgcgacacaaaatggcgaccaactactgcgcatgaagcgccgccgactactggcatattatcgttgtttaatcgtggtgaccgccgccgcctttactggccttgcccgcattgcggagaatactttcagccggaagtcgccaatatgaccggctaccgggattcccctgatcccgttctgtctagtgagtctgcttatctgtaa

SEQ ID NO: 202686 - DNA, 720 bp, Klebsiella oxytoca
atgaaagatggtaatggaggttatcatttttcttcgacaatgaccttcgttaagttcgataaccaacacttttgcgtttttgcagcacatgctcttcctaaagatgtagatgatctaaatcaaatcggtatgcttactacagatggtaaattcatgccgttttcggacatcgaagtgtctcatgaaatttgtcgtatacgggatttagtcgtttgccataccattggtgcatttgagtataagcattactttgatatgggtgataataaatcaacaacagaattcagtgaaaattttggctggattggttttcctaaaaaaaaagcaatacaggtaatccataacagtaaggcaaccagtgaaaaaatcaaggagcatcttactgaaggtgttgaaggactacaaaagtggactaatgctaatttcttattgataggaatgaaacaagtctcagaaactgaatcagagatcacaggttttcatgataatgaaaatgtgcaatacacacatgaaggtttcaaacaaaaaggttattctttaaaaggtatgagtggtggcgctctttttagaggaccgataaaaatcagaacagaatctccaagtcttaacgatttttttgattttgttgggataggacttgaatatgagaataacttagtaaaaggtgcatctaagagttctgtcctagaattgattaagaagacgctaaaacttagctaa

SEQ ID NO: 202687 - DNA, 1398 bp, Klebsiella oxytoca
atgaaagatgaaagccaaaaatatatctcgattatttttaaggagtggttgccgctgtacgacagcctgacgccggaagtgagggcggtacttaaaaatattgccgggcagcaggcggaggcgttagcgacccgtttttatgattttattttccaggacccggacattgcgcggcatcttagctatgacttagttcaggaacggctcagcagctcgctggccgggtgggtgaaagatatcctgatgtgcgataaggaaaatctgcaggcgctggcggagcggcagtacctgatcggcagcatccattcacgcatcggtatcccggcagaggcggtactgcgcggcgcgcgccagctgaaagccgggctgattgaaaatatccgcgatagccagctcgatcgcgagaccagcgttgccgccatctactacgccatcatggccattaacatggcggtagaaatgatgtgccacgcctataccctgtcgcactatcgggcgacgaaaaatgaagaagcgtaccgcctgtatagcctgatggataacgtgccgctggaatatggcaaacagcaggcctcgctctccggatgggaaaataccgctatttttaatatcgttagcgataataaaagcgatattaacggagcgttattatctgattctgaatttggcctgtggttccgccataaatgcgtgcgttattttaacaaaaatccgcaaatgcaggaaatcgccgacttaattagcaaggtggatgcgctgttatccgcctggaaatcctcgtctgagggttctgagtataaaaacacgcaggctttgctgcaggggatccatatccattgccagcagatcggcagccagatgggggtgctgtttagcagcctgtcgcagatgcaaagcggtaaggatacgctgaccagcctgcttaaccgccgctatctgccggttgtcctcaagcatgaagtgacgctggcgatggaatatgaactgccgatgacggtggcgattatcgacatcgaccactttaaagagatcaatgatagctggggccacatggtcggcgaccgggcgattaagcacgttgcggagctgctcagcgataatattcgatccagcgattatatcttccgctacggcggcgaggagtttctgctggtgctggtggagaccggcgccgcggaagcctttactatccttgaacggctgcgtaaaaaaatcagccagctggcgtttagcgttggcgctgacaatgagatttcgattaccgccagcatcggctacgccgtccacaccggtcatccggattacaatctgctgctgcgcgatgccgacagcgcgctgtacgtcgccaagcgcgatgggcgcaactgcgtgaagctgcatgaaggcgacggcaactaa

SEQ ID NO: 202688 - DNA, 873 bp, Klebsiella oxytoca
atggaactgttgtttgttaaatcggagtccacgttttcttacttcgaagccacgcggcgctatatcgataagcatggtaaaccgctggcactgtacagcgataaagccggtgtttttcgtgttaacaataaacacgccacaggcggagacgggcatactcagtttgggcgagccatgcatgaactgaacatccagactatctgtgcagaaaccagtcccgccaaagggcgtgtagaacgagctcacctcactttacaggatcgtctggtcaaagagctgcggttacagggcatttgttcaatggaggctgcaaatgacttcgctgaggcctatatggctgactataaccgccgttttggcaaagtaccgcgacatgattttgacgtacaccgtgctgtagaacatgatgaggacctggggcttattttcactgttcgtgaaaaacgtaaagtctcaaaatcgttgacgatacaatatgataaaatgttgtacctgattgaagacagcgaactgagtcgccgtgcaataggtaaatatatcgatgtgtatcactatcctgatggcagaaaagagctgcgcctgaacggtacgctacttccctactctacctacgaccgactgtcagaaatcgaccagggcgcgattgtcgataacaagcgtcttggccgaaccctggagtttatcagtctggtgcagagcaagcgggataacacgcgctctcagtcaattcccgctggagatggcccttcccgacgacggccaaagcaggaagggaagaaatcccagcgctcactggataatgatgacatgctcgaagcactcaaacagcttcagtcacgttcagaggacatttttggtaaaagagcccgctga

SEQ ID NO: 202689 - DNA, 633 bp, Klebsiella oxytoca; identical to SEQ ID NO: 32308

SEQ ID NO: 202690 - DNA, 531 bp, Klebsiella oxytoca
atggaaaaccgagttacacattttccagaccatcagcgcgacggctttctgcggctgctgcaacagggccgcctgaaccgccagtgtgcgttcagaagaaaggcgggtcagcaacgggacactgacggcgtccagcggatcgactttttcaggagcctgatcggtggatgcatccttctcctttattttttcatcggcgcacagcaccacaccgcgctgtactttcacctcctgaccagtccaggaaaccaccactccggcggattgcttcatttcatcgggccatgtccggtgttcagcgcgaaactcaatggtctgctgttcatgccagacctcattgagttcacctgcaacacgctccccgtcatccccggtattttgtacttcgagttcttcttcgcgttgtgcaaggaaggcaagtcgttccgattcggcttcggtatatgccacaggcgggacagcatgcagacgccagattttagtatccttcccgtagtgagaaatcggttcaaggcggccatcgcaccatga

SEQ ID NO: 202691 - DNA, 429 bp, Klebsiella oxytoca
atggaaaaccgagttacacattttccagaccatcagcgcgacggctttctgcggctgctgcaacagggccgcctgaaccgccagtgtgcgttcagaagaaaggcgggtcagcaacgggacactgacggcgtccagcggttcgactttttcagggacctgatcggtagatgcatccttctcctccattttttcatcggcgcacagcaccacaccgcgctgtactttcacctcctggccagtccaggaaaccaccactccggcagattgcttcatttcatccgtccatgcccggtgttttgcccggtgcgcgatggtctgctgttcttcccagacggcttccagagccccggccacgacgtcatcattcacgccggggttctcgtcttcatacttagcttccagagcttccagctctgcaagacgttctga

SEQ ID NO: 202692 - DNA, 858 bp, Klebsiella oxytoca
gtgaaagtacagcgcggtgtggtgctgtgcgccgatgaaaaaataaaggagaaggatgcatccaccgatcaggctcctgaaaaagtcgatccgctggacgccgtcagtgtcccgttgctgacccgcctttcttctgaacgcacactggcggttcaggcggccctgttgcagcagccgcagaaagccatcgcgctgatggtctggaaactgtgtaattcggttttccataccacgacgtccgtcaaagagccgttctgcattagcgtgagtgtgtcgcattacgcgctgacccgtgaagcacctgacggtgaaaacagcgttgcgtttcaggcaatccaggctgaaaaagaacgccttgaagccctgctgccggaaaactggcgaaaggatatgaccaccttctttacgctcgatggcgcaaccctgatggcgttgatggctttctgcaccgcctgttctattgatggtgtacagggcaaggatgagtttggtcgtaaacaccagagttcgctggatggggtggaaaacgccatccagtttgaccttcgcgactggtggaaaccgacggctgataaccttttctcgcacatgaagcagccacacattgtacaggcactctctcaggccggactgactggcgcagcacaggacgccgcgaaaatgaagaaaaaggatgccgctgaacatgcagagcacttcctgtcaaaaacccggtgggttccggaatggatgaccagtgccgacaaccagaaacagcctgccgcaaagtctgaactcagtctggcaacgagtcagagcgatacagacgctgatgtcgaccacgtcaccgaccataacaacccggcctgcgccgcctga

SEQ ID NO: 202693 - DNA, 567 bp, Klebsiella oxytoca
atgaaaaaaataaccaagcaaacaaagaatacaatatttattgtggcagctcttgttggaatctgttcctacatttttcccagaagccctgatactcaaaagacagatgatatcgttggggtgtggacatctgattattcatatggcacacagagtgttcttgctggtgtcaatgtgagaacttcttatttttctaatgggaaatataatgtaaatggtcgaatgtcttttaagatagataatgcaaatggaaaaacagcccttgttgaatattatgttagtggtgctggagagtgggtactccacgataaagaactgatagccacacttagcagcctgaaatcaattccagaccggattgtctctgatggaaaagacttcgacattcaggatcttgaaatattagaaaatatcatgcgcaaaaaatttccaactatcgaggaaagaatggctccaggaacaagccagtcttacatcatcaaaaatgacagtcataatcaaaagctactggaggtaataaatccgtttgggaacaactttgacataaccataacaagagagaaatag

SEQ ID NO: 202694 - DNA, 1038 bp, Klebsiella oxytoca
atgagaactatttcatttgaatttttagtattagatgtagtattgcctaagagagatgaactccctcgtgcccaatatgggctccaactacttaaagaaattaaaacacgaccaacgattagaaaacctggaaaaatagtaggtatcaccgctcattttgaagatatagaatcatttcgtaaggagtttgatgagcattgtgaagtacttatagaagcatctatacgtaacaaacaatggaaaggtatattaattcaagctataaaatttgaatcgacacgtctaatctctaattataccagtataaagaaaatctcttgcataacggtgcatgggatcagaacaactggttactggcaagaagaattaaaaaaaatcatagagtcaaatgttgatacagttgagttccatgcttataaatatggatattttacagttatctcgttttgtattccttttttgagaacaattaaaatcaaccattttgcaaaacaactaaaagatattaatcatgaaaataaagagttgttttttttctgtcatagttttggtacatacattgttattaacgctataagtaatttattaaagaaaaatgaggagctaaatattggtacaattgttcttgctggtagtgtacttccatctgattatgactttaagactatatttaataaaaccaaggctagagttgttaacgattgcggcgcagaggataagatactttttttatcacaagcgttcgttccgaatacaggtatggctggcagaattggtttctatggcctgaataataatagatttgttaataggtttttcaaaggtggccacagccactactttgaaagaggcggctcttttatggagaattattggttgccattgataggcaatcctgagtatatagagataattgataaaagagataaaacaagttatacaaacatcatttctgaaaaaattgtttcttttttagggaaggtaaaggaagttatttatatctcaatctttgcttttgtcgtgtacaatctattttag

SEQ ID NO: 202695 - DNA, 3312 bp, Klebsiella oxytoca
atgaaaaaactaaagttagttaatagaagaaatagaaccagaaaaactcacgaggttgtagcatcagttcttaaaccaccagcctcattaaaaccaattgatgaagcaaagaaagatgcgttctatttctttattgctagatcaacagataaagaatttgaaaatgcattagacattcttctaaaagatgaaggcgttttgggatgtcttaatcaaagtaaaatgccttataaccaaatagtgaacaaagagataattagtcaagatgatattgagcctataaggctcatgcatttatataagtctattttacttagacagtcgaacgagttgataaaagtgaaccgtttaagagatggtttggatgatttacttataaaagggttgtatagtgaagtaaatgagcgacttgatgaaattaataatattatagggttgtctatttgggaaatgaattatcgaatagcagttttgacggcaagtaataattttaaaaccattgatactctagttgaaagttggaaaacagaaaaaatatcaagcacattatacgaagtggtcagagtgtctggatggaaatcacatagcccagaatcaagtacagctatagaaacgatggttagacgttctaataaggagtacattgaaggcggtgcattagatatagcagccttctattctgctatgtgcttacaatatcccctgtatgatgatgttgatttgagttattgcttttattggcttcaaaaactcccactagttgacttatatgatacattacagaaaatagcgatatatggtatagttaaaaacaagaatgatggtagtatcaataacgaattcattaatttatttgaacaactaaactcgaaattgcaagaaaaaagccttgaaaaaatcttaattgctttacgaggtgagtctttaaaacattatagtgcaaacgtagatagagaagttcttgagtatacagaaggaaactataacttattattggatagattggaatccaagcctaatgaaataaaaaacctaataacaaaagttaatataatagctaaagcatatatctattcatcgcgaaaaccacaaaatttaccatctttacttttcacaattgtaaccaatttaatttcaatttattctttaaaaaactctaatcaggcaatagctcagcttataaatctggttattatctactctagccttgaactatcagatcaaattttattaagcatactgaaatctgcaccattcttcttggatgagcataaaaaaactaagctaatagaaaagacaaaatttattaacaccccacttacaccattagcatgcaacctggagtcgccaccttcgctatattctgattatttaaatgcgattgggacccctaatattaatagacttcttaaacttaaaactatagaagcaattaaaaataagagagataatgcttttgatttaatttgtgagtatgaaatcaaagctttaattcctaaagattcaattgagttaaaggtcgagttttatcttaagaataattgtctatcagaacttatagagttttctgcaaatgagttgattaaaaaccctaatgctaatatttgcttaccacttgaagatattgtcggctttataaatgaaaaaaaaatctactcattagatgcagttatttgtgcttattactacaatttgtactcaaatgaggatcaaagtgaatttttgaatgagttttttgaagagtatatacttacattaggaatagatagaccaagtgagttacttgataataatttaaatgataaggaagtaatatttttacatcatatagcaaaaattgatgtaatggattatttaggatgttttgatgatgcaaatgatttgaagatagaacgaattaaaatattgaataaattagtttcacttgggtatttaaaacagtcagatatagatatagaatgtaagtatatagtcgatggcatgcttattgatagtgaggctgcaaggtttaataactcaaaaatatttgtagatactaaacacatatttgaaaaaaggaaacaagaagttgaggggttaatatctaaatataacggagatgatcagattgaaattcaagataccaatgttcaataccaaattgaagatgttacgatattaaaagggaataaagaaataattatattgagactaattaacactttattgattgagtatttcaacaataaagaagtcggtcttgatattaatttaggcacagaaattagacatggtttttttggtaacctgatctgttcttctccacaaaatcgacgtttgataactgaactcgatgaggttgggaattataaatcaaacgagtactggttaagttattataaaataattagcgaacatattttaaatgatgtcgatagcttactagttaaatttagtgctgatttcaatagattaattgatgtggccgagcaatggatgaaaacttcattaaatggagatgaaaaggaacgtatttttacttttgatatatcactggaagatttttccagtataaaagaactgatggatgagggatgcacgtcagaggaagtttcaactttgatttttaaaatatttaatgttaagttgagtgagtgtttgtatttaatgaaaaggcagttgaatatgacatttgcctcactcattgatgatctttattcagagttgatagattcaataacagtagctaagagaggtacatcaatgagtacactcctagatgagataaggctatcaaatacagaagttaaggagaatattcggactgtgtgcgaatggttttcgttaaagaaaacaacacttctagaaacaattgagttagaaaagctaatacacttagctattaaatgtttccaacagattaataattgtgagattaatctttcgataaacaaaaatagtaaaaattatataccaggatcacatatatatgcgctcgtgctttgcttaatcaactgtctaaacaatagctataaatactccgataaagatttaaatgttgcaattgatatttatgggaaagataacgggatgtttaaaatctcaatttcaaataaattaactgatcaagcaagagaatctttaagtacagataggtttaaacaaatactttctaaacttgttaatatgaatgatagtgaattattagtaaataatggtggttctggattatataagtcacttcatgcgcttcgaaacgtgtctactgaatatgacttgattccaaatttcaatgaaaagaccttcacagtggaaatcaggcatggctattag

SEQ ID NO: 202696 - DNA, 1110 bp, Klebsiella oxytoca
atgaccaaagtttcatttgaaaataacacattacttattggcagataccatataattcgctatttagccgcaggcggtatgcaagaagtatatttatgtcatgatactgttctaaatagagaagtagttttaaaaacaccaaaagcagggactaaggatagaagatttaaacgaggcgctgaaatgggtgccagaataaatcattccaatgttgcatctactttagattactatgaagatgagaatttaacatttttgatagaggaattcatttctgggcaagatctttccaaaagaatgtctgctgaatttcattatttagacccacatacatgtgcccatgtaataaaaaatcttgcaaaagcactacatgaagctcataaagtaggaatctgtcatagagatttaaaacccagcaatataatggtatcaaatgattttaatttatctatggtcaagttaacagattttggtattgctaaactagctgaaagcgaaatcgaatctgaaatagaactttttgagaaagatgaaagtaccttaacaacatctcaaacactattaggggcagtaccttacatggcccctgaatgttgggatgactggaaaggtgcaggtcaggaaatggatatttggtcattagggtgtattgcttaccatttattatcaggtcaacttccttttggctctggtcgaagagcaattagagaagtcgctagattccaggataataatacaaaacttgtaaaaccgcaaaatattgggctccacgcatcttctgcaattttagaaaaagaattatgggctttgattacaaattgtattgtcgctgaccctcaaaaacggcctaccgctgcgaatattctagatgcattcgactctatttgttattcgaatgagccacgtcgtttcggtacaatttatgattttggtgtgccttatcgagaaacaggccatataattgacaacggtagacaagcggggatgttattcttccactcttcagaattttacggtaactcgttacctcagcaggggaaaaatgttacctattcagtatatcccggattaccacacgatagatgctctacaattctattattgaaataa

SEQ ID NO: 202697 - DNA, 495 bp, Klebsiella oxytoca
atgcatttgacaatcaaaataaatgatatatatctatgttgtatattttataaaagggaatttatgagaatatcaagaaaacattctaaatcatatattttttcaaaagatagtgatactacaacacctttaaatatttcattcaacaatcgtacatattgcgtgagtgtccgtttcaatgaaaaagaactgaaaataattaattctaaaagaggagagataagtaaaggtaagtggctccgtttacttgcacttgaaaaaaatacacaagccatacccaccataaatttgaatgcttggaattcactgacaatcatagtacaaaatttaaatagaattgctgcacatatcgacaccaaaagcaaagacagcaaacttacttacacagagcttttcgctgtaaagcgacaactgaaagagcttcgccagcacctgctaaatgctgacatatggagcaaacccgatgaagggtatgcagaagatcaaaaggggtaa

SEQ ID NO: 202698 - DNA, 273 bp, Klebsiella oxytoca; identical to SEQ ID NO: 90094

SEQ ID NO: 202699 - DNA, 309 bp, Klebsiella oxytoca
atgaccacacgtcgcatgcctaccctgacagccgagcaacttcgaaacatagcgagtgaagcggtggcagacgtagcacgccagaaaatcaccacatcaaaaagcgctgtgggattttcgcacaatcttcagagaatgagtcccgtcgaatcgaagggcaaaggggctgcaatcagtacggtggctcgtaagacactcaataacccaagcgcttcaggcattcagaagtcgctagctggttccgtgctatctcaggcagaagccaaagggtatttcaaagaagcttttaataaagtgcgtaaaggctaa

SEQ ID NO: 202700 - DNA, 624 bp, Klebsiella oxytoca
atgtctcaaccaaagaaatgggtgtttactgagctcgtacaggactcagacgagccggaacagttgatcgcatatgcgatgtataaagcagacaaagatgatctggcaatacaatgccgtgcgagattgcttcctgaggcagacatagtagttgaactcaccagtttccatgacagcatagcttattcagaaagaaggcttcaggactatcgtgacaaggcaaaacgggctgtagatcagttggtaagcagtgtaagtgagagggtcgcagccgcatatgatcagacaatcgctacgatgacggatgagcatcagattgacctgcaggaaaaatggaaaaagtggggcgaagatgcggcgttgtacagtgctcatcttacaaagccagcatggtatacccggtttgggaaaggcattttgtcgtggctcggtggcggggtatctggcctacttgcgaccgtgatttccacgctcctgattgtcggtgcagtgtcccttttcactccttcagttagggatacagctcgagattcattgaaaggtgtagttgatacgttgatcccagaaacacccattccaggcgtgactgacacagtcaaaacaaacaagcaaaaacagccctga

SEQ ID NO: 202701 - DNA, 213 bp, Klebsiella oxytoca; identical to SEQ ID NO: 97736

SEQ ID NO: 202702 - DNA, 2487 bp, Klebsiella oxytoca
atgcgtcttttggaattggctgaacagaatagaaaagaagcgaacaagctactcaaccccaagaccaaatcagcactcggtcagtttatgactccagccccgatttgtctgttcatggcaagtctgttcgacaacatcgaaagagacgttaagttacttgaccctggatgtggagtgggatcactttccgctgcattcgtagatcgagccttatccttgggggttgaaaggctagagcttgaggtctatgacatcgaagaggtgatgttgccattcctggataacacactaaaatcatgtgcaaatgagtttggaaaaaaattctcacataaaatcaacaagaaagacttcataatcgagacaagtctgcgcatagaaaaccttttcaacccggaagagattgaaacgtacagccatgtcatcatgaatcccccatacaaaaaaattctatcctccagccctcaccgaatctcgatgagcaatgcaggcatagaaacagtcaatttatattcggggtttgttgctttagcgttaaaacagttaaaacccggtggggaattagtggcaatcattcctcgatctttctgtaatggcccgtactatcaacctttccgggaacagttgctttctgaaacatccatcaagcatattcacatttttgacacacggaatactgcatttgcagaagatgaagttcttcaagaaaatatcatcattcattgcgtcaaaggtgtatcccagggtgaggttacgatcacttcaagcccaacgtctgattttcatcttgatgaagaaactgggcaaataacagctactgacatgacacaacgtaaggtttcaatcgataaaattgtaaaccctacggataaacagaagttcatacatatcgcagcaagcccgcgtgagcaggacataattgaaagattgtcaccattcacatcaacattagacgatctaaaaattcaggtcagtacaggacctgtcgttaactttcgacttcgagacgatctgcgcgaaactttagatgcagaatccgtcccgcttcttttcccccagcatttaaacgggaaagttcattggcccctcgacggaaaaaaaccaaatgctataagggtgtcagattcatcacgcccatggctctggaaaaatgagggctattttctgatcattaaaagatttagcagtaaagaagaaaaacgtcgaattgtagcaactttgtatgactcatcccttccaggtgagttgataggttttgaaaataaaaccaatgtctttcatattaaaaaagttggtatggacgcagatcttgcccgtgggctttatgtttatttgaactgtactttgttggacaaatactatcgccagtttggtgggcacactcaaataaatgcctcagacttaagatcgatccactatccgccactggaagttttgcggaaaatgggcagtgcattagacagtgaagtacttagtcagaaccaaatagatgaaataattaatagggaattagatctgatgacagaaggaaaatcgactgatccactgaaagctcaagaaaaaatcgaacaatctcttgagatattgcgtttgcttgggatgccgcgcgctcagataaatgaacgttcagcgctgaccttactcgctctccttgaccttcatcctgatggagactggtcaaaaatactacgacctatgataggtgttactccgatcatggattggtgtagagatgtatatggtaaagaatatgcgccgaacacgcgtgagactttccgccgacaaacactgcatcaattttgtgatggtggaattgccctatacaaccctgatgaacccaaccgcgcagtaaactcacccaaagcctgctatcaaatagcacctgaattgcataccgtgctgctaacgtatggtactcctaaatgggatgaatcactcaaagagcacatgggaagcatatccaccttggttgaacagtatgcaatggcaagaaaaatggaaatgatccctttgaagctgaacgatggaacggatctcatcttaagcccaggtgcccacagtcagttaatcaaggatatcattgttgagtttggccctcgcttcgccccagaagccgaagtgatatacatcggtgacactggagcgaaggaggatcattttcgcaaggagcgacttgcagagctgggggtaacagttaaccgcaaaggaaaactgcctgatgttgttctctattgggaagaacgtaattggttactgttaatcgaatcagtcacctctcatggcccggttgacggaaaacgccacggtgaattagcgaaattatttgcgaatgcaaaaccagggttggtttatgttacggcgtttccagaccgtaaagtaatggctaaatatcttatggatctatcatgggaaacagaggtttgggttgctgatgcaccaactcatatgatccatctgaatggtgatcgattcctcggtccacatacgtaa

SEQ ID NO: 202703 - DNA, 225 bp, Klebsiella oxytoca
atgaaaaaatgtacaatttcagttttaaccttgttggccctgctgacatgtcagccactgacagcacacgcaggtcggatcacgatgcaactcactgaacaagaggagacagcaaacggcaaaaccttatgccgctatgaaaattccatttactcattcagctatgtgacgcggagcaagcattgccccagcgtgaaaaccttcaacacggatgattcagactaa

SEQ ID NO: 202704 - DNA, 474 bp, Klebsiella oxytoca
atggtggaggttatacagcggtatggcctgagcgccagccgtggcgcgggttcgttaaatttgtctgccgatatcatggctcgcctgttcatcgcggtgctaaaccaaatccgctcacgacgccccatttctctgcaaaaaataattcttcgccaaaaaccagaaaagatgagaatcgcctcgcttttcagcccgattttcaggctcacgggacgctctctggagggcgctgtgattgtggtcactgttagtacctgttatgggaaagcgtcgtggtgtgcttctggtgaagcgtgggagggattgccggatggtgcaaaggctgaggccggaaatgttgtcggatgtggcaaagatcaaaggcgggaaccgggacacatcgccagcgcctggcgtcatgtggtggggaaaccttgcttatcaggtagagggaaagctactcccagagttaggtcacactattatcaactgtga

SEQ ID NO: 202705 - DNA, 222 bp, Klebsiella oxytoca
atgaaactttcgcttgatgacgaaacctacgcgattctacgcgaggagtcggatcgcctggggatgccggttcccagaatgatccgcatcatgtgccaggacatggcgcagaatattaaaaaaagagacgccgcgaacggtgaacgcctgataacgggccagccactacccgaatcactaacgaacccacagggaatgaacaatgagagtaaaaaaaactaa

SEQ ID NO: 202706 - DNA, 942 bp, Klebsiella oxytoca
atgagagtaaaaaaaactaaactgccgcagacaccaccgccagacgaaccatacaccaacattgaaatgcgtctggtttgcgctgacagcatccgcatccgcaatacaggagaggtcataacatggaaaccggacatgttccgcgtttatctgtacatgttcaatcagataaagggattcgaggccagcggcggtaagttttttcaaaaacgggaaaaaatctggaaatgctgcggtgtgtcccgtgaccgactggataagatcctaaagtcccttttgaagctggggttaataaaggatacaggagagagacggacagccccaggcgctccacgtgggatggtggtttataccgctttccgccttatggaggtgattggaaacctggagatcatcttcgcagaagatgacggcgagcctgtttgggatcacgaacgtgccagcgggaacgcggccaaaaaatccgaggagaagcagggaaatggtaatggtcatgaagaagctacagaagctacagaaccgcagacagaatccgccaaccagcccgcagacacatcctctggtcagagtgctgacgtggcccctaagtcttccccgtttgttgctggacagcgctatagcgtggaatctgacgatgatcgcaccgatggtaataattcggggaatctggaagtccaaatctttgatgagcacggcgtcattactgaggcgtttattaacagcctgactggtgatgtggctcctaaccgcaacgctgacggcacattgcagagtttccgttacgtctattgggtggctcgttacacacaggatgcgcttgacggaatttcgactcgtaccaaagatgaatacatggcagaggcccggccctggcacattccaccgcacctgttatcgacaccgacaacagagccggaatacgacgaagatcctaagttttaa

SEQ ID NO: 202707 - DNA, 636 bp, Klebsiella oxytoca
atgattgagaaatgcaaggcgctgaccgccaaccagaacacagacttacccgaaccagcctcaccagatgacgttaacgaagttaactcgcgcaaagcgggctgcactgaaccagaacaaaaaacagaccaatcagcaaagatcgatctacccgacccagatttaacccgcttgtttaaaaaccgcgctcgcgacggcgacataatcaaaaaatgcaaaatcatgctggtcgccggagtacctccgggcaaagtcgcgctgctgctgcgtcttccgctggaacgtgttatcgaattgtacaatagctcttataacccaagatgcaggcgctttgcgaacccgaacaacgggagattgataataacgatgtggcacgagggcgcgatgctcgcagatatctgtcaggcgcttggcttgcccttatttaccgtggtgatgtccctccggggggatggggttaccaatgctgcaatggctccacggatgccagagtacgatgatccgctgtatgttgaatatcggcaggttgtggcccgaaaagctgcgagcaaatcgcggcctattcaaataaaccctgttcgccgcgttagaaaaagccaacaaaccacaacagcgagccagaccgcgacggcctga

SEQ ID NO: 202708 - DNA, 399 bp, Klebsiella oxytoca
atgaaaaacttgctcaaaaccgttcgcgattccatagccgcagccatgaacgggcgcaccattgaacagatggaaaccgaacagctcaaacagaatgtaaaaaacgccgtggatgactatttaatccgccatcccgattggcaaccatcaacgaagtcagcgccagcagtcgcgccagttgccaacaccaaacaaaaggccaaacgtatcatgaagacgctgggcgctggggcaggtgtctttactccccatgttgtggacgaagcggcgttagctcgtgctcgctccaaatgccgggagatcgtcgccgccgatccggctgcgtactcctacgtgatcccgtcagtgccactgcctgaccaggataaaccgggcggggcgggtataatacagggctaa

SEQ ID NO: 202709 - DNA, 210 bp, Klebsiella oxytoca
atgcaattgaaaatccttggcgtgggaaactcgccgctgctgtcggtcaaggttaagacgctggacgatgccgggttgctgaacgtgtcagcgctggcgcgcgcgctctcggtgcataggtcaacattcttaagcaaggttgccagcgtaggcctggaggctgcgatcctgcactacgtgactgaacagaaattgaaaaatgtaagctaa

SEQ ID NO: 202710 - DNA, 207 bp, Klebsiella oxytoca
atggaactgccaaacgctcagtcagtaaataatttcgatttccttgcacgaagttttgcgcacatggaggctatgggtttgcctgttaatctaaatgagattacagggaacatgcctgacgaattgaggaagtggttttgtcgtcggtatgtacaatactgcaagcacgaagtaaaaaacgagaatgaagaaactacgggcgactga

SEQ ID NO: 202711 - DNA, 705 bp, Klebsiella oxytoca
gtggcattaggtttgctgctcaacggtcttgttgaggacattttcataaatgatatcgaccctgcactttatgctttttggtctgctgttgtaaatcataacgaatcattgtgtgaaatgatttacgaaatccccgtaactattgagaactggcatcaacaaagagacatactgcttaataacgataaatatagtatgctcgaagtcgctttatctactttctttttgaacaggacaaatcgctcaggcattcttaaagctggtgtcattggaggtaaggaacaaaaaggaaagtggaaattagatgcaaggtttaataaacaggatttaatcaaaagaataaagctaataggcacctataaagataaaattcacgtatcgaatcttgatgcagtagattttctgatggctcaaaaaagctcattacctaagaaaagcctaatctatcttgatcctccctactatgttaagggtgccgaactatatcgcaacttttatcagcatgatgatcatgttaaaattgctaaaaccttgcgaaatatcacacttccctggattgtttcttacgataacgttaatgaaataagagaaatctatcggggtcttaacatggctgattattcattaagttatacggctcaggataaaaagaaagggcttgaagttattatttataatgacggggtaaatatccctgagatttga

SEQ ID NO: 202712 - DNA, 927 bp, Klebsiella oxytoca; identical to SEQ ID NO: 162291

SEQ ID NO: 202713 - DNA, 903 bp, Klebsiella oxytoca
ttgagcgattccactataatccttgctaaagaatcaatttcagatggaagtgaagtaaacaagataaatgaaataagaccccttggcaatgaggaaattgaaatctatgatacacaaaaaaatatacttatggagtttgtgaatgactttgccttagtagaatatgtaagattgaactatgagtcactaatggaacttctgaatgaaactgttataaaggtagccaaagaaccttcttttattggttcatatcccttcaaaaccttcccattccttttgaatacaagaatactgaactatatgatgtcagtgaaaactttgctggaccatatggaaaccagtattaacaggcggtatggggagaattcaacggaatttgtcgagtttaaagcgctgacggcaaatgaatttgatagcaagttttcatatagattcatgtataagctcagaaattttgttcagcattgtggaatgccaccactttcgtacacgatatcaaaatcgcttgatgaaaccagtagtactctaagtgtagagttaatcgtatatttcatgagagatgaattaattcgggggttttctaagtgggggactccggtaaaggctgacctaacacagatggatgaatctttcccaataatgccgatttttaatgagcacatcaattctatttccaaagtgtatattcttttcaatgagaaatatcacataacaaaagctttaaaagctaaagagtacataataaacttcattggagagagagaggattatattgatgatgaatacattatcgcagagctaaaaaaaacacaaacaggtttgagtataaacaaaaaaaccattcctacatcagcgcttgagaaaatatccgatttttatagaataaaagaagaactattttag

SEQ ID NO: 202714 - DNA, 564 bp, Klebsiella oxytoca
ttgcagccagaacactcaagactgtatcttcgccctgtaaagacatcagatgtggatgatctcttcagaatttatggtgatcctgcaacaaatatgttcaatccatcaggaccgtatccaaatattggccatgcacgtaatgttttggcccgttggcttagccactgggaaaatcataggttcggcaactgggccatcgcactgaaggagaatccagaaaggatcatcggttttggaggaattagcattatcagttatgacgatacacctataatgaacttgggatatcgtttctctacagagtcatggggaaaaggtctggcgacagagtttgctaagcatgcagtcagctatgggtttggtattttaaatctggcagaaatatcagcggtagtaagaccaaaccatctcgcatcccaaaaggtcctgaccaaagcgggtctccgttatgcacgggatattaatgatgtgaaaaatgagcccgcaagcatgctttttaccctgactctggatgagtggaacaatactccaaataaggggactaccccgcccattaactattag

SEQ ID NO: 202715 - DNA, 267 bp, Klebsiella oxytoca
atgaagctgagtgattacctctatcgcaaggtggagcggttcgccatcgagaacggtgtgcaggtggttgatgccgggaagtgctcaccggagcagattaacgcgatgattgaggtggtaagcgagcggcacggggaaagcgcggtgaacgagaagctgaaagcggagctgatgcgggaatataacagccgctattttaacgtgccggtgcctgaactgccggaggacaaacccgcccgccggtggtggccgtccggcaaaaaataa

SEQ ID NO: 202716 - DNA, 180 bp, Klebsiella oxytoca
atgacgaagcaggaaaaaactgccctcaatatggctaaattcattaaggaccagtcgctgctgttgctcgagaaactgaacgagctggatatggataccccggccgacatgtgcgagcggcttcacgaggatgcggaaacactctggcaggtgatgcgggataagctcgggaaggaataa

SEQ ID NO: 202717 - DNA, 378 bp, Klebsiella oxytoca; identical to SEQ ID NO: 33308

SEQ ID NO: 202718 - DNA, 300 bp, Klebsiella oxytoca
atgccgtatgaggtggaatggaagcagggagccatcgaggatgtgacagcattgtttgactacattgcggaaaattcatccctgtgggatgcgcagaacgttaccgatcgcgttctcgctgcggcggacaaactggccgacttcccgcgcctctatgaagtggactcacgctatggcgaggacgttcgccggatcagcctgatgggacagcatatcctctatgatgttgatgaccaggcccggaaagtccgggttctggctgtggtcggccagcgccagaatccccataccgttagctaa

SEQ ID NO: 202719 - DNA, 264 bp, Klebsiella oxytoca
atgagcaacactacacactacgaaaacgccaacttcctgcgggaactggctgaaaacctgccccgcatactgccggaaggtggcccggacaaagctgcgctgttgcaacgcctggctaacgaagaactggcccaggcagagtatgaagatcaggttcgcgctaaagtgaccgccgcccgcgctgacacgcgctctggcatgaccacggaacaacttcgccagagactgcatggacgctatcaggaactacgcgatgccgtatga

SEQ ID NO: 202720 - DNA, 264 bp, Klebsiella oxytoca; identical to SEQ ID NO: 33307

SEQ ID NO: 202721 - DNA, 567 bp, Klebsiella oxytoca; identical to SEQ ID NO: 33306

SEQ ID NO: 202722 - DNA, 246 bp, Klebsiella oxytoca; identical to SEQ ID NO: 33305

SEQ ID NO: 202723 - DNA, 1686 bp, Klebsiella oxytoca
atgagtggtggagacggtcgaggtccgggtaattcaggtctgggacataatggtggtcaggccagtgggaatgtgaacggtacgtctggtaaaggtggcccttcatcaggtggtggtacggatccaaacagcgggccgggctggggtacgacgcatacgccgaatggagatattcataactataatccgggggagtttggtaacggcgggagtaaacccggtggtaatggtggtaacagcggcaatcatagcggtagctctggtggtggacagtcttcggccaccgcgatggccttcggtctgcctgccctggctacaccgggggctgaaggactggctttatccttttccggcgatgcgctgtcgtcagccgttgccgatgtgctggctgccctgaaaggtccgtttaagtttggtctgtgggggattgcgatctatggtgtactgccttctgagattgcaaaagatgatccgaaaatgatgtcaaaaattatgacgtcattaccggccgatacggtgacggagactccggcaagtactttaccgctggaccaagcgacggttcgtgtcagacaacgggttgtggatgtggtgaaggatgagcggcagcatattgcggttgtcgcgggtcggccaatgagtgttcctgtggtggatgcgaaaccgacaaaacgtccgggggtattcagtgtgtctattccgggtctcccggctctgcaggtgagcgtaccgaaaggtgttccggcagcgaaagccccgccaaaaggcattgttgctgaaaaaggtgattcacgtccggctggttttacggccggtggtaactcccgtgaggccgttattcgtttcccgaaagagaccggacagaagccggtctatgtgtcggtgacagatgttcttaccccggcacaggtaaaacagcgtcaggaggaagaaaagcgtcgccagcaggcatgggacgccgctcatccggaagaggggctgaaaagagaatatgataaagcgaaagctgagctggatgccgaagataaaaatattacgactttaaacggcaggattacatcgacagaaaaagcgattcctggcgccagggctgctgtccaggaagctgataaaaaggtgaaagaggcggaggcgaataaggatgattttgtgacttataaccctcctcatgaatatggctccgggtggcaggatcaggttcgctatcttgataaggatattcagaatcagaatgcgaaattaaaagctgctcaggcatctttaaacgcaatgaatgatgccttatccagagataaggctgcgctttccggggcgatggagagccggaaacaaaaggagaaaaaagcgaaggaggcagaaaataaattaaatgaggaaaagaaaaagcctcgcaagggaactaaagattatggccatgattattttcctgatcccaagactgaagatattaaggggttgggagagttgaaagagggaaaacctaaaacccctaaacaaggaggaggtggtaagcgggcccgatggtatggtgataaaaagcgtaaaatttatgaatgggattcccagcacggtgagcttgaaggataccgcgccagtgatggcgaacacctcggcgcattcgatccaaaaacgggtaagcaggttaaagggccggatccaaaacgaaacattaaaaaatatctttaa

SEQ ID NO: 202724 - DNA, 258 bp, Klebsiella oxytoca
atggggcttaaattacatattcattggtttgataagaaaaccgaagagtttaaaggcggtgaatactcaaaagacttcggtgatgatggttctgtcattgaaagtctggggatgcctttaaaggataatattaataatggttggtttgatgttgaaaaaccatgggtttcgatattacagccacactttaaaaatgtaatcgatattagtaaatttgattactttgtatcctttgtttaccgggatggtaactggtaa

SEQ ID NO: 202725 - DNA, 582 bp, Klebsiella oxytoca; identical to SEQ ID NO: 33309

SEQ ID NO: 202726 - DNA, 1962 bp, Klebsiella oxytoca
atgtttaatacggattcgcttgcctggcagtggcatatcccggagctggcccggcagatttacccgtgggtcagctggctttacagggagtattacggtctggccggggctttcctggttatcggcctgtttttcggtctggctgaactctgggccggacggatgcgttttgtggggctgagtcataaggagcgacgggagtatgccgatcgctataagcgcgataataaccggactgcgccattttcggtgctggcctcgctggattcgcccgggcggatggtcagggcacggcggcatgtctggaactacgcgtactggctgaccggcagcgccggtctggcccttctgggggggctggttgtcgccgtgtttatcgagagctggggagaaaccgtcctgcgtccggacctctacgcgaacgcagattattacctgctgcagccggctaacctgttcgggattgcctggtgcgcgggcgggctggttgtcgggattgtgttggcgcggctgctggcgttcctgctgcttgacggtcattttgcggctgctgacgaggcggtgaacgcgaaactgaaccaggagagccggcgcagcagccagcggaccggtgaaatgaccgacgtccgccacctgcatttcggggagccggtaccggtcaacgcgctggccgatttttccacggagcaggcccggaaacagcaggcggtgtttctgggtaaggatgagcagggccagccggtgctggtcccgcgtgatacctggcgcaagaccaacattcagatcctcggcctgcccgggagcggcaagagcgtgatggccaccaacgcgctcattcgctgcgtacgcgatttcggggacgcggtggtgtacttcgaccccaaaggggacgcgtgggcgccgcacgtcttccgggcgcactgcccaaacttcaccctgctggatctgcggccggggaaaccggcgcagctgaatctgttccgcgatctcgaccagtacgccctgaagaatctgctggttgccgggtttaacctgagtgagaccggcgacgtggcggaccactaccgcatcagcgagcagaaagcggcgaagctgattgcggagcagtttccgcagggggcaaacattcagcaggtgctggcggcggcgtacgcgctgccggaggccctgaaaaaggacgtgaaggggctgatcaccaagctggagaacgtggccgacctgagcgtcctgcagacggacagcggcatcgacgtggcggggataatcaacggcggcggctgcctgtacgtcatcggctcgatggacgatgaggcggtgatccgggtgcagaagatgctgtttgcccgctgcgcacaaatcatcattgcgcgggatgagttccggaggtggccgcacgcgagcatcatgctcgatgagattaaatacctgctgtcgaagtacgtgctgaacgcgctggggacgctgcgcagccgggactgcaacctgctgctcgcgcaccagtcgctgggcgacttcgggcagtgcggccaggatctgcccgctgattttgtgaaaaccacggtgctggataacacgccgatccgctggttctaccgggcggccagccaggagtccgcgcagtgggcggcgggccagaccggggaaatccgggtggacgtggagcgccgccgggccagccgggaggcggggaacgtggagcatatcagcggggacagcttcatccagaaggaggcgcggccgctgtttgacgtgaacaccctgcaacatctgcctgacgggttcgcggtgatgaccgggctgggcgtggcgcggctggcgttcagcagcccgctgcgggttgatcgccgggaaattccgctgaaaaccttcccggtgctggcgaaaacggacccgctggcggagtaccagccggaggccaggcggcagcggccgggtgatgatgattttgcggggctgtactga

SEQ ID NO: 202727 - DNA, 732 bp, Klebsiella oxytoca
atggcactggagcgatacaacgtcagccacgcgaagcggcaggcgcggaacgcggagaaaacacggctgaccctgcgctggctgcgggaagagctgtgttccacggcggagctggttgcgcgacggctggggattgcggcggtacagccggtttaccgcttcctggacagcctggtggcgaaagggctgctggtccgggcgaaatacccggttgacggccgtcaggtcagcgtgtgggggctgacgccgcacggggtggcgttctcgttcgacgaggacgagccgctgacggacattattccgtttcagccgtcgcgggtgtcggcggcgcagctgccgcaccggctggccgtgcagtccctgcgcctcgccatggaggcccggggggccaccggctggcggtacctgcaccgtattgccctgaaagggatgaaggtgccggacgcgctggcggagctggacggcagaacggtggcttttgaggtggagcgcaccgtgaagagccgcaggcgctatcaggaggtggtgtccgggtatctgtttaaccgccgggcgaacggcatcgatgaaatctggtacatctgcccggaccgggcgacgcaggtcagggtgcagcgggcgatcctgtcggtggatgaaatcgtgaatccacagaccggcgaggcccgcaaaacggcggagctggatcgtgaacggctgtttgcgtgctttaaatttatgacaacggagtga

SEQ ID NO: 202728 - DNA, 630 bp, Klebsiella oxytoca
atgcagtctggtatcctccgcagtttccagcagggacgatggttcacacgccttgtttttatcgctgtggcgatattgctggctggttgcgatcgactcgcgaaagaggagagcatcagtggcggtagcggcaccatagaagcggttaaccatacccactgggcgataaatcatttcagcgtagacgggcagtcagggctggatattatcggcccctggcaggggggcggtggtggctgctgttacggcgtgccaacgaaatggaaaccgggaatgacggtgaaagttgagtgggaaacgggtgtggcttttgcagatgatgtacctgaaattcctgagccgaaacgacctgatacctccgggatgaacgagaaaaattattatcaagtatggcaagtgtattttgatgaaaaacaagaatggtataggaaaattaaagcactgaataaagcgcatacaaaaatagtccctgttcccgattataccgggcaaaaaacctgcggaataaaggttcactttttaccctgcgatcaaataaaagtcaccaccagctgctacgactacggcaatccaaattatccgattaaagatccgatcaaaatggaggaacccaaagtatgtccacaatga

SEQ ID NO: 202729 - DNA, 873 bp, Klebsiella oxytoca
atgtcaggaggcagtgagcgatcctgtttagaattagcaaaagaattaataaatttgggcgaggatgttaaagtcgtaacgctaaatccatttaagaatggatttagcaattttcaatatgataatgtaaatatattaaaactaccccttttaaatatatactggccaactgaaaagaggaaaaaaagtttcctcaaaaaaatagtatggaatgtaattgatatagcaaacttgccaatgtgcgtaatgatttctttgtttttgaaaaaacagggagtaaacattgtacacactaataatatcaagggcgcctctcctctaattttcataattcttaagctttttggttttaaaatagtgcatacaacaagagattattatttattggatgatggttcttggtatagaaatatcaatgcagaacataaaacatataaactaaacgccaaaaggtatatcaaaagaatcttttcgaaaccagtggattatgttgtttataacagtgagtatatgttgaaatatcatcaggcttgcggtttttttgaggggacaaaatgtcaagttgtatataatggctttgaccctctaatatatacgaataaggatattagctcaaagccgaataaaatcaatgtgtttggatttattggtcgcgtatcggaagaaaaagggctagatctattaattgatggttttttaaagtttaatgagggggagtatcagttaataatcgctggtgcaaccgcagatgactttttggaaatatatcctcagtatgagagttccatcaaagataggaaggatataagatttgttggcttttgtgaaaatatcgatttttatagccacaaaatcaacttcaccaaaagatga

SEQ ID NO: 202730 - DNA, 840 bp, Klebsiella oxytoca
atgaatgaatatttaaatcaagtagatgaaatagctatagctttgtacgaatccgaactattaccagattttaagcctgatccgcctaaagaaagcaagcaagagcttgatgctatggggtgtatatttgattctaacgtgtgggataagcaaatatctgtaaaagaagtaatgtataaaatgatgagcgatgaacgaatggaaacggtatggcccgcgttaaaaaaacgagccgaggagtgctctgttccgtctcttttttatattgcactttccactgaaatatctaccatttatcctggtccagatgattggagtttgttgactcctaatgaaaagaaacggaagttagataaaattagtaagcttgcattggctttatgtcaggaaattgcaaatacaccactagatagaaatgtcatggattatgctagccataaattttattttgataattttaggcggcactgtactgatgaaaaaatgaaagagaaagttgacttcaatttgagtaagttttgcaagttggaaagtgggcattatgtttcagcacaagataacttggaaaacgttgtcggtaatgcatggggggatttaggggtcacagcgccttctgtaagttcattgttgcaaagtgtatattctaaagctgaaaataccacctatgactctgtaataaaaagaaagagccaggttaaaagggcattctttattagaagattatcatcattttttcaggagtcttttggtatgcctctttataatattactgctgcgattagttctgttttccttgatgaggaaatttctattgatgaagtacgctcaaccattcgataa

SEQ ID NO: 202731 - DNA, 189 bp, Klebsiella oxytoca
atgcgtaaggtcaaatggtcggaaattgacattgaagatgaactgcgccgcctggaggcgctgctctcaacgactctttatatgaatcttgatgacgacaatgaacacagtattgcaatggaattaatcggtatgtcgctgtgtcgaattcgcgaactgaaagagattagcgaggtgagccatgcatga

SEQ ID NO: 202732 - DNA, 327 bp, Klebsiella oxytoca
atgcatgatatctatcatctgcttgctaaaagctaccctgaatttaggcacctctcagatgcagagctggctgagtctgctgatacatatgcaggtgcgggttttgccatcaatagtgcgctcacactgatcggtaatctggctcttgacgcaacggaatcggaagggtatggcggcgacgatgccctcagagatatgaaccttattagcaatgcattaagacacctcccaaggatgatgatggcgctcaaccattgcagccagtctgctgaatatgtccgcatggatcgcaaaaaaaaagcggaggttaaaaatgatagatcctga

SEQ ID NO: 202733 - DNA, 186 bp, Klebsiella oxytoca
atgacgatgttgatcgtgagctgcgcgaaagatttacccgccccggtggtggttgataccgcctgcagctgggtgagggtcatctacctgaccgaccacgacattgacgtgctggataagcagaccaaacgggacattctggtacataaccgaatgtggcagtcgaattgtcagcagaaacaatga

SEQ ID NO: 202734 - DNA, 471 bp, Klebsiella oxytoca
atggatgaagaactgcgtaaaagtgatttaaatcgaagttgcaacgtcagcatagttggccttgttgcggatgaatcaagatttggaccgttactggagggtaaagggagtaactgttttaacgatgattttgtaggaagaaaatcgtttgcattatctgcccgcccatctgctgcttggattagagagtttaataaaacattccctcaaaaggcctttttattgcaacctaataaaaaaaggatatatgtattggttgataataaacaagtgtggtatgtcaatgcgagattaacagaagagattgatagtattaataataatttgcgctgtgattctatgaatagtaatctccaagaggaagtgcttaattctgatgaatcaaatattgaacatatgcgtatttacctggaaaggcaggggctaaaaaaattaccattattgaataatggtggtgagattacaaattaa

SEQ ID NO: 202735 - DNA, 900 bp, Klebsiella oxytoca
atggccagatccagaaatatcaaaccaggctttttcactaatgatgagcttgcagaatgccatccgctggggcgacttctgtttgctggtctttggaccatagctgataaagaggggcgccttgatgatcgcccgaaaaagattaaagcgatgcttctcccttttgatgaggctgattgtgacgctcttcttcagcaactcaatgaccataaattcattatccgctaccgggttaatggtgagtgctacatacagatatcgaactggaagaagcaccaaaatcctcactgcaaagaagctgcaagtgagataccagcacctcttgagaacgataaaagcaccggacaagaacagtgcaaggaagatgcagaggaagaaaagaaggattcagaatcaatccaagacgttgaaaataaaggagcaccagaactgcacggtacaagcatggtgcaggaatcagtagagaacagtttaaatcctgctgattcccttaacctgattcctgattcccttaacctgattcctgattccttggataacacccaagccgcggccgcgacatgcgaaggtgacaagggggctgagcaggcaactgttcatcagatggctagtcgatatgcattcgaaggttctgtggttcgtctgaatcacaaagactaccaggcgtggttaaccctgtacccgctgattgacctgccgtacgagctgcaaaagctggatatcgaattcagtcacgaaaagccgaaaaactggtttatcactgctagccagaaactgagctaccagaacaagcaggctgcctcaagggcgccacgcaaggtttcaaatagtcggcagacagaaaacttttccgctaaagactacgggcagactgaaatcccatcatgggcgagggactga

SEQ ID NO: 202736 - DNA, 693 bp, Klebsiella oxytoca
atgcatcttgatgccattacaaagcaagtcggcgtaatgacgactatggaagtcccgcaaaaattcaggatggaagggtgggtctatgtcttaagtaacccatgcatgccggggatctacaaagtaggcatgacaacgacaagcccagaagttcgggctagggagctgtcgtccgcaactggcgttccggcgccttttaaaattgaagctgctttttatacccattccccactggaatcagaaaaagaagtccatgaggttttatctgagtggcgcgtaaatgattccagagaatttttcgagctttctttaggggaaatcattcacgcctgctctcagagctgtgaagcgcaagtaggggagtccgttgaaagcatcgctgtttataacgacttcatcactttcgaaacccttgggaagctcaacgtcaatagtctcttcgatgacattggcataagcgtctttggtgacaaattagcggcggctgagcggctgatccgcatcggcgcagataccgtttttaacatcagaaaaaaacacggcgtcgtcattgccatgcatgactcgaatgcgtacgccattgagccagctgatgaacaggaactcaggaagcacagagaagaatatgagtcttttcgggctgagcgtgagtcccagggcatttacggcccgacacaacctgtggagttttaa

SEQ ID NO: 202737 - DNA, 363 bp, Klebsiella oxytoca
gtgacccaaaatgtactgccaatcaatcaacgcttgcatgaccaggctgttgatgaatttaatcgcctgcatggaacaatgattggcgaaattagcgcaatgttaaaaacggccaaagttgccccactggtagatcttaggaagaaggaccctacctttttaaacgttgtcgcagaattaagagtgttcagagacgtatgctgcgctctggcaccgcattttgatgtggataaatctggcgaaatcgccgacatcgacaaattactgacactggctaatgacctggctcaagccatcgacgctgatgaccctgacgctttatgcgcagctatagcagccctcgatgtagagccttatatatga

SEQ ID NO: 202738 - DNA, 129 bp, Klebsiella oxytoca
atgactaaagagtttgactatgctaccgtaagtaagcttttggctgaaatgcgcggatgtgtagagcgcgttcagaatctacgccgcaactttgaagctcaaatcagtcattcgcagaaagctgcttga

SEQ ID NO: 202739 - DNA, 333 bp, Klebsiella oxytoca
atggcttctataaacaatgcgctaggagagaacggcgcacccaccacgcccccgccagtggaccccgccccccggcctatggaagagcctggtgtggttataattatgcgcttcttagtaacagttctgacgccattgctgaacgaaatttttccgaatggcgcggtgttggcctgcgttccgtcaccgatgagctttttgctcagtctggtatacgggtcggtgatagcaccctgcaaagtggtaacgctgcttttgaggttcaaaatgtccgtggtcggatcgcctgagagcaaaagcttgaaattattgaccggggagctgcgatactga

SEQ ID NO: 202740 - DNA, 708 bp, Klebsiella oxytoca
atgcatcttaaaactcaatctaaagatgaaacttataccagaaataaaatccctattttcacagaagatgaggaagcccgcttcttattacgtgaaattttttccttctggatacaaaaaaatgctaagttcgccatcgtcgaaaattattttcatttagttgaatgctcaataggtgctgataatctgaaaacgattttttctgatccgcatcttatggaaacttccttaaaatcaatttgtgtattagatggtgatcatggaccagatttaagaaaaggtataatttctttacctggttctaaatcaccagaagatttaatatttgagcattgtgagaaaatttttaatgatgatgatgcttccttttgggaaaatactgacattatagataatggttttacaaaagattattatattgttgctattcagcctaaaatcaaatcgattgaacaaaaactacaacaaaaaagagataatggcgaatcaacagcaggtctgaaacgagcactgaataaatcagttttcaattcacacattgacttttttaaaatgatcaccagaaattggttgagaaaagatgataataaggaatctttaaaatattttcataatggttttcaacaattgttctttagagtttgctctaccaacggtataaataggaaaatttgggattatccctatgactcatcagttgaagattaa

SEQ ID NO: 202741 - DNA, 162 bp, Klebsiella oxytoca
atgacgcttttcggcaggaactccacctttgctatgaataaagccaacaattacaagcccaagattatgctcgctacttattgctttgtaagcctcttgcgcattatcaccactaccgatgatccatgtatctcgctgccaataatcaaaataattgagtaa

SEQ ID NO: 202742 - DNA, 198 bp, Klebsiella oxytoca
atgaacgagcaacaggtaaacgcgctgatagcagcgatgagcgaacaaaccgcagcacagagagagcaaacggccgcgataaaccgactggctgaatcaaatacggcgctgtgtgacatcattatccagtcgctggccgatgaaccggaagagcctgcggaggaaatcacctatctgagtagaaaaagcagggggtaa

SEQ ID NO: 202743 - DNA, 351 bp, Klebsiella oxytoca
atgcaggctggaaaacttcgacatcgtgtcgttccccaaaagtttatttcgttgcaagacccacagaccggggagattgtgaaagattgggtcaatcttgttcaatccacagcagataatggtatttgggctgaagtttaccctctctctgcacgggaatttatctccgcccaggcaacccagaacgagataaccaccaggatcacaatccgtcgacgcgacgatattactgctaaatgccgcatcttatatcgcggtaaaatatataacgttgagggcgtgctacctgatccggttagcggtctggaatatttaaccctgccctgttcagacggggtaaacgatggctga

SEQ ID NO: 202744 - DNA, 486 bp, Klebsiella oxytoca
atggctgacggtgttgaatataagctgaccggggttgatgaattattgggtaagcttgagtcaatcaccgatgatatgaagcgtaagggaggccgtgcagctttaagaaaagcagccaacgtcattgccaacagggcaaaggcaaacgccagaaggcttgatgatcccgaaacagggcgaagcatagctgataacatcgcagtacgctggaatggacgcgaatttaagcgtaacggcaatcttggattcagaatcggtgttctgcatggcgccgtactgaaaaggcatcctgataaagcaaaaaacgcccccacccctcactggcgccttctggaatttggaacggaaaatatgcgcgctcaaccaattatgcggccagctgctgaaaacggtgccgaggaggctatgaacacgttcgttgaggaatatgggaagtccatcgatcgagctatagccagagctgccaagaaaggaggtagaggatga

SEQ ID NO: 202745 - DNA, 366 bp, Klebsiella oxytoca
atgatcgcacctatctttagcgtttgcgcagccagccaggaggtaaccgcgctaatcggttcaaatccactccgactttacccattcggtctgcaagatgacaatatcgtctatccctatgtcgtctggcaaaacgtcagtggagagccagagaattacctggacaggcgccccgacgcagatagctacaccctccaggtagacgtctattcggttactgctttatcggcacaggcagtagcaatggcgctgcgtaatgccatagaaccacacgcctacatcacccgttggggtgcacagagccgtgacccggaaacaaaacgctaccgttattcattcgacgttgactggatagttaaacgttaa

SEQ ID NO: 202746 - DNA, 483 bp, Klebsiella oxytoca
atgtctgtgttaacgcagggtacccagctgtacgcgctgatccgtggtgttattcatgagattgaatgcataactaattttaaccccggcgcgaacccggcagatcaaatcgaagatacctgtctgagtgaacgtaacagccgaacgtacaaaaaaggactccgcacccctggccaggcgtcggtaaccatcaatgccgatcctgataacgaatcgcattacctgatgtggcaacttgcagaactggacgaataccaggatgagcttattcagtgggcgattggctggtctgatggcgagtctatcccgacactttcagctggtgaaatggaactaccgacagatcgcacctggtatacgttccgcgcctatgtcagcgatttcccgttcgacttccaggctaatgctgtagtggctaccgcggccacaatgcaacgcagcggtccaggactttgggtacgtaaaacgcaagctggcagttaa

SEQ ID NO: 202747 - DNA, 822 bp, Klebsiella oxytoca
atgtcttcatctgaattaattcgcattgcgaacagaaaggaaaacagaaaagcacttgaaaaagcctttgccaatgcagagcaatcttatcttatccattattcctgtgaatctttctatgacaacgattctggacagtcgcgtcgagtaacgtctatagctgtcagaaacctagactcagctcaaacacactcttggtctattcataaatcagccgaattgcagaataaattggatgatatcaacggtcatcttgatgaactggaacatcatatgcttgctgattacttccagtttttaaggaatcatgcgaatttcacatttatacattggaatatgagggatgaagcatatggctttcaagcaattgagcacaggtttcgtgtcttaggtggtgagccatacattctgcaggatgagcgcaagttggatcttgctcgtgttttagttgctctttatggtcgctcctacgccccacatgcatcagcaagtggcaggaaaggtcggttaatgagcctaactgaaatgaatggaattgcagatctagatgccttacaaggagccgaggaagctgatgcgtttaagaacggcgattatttgatgctccatcgttcaaccctccgtaaagttgatatctttgccaatatcattgatcggacccatgataaatcattgaagaccaatgcaactttttgggatctttatggcattaaacctgtcgtcttaattgatttagttaaaacccacccgctttatagtctaattggtattgttggaactgggatcggtttctatacaaagttgttcggtttattccattaa

SEQ ID NO: 202748 - DNA, 1011 bp, Klebsiella oxytoca
atggaaaatttaacgaggaatcaacattttatatctcaagtagagcagcgcagtaactgcattgacgagaccagaccaaaaaaaaagcagcgaatctacaaatttgaaattgcagatcgagaaaatagaattgttcgcttgactaatacagaaggtgtcaagataagcaagaatctgtcttttgatgatctctttagtttcgatgtatcttacaatgtgaaaatttctaatttaagaaagaattttgaggaattttttcataaatttgaaatggacttagtttcagcaactgacctccttatctccgagtccagagcaaatcctggtagcgatagtataaagtacatcgctgaacgagtgttcaaagcaaagctcatgggagggattagaaacccttatttaattcctctaactatttttatgtttaaaggattagtggggaagcatccaactgacccccttttgctaaatcacttctccgacattcgcgcgggaacaaaacctcatttagacaaggtttgcgcagagtttggggtgacgagtgagcagtatttccagtggctggagattctttttctggcgttaatgactccacccggagcagcaaaaagtatcctggagtcgattgttgagacgcttgttgagtcaaaaggaaaaatgggccatgtgatagtagcaacctttgacgacattccggggtatagagtcgcattgcctgatacaggctaccttcaaggaactaatgatcccaatcttactatacttctttttaatttgagtcgaagtgcgtttgctatgttcagtatggtggacttgtcaaatcagactcttgtaaatattccgccacaaatgagggagcaagtagggtcatacaacataaaattctcagcactgcaccgtcacaatgatatgatgttacttgaaagctttaacaggctggccgcctatcaagctcattctcatattttttgtgccgaacctagaatttatggaattaccactatttcatga

SEQ ID NO: 202749 - DNA, 333 bp, Klebsiella oxytoca
atgacgaaacaagtctcgaagatcattgcggaaaatattaacaattcgggatataccggcctgattatctcaaccaggctcaaggccaagcgtttcccgacgcagcagggcccattcaatcaatgccgccatagatgggcccagtgctgttcccaattccgtgagggagtattcaacacgaggcggaacttcaggataaagcgtccgcaatataatcccatctttttccagctgcttaagctgctgtataagcatcttttgatttaccccctcgatcctacgttcaagctcagaaaagcgcagtggaactttagcggcgaaaagctggcataa

SEQ ID NO: 202750 - DNA, 243 bp, Klebsiella oxytoca
atgaagctaaaaatgaacactcctgacgactctgtgattgtcgagagcaacctggtatctcagttttaccccgatttcgaaagcggtggcgagctgacaaccattgaaactgtttcacctgatgggaaaactttctctgtgaaagttaagcactcgtttaatcaggtcactcatgcgctggctactgcatggagcgttgatgaaaagaaagcattagcgctgcgcgaggtggccgacaaatga

SEQ ID NO: 202751 - DNA, 285 bp, Klebsiella oxytoca
atgagcaagcgcctaaaactaactgacgctcaaatcttcacgcttcgccgtatgtataacggcgcgcggtatttcatgcgcggcgacaaacaaaaaggtgagcaagataaaatctcccaccgcgttaattgcccctctataccagtgctttttcgtgaggggcttgtgaattggcgcaatccagcgtgcagaaaatttgatggcctgtattacagcgtgaatttaaccccttcaggcttcgatgcagtcgtagagggaaaaaccagcaaggagcgtgcagcatga

SEQ ID NO: 202752 - DNA, 663 bp, Klebsiella oxytoca
atgactgatatcaccgaactggcgcagagcctgaaagcggcagcagagaaatcaattgcagaagaggggccgacatggtttagcgaagaccagcttgcgcatgatggcggccttgctctgcatgaggcggacgctaagtttattgctttggccagtcacgagaacatcctcgcgctggtagaggcgctggagaagtcgcagctggtagacgacgaactttgcaagctcctgccgccaggtgttgagtacatggacccaccagacggcggcgatgttgagccgatcgagcaagtacgtcgaatggttgctgattaccgccagcgcatagccgagctggagtcccgcaccgtcaccgactggatagagcatgacgggaaatggcgaccggaatcacttggtctggatgaactcgtttacctgaaaaccagaaaacaggaactgaaaattccgtacccggcgggaaaggttaaggggtggatgcataccggcggagatatggacattatggcgtacaagctggtgtcgccacaagcccgcaccgtcaccgtgaagttgccgcgtcctgggttcatcaccatctcaggtgagcacatggccgtttatatgaagggtgaggttgtagcggcattgttagccgctggcatcaagtgggaggctgagtag

SEQ ID NO: 202753 - DNA, 660 bp, Klebsiella oxytoca
atgaaaggaagggacttaattatttcacgatcagattttgaaagcctaatggaaaaaataccacggcattccaagaaacgattgaaaggtatggcaataaatgactgtgggcatgccatcgagttaagagttggcggtcggtctattcagcatagagcatacacagcttgggctggcatgtttcgaaggtgctatgaggagtcctaccaggccaggcatccgacctatttcggttgctcagttgctgatgagtggatgagtttttccactttcaagcgatggtgggataaaaactatgtcgaaggatactccttagataaagacctgctggcgcccggaaacaaaatttactcaccagaaaaatgcgtttacatcccgcaaaaactgaatctcttcacgattgatagctctgctgtcagaggagattatcctatcggggttagcttttgcaaaccaaaggggaaatatcaatcaacaattaaaaatgggaaaggaaaattaatcagtctcggctacacagaagatcccgtcgaagcccataagctctggttttataaaaaaatggaaatggcaaaagactacaagcggctctgcgacagcatacacccaatgctttttgatggggttattaaaaaaatagagatgttaaaggagttttag

SEQ ID NO: 202754 - DNA, 330 bp, Klebsiella oxytoca
atgtcccagcagataaccgaaagccttatcttcagaccggcaagcgaaaaaataacaaaagaccttgaagggcgctgggtgctccttctcaacccctgtgatggttggcatatcgcccatattattgcgcttgaggaagatggcgaggtctatcatgttggcgcatatcagtttgctggggatgagttcgaacctcatgaattctatgttgcctgggccttactgccggattctctttccctggctaatcattttgacgaccagcgcctgaccccagagattagggaggcgcgttggcgagaatggatggctgagcgcacggaatcctaa

SEQ ID NO: 202755 - DNA, 489 bp, Klebsiella oxytoca
atgacagctgaagccattctggcgctggtgaaaaagctctggctaccggtgctggttatcctgctgattggcgcactggctatcgcggccagccactacaaagggaaagccgagcaggaaaagcagcgcgccgatggtgccgagcataacctgaagctggcaaaagaaaccatcaccgacatgcagacccggcagcgtgacgttgctgcgctggatgcgaaatacacgaaggaattagccgatgcaaaagctgaaaatgatgctctgcagcgcaagcttgataatggtgggagggtgctcgtcaaaggcaagtgtccagtgtcagccgcaacccaagccaccggcaccgccagcgtgggcgatgattccaccgtcgaactctcttcaactgctggacgaaacgttctcggtatccggtccggaatcatcagcgaccaaacagccctgagggcgctgcaggaatatatcagcacacagtgcctgaggtga

SEQ ID NO: 202756 - DNA, 597 bp, Klebsiella oxytoca
atgaacagggtatttgttgcttttgcgtttattgcattaatcattacgtgtgcttttgctgtgagagagccggtatcgctggttttcattatcgtgacaactattcttattggcgcggggtttagcaaagtagcagagaaggcgaaattcaattgtcgtctttcgcaatcagaaaaaacaggaactttacggttttgctctgtgggttttctggttgtttcgctagtttcaaatgccggatttctgttctgggttaattcaaaaacaccaatttttggtgatgcttatgccgaaagaaagcaatatgaagatttgaaaagcgatctaagaaaacaggatgtagcacaggaagaggagcgatttaagcgcgcatacaatgcaaaagagtcagttaggtccatacttaaagactcatcgtcggcagagttctctggggagcgagacggaaagggcggcgctgtatgtgggtatgtaaacgcaaagaatagcttcggcgctttcactggaaatgctcggtacatatcaaccgaaggtcagtctgtaatagacgacggcagccagtcgtttggtgaattgtgggaaaagacctgcaactaa

SEQ ID NO: 202757 - DNA, 720 bp, Klebsiella oxytoca
atggcacaagtaccattacccactccgacagataatcaggtacccagcacagatatccgggacgcagtttatgctggcgccatgctggataaggttgtcaccagtacagagcagaaatatacagatcgcctcggaggtgaacattacaccgtcgacggtattaaggcggaaggggataaagtcgttgaagaaactcggcagaacctgatccctctcagtcgccagtatatgacagtggctgatgcccaggctgacatcgctaatatacctgaaggtagtactacttatgtgcgcagtccggatgacagcactctggcgattgagtatatgaacgtttcagggacgcttgaacctaccggccggacaatggcatccggtgaactggtggccgatatcgatcagcgtatcagtcaggttgacggtgaaaatatcactgaaatccacgacgaaaccggaaatattatcggttatctggccgcagatggtcgcctgttccttccttatctcagcaattcagtgcaggacatccttaactttttgtctggtttactgtcttcgcggagcggaacagatatttttcgcctcggtgacggaaaaaatgacacctttatccagggtggagatggccgggtctatgttccgcttcttgatttatctattcaggattgctttaaacgcattgagtcatacgcttcgctggaaacagggaaggatatctaa

SEQ ID NO: 202758 - DNA, 228 bp, Klebsiella oxytoca
atgcagccatttgttacttaccttaaacgccagtcgccgccacctcagctggccagcggtgccactggttggctggagctgccgaacgggcagcgctggaatcccggccacgcctataaattcaatacaaatgaacccgtccggatgaaaggcggatcagtattgcgatttttaacgactaaagcccgcgttgtggttggtatggcaagggggcgttatggccattaa

SEQ ID NO: 202759 - DNA, 339 bp, Klebsiella oxytoca
atgaagcaccgctacacccgtgactgtcagcgcccggattatgacgagaagataacggaatggcttagtaccttcgaccttgatgatggtttgatgagttaccccgtcgctatttttcacggcggctttatctatcgtgtggtgactggccatgggctgggggagtacgtatctatccgtaactttttgggcgaacttggccttgtcaatctgattgatgatacagctactttcaggggctatgatgcagtgctggccagcccggaagtgagaaaagcaatctctgacggtactttcaggatggctgacattccgaaaaatataccgccagctaaatga

SEQ ID NO: 202760 - DNA, 2217 bp, Klebsiella oxytoca
atgagtcagacggtgattacttccgcctttgaacagctgaaagcccaggaagcggcaaacggtggcgttgtcattcttgatgagttcgtgtttgccaacgtcccaaacctggacattaccagcccaattgatcgtggcgaagggttgccggacgctgcgctgattgttcatcgtcaggcggtgggtaaaaccgggatggtgaataacaacgctgtggtttactccgtggtgatgggcgcggatgtgggtgattttgacttcaactgggtggggctggttaacaaggctaataacgtggtggcgatgattgttcatgcgcccacgcagaagaaaatcaaaacagcgaccggtcagcaggggaacgttttaacccgctctttcctgatggaatataacggcgcgtcagagcagacccagattattaccccggcagatacctggcagattgatttcacagcccgcctgaatggggttgatgagcgtatccgttgtgaaaatatggatatttatggagaggcctcattcttcggagatggcttccttgtaagtaaaactggctcgcaatatgttgttaaaaaaggaaccgggtatatttcaggagtccgggcagaaatgctttttgaccagaatatcgaaccaggtgaattacctgctaaggtctgggtagatgtgtgctggaaagggacgctgacaagtgtctgggactcatccacgaaaatcacagttagtgattttcttgaaagttatcatattaatgatgaacaacattatgtatttgctatagcagagattgacgcctccggagaaattaaagattttcgtaaaaatgaatctcaggataattctggtttaattacggaaatcagtaaatggaagcgaggtaaagtaacttcacatgttaactcggtttctcaggcacttgatacaagcaatgttagcatatgggaatatgctgaccggattaaggataaaccagacgaaactgatccctctacgtgggactggtctcctgctttttctgcggcccataaagataacgtttgtgctaacttaattgatggcgagatatatactctaaaaacacctgtggtttttgagtataccagcgacgcctattccgattacgccaggttaccaaaatgcaggaatggcctggcggtaatcgactattcgttaatggctaatggcggagccggattcaattcgagtcttgatgttgatgacccggcccagccagcatacgaagcggcatttacagtaaagggtctgagcggtcatgtggtgctccaggtgtttgagggtattgtatttaaaggcaacgccaacactgcggccataaaactaattggctgtgacggcgttaaaccgtatggttgtgtttttgcaaataacaggtatggggttgtttttaataatggcttaaaatccggtgtgtatactgaactatgtgtccctgaattttgccgttttcggggtggatgccttacagctattgcatacgagagaggcggtggcgacagctcttttcatggctgcggtctgggggaaggatgttatgtgacggttacggccggacgttctcccgttctcattggcgcaggttgtcagccttataatgcccctttgaatgctaatatctggatgagcgggttatccgcaccagttatacagaacaaaggattgaccgctcacttttatggtaatttaaagttagaggcatcatttaaaacggtgctggcttccggaacggccgtttatttttatggccccatttctgcgtggtcagccattgataaagggacgcttacgcaggctgtcagaggcgggccaaccgggccaggtgcaggtaatcttaacttttcgggtataacagaaccgcatgtaactcgctgggatgtagataaggctggaactactgtaccattttgtgtttacaacgaagaagcgatcgttaccgtcaggggtaatacatattattcgatctttaagataatatcaggaaggagacaatcaaataatgcaactacatccccgataatggtggtttccgggaatgttaacccggcgacaaagtttaatattatcagaaccgcttcgggtttatccctcacaactattgaagatggaactatcattgtctcgaggagaacaacaaatttacctgatgaaagtaatggggcgaatttctcaactgtagattactggagaaaattatga

SEQ ID NO: 202761 - DNA, 336 bp, Klebsiella oxytoca
atgatggcattatcagggatgatgtcccttaatttagataaagaactgaccacagatgggactacgctggattatagtgttcctcttacggggtttcctgatggtgcggttcttgatgttgttgtatctctcacaacgtctgatgtgaagaactgtagttatcgcctgaccgttcacaagcataataatattggggggaaggtgtctgtaaccagcgattattcatatggcgggttgtctatgaagttcaacgcaacttttacaacgctaaccataactttaaatgccaatgttgttgggaatttaaaaatatcggtagttcatcttaatgtataa

SEQ ID NO: 202762 - DNA, 273 bp, Klebsiella oxytoca
atgagtttttctgttcaaaaaaaagtaactccggttaaaacatacccttcattgctcggggcagcaatccgtggtgaagaggagaaaatcacagttacatacacggttacatcaattgtttctctcacggataaaatagctgttgctgagtacagcgtaagtcctgagggagccagtttatgcggagtgggtaattttgaattcttatattctggttccgggaatcccttagaagaggctgaggatgccttaaaagatagcctggtattataa

SEQ ID NO: 202763 - DNA, 720 bp, Klebsiella oxytoca
gtgtggaagctggggaatattacatgcggtgctctggacaatttaaattgtgttcttatcccggctcacccctgggtttacggccttggccagcaaactgaaaatggaacatatctcagcccggttaacaccgtttcatatctggcggaacagctggccagcgtcggtgatatttccgatgtggtgatattcctcatcaccggcagcggacatgatgattttatcctgaatctggacgaactggtcgatgtcctgcctgttcccgccatgacgcaggttaagaggctggcccggtcagcggaggcgctggtcaaagagaagatgctgatcccgtctcctgcttctggcctggcaacggtggtgccgttttcaacaccaacaacccgcgctgtgctgaatgcgcaacgtgttgctgaagcgcagatgcaggctgcatccgggttcagtctgacgggagtcagggcggcgctggcgggcttcattgaagaaagaagcaacattctcagcgaggtggccagcgggctggagtccctgaaagggaaaagcgcccgcgcctggacgttcaccgcgcagggcgatatcaccaccacgctgcgcactatgatgaaagatataccggatgcatcggcggtacattgtgccgctgtgatgatggttggtgaaaatctggcaggactcagggagatgatacatgaactcgatagcgacgctggcgcttaa

SEQ ID NO: 202764 - DNA, 273 bp, Klebsiella oxytoca
atgtataaaaaacagcctactacgttagttttcacccaggataaatgtactatttatggctctggcgctcagcgcgcacgcgaaatcctcagcaataaaaagctgttcccctctgggcttgattgttcgacgcctaagaaaatctaccttttcaaccgacaattaaatcagccacaaggcttaggtatttatatggatatattcatcctcaaatgtgatatgaaggaccagcagtgccacagttactactataaggaaataaaaaatgcgtaa

SEQ ID NO: 202765 - DNA, 3105 bp, Klebsiella oxytoca; identical to SEQ ID NO: 142856

SEQ ID NO: 202766 - DNA, 918 bp, Klebsiella oxytoca
atgagtgatatccagctctttcgttatggtaaaaacggtgtctctgaacttccgggaaaatcagcagccattgaaaaagatcttcagaaactgatcgagtctcatatggaggctttccttggggtacgttttttggcgacagaatacagcacaggcaagacccataaggggcgcattgactcattggggctggatgaaaacaacacgccagtgattatcgaatataaacgtcagagtaacgagaacgtcattaatcaggggttgttctatctggactggctattagatcatcaggccgagttccgttggctggtgatggataagtttggcaaacaggttgctgacgatatcgattggtccaatgcccgtgtgatttgcattgcggcagattttaccaaatatgacgagcatgccgttgcgcagattaaccgcaatatcaatcttatccgctataagctgtttaaccctgatctcctgatgtttgagctggtgaatgctgctaccgagactcacaagcctcagcctgttgcaatagagaatcaggtgccgaagcagaagaaaaatgctcaacgctatcgtctggataagtcttcccctgaactggttgcgctttatcagaatatctgtgattttgctgatagcttgggtgatgaggttcagcgcaaagagttactgctttatactgcgtttcagaagataaagaattttctaagcgtcgtgatatggcccacagccaaagaaccacacgtcaagctttacctgaaactaaaaccggagcaggtgatcatctctgatatcgtcagagatgttactaatttgggacactggggaaccggtgatattgaggtggttgtccataatcaggcagatttagcaaaagctaagttactgattgagcaagcgtatcaagagaactga

SEQ ID NO: 202767 - DNA, 1338 bp, Klebsiella oxytoca
gtgaagtacagagcatattcagaatataaagactcttgtgtggaatggcttggagagatccctgctagatggacacttgagaaattcaaatacttgttccaagtaagtaatgaaaaaaatggtgtggagcctgttgggcagatgttatctgtatccggttataggggagtagaagtaaaagagtacaatgatgaggcaaagaaaagaacgcttgaagaagtagcagaataccgtgttgtgagaaaagggcagttagttgttaatacaatgtggcttaactattctggcctaggtgtttccgattatgaaggatatgttagtcctgcatatagggcatataggtttacaaaaaatgttaataagaaatatatacattatttgttgcgttcaaatccatacgtcatggcttatacttcgcaaatgcaaggtataagaccaaattcattacaaattaaaacagatgattttcaatcattgcctgtacttttgccttcagtagttgagcaggagtgtattgcgaaatttttagattacgaattggataagattgacctattaatcgacaaacaagttcgactcattgaacttctgaaagaaaaacggcaagcggtgatttctgatgtcgtaagaagagggttaaatcatcgtgttaagctcaaagtttcaggaaatgagtggttaggtgaagtgcctgagcactggggggtatcccagataggttggctttgtaaagttggtaatggcagtactcctaatagagataatcaatcctactggctttcaggtgattacccatggcttaatagctctaaagtaaacgatgatattgttactaatgcagagcaatttgtcacttcaaaagcattgttggagtgcagtttacctttagtaaaaaaaggtagcgtcatcattgcaattacaggggaagggaaaacgagaggtacctccgcgttattgatgatggatgccactattaatcagcatattgcttatatgactcctttgtcaaaaaataaaatattaccagaatatcttcatttatggcttcaaagtaaatatgatcagattcgttttgaatcatctggtgggggcagtacaaaggccgcaataacttgttctgacgtgaaaaaatatattatcccgctaccgccattaaatgagcagaaagttattgttgctgatgttgaagaaaaaaaacgatgtttcaatacccttgtgatgcattgtgaacagcaaatatctttgctaaaggagcgtcgttccgccctaatttccgctgccgtaacaggtaaaatcgatgtacgcaactggcaacccgctgctaaggacgctgcatga

SEQ ID NO: 202768 - DNA, 1923 bp, Klebsiella oxytoca
atgactaatttttcttcaatggcggctttcttatggtccgtcgctgacttactacgtggtgatttcaagcaatctcagtatggcagagtgattctgccatttaccgttcttcgtcgtcttgagtgcgtgcttgcgcctaccaaacaggctgtacttgataagttacctgtggttgaaaagcttgatgagaacgctgccgatgcaattcttcgccacgcttccgggcaacacttttacaatacttcgccgttggacctcagtaagttgggggaaacacagccacgacttaatcttgaacgttacattcgctcattcagctatgacgcgcgtgagatcttcgaacactttaaattctatgagtttatacagcagcttgatgatgccaatttactctacaaagtagccaaaaaatttgccgaggctgatttgagcccttcttctgtcagtaaccacgatatggggctgatatttgaggacttgatccgccggtttgcagaaggttctaacgaaacggcgggtgagcactttacgccacgggatatcgtgcgactgacaacctctctggtgtttgcggacgacgatgcagcgttgactaaaccgggactgatccgccgcatctacgatcctactgccgggacaggcggcttcctttccagtggtatggaatacctgcatggaataaatcccagtgccagccttcgggcctatggtcaggagctaaacccagagtcttacgctatctgtaaagcggacatgctgatcaagggacaagatatcagcaatatcaagctgggtaataccctctctgacgatcagctctggaatgagcgttttgattactgcctgtccaacccaccgtttggcgttgactggaaaaagattgataccgttatccgcaaagaacataaaaagggctacgatgggcgttttggacccggtttgccgagagtatccgatggttctttgctgttcttgctgcacctgattagtaagatgaacgataacagccgtatcgggatcattcttaatggttcgccactctttaccggaggtgcgggcagtggtgaaagcgagatccgccgctttgtgctggaacaggatctgctggatgctattgtcgcgttgccgaccgatatgttctacaacaccgggattgcgacttacatctgggtactcagcaatcataaaccgaaagaacgtaagggcaaggtgctgctgattaatgccacggagcaatttgcgccgatgcggaaatctcttggtagtaagcgtaaagagttaacggaagcgcagattgacgagattgtgaatcagtatacgcgctatcaaccttcggctaatgttaagctgtttaaaacctctgattttggctatcgccgtattacggtggaaagaccgcttaagctggcattttatccacgcgatcttgatcgtcgcgtagcgttgctggcggataaagactggtccaaatatggtgatttagagttattagccgctctggatgcaatggatgataaatatttaagccgggaaaaattcaaaaaagcattgccgaaagtttctgctgctcagtttaagttgttgataaaacacttaagtgaaacagatgagaatgctgaagtttgtaaaactaagggtaagccagaacctgacgccagtttgcgtgattatgaaaatgtgccgttgagtgaatctgttgaaacgtatttcacacgcgaggtattaccctatatacctgatgcgtggatcgatatcgaaaaaaccgatccttatgatggacaggtcggtttagtgggttatgaaattccttttaaccgctatttttatcagtatcagtcgccacgttccttggaagagattgatcgcgacttggatgaagtgagcagagaaattatggtcttgctggcggaggtccattcgtga

SEQ ID NO: 202769 - DNA, 876 bp, Klebsiella oxytoca
atgtttggtgcaaaagaccgcattgcgcgatcagtatacgtatcgctgacagaagaagagcgccaactggaaaagctggctctcaccattccagggtttgaaacccgggatcggatggagaaagagcgccagtaccgtataagagcaatacaaaaagctgtccagcaggacaggaatgataacgagaatgaaagcaaagaagtcagaaaagcacacaaaaagtggcgaggaaaggctcttcggctaaagaggaaacttaaagcctgtatgttagataagccatgtggcagtgctgcgtgcccacagtgcttccgcctgcacaggttacgtaaactggctgaactggccccgctgcgggggtgtatgagcgcgtacagagtggttacgctggtttattacgatgccatgctggaagaagagcagatcagttgctgggaccataagaaattccgggaacgggtctacaagatggtaaaaagagccggatttacggacaaaatagtggggggctatgagctggattttcacaccgatattcagcgctggatgcctcatttgcatctgctgatgccaagagagcctggcgcgctcaaaacgctaaggaaggcgatgaaaagagacaaaaatatacgggccagagcagggataattagtcgaccaatgaaaagccaaaaactaagggattttgatgcgcaggtaacttactgtttcaaggggatgtggcaggaagtaagaccctaccctgatgaggttggcaaaaggaggacccgcaagcacaggctgccacctgttctactggcacgggcgctatgtaagcaggatgagatggggtttactggactgacatttacttctggggtgagaacccgtaagtag

SEQ ID NO: 202770 - DNA, 195 bp, Klebsiella oxytoca; identical to SEQ ID NO: 142851

SEQ ID NO: 202771 - DNA, 495 bp, Klebsiella oxytoca; identical to SEQ ID NO: 142850

SEQ ID NO: 202772 - DNA, 948 bp, Klebsiella oxytoca; identical to SEQ ID NO: 142849

SEQ ID NO: 202773 - DNA, 618 bp, Klebsiella oxytoca
atgaaaaaacaacctgtctcaccgacacgggtggcatcgtgctgcctgtcgcctgctgaagtctggcgcaccctgctgactcacctgttggcacagcactacgggcttaccctcagcgatacgccgtttggcgaggaagacaccattcaggcgcatattgaagccggtgttcccatggcggaggccctgaatgctgtcgttgagatgtatgatctggtacgcacagaccgggacaatgcgggctttatccttggctccccattgattactactattgatgttctccgggcgcgaaaagccaccgggcttctgaatcggggaacgtataaggccgtcagccatatcacgcaggggcgcaggtctgccccggaccgcgccacaatcgctgaacccggagcgccgttgccgttgctgccatcggacacgttcacccgacaggatgcggagcgtgttgtgtcagcgtatgaccgtgtcgctattgaggatgaccagcatacccactttcggctggcaatacgcgatgctgaaggtcagcttatctggcgggtctggaactttgagcccggagccgggcagggtcttaaccactatctgcaacgctatggcgtgaaaaaatga

SEQ ID NO: 202774 - DNA, 366 bp, Klebsiella oxytoca
atgacccattcaacacatacaccgtcgccagcaaccccctggtgggggctctggcgtgatgtgacgccgctgtttggtgcacgactggtacaggaaggccacaacctacattttctggccgaccgggccgggtttagcggtgtgttcagcgaaagcgatgcacgccatctggaccaggcctttccgctgttcatgaagcagatggaaggcatgctgttgtctggtgagctggagccgcgcagggcgaagggcatcacactgcaggcgaaggaactgacttgtgaggctgatacgcttggctcctgcggctatgtatatatcgccatttatcccactcctgtcccggttccagcaacacaggactga

SEQ ID NO: 202775 - DNA, 432 bp, Klebsiella oxytoca; identical to SEQ ID NO: 142846

SEQ ID NO: 202776 - DNA, 489 bp, Klebsiella oxytoca; identical to SEQ ID NO: 154481

SEQ ID NO: 202777 - DNA, 543 bp, Klebsiella oxytoca
atgacacttcctcgagacgttcatgcgtcccgccagggacagcatgactatttgtgtggcatctacagcctgattaataccctgagttacctctatgacggcagagtaaggcgggaaaaattaatgtaccgcctgctaagcagctataagcgacgatgggacttatttgatctcctgacgcttggcctggatgaagagcagatggaccacctgatagcagatgttctgctgagagggcattacgcccaacattatcccctctattttcatactcccttccgttatcgaaccttgagaactcaccgaatatttcatgatatcagcgactggctggcttcaccggagaatcaagcgcagcgcgtggtgattatggggaccacatggcactggtcagtggtggttcgtaccgatgctacccggttgtttttgtttgatagcctggggatacgcagccagcgaaaggacacgttttcagtacaacctgagctgaagcgccatacgttgctgccggatgccatttactttgttgaacgtgaattctga

SEQ ID NO: 202778 - DNA, 381 bp, Klebsiella oxytoca
atgagcagtgaacagatgactgagccctgtgatgccggaatgacggacaggggggagtggcttacagcagagcagtttgccggaatggaaggaatgccgggcacagcgaaaggggcgcggctacgtctggaaaagctcacagccctacatccggaaatccgccgcaaacgcaccagtgggaaggggtttctgtaccatatcagcgcggcagggatggcgttgaaaagtgagcgggatgcggcagatacctcagcagacgagcagcttaacctgtggatacagttgttccgtaccatgaaaccggcctctagggataaacttttgcagcaggctctggctcaggttgcaagggacctgtctgaaggagacgttaaccagtaa

SEQ ID NO: 202779 - DNA, 528 bp, Klebsiella oxytoca
atgtcgaccaccattactgaagtaacggaatgctttgagtacctttttagttccctttaccggaaagcatttgtcaaaaccctgcgccttaacgaatgcagtgaacgggagttgctaccgctggtacgctgctacctgctgggttggtttgccgacagcgtctcaccggaagtccgggggaaactgcccggcagtatctccgggcatggctatattgatttcgtcattgacgatgtggcggtggagttcgccgtccgtaagccaggagccgcccgttctgcactgtcagcctcagtcaacagcacggaggtaaagaaactgatgaagtatgacggcaaagccctgctggtactgttcgatttttctgacacgccctataccgaagaacagattgagtccttcagaaactggccctccctgggccgaggcaaccatcgtaaatcagcgttcaatgttgcgtatttctttgtggaaaaacgcagcccgctgacacccaggaaaatcaccagaaatatccgcatccgttaa

SEQ ID NO: 202780 - DNA, 519 bp, Klebsiella oxytoca
atgaggaaaaccgctgccatgttgcttctggcattttcaggttgtgccggggcaaaaacactccccgcagaaaatttgcaggggctgtatgaggcttatgccaccctgaatacctgccaccagtatggttacactggcgatgaggccttaaccgcactggacaaacttatccgcagcaatcgctatcaggataataccggcaacatcatgacattaacgaaggacaatattaactattaccattcccttcaggaccgctttattcttgagcagcaattcaaaagcgaaggaataaaccagagcggtatccggctccagataaaaaccctctgcgaccagatgaacgccgctgttggtgggaagctgggtgtgaaaactcgagttatttcaccggatgaccttcccgccagcgcaaaacctgtttttgacaaaccggccactgacagtgccccggcaattccggaagaccgaccgatgacatgggacaacagcccggtccagggtattccggttcagtga

SEQ ID NO: 202781 - DNA, 315 bp, Klebsiella oxytoca; identical to SEQ ID NO: 154482

SEQ ID NO: 202782 - DNA, 855 bp, Klebsiella oxytoca
atgaagatagcgatggtgatggctaccggcgatagcgcagcgatgagtcactggctggcgaccgcctgcctcggcgaggcagaactggagcgttggattatcgatgccgagccggaggtggctgaacaggttcttggtgcgctggttatccagtggcggcaaacgccggtcgatatgctgatatttccggctagtatttttggcgatgagctggcaacaaggctagcgtggcgtctacaaggcggcagcgtatgtcaggtgttatcagtgaatgtgcaggaaggttgggtgacaaaatctcactgggggaatgcgctgattgcaacgctggaggcgtcgtcccggccgctttgcctgtcgctggcgcgccagttcggagttaaaacatctaccgaccttcctgaacatctgacgacacgccatatcgtacctgatcctgtaccggggtggctggcgagcattgaacgcatcgagcgttctgaaaagcatcctttgcaggaagcgaagaaggtgctggttgtcgggcagggcggtgagggcgttgatgccgataacattgcggcgatggcacggagcctgggcgtggaagcaggctacagccgcgcgcgggtgatgaacggcggctacgatgcggaacgcctgattggtatctcgggtcatctgctggcgccggatgtttgcattgtggcaggggcctcgggggcagctgcgctgatgacggggataagggatagccggtttattgtggcaattaattgtgacgccagcgcgccggtatttactcaggcggatgtcggcattgtggatgactggcgaccggtgcttgaagcgctgaaagtctatatggaaacgtag

SEQ ID NO: 202783 - DNA, 783 bp, Klebsiella oxytoca
atgaacattctgttggcgtttaagctcgatccggacgccagtatgctggcggaaaaagactggcaggtagccgaacgagacacctgcgggccggatgtttcgctattgcgcaacgccatcggtgctgatgaacaggcagccgccgcgctattgctggctcagcgcagtgttggctgtgagataagcctgaccgcattaaacattggggatgagcgcgcgctgcactggctacactactttgccgcgttagggttcgagcaccaggttttgctggaggcggctggagatttgcggttttccccgtcgtttattgccggacagcttgctgactggcagcgcagccggggggctgaagtgattgtaaccggctgtcagagcagcgaggggctgaatgggcaaactccgtttttgctggcggagatactgaattggccctgtgtcacccaagtcgaacgcttcactcttgagccgccttttgttgtcgtcgcgcagcgaacaacatccggtgttcgccgctgccgggtacgcttgcctgcggtgattgcggtcaggcagtgtggcgaagtggcgctaccggttcccggtatgcgccagcgtctgggggcggcaaaggcggaggttatgcgccaggcggtggccgttgaggcgacgcctgcggttcagtgtttacgcctggcgcggccggaacagcggcgcagtgcggtgataattgagggggcaacggcgcaggagaaggccaggacgctatggactagctatctgcgagagaggatgcagccatga

SEQ ID NO: 202784 - DNA, 897 bp, Klebsiella oxytoca
atgaccagtaaattaaccagagaacgcctggaaaaaattaaatcctggcgtgaaacctacggtgctggaagcaacgtaatgctgccagctgaagaggctgaggagctagctcgcatggcactggccgcaatgaacagtgagccggtggcgtggatggcgacttatcacggcgaggtttccgacgacgcgatcggcatcactcgctccattgttgaggctcaggcggagcgtttcggctgggaaccagcattgacggaaattacaccgctctatcgccacgcgcagccagcgctagtaattccctccgagcttcacccggatacgcagaagctggtgaccgacttctgtactgccttggctgagaagttgtacaaggcccaattaaaatacggctacgacgcagactggaagcaagatggttggccaagtcaatgccaggcgcactttcaccagcatatcgccaaaggtgatccgcgcgacgttgccgcttactgcgcatttatgtggtatcacggttggaaaactgaagctgcgcagacagcgccagtagccactttctatcgcgatggcgttgaagccgccgccaaatggatagatcagcagcgtgaggcatacgacagcgagcatggatggtctgatcctgataccggagctttcgagttcggcaatgatgcccagcgcggatattcatccacactggaagaattggccgaaggcattcgcgctctgcatccaaatgctggcaactctccgataattccagagggtttaatcgccgcggttaatcgcctcctcgatagcgacggtagtcgcggttgttatagcgctatccgctgcggtaacgcccgctttgaagtagagcgtttgctcgccgctgccacgcaggaggtgaagtga

SEQ ID NO: 202785 - DNA, 1203 bp, Klebsiella oxytoca
atgacagaacagcaattacctgaaggctggcaaatggtgaagtttggcgatatcgctaaacatatctctaaacgagtggaaccgagcgagacagaccttgaaatttatgtcggtttggagcatttagactctgatagcctgaagatcaaacgtcatggtacacccagcgacgttgaaggacagaagcttttagtaaagaaaggccagattatttttggcaagcgtcgtgcttatcaacgtaaagtagcagtagcggattgggattgtatctgttcagctcatgcgatggtgttggaagcaaactccgaaaagattattccagagtttttgccgttctttatgcagtctgatgtgtttatggaacgagctattgcaatttctgagggctccttgtcaccaactatcaaatggaaagtattaagagaacaagcattccctattccctgtaagaagacacaattgcgctttttaaagttggttgagtcaaatgcagcctttttaaataaaactcatgagtttcttatctctgggtgtgatcttatttcaacactggaagttactctttttacgaaaggtattgatgcgaatagagtcagaaaggagacaaaactcggactgattcctcagcactgggagctggcagaattgcaagatatagctcatgtaacagatggtgctcatcgaacaccaacttacatcgattctggaatcccgtttttaagagttacagatatacagtcaaaagaaattgacttgagtggggtaaagtatatatctgaaatagagcatcaggaattatgtaagcgatgccatcctgaaaaaggtgatattttactttcaaaaaatggaacaattggaattacaaaaatagttgattgggactgggagttttcagtttttgttagtctgtgccttatcaaaataaaacgagaaaatatagatccaagatatattcagctagttctacaatctgaattggtaaaacatcaaataaaagctagatccaaaaccggtacaataactaacttacatcttgaggaaataagagaatttctcattcctattccgcaaattaaagagcaaatacaaattgtagaaattatagaaagagctcattcagctgaggttgcagctgaggaaaaatgtgagttgtcaaggctaataactagaaaaatatttggaagattaatggaaggtgcataa

SEQ ID NO: 202786 - DNA, 228 bp, Klebsiella oxytoca
atgatccgttgccatcttgctcggctcatgggcgaacataagatgcgaatagccgatgttgtcagggaaactggcctgagtcgcaacactatcactttgctttacaaagagacggctcagaaggttgacctggatacattagaaaggctttgcgtgctttttgactgtgaaatacacgatttactgcaaaaggttcctgcttcgcagaatcgtacagagaaaaattaa

SEQ ID NO: 202787 - DNA, 336 bp, Klebsiella oxytoca
gtggtgctgggctatacccacggcagcatcaccatggttttatctggtgcgctgatcggcattggctacggttccgttacgccaatattccagacgcagatcatcagttcggtagagccgcataaaatcggcgtggcgaactcactgttttttaatgcaatggatgcgggactggcgttgggcgctttcgttatgggcttgatggtggatggcgtgggctatcgttcaatttatctgatgggggcggtactggtggtacttgccggcgcgctgtatatcctgcagatgaaaaaacgcggcgacgttaagctggtctccgcgcacgaagtacattaa

SEQ ID NO: 202788 - DNA, 207 bp, Klebsiella oxytoca
atgcggatctggcgtagtgatttttttcaatggatgaaactgctggtactctccagcgcgctctcttttgtattgttctggtttcaccttcccgccgcgctgctgctggggccgatgattgccggaatcatcctcagcctgcgcggcgcggaaattcgcgtaccccgtccttttttattgccgcccaggcgattatcggctgtatga

SEQ ID NO: 202789 - DNA, 933 bp, Klebsiella oxytoca
atgaggggagtcatcgcgctactgctggcgtcctgctgcagttcgccgctgctggcgcgcgatgtcgtgcaggtttcgcgctgcgttcccggctccctgcttcatgagcatcgtctggaaaaaacgcacgtggtcgatgactttcatatttactacagcctgcagggcaaagatgccctgcgatatccgcaggacagtaccggcgatggcgtgccggacgttataaaagatattggtcgtcagctacaggcggcgcaatatctctacacgttgcggctgggcctgcgctcgcctctgcggcagaagatttatgcccaggcccgacagattaacctctatctgctggcgcttcctaaaggtcatggccttgccttcgatcgcgtggcggcggaaacgatgagcgacgaaccggcgctgccctgcggcttaaaaatcgtgcttaacgccgggctgcagcccgcgcgcaacgttacgccagcccatgaattattccatttataccagtacggttacgcggtttttaaacagagatggtacctggagggaatggcgcgttggatggaaaatgccttcagagccccggagaaaagagtttcgccgctggctgagccttccgggtgtgaaagtaatttctcgcgcggctatggggcggcgaacttctgggccagctatgcgcagcagtattttgcgccaacaatactgcctgaaaaagcgctaacgtaccgttacgctgacgggagtccggtgtttaaaactctggttttgcccggcggtacgatgctggcgcctttttttcagcagcttgcgcttaccagcgaggggatttcccgcgcaatgaagcgggcaaacgaccgctggagtgaacaacagcagcgtgacggacaattcaatagtctgatttgccaggcgctggcaaatgccgcgcagagataa

SEQ ID NO: 202790 - DNA, 1011 bp, Klebsiella oxytoca
gtgactctgactccgacagcgactcggattctgacagcgattccgactctgacagcgattctgactctgacagcgactcggattccgacagcgattctgactcggacagtgattcggattctgacagcgactcggactctgacagcgactcggactctgacagcgattcggatgctgacagtgactccgattcggacagcgactcggattcggacagtgactcggattcggacagcgattcggattccgacagcgactcggattcggacagtgactcggattcggacagcgattcagactctgacagcgattcggattcggacagcgattccgacagcgactctgactctgacagcgactcggatagcgacagcgattctgactctgacagcgactcggattccgacagtgattcggactctgacagcgactcggattctgacagcgattccgattcggacagcgactcggattctgatagtgactcggactccgacagcgattcggattccgacagcgattctgattcggatagtgactcggactccgacagcgatgcggattcggacagcgattccgattcggacagcgattctgactctgacagtgactcggattccgacagcgattcggactctgacagcgactcggattctgacagcgattccgattcggacagcgactcggattctgatagtgactcggactccgacagcgattcggattccgacagcgattctgattcggatagtgactcggactccgacagcgatgcggattcggacagcgattctgactctgacagcgactccgattctgacagtgactcggattccgacagtgactccgattctgacagcgactctgactccgacagcgactcggatagcgacagcgattctgattccgacagcgattcggattctgacagcgattcggattcagacagcgactccgactccgatagcgatatcgaggctgtaccggatagcaacagcccggatgtggtga

SEQ ID NO: 202791 - DNA, 210 bp, Klebsiella oxytoca
atgaacctcgtcgaggaacagaaacccgccatcggcatcatcaaaggcgccgcgtttttcgcggtcggctccggtgaaagcgccccggatatagccgaaaagggtcgccgaaagcagctccgggttattggcgtagtcggcgcagttaagctcaacgaaaggtttgtctgctgcgataacgccgcgttcgagggcatactgataaattag

SEQ ID NO: 202792 - DNA, 258 bp, Klebsiella oxytoca
atgccacagccagaagatgttatctcttcctcaaagaattcaaaacgctctcagcgcaaaagccatccaatgagcggttctgagcggcaacagaattttgttgcacgcaggcgagaaacccacaaagaaattaaaattcttgttcctaacgagttaaaaacgaaatttctggaaatgtgtgcatcaagcggcttaagccaggccgagttattctgcaaattgattcaggatgctgagtcaaaaaacgttatgggataa

SEQ ID NO: 202793 - DNA, 531 bp, Klebsiella oxytoca
atgttaacccataaaataatacaaagtgaaatagaagagctaaaacagatcctcgctcataaggatttagagattccctcattctggcgttgtatctggcctggcctagtatgcatgttgtggtttctactatcatcctatctttcgtactggttgagtgatcatgcttctggtcttgagagaataactgccatggtttttgctggtgcgataggttttttttctattgttgtaatagctaatactcgttcgcattttctttcgttgcctgagtcattcaggagagaatcaaaattctttaattacctagctgttaagtgtcaggcttatggcatctttatcttgattgtatttccatgcctggcattctatttttcatctattcatattaatgctatcgcttttagtgttataacattcttcactatactagtgacaataatggttatgaatattgaccttggtcgttatcagttagcaacacttacgtcagtcattgagtcggttagaaataaagaagtcaagttgtaa

SEQ ID NO: 202794 - DNA, 228 bp, Klebsiella oxytoca
gtgatagttagctttgctaaacatcctggcgtggacttctgtgtaaggttgctgctgacagccgttattattttccccgtggtttacttttcctgggccgcggttattgggaccacggccagtgattatatggcgagtgtcatttttatttttgctacggggtttatctggtttttgcttaatctgtttttttcggtctttaaggtgccattgaaaaaaacgaaatag

SEQ ID NO: 202795 - DNA, 339 bp, Klebsiella oxytoca
atgaagatattttttttaaagcttcccttgatttttatattagtttgcatccctggtgcgttacttttttacaaggattatcttgaaacacaaccagctactccagaacaactgagcgaaatttcgaaagaaacaccctgtgcgggtaaagtattacaattggcccttgaatctaacgatgatgattcatctgaaccgttaactctcggttacgcaaatgaactcgcgtcagggtgtaaagaaaaagaaagactaatggaaagcaaaaaaatccgtgagggtgaaatgactacattccgcgaaaaacagctgaaagctctgaacggtatcactaaatga

SEQ ID NO: 202796 - DNA, 216 bp, Klebsiella oxytoca
atggttaaatttaaagactttgaacacgacagagatgaaaaagatcggcggtattgggattatggcgaaagtcaggcacttgttaatatgaatgaatggattggaagtaatgatattgaagtggtcaccgttgaaaccatggtcactgttcgggggagtgtggccagtacgtttagcatgtttaatgcatttagactttggtataaagaaaaataa

SEQ ID NO: 202797 - DNA, 216 bp, Klebsiella oxytoca
atggcattgtttgtttaccaaggatctcaatctggcaatgaagatttaattaaggagggtaaatactggtcgactgactgcattctgaaggaggttgacattcctaccgggtttttaaccagtaacattaatcgactggactgctccggggtcattgtaaatgtgatgacagataagtatgacagtgcagtatccgcttataacaaatcaaaatag

SEQ ID NO: 202798 - DNA, 684 bp, Klebsiella oxytoca
atgtatccgatggatcgtaaagaaaaagacacctgccgtcaatccctggcatcttctcttcagatgcttatcatgagctattccttccctgcgtgcattcatacccatgatggttttttccctgcattcaatcctgcttttttaacagagtttggaaacggacccatttcagataaatactgggaagcgcatttcggagtagatgacttcctccatctccgtgaaattgagctcatcttacgcggtgaagacgccgattttcatatagagaaatgtgtatatatgaatgataagcagtttgatttcacgctggagaaaattcagcagagtggagaggtttattatctctggaagtttggtagatcgctaaataccaatgaaaagataatcaaagatttacctatgcataatgacattcttcactttatgaaaaatgttaaggagttgtcgaggactgaattcgattttttaggtttgtattctggaggtgcaagtcataatttgatatcgcaaataatgggctgtaaatatgcttcttcgagaaatgccgtgagtgaaattcttaagaagttaaaaattagcaacagggatgatgcttttttaatagttcatcttagtgaattagccgcgcccataatgaagggggttaaaaatataataataaagaatgttaataatctgtaa

SEQ ID NO: 202799 - DNA, 390 bp, Klebsiella oxytoca
atgccaagggtacaggtttatataagcgaccaagttgttgaaaaaattaactctataattgaaagtcgccgggttgaaggtgcaaaagataaagacgtcaatttttcaagtatcagttcaatgctgatagagttggggttgcgtgtctatgaagcccagatggaaagaaaagaatcaggttttaatcagatggccttcaataaagctttgcttgagtacgtagttaaaactcagttttcggtaaacaaagttctgggtatggagtgtttgagtccccatgtaaaagatgacccaagatggcaatggaaaagtatggttcagaacattcaggaggatgtgcaggaagttttgcgaacatacttccctgaggttgagtccgaagagtcttaa

SEQ ID NO: 202800 - DNA, 1656 bp, Klebsiella oxytoca
gtgccggtcaagcgcgtcagcgacgaggtggcccggctggtttccttcatcgagaacgatgaacacctctcgatgcatccggctgagcaaatctacgccttccgcgacctttctgcgcagggcatgacaccggagcagatcggcgcccagttgggttacggtggccgtcatgttcaacgtatgctcaaactggcagggctggcgccggaattgctgacccggctggcaaaagatgaaatgaccattgagcagtgtcaggcgctggcgctcgaaaatgatccgacccgtcagctgcaggtctatgaaaacgtcaaatccgcctatggccataccgcaccacatctgctgaaaagtgcggtgacagatcgggaaatctcgttaaaaagtccggccttcgagtatatcgggcgtgaatgctatgaggccgctggcggtgttgtgcgagaagacctgttcagcgccgataacggagaaggcacagcagacaaggcgctgacggagagccttatccaccagaaactctctgtgctggctgacgaaatccaacacactgaaggatgggcatggtcacaggttcgcagcgatcccgttctccgctgggggaatgacacccgaatcttccagctgaccccggtgccggaggcaaactacaccgctgatgagcaacagcgtctcgatgaactctgtgcttcactggagaccactgagacacatgacgatgagtacgcgattcaggctcagattgacgaaatggagagcgtggccgtcaaccgtgaatggacgccggaacagaaagcagagtgtggtgtggtggtcagcttctggggcgcggaagtgaacattcagcgcggtgtccgccagattgccccggagcgggagctggatgatcaggctgaccagaaaaaaaataccgtcatcactaaaaaaattgagaaccccgtggacagcatcagcgaaccgctgctgaaaaaaatgtcttcggaacgcacccttgccgttcaggcagcgctgatgcagcaaccacagaaagccgtggcgctgatggtctggcggctgtgttcctgcgtgttcgactacggtggtatgtcagtcagtcatcccttcggaatgaaagtcactgagcattacacatccctcgtcagcgactccccggccggaaaaaccggaaaagcctggcagacgctgatgcaggaaaaagcacgcctgcaggcgctgttaccggagggctggtcaaaggatttcaccacgtttttcaccctcgacggggaaacgctgatgtccctgatggcgttctgtaccgccagctcagtgtacggcgttcagacccgcgaatgtggacacacccgtcgcagtgacctcgatggcgtggaaacagcgatcggcttcgatatgagggactggtggacaccgaccgcagacaatttcctctctttgctcagcaaaccgcagatcgttgatgcgcttaacgaggcaggaaaaacaggtgctgcagctgatgccgggaaaatgaagaaaaaagacgctgcagagcatgcagagcatgccctcgcggagacccgatgggttcctgaatggatgcagccaccggccacagcgaaacccgtcatcactgatgatgcagcagacgctgatgatcatacggctcacgcagcctga

SEQ ID NO: 202801 - DNA, 699 bp, Klebsiella oxytoca
atgactgcgattaatcagtttgctgctcatgttggtctggactgggcggataaaaaacacgatgtctgcgttcagtttaaaaacggcgagcgcatattccaggtggttgaacacactccagaagcgcttgatatctggctcaacgaattgcaccaaaaggtgaaaggcaggatcgctatcgcccttgagctgaagaaaggcccggtggtgtatgctctccagaagtacccatttgtcactgtttttcctgtgcacgcgttgtcactggcccgctatcggcagaccttctggccaagcggtgctaaggatgatccacaggatgctgagttagcattagagctaatgctacgctatccccaaaagataaaagccatagaatccgacaatggtgatatccgattacttcaacagttagttgagcagcgtcgactgctggttgaggacaaacgccgctttgtgaaccggataatcaacacgcttaaacagtattatcctcagccactggagtggttctcacatcggggtagcttactgttgtgtgagctgattatccggtggcccagtctgcaacaactgaaacgagccaggcgcgacacgatccgtaactttctgaatgccaaaggtggccgtgcaatggcccttaccgagcaacgtgttgcgagtattgataacgcgatcccattgaatcgccacggataa

SEQ ID NO: 202802 - DNA, 519 bp, Klebsiella oxytoca
atggcaacagcactggcgacacaaattaaagtcgtgagtgaaatcatcaaaacctatgacgagcgaatcgaaacgctgtttgacacattgccagatgcggggctgttcaaatcacttccgggcatggggccgtgtatgggcccacggatgcttgctgcgcttggtgataaccgtgaccggtttaacagcgctgaagaaattcaaaactatgcaggtattgcaccggtgaccgaacgaagtggccagaaatcctgggttcactggcgatggcagtgtgccaagttcgtcaggcagacctttgttgaatgggctgccaagacggttaactcatcatactgggccagactttattatcagggactgcgagaaaaaggaaaatctcaccaatctgcaatccgggctctggcattcaaatggataaggatcatttaccgctgctggaagacaagaacccagtacgacgaagcgaaatatttgctggcgctggaagcgcgaaagtcacccttactgaagtcataa

SEQ ID NO: 202803 - DNA, 411 bp, Klebsiella oxytoca
atgagtgagattgatgtattaaaagtgaagtatcccggcgcaaatgcctggcaagtgggggatagtcaagagctggccaacgaactcgcgactcttattataaaggggataaaaacggcctcatgtggatcttttgcatcttatcagcaggaagattctgcccccaaaattgggagccataacatcatccttgatggtcaggatgtacctgtatgcattatcagattggtttcgatgcgactggtgcgtttttgtgatgttaccgaggagtttgctcgaaaagagggtgaaggcgatttaagcctcgagtactggcggaaagagcatcagcgattttttactcgtgaaggttatttttctgaggatatggagctgatcacagaagaatttgaggtggttgagattctgtga

SEQ ID NO: 202804 - DNA, 1032 bp, Klebsiella oxytoca
atgtcgaaccgggtcatgactacgcttgaagagctctctccacgatgcgaaatatacagcatcgatgaggcattttgcgatctgacaggagttcgtaactgtcgcgaccttaccgacttcggcagggaaattcgcgagacggttctgcgccggacgcacctcacggttggtgttggcatagcccagacaaaaactctggcgaagctggccaatcacgccgcgaaacagtggcagcggcagaccgggggagtggttgatttgtcgaacctggaacggcagagaaagttaatggctctattgccggttgatgaagtatggggtgttgggcgccgcatcagtaaaaaacttgagtctatggggatagacacggtgcttaagttagccgatacggatattcgttttatccggaagcactttaatgttgttctggaaagaacagtgcgtgagctgcgtggcgagccatgccttggtcttgaggaattcgcgccggtaaagcaggaaattgtgtgcagccgttctttcggtggccgcatcactgaatatcatgaaatgcgacaggcgatatgcagctatgcatcgcgcgcagccgagaaacttcgcggcgagcatcagtattgccggtttatctccgcttttgtcaaaaccagcccctttgcgctcaacgagccatattacggcaacagcgcatcagtaaagccgctgaccccgacccaggacagccgggacataatcaccgcggcgactaaatgcctcgatgctatctggcgagacgggcaccgttaccagaaggccggcgtgatgctgggcgatttctacagccagggtgtggcacagctgaatctttttgatgacaacgcaccgcggcagaacagcgaaaagttaatggaagtcctcgaccatctcaatgcaaaggatggcaggggtacgctgtattttgcagggcagggaatccagactgcctggcagatgaagcgagaaatgctttccccgcgctatacaacgagatatgctgatttactagtagtaaagtaa

SEQ ID NO: 202805 - DNA, 573 bp, Klebsiella oxytoca
atggaagctgcaaacgcatttgccgaagagttcatgaacgattacaaccgacgtttctcaaaagcgcctcgccaggagttcgatgttcaccgggaactggatgtcgatgatgatcttgatatggtgtttacttggcgtgaagcccgccgcgtgtcaaaatcactcacggtgcagtacgacaaagtgctttatctcattgaagacagcgaattcagtcgtcgggcaattggtaaatatattgatgtttggcattaccctgacggacataaagagctccgacttaatggcatatcacttccctactccacctatgacaaactgtctgaaatcgatcagggtgccattgtggacaataaacgtcttggccgtgcgctggaaatggcgcaactggtgcaggccgaacgggataataaccggtcacaatcagtgccatccggtgacggcccttcacgcaggcgcaaagcccccacgacgaagaaatcacagcgttcactcgatgaggacgatatgttcaatgcactggtaaaacttcagtcacgatctgaagaaatatttggtaagaaacagatatga

SEQ ID NO: 202806 - DNA, 738 bp, Klebsiella oxytoca
atgctgaccgggcaaatcaaacagttctggcttgagtctggctgcgtctatggttatcgcaagatccatctcgatctgcgtgataccggacagcagtgcggagtgaaccgggtctggcggctgatgaaacgtgccggaataaaagctcaggttgggtaccgtagcccacgagcacgtaaaggcgaagccagtattgtgacacccaacaggctccagcggcagttcaatccggactcaccggatgagcgttgggtgacggacataacctacatccgaacccacgaaggctggctgtatctggccgtggtggttgacctgttctcccgaaaagttatcggctggtcaatgcaaccccgcatgacaaaagagattgtcctgaacgcattacttatggcggtgtggaggcgtaatcctcaaaagcaggtactggttcactctgatcagggtagtcagtacacgagccatgagtggcagtcgttcctgaaatcacacggtctggaaggcagcatgagtcgtcgcggtaactgccacgacaacgcggttgcggaaagctttttccagctactgaaacgcgaacggattaagaaaaggatctacggaacgagagacgaagccagaagcgatatttttgattatatcgaaatgttttataacagtaagcgtcggcatggttcgagcgagcagatgccaccggctgaatatgaaaacctatattatcaacggctcagaagtgtctag

SEQ ID NO: 202807 - DNA, 867 bp, Klebsiella oxytoca
atggctaatgaagtattaaaatggtgtttaagcgtagttgcttcagcagggtttatcggtgggataggttttatagcaagagagagtttagggaaacttctaacaaagtcgattgagcataaatttgaaactgaattggaaaaattcaagtcagatataagagagggtgaaaaggaattagaacaaataagaagttacatttcatctttaagaacaagcagagattcagttcttcaatcgaagaaatttgaatcagccgaaaatctcattgccatacgccaattccttagtagcttcacgatggctgtacaatatatgcaaatgttaaaggtcgatgagataattaaaatgggtgacgaccaaaatcttaataacttcatggaagccattacaaagcctttgaatatcaaccaaaaaatggaagaatactcaaaatttaataaagatatcatgaagctatatttaaatgataatactattaaagctttcgagatatatgaaaccatcatgatttatgcattgatatcactgcagcttttatcaattccaatgtcgagaaaatacaatattttaaaagatggctcacttagcaaaaaaattattgaagtagtcccttcgtccaaagaaggatttgataagtttggcgagaattatgtttattattggcatgactatttttatgcggatgttttaaaaaaactcagagaggagttgattggagaagtcaatatgaacaatgacacaaagtcagcggaaaggcttgccttggactttaagaaagcacaagttaatatccagaaatcgttaagagaaaatgggttgccacaaaatttacttaataaagatgtgattaatgataaagaatga

SEQ ID NO: 202808 - DNA, 1218 bp, Klebsiella oxytoca
atgcaacccatacacccccttatcaaagcggcaagagataaaaaattaccgcatccagcccagttgaataaattcaatcaagaatactggattaaattcatggacaaaataggtccgctaactgcagaggcttcagcatacatttcaggtgctacgtggctcaataataattttcaaagtgtgcataatactcgaaagcaaatttgttttttaaagggctgcagacctgaatatcatgaaatgatcagggcacatatcgccagtgctaattatgcattttggcaggtatgcgacgaacaaaaagagatttttgaagatacaagcaatacagctatagagcagtttattatctcaaaaacttcgaaggtaggaaaaagcgacccggtaagtgtcaacagtgtaaatatgcatagacttgacagtctaagaggtccattgttcgagctatttaaatataaggaccgtatgcatatcctctttcctgatgatcgcccgaacaagttatcaaaacttgacttttatctcgcagaaatgaggctgtctcagcactaccatagcttttcttcgctgtggcaagacttgctctatggtcgtgcagtattcactttccagcagaagcgagtctttttcatgcaatgtcattctgactatcaccgcatgaaaacaattgcagaataccgtcgagatcattttttagccacttcaataactgaagctcgtaccgtaatggataaatttcagaatatcaatccttggtcaaattatctacattatgagccaggtaaagcgttgagctcagcaccatggcgaacattatctcaacgctcgcaagtgattgccagatatcagcctttatcggctttaattcagcttgacgaccacctcaaatcactattaaaacgcaaatcctccccttgtattgaacgtaaattacaaagtgttttagatatatgggttcatctatctgtgctggctgttcagattgatgaacatctgcacacaaacgaggaaatcaacgactggtcaaaactagttcatcttgcacctcaatttgaacattctaatcttattgctgcactaatacagtgttgtgaatatagtgaaactgagatcatcgatgccctagatttattgacctggagaggaaagtcgccgcaggaggatttatgggtgcagcctctggtgtctgtagaggataattatgttttcccgatctga

SEQ ID NO: 202809 - DNA, 1152 bp, Klebsiella oxytoca
atgattgccgacatcgcttttcatgatcttgatagcgacaacccacatgctcacgttatgttgacattaaaaactataggaccagaaggttttggtaaaaaggaaaggagctggaatgacagaaaaatgtctgttttatggcgtgaatcatggtcatctatggctaacagctaccttgctgccgctggttcgtcagaacgtattgatcatcgttcccttcaggcccagcacgaggaagctttagaaaaagcagcagtagctttagataatgaagaaaaagcgctatggcttgctaaagccactgaaacgaaccgccctgcaatgaaacgtatccacagtgccaaatggcgtagtaaggcggctcaggaacaaagagccacagaacaagctgttcgtgatgctgccaagcaggaagcggttgaagtctacaaaacgttcagtgagcttgatcttgaaattgttgttgatgtcagaagctttactgtctccgttcttgctgaaccagaagagattgtattaccaaaaacaagctccagttcttctgccaatgaaacgcaaagacctgtgctggtagccccggcacctcatactcctatgcgtggtgttaaatcctatcgtgataaatccaaagtcagtaaggttgttgctggtaagaaaccattggtcagtatttctgattctggaacatatactattctgaaaacatcctcttctaaaatcaaaaacaaggcatccagaagcgcccctgaacgttttaagaggaaacagactactccacgtcaggataatatctttaaacgcttaactgcccttttagttgattttatcagagataaattcatatgggctaaaacgaacaaaactaaagttgatattatcagtgaagaacatgataaacgtattgctgaaaactacgtctttgacgaggtattaggccgtcatatctctcgcactgaatatgagaaaaaagccaagtttaaccaagatgactacaagccaacaccggatgagatcagccgcttcccaagccgtcctaaaaatgaaataccggaacacgataatagtctggatctcacgccgtctatggcattgcactctattaccgataaattatcacctcctaaatttacacctaaaaatacaaagcaatga

SEQ ID NO: 202810 - DNA, 270 bp, Klebsiella oxytoca
atgcttacagaaaaacagaggcaagagataatatttctcgccgttattcaatggaaacatgcctgtactctacattttgttggggaatgcaatacatctataaatgatgataaatttatggatatgatattttttttgattaacaatccttcaatctattctacagtctgtcatcaggatgtttttgaatatgaaatggaatatgaaccgataacctatgatgaaatcaggctggctctgaaccagccattacgccatttaatagaataa

SEQ ID NO: 202811 - DNA, 861 bp, Klebsiella oxytoca
atgtttgtgtttggtgttattaatgatcctgattatccaaataaactcactcaaaaaaattatgatgagataactaaacggtcatatccatacattcaggtttttaatcgagaaaatgcttcatatgcaatatgccctgcgtgtaaaaacccggtacggttggtgaataaaaatagtagcgagaggatttctggaacgctgtatgctatgcatgttaagtataacgtaaaggatctcgcagattacaatcaatctgaatatgatgactgttatctcaggaatccagaaagaatggatgctaaggttagaagaaattcttcacaaaatggattgtccgagaaaataagaagtaaattacgagagcattttgatttagttgtcgcaataatgaagacagtcacgggaataaaattcagcgatattgttattgaagaaatgctaaatgacttcgctttgaataaaggacatacatatagagcaatgactttattcaatattccttatggattcttatatatgaccgaggcacaggatctgtataattgtcaagtcagtagtaaaatagttaatgaaataaataaaaagtccaatcaatttatatgtaatggatttggttatatcggaagaaaaaacaatatgaaaggaaataaaattattttgtttttctctgaccatataattgatgcggaagacaaaaaacaaactatcaagctaaatattgcagagattgggtataaagaaaatcctgaggatggtgttgttttatatcaacagatcattgtggttgataacaatatttttgataattacatacgagtccaaaaaagaatgttaaatcttgcacaatcaataatgccataa

SEQ ID NO: 202812 - DNA, 492 bp, Klebsiella oxytoca
ttgttaacgattgccgaaatacaaaaagaagcgactgagtttcgaaaattgatcgaggtctgtgacaaaaagaacaccagccttgttatagaccattttccggttatgagttgtaaactttcttcgatgcttctttcgtatcatcttctgaaattatggcctgatctcttaataaaaggtgtgagtgctgctacaggtaagaatggtcaaataactcactactggcttgagattgatgatattgtgattgatataacgggagatcaatataacattatttctgacaaggcacttaatgaaaagattataaatagcagaccctttccagccattcatgtctcacgtaagaaagaaagttatctatatgaaatattcaaggtaaaggaagaggaatatctggtttcaggatttccaactattggaaatgattttattgaagaaatggaatatggacacactcagttaatgagttacaaatctattggtaaatga

SEQ ID NO: 202813 - DNA, 579 bp, Klebsiella oxytoca
atgaaaggacataacttcttaccactggtggtctcgctggcatttcttactggatgccaacagcttaacgatggcgtgaatagcgttaatggggcaattaactcttcactgtcatcattgaacagtgcagtgggtaaaacacttagcgcttcaggttcaactcaaagctctggccctgcctcctcagttgcgggtcttggtcctgtctgcaaagactatgaagaaaacgcaatggcagcagagaaaaaatggacgggcaaacggatctcaatcgcaaatgcgactgttcttgaagttacgaaaggcagaagtgccagcgatatgatgacgggaatgcctaaatcagcccctaactattatctgctctttaaaacagccgatacaagctactgcggcgggatggtctggctggattactactccggccttgatgatgccgttctgacttacaagaaaggccagaaagtcagtgtcactggaacagtcaacaacttcgaagtccgtgggttcgctaccgtcaacaacgccgatatgccagttcgtcttgttgttctgagaaacggcacaatcaatcattaa

SEQ ID NO: 202814 - DNA, 228 bp, Klebsiella oxytoca
atgctggcattgatcgtttttgtattaatcctgttaattgttgccatatatgaatacttcgccctagggaaacaattaaataacacatcaatcacctttcttattgtgatgtttttttcattggcaataataatcaaaaaaataaggcaaatagaagaatataatgacaactcattttttataaaaatcttaagagcaaaaaaacattatcaaaagctaaaagattag

SEQ ID NO: 202815 - DNA, 366 bp, Klebsiella oxytoca
atgaaagagattgttttaaatgaaagtaataaaatggcgataaatcttatcacaaatgtattaccgggatattgcgaaacgatctatagcatctctgaaaaacagcctgaaacagccatgaatattttagcaggggaaatgttatcagagatactttatgatgttttgattgtctgtgaagttgaagactatgttaaaagtggaagaagcaaagatgtatctgagatcaatatggatgagttaaagaacacgattttatactggcataaagagcatatcattgagcttgtactgaaaaacataaaactggatgatgctgatgagcgtatttactggaagttaaaaatgactgtgaatcagttttga

SEQ ID NO: 202816 - DNA, 237 bp, Klebsiella oxytoca
atgaataatgatatgtcagtaatcgtatgtatgttatgtaagaaaacacctaaagtgatgagtcttatccaagagagcttggatatatttatcgcattaagaggtagcgctgtcgaagaaatcatgaatgataagaccttgttagatgatttaaatcgttatgtaaatgagacactgtatgatgagatggatctggaatatggttctgtaatcatcaaaatagtatctaataaatag

SEQ ID NO: 202817 - DNA, 297 bp, Klebsiella oxytoca
atgtctaaagaaaatataagcagtaataaatctaccgagctgttctatgaccttgcttgtaggtcgtttacagcaagttgggagatgttcatggaagtcaatggtgatggggacgcaaatgattatctggatgaccccggtttcatgaatctatttaatatttatgttattgaccatattcagaacaactttgaaagattcactgtccaagaaggaaacagtggtgatattaatcaagttgactttgaactagtcgctgccatgttagttgagtattcagaaggctttagaaaataa

SEQ ID NO: 202818 - DNA, 825 bp, Klebsiella oxytoca
gtggcttctggtaaccgactgcgaacaacggggttgttttcaccggctgcacactatgagtctgctgtggcttcaggtatcagcctgcgaacaacgggtttgtattcaccggctgcacactatgagtctgctgtggcttcaggtatcagcctgcgaacaacgggtttgtattcaccggctgcacactatgagtctgctgtggcttcaggtatcagcctgcgaacaacgggtttgtattcaccggctgcacactatgagtctgctgtggcttcaggtatcagcctgcgaacaacgggtttgtattcaccggctgcacactatgagtctgctgtggcttcaggtatcagcctgcgaacaacgggtttgttttcaccggctgcacactatgagtctgctgtggcttcaggtatcagcctgcgaacaacgggtttgtattcaccggctgcacactatgagtctgctgtggcttcaggtatcagcctgcgaacaacggggttgttttcaccggctgcacattatgagtctgctgtggcttctggtatccgactgcgaacaacggggttgttttcaccggctgcaaattatgagttttctgtggcttctggtatccgactgcgaacaacggggttgttttcaccggctgcaaattatgagttttctgtggcttctggtatccgactgcgaacaacggggttgttttcaccggctgcaaattatgagttttctgtggcttctggtatccgactgcgaacaacggggttgtcttcacctgctgcacatcatgagtctgtggtggcttcgggtatccgactgcggacaagctga

SEQ ID NO: 202819 - DNA, 1179 bp, Klebsiella oxytoca; identical to SEQ ID NO: 185135

SEQ ID NO: 202820 - DNA, 927 bp, Klebsiella oxytoca
atgcttgttctgaattctaatactgcctataccggtgataaaaaagacctgccgggttactggcctgtcttcggctacattcctgccattgcgctgtctctgcgtaagttgtcttcatcgtattccggcccggcaataagagttcgccgctcaacggataacgcagagactgacatcggatttacctcttctggcgatctggatactgcggttttattgtctttctgcggctccggaaatggtttcgtcagcgtctggtacgatcaatccgggaatggattcaatgctacacgcagtggtgcggcagggcagccgcgaattgtctccgccggtgtggtggacctgatgggcacaaagccaggtgtaaggttcgatggtacggatgatgcgctgtctatggtgacagctgtcgctgctctggccggaaaaacgggtctttcgtcatctatcgtcttcaggctgcgtgccgttccgacagcggccgcgagttttttcacattttataagtctgcgagttcatcgggagatacggtaaggcgccggtataacctgggggcaggattccagaaccaggataagaatctgctgcaggttatctccactcaggcagcaaccggtaatgcggatatagtgaccgagccaacgccggttactgtgaataaaaacatcgtggcacgctcatatcttgatttgaccaacagcatccagggtatcgctttagacagcagcgcatgggtgacaggaggaacaagtggcagtgctactggctcattcgattctgctttgctgggcggaggaccgtgggcggcaggcaacccaagcgaagtatctttcctgaatgttggtgagttcatcctcgtggactcaaagaacgattttttcctgaataatatagtggctaaccagcaaaattattttactgattaa

SEQ ID NO: 202821 - DNA, 969 bp, Klebsiella oxytoca
atgctggctaataaacaaatgttaaatttaaaagatcacttgtcatctatcgttaagtacataaaaaataaaaataatgttgtttttttagattatccattacaccataacgttggcgatttattgatttttcaaggtactcaacagttttttgccgataatgatattcacgttaaattttataggtctgtccttgactataatgttgatgaattaaaaaagagtatagacgctgaaactaccctgatatgccacggtgggggtaactttggtgacttatatgatgttcatcaaaatcttcgcataagtttagtcgaaaattttaaagaaaatagaatcattatatttcctcaaactgcgcatttctcagacttagacaaattaaatcacgacattagtatattcaggaaacattctgatgtaatccttttcgctagagacgctaagacttttgatttgtttcaacgcttcagcgacaaagtgtttttaatgcctgatatggctcatcaattatatggcaacctcccgatttgcaatgttgaaaataatgaggctttatattttcttcgtgtggataaagaaaagaatgacctgcaattaacttatgcgaataataatgaaatccgaagtgtggattgggttgatttcattaatccgtatgagtttagatatgaatttttattgaaaaagatatctaggatagccaataaatataattctagcaccatgaaaaatatcatatattttttatgggataaacattcttctcgtgttgttaatagaagtgcccgctatttctctaagtataatgttataatcacatcacgaatgcatgggcacattctatcatgtttagtaaatcggaatagtaagattattgataattcttatggtaaaaatagtggttattttaatgagtggacaaataaaacagaattgagttccttattacttaaacatgaaaaataa

SEQ ID NO: 202822 - DNA, 1191 bp, Klebsiella oxytoca
  misc_feature (37)..(46): n is a, c, g, or t
gtgctgttattgtgctatgtatttgcttatctatctnnnnnnnnnnaaaaacatattgctcaccagcaacaattcggtggaagtaaaattgtaggtttagtattagtttttgagggagttggcgctgctcttcaattacttgttatattacctacaggattgttattgaaaaaccttgatgttagtgttttaactaaaaggaaccttatttcgaggattgttttctttgtcattgctatccctatggctttgtatggttatggcttatggagtattgtttttgcaaatctttttcaatatttcacggcgtttattttaattttttatcaatctagaaaaataatacctcgtgggtattattttagttttaaagatttttttgagctttgcaggtttggtcttttcgtaatgttggaaaacttgctttggactgttctgactcgcgtttttagtttgctaatattaaatttccatggcactacgcagttgggtatttataatatttctactagattaactgacgcagtactaaatatacttaatactgttattggtcgaatggctcttcctgttttttcatcggttcaagatgatcgtcaaaaactttcaagtttctttttcaatgctacgaagctttttaatatcgtttcgatgcctgcttttgtaggactggccttcacttgccaatactgggttcctattgtattaggtacgcaatggattgaggcggttccaataattcaaattattgccattatgaacgcaataatgttttctagaatatttgtaagccaactaatgaaggctgtcggagagtcaaggagatttctttttttatcatttacttcagcattcgtagccattcttgcagcattggttacagcaaaattgtcattgtatgagacaatgttggcatggtcctcaatgagagtattgattacaattcctcttgggatttatcttgtttacaagataatacacataaaagcctttgagcaattgcgaccaattttcctaccatttgttgtcacagttataatgatatttacaatggtaatatttagatttttttcagagaaatccctcctatcaaatgttgtctcgattaccctagagataggggtgggtctaattacatattctttcattatagttattttgataaaaacaaagaaaattattcttcgttaa

SEQ ID NO: 202823 - DNA, 675 bp, Klebsiella oxytoca
atgggtgtcccactgcgctgcccggactacagcagcgtcagcaaacgggcaaagtcggtgaatgtcagttttaaagcgtccacccggggtgaaatcgcgcatctggtgattgattccaccgggctgaaggtcttcggtgaaggtgagtggaaagtcaaaaaacacggcaaagaacgtcgtcgcatctggcgaaaactgcatcctgctgtagatgcaaaaacacatgaaattatttgtgcggacctgtcactgaacaatgtaacggactcagaggcattcccgggtcttatccggcagactcacagaaaaatcagagcagcagcggcggacggtgcttacgacacccggctctgtcacgatgaactgcgacgtaagaaaatcagcgcgcttattcctccctgcaaatgtgcgggctactggcccgttgagtacgcagaccgcaaccgtgctgttgcgaatcagcgactgagcgggagcaatgcacggtggaagtggacaacagattataaccgtcgcccgatagcggaaacggcgatgtatcggataaaacagctgttgggtggttcactgacgctgcgtgattatgatggtcaggtggcggaggctatggccatggtgcgggcactgaacaaaatgacgaaggcaggcataccagaaagcgtgcgcattgcctga

SEQ ID NO: 202824 - DNA, 306 bp, Klebsiella oxytoca
atgggccaggttgtaacgcatcagcccattgaagcaatgccggttgagatacaagaatgcagctgcacgctcggctgcatccagtgtctgcgcgttgaattccttcctgatcagttcataaccttcaggattgcccattttctcgaacatccagcgggctttgttttcaaccacttcaggcacgacagccagcatttgatacagatggataaggtcggggttaacatctgccagcaggaaatccgcgtgtttatcgctgttcaggaatacagatccgccacctacgaatggttcaatcagtcgtaa

SEQ ID NO: 202825 - DNA, 948 bp, Klebsiella oxytoca
gtgtcgtatcgcgaccatctgtaccgtgtgatagcgaagcacgccagtgaatggtattacggcaaggatgactcgctctggaagacatacctggatactttaaccacggacgcaccgttatggaaaacgtacctggaagcgtttctggataagatgacatggatgaaagcagtatccgaaaagggcgtagtgctggggcccgaaccgtggcatatgcatccgattgtatttttaaatgctataaggaaagggaagccaaaaattacgcgagaaatgctcaggaggatttggaatagcccaggcaatgtttctgacgctgttcttgatattgttgctgaagagttttcgaataaatttgaagcgtgtaatattaataccaaaaatagactttatcatttttttgcgcaaatttttcaagaggtagggcctgcgtttaatttaaatgagggttttaactatagaccacaagtgcttatagataaatttgcatactatgctaatcatcctcaagacgcgcaaaccgatggttatatcccaagaagacaagccgcaaataaacaaaatgttgccaacagggcctatggtggacgagagggaaataatgatattgcaagtggagatggatggagatatcatggaaggggaatgaaacagttaacattcagaaataactataaatcttttacaaactatcatgaaaaagtttggggagaacgtgttgattttgaattgaatccagaccttttacttgatacggtttatgcggcaagatctgctttatatttctgggaccagaataatctatacagaagagctgacaatggaatcagcagggttgtatctgactcaataacgagaattgttaatctttatgataatcactatgaagatagacataataatttaattagattcctgcaagagagtatttttgatgaaatattttaa

SEQ ID NO: 202826 - DNA, 552 bp, Klebsiella oxytoca; identical to SEQ ID NO: 182276

SEQ ID NO: 202827 - DNA, 795 bp, Klebsiella oxytoca
atgccgacagcgattcggattccgacagcgactcggattctgacagtgactcggattcagacagcgattccgactctgacagcgactcggattcggacagtgactcggattcggacagcgattcggactccgacagtgactcggactccgacagcgactcggattctgacagcgattctgactccgacagcgactcagactctgacagcgattcagactccgacagtgactcggactctgacagcgactccgattccgacagcgactcggactctgacagcgattctgactccgacagcgattctgactctgacagcgactcggactctgacagcgactcggactctgacagcgactctgactccgacagcgattcagactctgacagtgattcggactctgacagcgactcggatagcgacagcgattctgactctgacagtgactcggattcagacagcgactctgactctgacagcgactcagactctgacagcgattctgatagcgacagcgactccgactcggacagtgattcggactctgacagcgattcggattcagacagcgactccgattccgacagcgattcagactctgacagtgattcggactctgacagcgactccgattcggacagcgactcggattctgacagtgactcggattcagacagcgattctgactctgacagtgactcggattcagacagcgactcggattcagacagcgatgccgactctgacagcgactcggatattccgcaggccaacgcggataccaatactgcgctga

SEQ ID NO: 202828 - DNA, 312 bp, Klebsiella oxytoca
atgagtgatactgataacagtagaaaatcacgaacagaaaaaacaattaagcaaaaaatagcatcagcacagatgcgtctgaatcgtctaaagagtaaggaaaaatccctgactaagagcgctgagacacgcctgaagataatccttggggcagaagtagctaaagcttttggctgtaaagtagaagacatcgataaggagtttgtgctgggtatattaatacattttcaaaatgttggtgctgaggataaggcaagactaaaattgcgagggaaaatatttcttgaaaatatggtggctcgaaaggaatga

SEQ ID NO: 202829 - DNA, 714 bp, Klebsiella oxytoca
atgattagtatcaaccttactacaactcatagccgactggatttatgttctgcgacattgtggtctctgttacatcaaagtctattaccagagagaatcaatctgtggatatcacatgagccatttatggctgataaaggtattgctgcattaccgaactggattaatgaattgaatcatattcatgacattatccgagtacattatgttgataatattggaccttatcgaaaaattattcccgcattgcgttcatctgcaaatgaagatgtgattgtttatgttgatgatgatgttatatatgctaacgcttggtttgaagggcttttaaacacctttgaaaagttagagcgcaaatatgttgtagcttcgcgagtcagagtgaaaaaaaacaatttttttgggaagctacaaagttataatatgtttcatgtatgctctgagcagcaattattttcttctgacttcattattaccggggttggtggttgtattttaatgcggaagcatataaaagatgagttccttgagcttaacgacttccgcgagctgatacctaagactgacgatatttggatcagtaagataattgaattatcgaattcacaggtgttttgtaacccccttctattaaccttagtccaagaaatcgaacatactaataatgctgtctcttatacacatctgacgctgccgacgaagaggatagtgtag

SEQ ID NO: 202830 - DNA, 357 bp, Klebsiella oxytoca
atgtcggggctaaatcgcgccagcgctggctgttttacgcgtatgacaggctccggaagacggtttgcgcacgtattcggtgaacgcactctggccacactggagcgtcttctgagcctgctgtcaccctttgacgtggtgatatggatgacggatggctggccactgtatgaatcccgcctgaagggaaagctgcacgtaatcagcaagcgatatacgcagcgaattgagcggcataacctgaatctgaggcagcacctggcacggctgggacggaagtcgctgtcgctctcaaaatcggtggatctgcatgacaaagtcattgggcattatctgaacataaaacactatcaataa

SEQ ID NO: 202831 - DNA, 339 bp, Klebsiella oxytoca
atgcgtgatatttctttggttctggaacgttggggcggttgggcctcaatggatagctccggtgttgactattcgcatattgcagctggttttaagggattacttccgcagtgtggaaaaactcgtttgagctgtactgacgacgatgcacttatcatcgaaggatgcatggcaagactacgtgacaagaaaccatatgaacacagtttgcttgtggcacattatctgtatggtatatctaaacgtaagatagctaaaatacaaaagaaagacgaaaaattaattcgtattgagatacagatggctgagggtttcattgatggttgcttaagtatttga

SEQ ID NO: 202832 - DNA, 1662 bp, Klebsiella oxytoca
atgctttgttattcatatgttagattcagtacaccagaccaagctaaaggtgatagttatcgtcgccaaatggagtttgccagtaactattgtaagctccataatctaactctagttgaagatctcagcttcaaggatctcggcgtaagtgcatataagggaaacaatcttaaaaatggagctctaggtaaatttttagaacttgtagtaagtggacaaatccctagcggtagcacattagttatcgagagttttgacagattatcacgacaaacagctataaaagctcaagctgttttttttgaaattatcagtgctggtattactattgtcacagcgatggataaccgttcttataatcttcaatctgtagcagataatccatttgatcttatgtatagcctaatgatcatgattagagctaatgaagaaagtgaaacaaagagtaaacgagttaaagaagcaataaaatccaaaatagataataaaaaaataattcctagcaagcttccctactggattaaacacaataaaaatgaagatgtcttagagttaattccagaaagagcacaaatcatttcatatataattgaaagatatctatctggattcggcatcaataaattaacacgccatcttaatgaaacaataccaccatttgcaggaaaatcttggtatccactttacctgcaaaaactccttcgttccgaatctctttatggagaacgccaatacaatatgaatgatactctctatattatggataattactatcccgctattatagataaatccaaatttgctgtaattcaagaaaatttagattcacgtgcaccgacccgtggaggaaaaataccctcagcgataacgggtattcgtaaagcttattgtggatattgtcaaggcgttttagtttcacaatcgactaaacgtaatggtaaaatcgtcgatggattgagacgagcccgttgtggcacaaacaataatgccggtagttgtatcaccagttcattcagaatatctattgttgaaagtgcaatcgcagaatattgtagtcagcattttgacttatcattacttgttcctgaatctaataattcaaagttagatttagcaaagtaccgacttgagttaaaacaattagatacaaaaatagctaattacgttaaattcatatctgatggaaatattagccctgcaattatttctgctcttgatgaagctgaaaaaaacaaaaaaaatttacagcaaaagataaaaaaatcagaactcaacacccttacaaatagtaacaatgaaattacagccaaatggaaaaaaataaaaacaaacttaagtgtgtatgacgaagaaaacacacttaaattacgcgaattaattcgcagctcgattaaaaggattcttgtttttcaatatggcccatgggccaacactgggccaataaaaacaccttcaggaaaaataatccaaccatataaaggaaactttagcatacaaataacatttaataatgggattagaaaaactctcgaacttggtgagaatgttaaagatcaagaagtggatactatcaatagaacaattactgaaaatggaaatacttatactccagacgaatatattttaatgattcaaaagactttaacaaaacaaagcacttag

SEQ ID NO: 202833 - DNA, 642 bp, Klebsiella oxytoca
atgactatttacgcctatacccgtgtttcaaaagccgaaaatgaaaccggcacgacagataatcagattattaacattgaatcacaattaaagatagataacgtatattctgatgtcaatatttctggctcaatgccatttcaaaaacgaccagaagcacaaaagttggtatctgtactcaaatcaggcgatattgtagttatagctaaacttgatcgtggattccgtgataccgctgattgcctgaacacagttaagtggcttcaaaaacgaaatgtcactttaagaattcttgatattgcgcttgacgtatctaccccgattggggaaatgattttgaccattatggcttcagtggcaacttttgaacgcaagcggatcgctgaacgcatcaaagatggttttgcaaatggtcgtaaacagggtaaaagttatgggtataaactggaagcagtgcatcgctcagtagcgataaggtcgtctaaacggcgtcaggaagctttagaacgttatgacatgattcgtacaaatctgagtgagttaatcgctcagaacgctactgaggctcaaatgttggctcatttgagaatgttaggccaacctgtttctcgcacaacattgcgtaatgcacttggaaagtag

SEQ ID NO: 202834 - DNA, 375 bp, Klebsiella oxytoca
atgaaaagattagttctagcttctttattagcgttctcgtttggtgcttctgcatattctgtgaatatggaagaactcactaacttcggtaatcaaatgcgtgatcgattttcttcaccgcatgaaatacaaaaagctaataacgcaccaacttgtttcgctatcgtgactaatgaaaaaacaggtaaaataactcgtaccaagttggaattggttggcgagcattcacaaaaaggaacacagcatacctaccatgaagaagataatactggtagcactacagtctggttcgatagtcgtactggcaaagggcagatatcaataatggacagtcaggaagttattgctagtggaacggtgagtaattgtaagtaa

SEQ ID NO: 202835 - DNA, 363 bp, Klebsiella oxytoca
atgcaagaattttggaaaatctttggcagcgaaccttttgtagctatcgcttggatttgtaccgtcgtcagttgcatctatgcttttatccaaaaaaacaatgtgactaagattgaacagaaattcagtgatcttaacatcacacacagcgaactaactttacaaattgatacgcttaagcagagaaatgagactctagaaatctctaataatgatctaaagattcagaatacaattctgcaacaaaaaatagtcaacatcgaaaaaaatgatattcatgataactatcaagaagttcaccaacacggccaaaataactttaatcaaggtgtaattaaaggcgactttatttacaaaaattaa

SEQ ID NO: 202836 - DNA, 237 bp, Klebsiella oxytoca
atgttaccaactaaaggcactcacccagagatgaatgtcctctttattggtggatttattctgaaacagcttcatgagtgtaaaagagggcgtatgacactcatacaattaatgaaagttgggactaaagagctttctgtttctgtagaccacataattttagcgctggactggctgtatatcatatcagccattggctacgataaaaaagaggtttttattaatgaagttgcttag

SEQ ID NO: 202837 - DNA, 1692 bp, Klebsiella oxytoca
atgaagttgcttagatttctattagagatagatggtaagaaaatacgagagataccgttttttgataatttaaatataataacaagcaaaaagaattctgatgcttctggtaatagtgtcggtaaatctacgttgggaagaattctagactatttgtttgatggctcaattaaacctatctatattgatgaagagtttcagacccctaagcaagagattgaacagcttttaactacaagtgaagtatacgtctcattagagtatttaggtttagataaccaatacaatattatcaagcgtagactttctactaatgttgatttacaagattatattttgaatggggaggaggtgacaagtaaagaatataatgctcatatcatgggaagtatttttaatgtttactctgctaaaccaacactcagaaaacttgctccaaaattctttagaacaacacaacatcgcatgactaaaacagttaactttgacaatggaaggaatgtttccaggtctgatattagcactgtttttctatatttatttaattttaatgatactgaaatacttactaaagttcataaattaaaaacaactataaaagggtatgaaagaaatctcaaagcatttaacagtgtgatttctcaagataagattgttagctctataaccagtattagacgagaaattgctaagttggaaaggtctcttttatcgtctgaaaaaggtattgataagttagaaatcgtttctaaaatcaatgcaatagatgatgaacaaaacaccttatcagatgaaatattgtcgttggatttaaagataaaaaatatcatcgaaactaaaaaaatacttagtaataatgaacaagtttatttgttaagtgaattgcagtcaatttatgaatacgcttctgttaagattgaatccacacttgaggattatcggcaagcacttgcattccataaccatcttctgagcactaagcttgagtttgtttctcatgggttaattaaccttcaagaggaacatgaaaaagcgacggtgaggttcgctcagctaaataatcagaagcatagtcttttcgatgaacttaagtctaaaaagaaaattgaagagatatctgatgcaatgaaggaaattggtaaactcgataaagaattagctaaactaacagctattattgacaaaaaagatgatatcgattctagattgttctcagaaagaaaaaacttaactgaattgtcaggggagctggaagctgagcttaccaatgtagcctctttcgaacaaaaatttattgataatttcaaaaaatacacgcatgatttttatggggttgaatataaattcagcctccatttagatcaagaaaaaggtgaatgtatccctcatgtggatgatgtggagtcaaataacgaaggcggtttaaaaagacttgaggttgttacttttgatctggcatacatcaagaccgtatgtgatttaaaggctttgagacctaattttgtactgcacgactctattgatgaaatcgatattcaacatgtccgcaaagtttttgacgagtctattaaattgcctgggcaacacattgtatctatgctgtctgataaactaaatcatgaagattaccagaaatataagccccacattattctagaattatctcaaagtaataaattttttaaaatataa

SEQ ID NO: 202838 - DNA, 309 bp, Klebsiella oxytoca
atgagttctaataaaattactcaagatagatacgaaatggtttatattaaacaaaacaatgttgttatagttcatcgagaaccttatacggtttcaatattaacaagagagcaggcagaggattttggatataatatctctaaaatgaaggaatatgaaaatatcagtattaatgggataccagaggatggatatgaattggtcgagtattatgatgattatcaggaaccagacataacaagaggggaaattaaccattacaaccctgaactggataagatgataactgatttcttaaataaaaattaa

SEQ ID NO: 202839 - DNA, 939 bp, Klebsiella oxytoca
atgcgagtattactagctccgatggaaggtgttctcgactcattagtgcgagagcttttaactgaagtaaacgactacgatcattgcattacggagtttttacgtgtagtcgaccagttattgccagaaaaatccttttatcgcttatgccctgaattacataatcaaagccgcactgaatccggcactttagtccgtatccaactgctagggcagcacccaggatggcttgcggagaatgccgttcgtgctgttgagctgggttcacatggtgtcgaccttaattgcggatgcccttcaaagctcgttaatggcagcggtggtggggctactctccttaaagatccagaactgatctaccgtggcgcaaaagccatgcgtgaagcagtgccagcgcacttacccgtaacagttaaaattcgactcggttgggacagcggtgcgcggcagtttgaaattgccgatgctgtgcagcaggccggtgccactgaacttgttgttcacgggcggacgaaagaagatggctataaagctgaatgcattaactggttggcaattggcgaaatccgcaatagattatcgatcccagtgattgctaacggtgaaatctgggactatcaaagtgcgcaggcctgtcttaacgccaccggctgcgatgcagtgatggtcggccgcggcgcgttgaatatcccgaatttaagccgcgtaattaaatacaacgacacccgtatgccatggccggatgtagtgaagcttctgcaaaaatatagtcaacttgaaaaacagggagatacaggtttgtatcacgttgcgcgcatcaaacaatggctaggatatttgcgtaaagaatatattgaggccacagaactctttacaacgattcgcacaatgaaacactcagccgatatttctcttgcaattaataagctgggcgtgtaa

SEQ ID NO: 202840 - DNA, 861 bp, Klebsiella oxytoca; identical to SEQ ID NO: 141684

SEQ ID NO: 202841 - DNA, 141 bp, Klebsiella oxytoca
atgctgcgcattttgtatctgtcggtgatgcagcgcttcgccaaaacctgggttcaggcgaattcccgggtacgtctcttgtacgcggttctgacggagcaagccttgagcaagctattaagtttgtcacaccacttctga

SEQ ID NO: 202842 - DNA, 2514 bp, Klebsiella oxytoca
atggccggagaagatcttgcaggcagcgtagtctatgaagtgcgcgcagaagttaagcccttattgcaagggggggcgcaggtaaacaaggttctctcggaaattgagtcgtctcttgatgggaatattgcacaattcaaaaaactggaaacaaccgttagttcaacggcacagtctgttagtgctgccaccaaaagcatggggaatatgcggggtgttttcggacaactaggatatcagattcaggacgtcgcggttcagttgcagatggggcaaaatgccatgatggtgtttgcccaacaaggctctcaaatagcttcaatctttggccctggcggtgcgattgcaggggcaataatcgcgatcactggcgcgctagcgggagctcttttaccttcattatttaactcaaaagatgcaactgaggatctggaggtggcccaaaaggcccttgctgataccgtagtaaaaaccgactcaggagtgagtgcgctatctgaaaagatacagcgcttggcagccgtaagctctgatgcagcaaaagctcaaattgcggttgcgatgacagatgctcaaaaagcaattagtgctgcaggaggcgtaatatcagcgcagattaatgatcttggcacttggcggaatagcatgtccgcagcagaaagccagcttacaacccttgagagtaaaggcattgatgcatcatctgcgctcaaagaacttggtgggagctatgaaggcaatatcgtcggcataaatatcctaaataatgtcacgaactctatggccgagacatttggaattacccaaactcaagcggtagggttggtaaaggtattccgaaatttacagaaagaacctactgccgaaaccatgcaggcagcggcatcagctctatcatcgcttagtgagcaaaccggatatgcaaaccctaagcttaatgaactgacaaatgtcgtaaaccagaactatgtttctgctgcaaatgccacggatgcaatcaatgttcttaagaatgccttggataatcttactggtagtacagaggcttcaagacaagctttatcaggaaacgcagaacaattaaatagattggtagaggcagcgaaaaatgaagcagcaactgttggtttcagttctcgccagcgcgcaaaatatgttgcaggactgcttggagcaaattcggctgagctgcaggcaatagacactagctatgacaaaatagaagcatatgaaaaagagcagaaggcattaaaagatcaggagcgagacaggcaagctgcagcgtctgaggcggaggcagcagcaaaacgttctgcggcagctcaacagcaggtagctaatcaactcgatcagctttcaggcaagtacgaaatagctgttcttgagcagcgcggcatgggtcgtgaggctgccgtacttgcttctcagcagcaactgggggcttcagctactaaacagcaggcgcaaaccgcgggagagctagcaggaaagctgtatgacgttgctcaggcgaccaaaacagcgaaagaagaagagcagaagcgtagggatgcaaatcaaaacttcacttccttgcgcggacaagcctcacctgtcgcgggtgttgataaccaattccagcagcaaatggagcaacttaaccagtacgctacgctttacccgcagaaaattgcagaggttgaggccgttcgggcatccattgaacagcaatatcgtgaccaacgcatcgctgctatgtgggaggaatgggcgcagcagaatgcggcaactcaagcagcggctgccgcatttgatggactggcaaatagcgccagtaatgccctaactggtgttatcaccgggagcatgtcggctaacgacgcgctccgctcaatcggaaacacgatcctgaacgacgtcatcaacacgtttgttcagatgggtatgcagcaggccaaatcggcaatcatgggggcgacagcgcagaatgctgcgatcgcaactacgacggccgcacaggttagttcattagatacgaccactgctgccagtacatcatcggcggcggccacaactgcagcgtggacaccggcggcgctggttgcgtctataggctccttcggcggagcggtcgctattggcctcggtgccctggtggctgcgctggctgtaggctcatcgttggccggcaagcgcaagaacggcggccctgtatctgctggctcaatgtatcaggtgggtgaaggcggaaaaccagagatttaccaggccagcaccggcaagcagtacatgatccccggcgataacgggaaggtcatcagcaataaggatatgaatggtggccagatccaggtaaacatccagttttatgaccagactagtggtggccagcattcattccaggcgcaggccagccaggaaggtagcgtcgtgacagtagagggttttcttaccgatgttgatcgcaatggaccaatgtcctctgcaattcaaagcgcttttggtctcggaagaaaagcgcaaggtgcttactga

SEQ ID NO: 202843 - DNA, 267 bp, Klebsiella oxytoca
atgtttggatattatgtcgtattaattttttcttggttggtcacaattgccattggttttattgtgattaggaaggccacaagagcggatgagcaaatttccctgttgaagaatgttatagaaaaacaggaaaaactgctgcaagcgcttgctcagccagtgataaaagaatcagatcatcccgctcccgtgaatgaaaattattcagaggtgaaaagcgatgatcagtacctcctagaggctaggaagaaagctggcttgttataa

SEQ ID NO: 202844 - DNA, 951 bp, Klebsiella oxytoca
atgacaagtatagcaattcttgaagcagttaacacctcttacgtgccgttcaacggccagcagataataactgcgatgtcagcaggcgtggcatatgtagccatgcggccaatcgtagaaaaccttggtatgagctggtcaacgcaggttcgtaaactttctgctgcggtgggaaaattcaactgtgttcatatgaatatggttggtaatgcagggggtgttcatatgaacacccctttgaaaggtggcgcacagaagatgctttgcattcccctgaagaagctcaacggctggctgttcagcattaaccccgagaaagtccgcgccgacatccgcgacaagctgatccagtatcaggaagagtgctttactgtcctccatgactattggacgaagggaaaggctgagaacccgcgcaaaaagacaacggtagacgaaagaacgccgctccgggacgctgttaatatgctggtaagcaaaaggcatatgatgtacccggaagcctacgcaatgatccatcagcgttttaaagttgagagcattgaggatttagacgccaatcagatccccgatgctatcgagtacgttcatcgtgtagcgctagaaggtgagttccttggtaagcaggaagagttacctgctccgaaattgaacatcccggacatcacaatggagtggtggtacagcaacaacttcccaatgcgcatagataaccttgagcgttatccggggcatcaggcgtggaacgatttaactcttacaccgccgatgatgtatgggaaagacactaagtcgccagccctttacctgattgagatattggagcgcatggggtttgacatggtaggtcctcgtatcgaggtggaaaccatgcggatcatgcttggaaagggtaagcagaagatcagggtcatgggcgacgggcgggttaaataccttctctcgctttga

SEQ ID NO: 202845 - DNA, 162 bp, Klebsiella oxytoca
atgaaaggcatgagcaaaaacccgcagtttaacctgcgctggccaaaagagattctggatatggttcgcaaagttgctgaggaaaacgggcgttctgtcaactcagagatttatcagcgggtgatggaaagctttaaaagagaagggcgcgttggcgcttaa

SEQ ID NO: 202846 - DNA, 684 bp, Klebsiella oxytoca
atgaaatcatgcaaaaaatgcggtgagaccaagccgttatctgaattttataaagaattgaatggcaaatttggtgtgcgtgcagaatgcaaaatctgctctaaggcattgaaggatgccaaaacaggaaaagataagacccctgatgggcgcatgcgtctacctgatgtctcgagtctatccgagctatttatttacgatccgctttcaggtgatttaatccggaaggttcagtcaggaaaatcacgcgccggggaaaaatgccgctctccaaattccgagggatattatagagcgtggattgatggccgattatttatggctcataggattgtatggaaaatgataaccggagaagaaccgaaaattatagaccatataaatggagtcgtaaccgacaacagacgagaaaacctcagagcagtcaacgacgctcaaagcgcaagaaacaccacagggacgctcaagccgataggtgtttattggcatgcccctaaaagtgggaatagaaagcactgctggcaatcgataatttcagtaaacggcaggcagatcagtcttggcctgtatgatgatcttgctgatgcaatcaaggcctacaatgaaggcgctctaaagcaccatggagagtacgcggcgcgaaagattcgacataacgagctgatcctctcaaatatgcagtaa

SEQ ID NO: 202847 - DNA, 630 bp, Klebsiella oxytoca
atggcaaaaagagatgacaattccgggttcatttatcactggataaaagcagtgccttttacgagaggcatgcatgaagactatgcttctgcatttgacgttttaatggaaataatcgatgacggttgtataagggctgggttgactatggagaagggagggcatgaatgcatatgctttactgaatcgacaaagcgcgccatcaacaacgatacgtctaagtaccaaccatttgggtttcaatattccaaacgaagtatttttaatgctggtggtcgcccagccatttattctccaatcgctgataaggattttttacacccatgccttcattggagatttatgccgtttgacttaagttcatcgtcaggtaatggaggatttggcattgattttacatgggagcgtgagtggagattaaacgagcctaagctttatgtacagaacgcagaagcaatttacgttccgaataattattatagagatctactcataaagcgtacagatgaaataataaatgatagtattagctcaaatccagatgatatttactatagatatccagatcctggtgtagaagattattttcatgatgttcaaagtaaaatagatgtgttaagtcaatattga

SEQ ID NO: 202848 - DNA, 639 bp, Klebsiella oxytoca
atggcaatgttatcaatcgatacaacgtgcccacactgcaaaaaagataacgctgttatgaagtttgttcagcaaacacctctggcacaaaggtggtattctgtagttttccagtgccaatcttgcttacgattgttggtcgccgaggtcgaaacggaccttactggtggacccaatcacgtagctagtaattcagcctttccggttatagttaataactacagaaatatgcgtgtcaattgtacatatcctcaagctgagcaagtggatgctcctattagtacccctcctcgcgctgctaaattttttattgaagcgaaagaagatttcacccgtggcagatatgaaacaagcgcaatgaactgcagaaaagttattgatattgcgacaaaatcgcttcaccttggcgaagaagacaaacttgtacgccgtatatccgcattgcgagcaacaggcttgattacccaagaaatggcagattgggcgcatatcgttaggattgatacaaatggagcagttcactctgatgaggaattcacaaaagaagaagttgatcagctgttgaagtttacagaggtattcttgacttactcttttactttacctgcgatggttgcctcaaagcgagaaactgaataa

SEQ ID NO: 202849 - DNA, 696 bp, Klebsiella oxytoca
atgacccaaccaatgacccataaccagttaacagaaaacagcatcacccagcttttaaacaacgtccgactggcacgcgataacgcagagcgtgacgacaatcgcgttgaccactctttttattatgcgttgacgcgcgccctggaagagctgcaggaacgccgcaaagccgagagggacagcgagccggtggcgtacatgtacgatggtgaagatggaagggagtataacgggcataacgaattctccggtggcgggaaaggtattccgctctatcgccacgcgcagcagccgttagtacctccagagcagcactgggaggaattgtgccgtcagcacccggaaatgagtattggagatgcgattatccgtgctgcgtggtggaatcactgccgcgccgccatgctgcagtgtgccgaaaataccgagtcgcgctgcggcatacagaccgcgccagcactggattcctttaaaaaaaaggccgatgcgcgctgcggcaactctccggtaattccgggatggattccgataagcgagcggatgccggagaatgatgtatctgtgctcacattcgacggaatgtataagcgagttcatcatgccatgtatggtcattggcagtgctgggagccagagaaaatcactcactggatgccgctgccagccgccccgcaggaggaaccagatggaaaatga

SEQ ID NO: 202850 - DNA, 408 bp, Klebsiella oxytoca
atggataatcttcagcagaaaatcatcgactacgtgacagaaaaccagccaacaaccattagggatatcgttaaagacacagggatttacaggagtctgtattaccgcataacggcagagcttcgcgaaacaggacagttacaggctatgcctggcgttggaatttttgccggcgatgaaggggtgcagaactggcttgagaatggaggcagggaaatgctcagccagtgggggagagataccaatgcagcaagtcaggcagcgaagggagtatttaagcagcgccagaaagatgatgcgccgaagatgtttgagccatataacccggcgcggaattgcgtggtgagcgaatacatggcaagcccggcccgcgctcggctgctggctgtatacgggaggatgggatga

SEQ ID NO: 202851 - DNA, 195 bp, Klebsiella oxytoca
atgagtcgtatgacacttgccgattacgccaagatccacggacaggctaaagcagccagtgactttggtgtgatccagtgcgctatcagcaaagcaattctggctggccgtaacatcatggttacggtaaagccagatggaagtgttgtcggggaagaggttagaccattcccaagcaacaaaaaatttaaatag

SEQ ID NO: 202852 - DNA, 717 bp, Klebsiella oxytoca
atggaaaataagaaatcattgacgacagaacagcttgaagacgctaggcgtctaaaggctttgtatgagtcgaaaaagaaagagctgggaataactcagtactctatagctgatgagctagggattactcagggtgctgttgggcattacttaaacggaaggaatgccctcaacgctgaggtggcctctggttttgcacggattcttcaggtacccatatcagagttcagcacatctatggcaagtaaggtagctgaacaggcggaaagcctgaatggggaatccaatgtaaaattcgccggcgagtataggtctggtaagaggtatccagtgttaagcagtatccaagcagggtcttggtgtgaggcttgtgaaccttactcaatgaaagacattgatctatggctagaatcagatgcgcacattcaaggggatgccttttggcttaaggtggaaggagactccatgacctcgccagtgggaattagcgttccagaaggaacttttgttctttttgatacgggtagggatccaatcaacggaagtttggtaattgctaagctatcggattcaaacgaagccacattcaaaaagttgatcatcgacggcggacagaagtaccttaaggggttaaatcctgcatggcccttggttcccattaatgggaattgtaagataataggggtcgctatagagacaaaattaaggctaatttaa

SEQ ID NO: 202853 - DNA, 330 bp, Klebsiella oxytoca
atggatgcacaagcacgccgccgcgaacgtcgcgcagctaaacaagccgaatggaatacagctaatcccctgttagttggggtgagcgcaaaaccagataaccgccctattctttcgttgaatcgcaagccgaaatcacgcgtagaaagcgctgttaacccgattaacttaacggtgcttgcagaatatcgcgagcagctggaaagtcgcgcagaagccgttgagcgcaagaatcataagctttggtacaaacaacctggcgagcgcggcattacctgcagcggccggcagaaatcacggggtaagagcatcccggcttattttgactaa

SEQ ID NO: 202854 - DNA, 195 bp, Klebsiella oxytoca
atgaaatttggaaaaacaaaatgtaatccatcaaaaaatgatggcgtcgctgacagcgtaacaattggcgacatcacaatcagtcagtttgatgagggcggtttgtggcttgaggacggtgatgttgatgcggggtcgttcgatgaggctcttttcgctgcccatattcggaagttttatgacgataacctgtag

SEQ ID NO: 202855 - DNA, 264 bp, Klebsiella oxytoca
atgcaagaatttaaaggtacgccagggccgtggcatgttagcaatgaaggctgcatgttgatacgtgacgacgcagggctttctattgtggcgaaatacgtgggttacaccaacgacgaggaagaacttgcaaatgcacgactcatctcggctgcgccagaattgctggaagcgctgctgttgataatgggtggtgatttttatatgccaaaagaatcagctgatgttgcacgattggccatcgccaaagcactcggtaaataa

SEQ ID NO: 202856 - DNA, 294 bp, Klebsiella oxytoca
atgaaaacgccagatatctccccggaagcgcttcgcagcgtctccgggaaaatggttgcgtgccgcgcagctgagaagcttggaataaccgttgctcgcttctactaccttgctcagcgataccgcgtcagtacggcttatgtcagacctctgtggagtgaaagtgaaaatcagcggttgataactatgcgcaaaggcggaatgaccatcaaaaatatggcagcagagcttaacaggagtgagtgggccattaagaacaggctcggcctgttacgcaaaagaggattgatatga

SEQ ID NO: 202857 - DNA, 276 bp, Klebsiella oxytoca
atgtcctggttaaaagatgcaattctcaacagaaaggaatttaagtcgctttcatggtgggagaactttatgggcggtcacgttagcattgggccgctgaccttttatggtgaaaacgccatgcattgggcggttaaccttcgaacaaagagatggggctatgtctgttttaggttgcctttccgttgtttcgggaaatggtggcctctgtatttttattgttcaccaaatggcactccccgggctgctacattcaaaattggaggttgcgattaa

SEQ ID NO: 202858 - DNA, 357 bp, Klebsiella oxytoca
atggattacagcaaactgagtgactttgagataaataggcgcgtggcaatttcccgcggcttgaaagtgcaagaggtagacgatagcaagtcgactgggatgacgagcaaatatcatgaactcaagccgcataccgtttgggtaagtgatggttctgagccatgggagcagtatgcacccacgctctgctggtctgatgcagggccgatcatctcagataacgaaatcaacatcctctggaactggaatgaagagggcctacacggtgtcaccgcctctccgctctatgaatatgagcatgaaaatgcactacgcgcagcgatgaccgtcttcctcatgatgcaggaatctaagtaa

SEQ ID NO: 202859 - DNA, 630 bp, Klebsiella oxytoca
atgtcagaccaaggcaaatattatgactattacatggttgaaggtaacgatgtgaaaaagctcattgatggatataactctatcaatgaagcaagagcatccactctggccaatgcggcgaaaactgttggtgcagttgcatggacactgacaagcaactggggtggaggcggcggactaattcagggatttgcatgggataaagacttccagttcccatgcctcattaccatcaagggtgaagactactttgatggaaagcgtgttgttatcgccagggggaaaggaaacacaaaagaaggtagagcatacaataaggagcttgacgctgttcgggatgaggctaatcgaaaactaaagttattgccacagtggaaagactacataatcaaccactacgaaatcatgcgaaccgggattggcggaccttctggtcgcaggttcggatttgcaatgctttccacttatggcgggaaacacccccgcagggatgacgcgcttcttttcggcattccaaataacaatgacgaaaagcacgggaaaattacaatccccgccaacttcaagaaactaacctacggccaattttacgacatcgtaaacgccgaaacagaagaagccgcccactga

SEQ ID NO: 202860 - DNA, 273 bp, Klebsiella oxytoca
atggctaagttacttacgttacttcagtgggctgacgcgaactacgaaacgccaccatcattgtctacgctacggcgctggactcgcgaggggaggatttatccggctccggaactgcatggtaaggaatacaaagttattcctgatgcgtgttacgtagacccgagcaagaagaacctgaagcctaaaccgaagaattttgatgtgccccggaatggtactttactggagagactgactcatggcgaaaaggcccgcacgttacgacgctaa

SEQ ID NO: 202861 - DNA, 945 bp, Klebsiella oxytoca
atgactatttccctgcatacccagactagcgcccctaacaccgcaacggcgaccagcgtatccccgctggagcagtcaggctcctcaaaaacgaaatgttccaaaaccaaaagcgatatttatcagacagtcactgacagcatcatttctgcccttgaaacaggcgttaagccgtggtcctgtccgtggcagcgcgtaccgggcatgtcaggattaccttcaaactacgcgactggtgctgcttacagtggaatgaatatcatgttgttgtggtacagtgcgtcagaacagggattcagtgattcgcgctggatgacctacaaacaggcaaaagcggaaggcgggcaggtacgcaagggagaacacggcactactgccattttctatgcgaccttggaaaaggaaaacgacgccggagaagttgaacatatcccgatgctgaaaaccttcaccgtgtttaacgttcagcaaatcgacggcctggccctgacaactgaaacagtcagcccggaagcaacatttgacccgttgccgcaggctgagaacctgttacggaagagtggcgcaaacatcatcgagaaaggacaaaacgcctttttcatcccgtcaaccgatgaaattcacttaccggaacgatatctttttgcctatgctgccaatttttacgccaccggtctgcatgaactggtgcactggagtggtggtaaaagccgtctgaatcgagaaatgaaagggaagtttggtagtgaaggttatgcgtttgaggagttgatcgccgagcttggaagcgcgttcctgatggcggacctggggattgtcggagcggttcagcatgaaagttatattgcttcctggctgaaagcactgaggaacgacaaacgctatattttcaaggccgccagctcggcatccaaagcgcatcgttatttgatggataaaatctga

SEQ ID NO: 202862 - DNA, 861 bp, Klebsiella oxytoca
atgttttcaattgcagctgatgtcagaaatacgctaggagagtgcccgctgtggtgtgaaagaacccgcaggctctactggactgacattgaagccagcgaactgctcgccataaaagaaggcaatgatgctgtgatgcgctggtcgctgcctgaacgcctttgctccttttccctgactgaacaaagtcacattctgctgatgggactcgcgtccaggctggctttctatgatctcagcagcggattgcttaccacagtggccgcttcaccaggaaacaccggtacccgcataggtgatggacggtgcgaccgtgccggtaattttgtcttcggaacgatggatgacggttatcccgttaaaggcatcggtaagtttcaccggctcaacgcgacgacgctgactgttgagacgcttgcactgcccgatgtcgctataccgaacagcatctgtttcagccccgatagtggcacgctttattattgtgactcgatgcagggtcggattatgtgctgcgattacccctcgctgcaaaaccagcgcgtgttcaccaaaatcgaaggcggcggcgcgcctgatggttcctgcattgatgcacaggactatctgtggaacgcagaatggggcggcagtcgggttgtccgatacagtccggggggagaaatacacagtattctttctgctccagccctccagacaacctgcccggtgcttggtggttcgtcactccacacactttcatgtaccagtgcccgggtaggcctcgcagagccaaccgcttatgacggtgcgcttttcagcattcggtcacctttttttgccggattaccagaaagccgttttgcagcgcacaaaatataa

SEQ ID NO: 202863 - DNA, 867 bp, Klebsiella oxytoca
atgcaaagaattattcctgataaaaattggtgggataacgagagtcataatcgaaatgcggcaacagtatgcccatacgcgaattcgcatagctgccctcgataccatgacagtgtagttctgcttaaacgtagcaaaatgatagcgggcataacggatacaaaagaagaggagttgagtgagtattgggaaagaactaaattttcatctttatgtgatgaagaattaccctcagtttattcaaatgaaaatggaggtatttcatcgatcagtaatttttgccctgaaatatcatataagtatttttactattatgctgattacatgtgtaaatatgtcgatgaaatagatcaggatacaggtgtgcgtattgcggcaaatgataatataaaaaatgactggaagtattcatggatgactgttactcctaggttttatttggattgcgatgtctttagtcatgttaaacagttcaatgaaaatttggggagtgattacttaaaaaaattgcaccccaatattgttcagcaaataagtagaatgaataattgtttagattccaatgacccggcaggagcgttgcacgccgcctctaatattttagaaacaatggcgaaagatatttctcaaaacccaaatgtatcaaatcaatcattgggtggtttttttgaacagttcaagaaaaagtcaagcttatctaataaccttattgttgcgattaaagatatttatgatttgcgtaacaaattacctactgctggacacggaagcctagacaagcctgaattgactatggcagatgctatagctattgcggcaatgacaaaggcgatattagaaattgaatatcgaagtaaggccatctaa

SEQ ID NO: 202864 - DNA, 1083 bp, Klebsiella oxytoca
gtgatagattgcctttttgaacgcttaaatgggaaacaaaaagtgacctctgagtcaaatcgaatttccgctgcaagcaccgcctatgtcgatgcagtatgtcgtgcgtgggggtggtcatggcaagaggtaggacaggccgatgatgacggttttgatgggctagtgtatctgcgaagcaaaaggattaataaagaccgaccaaaagatcgccgatcatggaaacatgaatttactgggggcctaatccaagtccaggtgaagagtggggcaagctacgtggactatacgggtgaagactttctcgaagttagaattccaaatcttgaagtcaagcgagatctttggagcaaatcaccgctgcctgttgtgctggtttatgtaaaggaagcatcgccgggaaaacttgtaagccaagcttggtgggcagatctcaagcgagcggactcctatactaaacggggcacggtgatcgtccagctaaaaaacagattccaatcgggcctggagtgcattcgaccattttcacgacttgctaccggccagcatcgagcgcaggggctcgtggaaattgacatgacgcagaagagtagtctacctgctcgtattaattcgttttctaaaccaattaagtttgcagcctgggatttttatagattgtggaaggccgcaggtgccacgcatcccacacttggtgaggtcatagttaatagaacgggctggtctcacattacgcgtgtaaaacgaccacttgcacgtataatcgcaagctttgagttgttacctaccgccgcgcgtattattgagacagtcgatacatggcataggcttcgaagaggtctaaagactcgaaagtttccaggcggttcatgggcggaatacgactacgtgggggtctctgcgttagtaaagtggcctgcgcgggaagcatctgaggtaatcgtgatacttaagcgtgagactaccctaagtgaagagctgatagccaaagactctagcgcaaagagcggtattagagttataggaacaaaaacttggttctattccgtgtacgagcccggtaggcgtaaaggaaaaacttga

SEQ ID NO: 202865 - DNA, 918 bp, Klebsiella oxytoca
atgattggaataattggtacaacttccatcgaggtaaggaaagatcagggctctaaaattataaccatcacgcagagaggtgcttcaaaaagcaatgctataccttctgtggttgtggtttgcgaagatgcaattgcggcgaaagttcttgatctagtcaatgcggaaactaagggttcatatagggttgttaccgcaggggcttggggtaatatggcgactctattgtatggaatgtacttctatcgaaggcatctgcaagagacaggtgacacaaggtttctagaggttttgtgcgtcacggatggagatataacgcctgactggtttcagaaggtcataaaggaaactcatcgtggaactcatgcacctgatcacataaaagaaactctatctttaatagagcagagtctgataagttttaaattgtcagaccatccggaaaaaacaaaaggaataccggagtacaatcacaaaaagtggttggacgagatttctgaagagcatgtcaataaatacttcgaaactcgccttgcagaattgaattctttcctagagaggagtaagcgtgatcaagagggtggaatcggtatcgagatttggcatattaagaaagagatttcagaaacgctacgcattattgaggtttcccagaaaatgaagttcaaggctgttgatgacttagtagattatcacgcttattataagcgtatctctgctgttttgaagcgcggagatacgctgatgcactatcaccagcatgacatagtgtattcagtgctaagtatcatcaggaaatttaatcctgtacgttggcatgcttacatagcacctgttaaagaggctatggaagaggcgtcatttaatcaaactgaggtattcaggaaggataggttcaacaatacagaaattttatga

SEQ ID NO: 202866 - DNA, 660 bp, Klebsiella oxytoca
atgattgctcatatgttcaaccttagtcctggtatgcaaggatttcttggtggcgctgctgctgtgggaattccacttttttttaatttggtcaaagagatagtttttgataggagaaagagtaaaacagaacgcacttacatcagcgtccaacttgtattccttctggataaatttgtcagtgaatgcgctgaagcttcatgggatagaggatttgatgaaacctttcaagaacctgaatcccctgaatatttaaagacacaagtcgcccctcccactttcgatatgagtacggtgaaaggtgagcacaagtatcttgaaccaacactcatttacaggttgcaatccatcgacattgatttattgaaaatcaaaaataaactccgagaaatgactgacaatccaaatttcggcccaatgtttatgggggattatatcctgttgaggcgtgagctttatatggatttaggattgaatgtcgctcaattatctgagaatgtccgtgatgaattgagaatagacgctgatcatggatggaaacctaaagaaatattacttaaaagcaaggcagacattactcgtatcaaatcaagggcggctttcaacaagatggtaagaaaagcagaacgaaagatgaggtcgacacaacagacattctga

SEQ ID NO: 202867 - DNA, 969 bp, Klebsiella oxytoca
atggataatacagttgaaataataaaacctgctatttttacggataaaaactcttattgggcaatgcattattgcgcaatattagaaactatctatgaacaaaaaacgcttagtcacggattccaatcatcatttatgtctggggttgagcctacattgggtaatctagtaaataaggcaggattcggtttttttaataacattcaacaatctctacaaaattttggccttcaaactttgatatgtcatttcctgactagtagtgaaggtcatgaagtatataaaaatatcgtattaaaaatatcagagttatataactatgactttttgagtgagactcaacagtacggagtttttgtaagtggtaaagattttttaagcggtttaagatttgcacagcaatataatcctgaattgatcggctttaataaaattacattacaagaagctggtcagcatgtttcctatgcggatttgtgcattgtattgaaaggcgaagaaaaaaatttcggtcttctgggagaggttgaaggaaactatggagaaaagttgatgttagaaagcttttggggtaaaaaaaagggaagtttttatagttttgggataggtgtgaaaactcgcgtattccgtcatcttgatcataatgcactgcctcctaatattactggtcaatgggttgaaacaaatcagggaacaaaatatatcgtaattattgaaagtgaccattggataattaaggattttcataatgcaattggcacgatgaaaatatttatgactctagggcccttacaacgctctaattatgacccaacgcttttgccagttattaataaaataaagcaaagttgggattttaatgtattggatttaatggctgatcttagggttttaattaaccctcatagcctttctagtttaggtactaataaactagatgtaaaagtgattccgacaataattatttaa

SEQ ID NO: 202868 - DNA, 1371 bp, Klebsiella oxytoca
gtgagaattgaaaggttgaaactgtatgaacataaaatgtttatagatactgaagtgattgtatctaattctgaacagaaaggaaatttaaagacagtcgtcattgggcccaatggtgctggaaagagttcatttctctcttgcatatgtgatatttttttgtgcgaattaagcgcgaatgccgctaaaaagaagaaaataattagcacaatcggatttaaatatgagttaaaattaactaatgggcggatagtatcagaatcaagcgataacgattatttcaaaaaaaataaaatacttgccgtaactaatagttataaggataaattttatttcccaacaaaaaatggaattagaaattcacctaattacatatatcttgggctaagaagtgcgtctaataatatattcttttccaatgtcaatgatgatatgctgaaatacttaatcaccatattattagatgaaaagaaaaaagacagtgctgtaaaggttttgaatgaattaaacttcaaaaggtcagtgggaatagttataaagaaagggaagaattataataaattttttgaaaaagataacgttcgttctagtcttagtgatggatctctgaacagatttttgtcttctgaatattatattggcaatgaaagtgacatcttttctattttatctgattttaatcagagtaaatacgctgatcttaattttaatttaggtaatgacgacgataatagtgatgtaaatactttagacatagtattaaaacttgttgatgcacgtattctttcggttgaaagattatctctattttcgcatgatggatatgatattaatgaagcgagttcaggcgaatttaatatacttagggtgatgttatctatcatagccaacattgacgataactctttaattttgatcgatgaacctgagataagtttgcacccgaattggcaaattgagttttgcaggcttttagatttggcgattgaaaatttcacaggctgtcatacaattatagcaactcattcacattttattctttcaaatttatctaagttatcatcgacaataatttctatgcaattaagtaccttaaataggaaggtatatttgcaaaatacttatcctgaatcctttgggatgtcaccagaaaatacgctgtatacgtttttcggtataaccggatacaataataagtattttgaacaagatttgagaattttatttgattacatgactaaccacaatgtggaaaactactctctctttgaaaaggctttttatcgattaaatagatttgattttgatgagtcaaaccctataaaaaatttaattttaaaatatatctctctagaaaagaaagaaaattaa

SEQ ID NO: 202869 - DNA, 516 bp, Klebsiella oxytoca
atggattttgtctcagacgcactgtatgacggccgtcgcctgaggttgttaactattatcgatctctttactcgcgaatgtctggggatctgcgtggggcaaaatctgcgggcaggcgatgttattgatatgctgaacactattgccttcaaccgtccattaccgctgatgctgaaagctgacaacggtagcgaatttgccggtaaaatgcttgataaatgggtttacgagcgtcagataaagatagatttctcccgtcccggcaaaccgacggacaacgctactgtagaatccttcaacggccggctacggcaagagtgcctgaatgagaactggtttatgtctttggatgatgcccggtgcaaaatcgaggcgtggagagtattttataatcagagccgaccccattcttcccttgggtggcaaacgccggtagaatatgcccaaaaatccgccgggtcagagcaaaatgacagatcaaacgaaccggtaatttctaataatgggcggagttaa

SEQ ID NO: 202870 - DNA, 408 bp, Klebsiella oxytoca
atgacgctggcgcggttacgtgaatggatcctcgacttgcagacgcgctatggagccagtcagcgtcaggtatgtggtgcgcgctcaacgccagccgcagttcagtgcgatatcgttcggtcgcacgtgattcaggtgccttatgcctgcgtatccgggagattgccgaaacgcgcgtccattatggctatcgacgggtgcatatcctgctcaggcgtgagggttggcgcgataaccataaaagaatctatcgcctgtatcgggaccaggggttgtcattgcggcttaaacgtcctcaccgaaataaatcagcccgttcccgccaaccagtacagcaagggaaccacccaaatcatatctggggcatggattttgtctcagacgcactgtatgacggccgtcgcctga

SEQ ID NO: 202871 - DNA, 267 bp, Klebsiella oxytoca
atgaaaaagtcccgttataccgaagagcagatcgcgtttgcgctcaagcaggccgaattgggtacgcccgtaccggaagtgtgccgcaagctgggcatttccgatgccacattttacacctggcgaaaacgattcggcggcctatcaccttctgaattgaagcatttacggcaactggaagaggagaatacccggctgaagaaactggtcgccgatttgagcctcgacaaagccatgctgcaggatgtgctatcaaaaaaagcatga

SEQ ID NO: 202872 - DNA, 1227 bp, Klebsiella oxytoca
gtgagcgacgaggaagcaagaaagtatccgcatagcgctatttccacttggagcggattcgtctaccaaggcaaagtggcgctctatcattgcctcaaattaattaatgcaggtaatagtggattcgagctacaactggatagcacagacgattttgcgatttacaaagatgataaactcatcagcgcccatcaggttaaagcaaaaatcggcgattatcgcagtaactataaggacgctttagaaaaatcggccgcaatagaattagatagaatagcagggataaaaagatattttcatatatcccaacccataaacgaccatagtgattacatagatgacaatcacgaacgagttgagttttatgtatatggtgaatctcgacactgcgaactcgacaagatagaagagctaacgaaagagattattaaagaaatctattcccgtcaggccatggtttttgatgatagccttatagatgcaaattactgtctactatcagataaaattagctcacatgcgttagccattcatacaaaaatacaaaatgatggtgacgctcaacgtaaagcagcttatcaataccgtgtaactgaagaaagtattcttgcagacataacagactcaaatccatacgaaagaaaggactattacgcgattgagctaaaggcgcgcctctacacccacctggaagaaagactcgctgaatcactcccgggtatgtcggacgtagcctacgaaagagcaagacgtatctacgagcttataagaatctctgagggtggcgatttcaaaacactctgccaattgatgaagccctcagaaaagttttcacgtattcagaactcagatatacgtcgatacacgaacctcgtacacaccattaatgttgagccaattttaaaacgactaccgcactatttagacagtaacaataaattttacgcaccgacggcgttatatttgccagaaccaacagacaaaaaatattgcacctctgaaattatcgctgaaataaaaaacaacgacgatctaggtaggctgttgttcgaattcaacaatcttattgcagccaaggctagcgagagcttcataattgacaccaagtatacaaactgcttcgatataatctccactgacgatcaaaaccgcatcgacagcaacatcaccaaaagtttatgcatcagcattttaacaaaagacgacgcagaggctcgacttaaatga

SEQ ID NO: 202873 - DNA, 666 bp, Klebsiella oxytoca
atgattattgacctcatacaccaagctctagatgcacacaatttctccaaagtacatgagaacaacacgacaagtttctatgttcgagagaacggtacggcgatccgatttgccgttttgcacaggttagataatttgatgaagcctggagatcttaacgcaaccatcaaccagtctgcgccggtggcatttacagctgatcccgcatttaaaaaaaattgcgatttaatctgcattcatcacctcgacaagttggccgaattcaaaaattctgaagaacagatttttgaaatcgaagaagaccctcacttctacaaaaaatacgtactttactatagcgatacagaagttgaagccattaaaggactaaacttcgcaaagctaaacgaattgatttctgataaaaaacaatttgatgcttacaaaaaagaacccacatcagccactaagtacagcgcagctgccaaaatattcattaagctgcctttcttggcacttaatattaataaagttgaactagttccactccgtttacaaattgaagaggctgtggcagaagtcgaccttactaagacgtatgaaacggtacaaaaatacgaccaattaaatgcagaagatctgataaaggagctgattagcgatgaactggcaaatttccaaaattga

SEQ ID NO: 202874 - DNA, 2340 bp, Klebsiella oxytoca
atgaactggcaaatttccaaaattgagatttcaagttttaaagccttcaaacaaattcatctggatttcggtagctcatcacttttgacattagatggaccaaatggatttggcaaaactagcatattcgatgctattgaactattgctaatcggcagaataaaacgaatttgtaatctatttacaaatttaatgatgaacaaaaaaacgaattacgaagacaatctgctttggaataaccgttcaggtaataatgacctgactatcaaaatagagtttattaatggttcgcgtaagctcactctagcaagacatactcccgcgtcaaactttcatgagaaatcaaataatcgagcagaccaatttatccaccttaagctttacgagttacccgaattctcatcaaacaattatgtagcagaaaaccttcgcaacgaaaattttattgaggaactttttggcgaaaacttcaaagaaaacttttcttacttgaattatttggaacagggccaaaaccagcttctgcacacacgagtagacaaacgtaaagaagcgttaaacaacctcttcaatattagtgacgtgaaaacagaaactgatagctgtaaagctatcgctttgcgactcacaaagttcatcggcgacccaaagcgtgctgcagatttatcaaggttagaaacagaggccaattcactcaagaaaatgattcaggctgacttgggtgtaattgaatataaaaaaatctccactgcagtgctacaaccaggctgggataatgagactcccttccccacctactctgcggaaattcatagagaatatattgataacatccagaatcttcaaagactgactctactaaagagtgcaatacaaaccagagataaaaatgattctattgaaaattttattgaacttaacaaagattctataaaaagcttggctcgttttggcaatgatttgaacaagctggatggtctcgaatccatcaaaaaaaaattgaacgagctgctcaaatgtggagggattatcaaacgtggcgctacagtcatcaaggcccatgaggccaagagccttgtgggatggccccagggacgtctggaattgttccttgagcaaatagttacccgtgactcgcttcagcaaaagagcacctctaataccaacgctgctgccgagctgaatcgtctaaaagcagaactagtgagtgagcatactaaactctatcctgacgatcagcattgcccactgtgtggggcggactggcaatcccatgatgctatgctgcaaaagattgagttccgatccacgcagatcaataatgtgctaaatgctgatggtcaggccctgataaatctcactggactaatgtctgcagaactagcccaaattggcgctcaaatacaaggtcggataacgcagttatccgttggctataacagtgccctacacagctccctactccgtgataaagcccggttgccagcgattaaccaactcgcctcccagcttcaagccttaggggtacaattaaaccattcattctccgagaatgatgaagaagtggacactcggattcaggctctaacagctttcatcagaagccagaaagcagctgagacagaacctctgccgcaagattggagaaatatcatcacatttgctttcaaagagttgcaggacttttatattgttgagcttcagaagctgaaagacaaagagctgtatatctcagctaaagcaaacgaggcccagagcgtaaggctccagcagtgcctttatgagctacaggtcattcagcgtgaaaccgaagcagcgcagattgctaaaggcaaagtgactaaactaaaggctactttggagaaaacagaacgccgctactcggaacaaacgattgctgaagttgagctcattttccatatttatagcggaaggcttatccaaaactatcagcgtggtttgggtctgtttattgaaagcaaagatggtaaagagctcaggtttcttacagccgagaagtctgaatatgatgcgattctgtcgatgagctctgggcaggtgtcggcgctcagcctaggatttttcctctcgctgaataaagtttactcccgcgtgccgctgatcctgatcgatgacccgtcccagtcgctagatgaggtgaatatcgcctctttaactgatcttcttcgctgtgagttcagcaatcgccagttaatcgtttcctcgcatgaggatgacatttcctcctatatgcgctatcggttctccaaggctggtctgagcacccgatcattaaacatgcaacgcttagctaaggaagctctagtcgctgcgggctga

SEQ ID NO: 202875 - DNA, 801 bp, Klebsiella oxytoca
atgattaccagtatccaaggtaatagcctctctatggctggcctgttagcaaatgttagcactttgcgagtgctacgcagccacgggaacctgtcaaaacctgtcacttttcgggccactgcaggtggtgcgcaaaacgccgggtggaatgtctcgaccagtatgaatgcgggcaagcgctcaggatctggctatctggaagatagcgtgtctggcgccggcgccgacggcggatgtggggcccatcacaccaccaggtttaaattgccgtaccgtgacaaaaagggcttgcggtctgaaggtatcccggtctatggttatagtgcaccattaaaatctggtgccgggattggcgtcctggaaaagtacaaggcgacacatgacgcgcctagcgtctttttttgtgtcctcacattcactcacccttttttcagcgctgcggttataatccgtgccgcttgcagagttatggtgagttggatgggggcggagaaatccgcgccggttaccttgtacgccggttacgccaaccctgttcagctcaccaccagtgaaattggcgtttccggtggtgggatcaaatcccagtacaaggaggctgccatcatggctactacccctacccaaaatccacaatttatctggatcatcgctgctatacgacgtgatagccaattcgtcactgtaaaaatcttccacgttaccgcagtatctgaacgcgaagcccgtcgcactttagtgcgtgatcacgtttgttttttcgctggccgcatccgtctgacggaggtggatcatgcgtaa

SEQ ID NO: 202876 - DNA, 207 bp, Klebsiella oxytoca
atgatggcagcgcactgtgtgccgccacagatgatagggattatgccaagcaatattgggggatttggggatgtggaaaaggccagccgtgtctttgtacgcaacgagctgatgcctctacagaagcgattgcaggaactgaataaatggctgggtgaagaggtgataagttttgaaccctattcactagagataaaagcagagtaa

SEQ ID NO: 202877 - DNA, 741 bp, Klebsiella oxytoca
atgactaactcaaactccgtttatgtcgcatggcaggaaccagatacccgaaactggcatgtcgtcggtaatttgcaagagcgcaattcggggtatgtttttaagtacaccaagggtgcccttaaatcctccaaatttactcgatttagcggcatgaatgatgtccgcgaaacgtatgtatcagaagagttgttccctctcttcaaaaaccgtcttttgtcacctagacgcccagagtatccgcgcttcattaagtggcttgggtttgaagatgatagcgtgaatccgatcgatatcttggctcgatctggtggtctgcgaagtactgaccaactgcaaattttcaaaaaaattgaagttgatgcaagtgggaaatttgagcatttcttctttctgcatggcttaagctatctgaactcgatggcaaacgatcgagtgtcggaactacaaccaggtgaaaatttgcgtctttgcttggatcttcagaatgagtatgacggtgatgctgtcgttgtccgtgctgataagcctgctgaaattgtcggctattgcccaagatatctgagtaacgatatcaaaaaaatgctattgaatgaccccaaatctgtaacactgtcagttgaaaagattagtgatgatgcaccacataattatcgcttactttgcaagttgtctgggactctaaattcagattgtaaatcttcgcttattcttcaggatgagttcgaaggtattgagtaa

SEQ ID NO: 202878 - DNA, 915 bp, Klebsiella oxytoca
atgccttaccaactggtagtgcttagcccggttgctaacgatctggagcagttaggaactaaagaaaagttttggttctattattcacatgacactgataatttacagttgttcaagtattcaagggctagcaccggtgagcattggtctgaaaaatgcgctgcagagctttgtcacttactgaacattccacacgcgagctatgatttagctaagtgcaatgatagattcggtgtggtttgccagaaccttattccacttggctttcgaatggttatggggaatgaggtcttacatagttcaacggcagattatcctcaacctttgcaaccgggtgaaaaacctgtaagggttcgagagcataccgttacaagagttttaggatgtctggataaggcatcgatccagcctccaccgagttcatataacttaaatgggttaaacgctgcagatgtgttctgtgggtacttgatgctagatgcattggtcagcaatcaagatcgccatcatgaaaattgggcgatcatgctcaataatgaaactggtgagcagtttttatgtccaacgtatgaccatgctgccagtttaggaagggagatgttagatgatgaacgtgatgaaagacttacgaccaaagataaaaatcgtcaaatcccgtgctttgtaagcaaagctcgttctgagcttttcaaagcaaaaaccgataaaaaacccttacttacagttgaagcttttcagcatgctgttgagggaagagttgccgctcgcgaccattggctgggtaagctgagcgctttaacagaagattccattagagatgtgtttaacaacgtgcctgcatcgtgtatctccgatagcgcacgtgagtttgcaacactcatggtaatggaaaatcgtagaaggctattagaatga

SEQ ID NO: 202879 - DNA, 171 bp, Klebsiella oxytoca; identical to SEQ ID NO: 104840

SEQ ID NO: 202880 - DNA, 309 bp, Klebsiella oxytoca
atgcgcaatttcattattttgttttgcttggccttacctttctcagtatcggcaatcgttatgggaggaagcaatctcggattcggtgggtatcctgaattcactgagatagcccccacaccgccatacactgatgaccaatattcgtgggagaattaccggcgagaagtcgaggattacacaacgaaagcaaagcaatacctggaggatgctgattctgatattcagaggattcaggaggctcagcaggatgccatccgcaaagctaatgaagtagttcaagagtacaaccggaattcacaccaataa

SEQ ID NO: 202881 - DNA, 249 bp, Klebsiella oxytoca
atgaaaaaggctttagggaagaaagaattgctggtaatagtgccgttatcaatgagcagtatcgatcgccttgaacacaagggacaatttccaaaacgcttttatattaccgacgggcgctgtgcctgggatggtgatgagatcgaacagtggctcgacgaacgtaaggccaataaccccaaagaatttggtggcacaaagcctgacgtcacaaagagaaaatatcggccagtgagtaatacagcctga

SEQ ID NO: 202882 - DNA, 765 bp, Klebsiella oxytoca
atgcaagattttatctatcataatccggtaaaaattctttttggtcgcgatcaaatttctgcgttagcacaagaagtcccgcagggtaaaaaggtcatgattgtctatggcgggggcagcgttataaagcacggtatattgaaacgcgtaaaagagtccctgacaaacaccctggtttatgagtttggcggtgtagaagcaaacccacattatgaaaccctgatgaaagccgttgagattgtcagagcagaaaaaattgattttcttctggccgtgggcggcggttcagtgatcgacgggactaaatttgttgccgccgcagccctctacgaaaatgatccatgggagatcgtcaagagttatggcggcgtggtgaaacaagctctcccttttggatgcgtgctgaccctggcggccacgggttcagagatgaataacacggcggtgattaccctcgctatcgttatgcctgcactatggcgcttgtgcaaaaaggaaaaagcagaaaagctggctcagtacggtgcgcgtgtctggaatattcctgagtctgatagcgaaaaaatggccgatgaggctatcaatgccaccgtggaattttttgaactgatgggcgttaaaacccgactttctgattatggtctgggcgcggaagatatttcagccgttatcggcaagttaaaagaacatgggcatatcgcattaggtgaacatggaaaaattactgctgaagtggcggaaacaatactgaatatggcactttaa

SEQ ID NO: 202883 - DNA, 249 bp, Klebsiella oxytoca
atgaagagtaaaccgccaaggcagctttataaatgggacagggctcgggtaaaacttgctaggccagcaggaaacatgatggcatctttgcctaccggtactgagggggaagtaagaaaacgagggcgtggtctggaatttacttctgatgcatgtgagtgctgtggtgttcaggtgcgaatatcgagaatgagccgcgatgattttgagcttattgaactggatgaacaattcaaaagtgagggctga

SEQ ID NO: 202884 - DNA, 591 bp, Klebsiella oxytoca
atgaggactctggggtggtgggtgcttgcggttggtgttttttggctgattatcgccctcaatatggacacgagtgttgagagcagtcctggggttcgagttatgaactttagcttgattgcacaacaacagaatcaattgcttcttggagcattgatttctttcgcgggattgatgtgtgtgatttttggaaaaaaacatgccttggtaaatatggccgccgatgtaaagtgtccgttctgtgccgaacttatcaagccagatgcaatcaggtgtaaacattgtcatagcgaccttcctgctaagtcctcttcggtggataaggatcatcttttggctgagttcgagcgctttacctaccttaatttttttgatgaaaacggtgctctctgtgaatccaagattcaggagtttaccgatattggactcaggtatctggacgcggttaggcaggttagtggggataaagcgacggcagaaaaaaggttgcttagaaagattgatgagcttgcttctatgtttaacagcgacgtagctgagcaattttatcgtctatgcgtcaaatactctccatggttggttatgggctaa

SEQ ID NO: 202885 - DNA, 294 bp, Klebsiella oxytoca
gtgcgcaagctggggtttgagatttacgccggcaaaggctgcacggagtacggcgtcgccggaaccatcgccgaaatctgccgcaatattttcaccggcagccatcgcgcgctggcggtgtcgtgcattcttgacggggaatatggcgtcaccggcgcggcggctggcgttcccgcggtgctgacgcaaagcggcgtgcagcagattattgagctgcaactggccgatgatgaagcggagaaattccgccactctatcgaagtgattaaagccaatatcgcccgtctaccgtga

SEQ ID NO: 202886 - DNA, 2289 bp, Klebsiella oxytoca
atggcgtcggtaacggcctgcgccgcgacctatgattccctgcctgcgcctgcggcatcctacggcgaaaagcaggagtacgagctgtacctcagcgtatcggtcaacggcaatattcttgccggcgccgttccggtaaaggtcagcgctggccactactggatcgcggccagcgtgttgcagcaagcgcatattcccctgcagaccggcgacgcgctggttgatgtgacgacgctcccctcggtaaaagtggaatatgaccagccggatcagatcctcaagctccaggttccggacaaatggctccccgagcagcacatcggggggaccacggaacaacctggccagaccgcgataagcagcccgggaattttatttaactacgacgcttacagcctcttttcatccggcggttcgcaaaccaccagcaccttcaccgaaacgcgccttttcggcccgccgggcgtcctttccaataacgccgtgattcggcaaaactggtcttcgacgggctacgagcagcagggctatatgcgctacgacaccctgtggaagtacagcgatagcgaccaaatgattagctaccaggccggggacgtggtcagtaacgccctgacgtggagcagttccgtgcgcatgggggggctacgcctgagccgcaacttcagcgttcgcccggatctggtgacatatccgctgcttaacttatccggcagcgcggcggttccttcaagcgtcgatctgtttattaacggctataagagcagctctgcgcaaatcaatggcggcccctatacgctgaccaacgttccctggatcagcggcgccggcgaagccaccgtagtgaccaccgacgctctgggtcgccaggtctccaccagcatccctttttatgtctccaataccctgctgcgggaaggactgagcgattttgatttcaccctcggcgccctgcgcaacaactacggtatcaggagtgccgattatggcgccggcgcggtaagcgctatttatcgctacggattcaacaactggctcacgctttcgacgcataccgaagaccgcgaagggttaaccaatgccggcattggcagcgatatcggcgtggggaatctgggcaccctcagcctgtcgggcagcgccagccgtggcgagggagacggaaaccagttcacctcgggttactcttactatggcagtagctggggagtgagctatcaacatatccgccgcagcgccggctacgacaacctcagcacctatgggtctaccgccacgctcagccgtcagtcagaccaggccacgctgagcctgagtccgtggggacgaaccctcggttcttttagcattggctactttgatatcaaagccgaggataattcgcgcacccggctgctgaacctctcctggagccgcggcctgtggctcagcagcagcctcagcctgagcgtcaaccgcgatctgcaggaaggtagttacgccagcatgctgcaggtcatcatccctttcgattcgcaaacctccgtccagctaagcggccagcgcgccagcgccggacaatggggagaaaatatcagcgtcagccgctctgctccggcagaaggcgggctgggctggaacctcgcccattcgatcggcggcgataactatagtcaggcggatctgacctggatcaaccgcgtgtcaacgctgagcggaggctactacgggtcgcgcgacgatcgtcacagctggtttgaggccgcgggctcggtggtgctgatggataacagtctgtttttcgcccggcaaattaacgacgcctttatcgtcgtctccaccggcaactacccgaatattgcggtgaattatgaaaatcgcaaagtcggcgtgaccgataaaaatggtcatctgctgatcccgtgggcgacggcgtggtatccggggaaagtcaccctcgatacgctaccgctgccaacggacaccgaagccgtcacggtggagaaacgcatcgccgtgcgcgaaggcagcggagcactggtcgatttcccggtgaaccgcgtgcgctcggcaaccctcgtcttcgtcgatgccagggggcaaccgctgccggtcggtacgccggtcgaggaggttaacagcaagcagcgcggcctggtgggctatgacggcgtggtctggttctcgcaccttggacgccacaacgaagtcaaaataaacgccggagagcttcgatgcagcgtccagttcgaacttccgtcctcaacgccggttccgcagcggataggtccggtcagttgcccctcttaa

SEQ ID NO: 202887 - DNA, 510 bp, Klebsiella oxytoca
atgacgttagtagaatgctttgaaagtcataatagagaattcattgtagctagccggattcgaaaggtggaatttaacctttggaaaggtaagaaaagttatgaatcgtttcctatagtttctgaaaaaatcattctggatagtaattttatcattaccggagttggtggagctgtccttacaaagaaacatattcacagcagatatattcaagatgataactttattactatagctccaaagactgatgatgtttggataagcaaaattattgagctttctaattcaaaagtagtggcatgtccagaggcattaaattatgttcaagagattgttcattctaattttactcttagctcagaaaatactttgattaatcaacggatattattttttcgttttattcataaatttcttaccaagatacaggcttactgtggtcggctcgacactaacaatgatttatctattaagagagttgaagaatacttcaaagcaaagaataaataa

SEQ ID NO: 202888 - DNA, 1419 bp, Klebsiella oxytoca
atgactcttgtaaataacgttaaatgggtaagtatatcccaaatagttaaagtttttagccaaatttttggcatgctagtcttttcaagactacttggtcccgtggacattggcataatggctatggcacttgttgtggttaattttacaaatatatttagagatttaggtacttctgcagctgttatacaacaacctcttgtctctgataatttaaagaaaacagtatttacgattaatataatttttgggcttattgttttcgtggcggttttctttttagctccttgtattgccttattttttaatgagccaaaattaataagcgttattagattaattgctttaagttttccaataaatagcgcaacagctattcacctgtctttgctagaaagggattccaaattttctaatgttgcttgtgtagaggtcttctcttccttatctgctttgcttgttgcgattttattatctttctatggttttggtgtttacagtttagttgcacagacactgttgtactcaactttatcagcttcaggctttatttattattcttcttggaaatgcagtgttaaaatagataaagaggaaataaaacgtattctttcatttaccacaaatcttttaagttttaattttttgaatttcttctcaagaaatttagaccaagttattataggtagaaatttttctgcggttgttttagggcattactctcttgcgtatagattaatgttgttcccaattcagaacattacctttgttttaacaagatctctttatccagttctaagtcgtttacaggacaatccgaaagaagcattttacatttatatgcaatcaatcaaagctattgctatcataattccgccactaatggcaggattagctttggtaagtaatgatttcatacatcttttttttggtgagaaatggttgcctgttgcttcttttttagtctggttagcacctgtggcaatattgcaggctttcgttagtaccactggatcggtatttatgtcgaaaggtaaaaccaatgttttattagcagtttctgtctataatgcctttctacaaattggtgcttttattattggtggcttctatgatatttccatattgattaaattttatttaattgcaaattttttaatgtttataccaaatatgttccttgctgtaaggatattatcgggtaaattttcagaatttctcttggtattaataaaacctcttttggcaacaggtttgatggctactgtagtattgctctataatagtttcttcgtgcatttagaaactaatcatgtaataaaatttacttccaatattcttttaggtggagttgtatatataagttttatatttatatttgaaagagattttatcctaaaaagaaaacgcttgcattaa

SEQ ID NO: 202889 - DNA, 543 bp, Klebsiella oxytoca
atgacagcagatcagattatcgagggcattctcggtaaagaagggggttacgtaaataacccgaatgataaaggcgggcctacgcgctggggcatcacgcagactaccgcccgcgcatatggttacgcaggcgatatgaaggcgttaccacgggaaaccgccaaagccatttacctgtcgcaatactggacagaaccgaagtttgaccgcatcgccgagttgtcgccatccattgcgcaggagttatgtgataccggcgttaacatggggccgcgcgtcgccagtacattcctgcagcgctggttatcggcgctgaatatgcagggcaagctttatccggacctgaagccggacggtgcaatcggcaacatcaccatcgctgctctgaaaagttacctggcagttcgcggcaaagatggcgaaaccacattactgaaagcgctgaattgcagccagggtgctcgctatctggagctagccgaagcgcggccagcaaatgagacgtttctgtacggctggataaaagagcgggtgagcctgtga

SEQ ID NO: 202890 - DNA, 849 bp, Klebsiella oxytoca
atgaccagcaaattaaccagagagcgcattgagctaatcgctaactttcatcgcgcaatggtgctaccgccgagtcacgatgaaattgaagaactggcccgcatcgcgctggccgcaatggacagcgagccggttggggaattctacgaggagggcccgctgaactggtatcaaatttcggatggcgaccgtgttccagccagcagacgcatccctctctatcgccacgcgcagccagcgccggtaaataaacaggagccgatagcatggctcaatgatgcttacctggcgcgcggagtagtcgatggagaggccggtagcgaggatgcaggccctgggtacattcccgtctatcgcgagcaagcaacgcagccagcgccggtaatgtcggatgaaattctctcggcaatggaagaggttcttcgtatatccgaccgtgagcatgaagcatggcatcgagcaaaggcaggaatttccgcctgccgcgccgccatgctccaggctggcaactctccggtaattcccggctgcgatggtgctgaacttatgccatcaacgggagaggttattaagctgaacccggccaacaacaaactttacacgactcagccagcagtattggtcaactctccggtaatcggcattgacctggcatccggtccagaccgttccgtcgaggttcgctacgtttctcctcccggttacgtgatggtgccagctaaagccaacatcgcaatgattagggcgggaggaaaagccgcgcgtgagtaccaggaggaacacggcggcaacagcccgcaggtaatctatcaagccatgctcgcagccgccccgcaggaggtgaaatag

SEQ ID NO: 202891 - DNA, 1173 bp, Klebsiella oxytoca
gtgagttcaggcgcaaaagtagtaaccgcgtttattcgcgaaaccacaccgggggagacaccctctgctggtgtatggaacctgttacgccgttcttcgttcgggctgatgccaacgcagaacaccaacgataacgacgaaatcggtggtgaccgtatggcgcagggcgtttcccgtggcacgattgatgtcggcggcgatgtcggcaccaaatttcgctggaatcagcatgatgattttctggcgagctgtttcggagcggattggctcgataatgtgctgacgatgggcaacaaccgcattactttttccgtttcttcatacgctgatgatgtaggtatcgcgcagattgcccgcggttgccaggttgccactttccagattgaaatcccgaatgatggcgacataactgcgaccattaccttcgtcgggcttgactgggacaccaaagcggatgacaccagctatttcactaacccggtggatggtgctggcgcgctgcgttattcgtttaaggaagtgacaggcctgagtctgaacggggtggcgggtggtgccggcttctgtgtggatacgtttaatatccagtttgataacaacatgcagactcagcgttgtattggtaccggctcagcatttgccggcgcaaacattccgacgacctttacaccgtcaggccagatcacgctgtcatggtccaaggcggcctgggagatttataaaaaaaccttcaccggcgaaacggtgccgtttaccttcacgctggagaacgccgaaggcgcttataccttcagttttcctgaagtgcagatttctggcgactggccggacgccgggaatactgacatcgtacaggttcagctcgatatcacggccgccaatacgccgccaaccattacccgcgcgccaaaagtaccggcgacggcaatcagtgttgcgccagccacttcaaatggcgcagtcggctctacggtgacattaactgccacgcttacgcctgctgattcaacagatatcgtccagtggacgtcatctgaccctgcgattgccagcgtagtttctaccgggcaaaaaacggcgaaagtgacccgcaatgctgccggaaacgccacgatcaccggtaaggcccgcacctttacggcaacgactgaaatcaccgttaccgcgccttaa

SEQ ID NO: 202892 - DNA, 3357 bp, Klebsiella oxytoca
atgacagaacaaacttcccgcttggccattgttatagatagctctggggcagaaaaacaggctgacagccttgcagttgcgcttgataagatgactcagtctggtgataaagccgttaccagcatgttcaaagtgacaaaagcgactgacgaggaaaaagacgctctcaataaattgcgagcagtcattgatccggttggtgctgctattgataccgttggccgccgctttactgagctgaaaaaatacttcgacaaggggctaattgacgaggaagagtttcgctctctctccaaaatgctgaatgatacgaccgatgagttaagcggcgttgcacaagctcaacgagaggcagaaaaggccagcaaattagctgctgctcagcaggaggcccagacacaggcattccagagaatgctggataaaattgacccattatccgcagcgcttcgtaatctggatcagcagcaatctgacctgaatgaagcttttgattctggaaaaattaacccgtcacaatacgatgcttacagcaaaaaattgatggaggtgcgccgggaagtcaccggaacggctcaggcagaacgagaagctgcaaaagctcatgatgaacaggtagccgcgttgcgacgcctggaggctcagattgatcccgtaggtgaggctttccgacgtttaaatgaacagcagcgccaactggatagcgccaaagcgtctgggatgctctcgccgttagcctatgatcgcctgaatagcaaacttgctgaatcccgagacgcattggagaaaacccaaacgcaattgggtaaaacaggccaatctgcagctcagactgccaatgctatgcgcatgatccctgctcaaatgacagatattattgtcggcttatctacaggtcagtcgccattcatggtgctcatgcagcagggcgggcagttgaaagatatgttcggcggtattggtcccgcgattaaaggtgttggcggatatgtgctggggttgattaaccctgtcactctggctgccgcggctgtcggtgttcttgggctggcttattacaaaggctctcaggagcaggacgagttctacaagtctctgacccttggcggtaatctggttggtaaaacctccgggcaattggcagatatggccgcccgtgtatcggtcgcagctaacaccacaaccggtgcagcagcttcaacgctgaatcagttggtgtcatccggtaaagtagctggcgattctctggagcgcgtgacaaccgccattgttaagatcagcgatgcgacgggtattgctacagaaaagctggtgagcgacttcaacgatattgctgctgatccagtagcggctataaccaaacttaacgaccagtaccactttctgacactggcaacctacaaccagattaaagcgctacaggatgaaggtaatcagcaggatgctgcacgggtggctactgatgcttacgccaatgccatgcagcagcgtgcgaatgatattcatcagaatcttggtcttcttgaaagtgcatgggactcgctgggtaaaacagccaaaggcgcctgggatgcgatgctcaacattgggcgtgaacaaacactaacggataaattagccaccttaaacgaaaatattgctgaagcccaaaaagggcaaaaagatggtgggttctggaacagttttagcgcgaggtttaccaacctcccagagatgataaaacagagagacttgcttgaatcagttgccaatcttcagggggatgtaaccaaagggcaggcgaaggctaaggaagccgaacagcaaagaattaaaacgcagcaggaagcagatcgcgttaaccagcaatatctgagcaatgcggataagcgcaataaagctattaagcagcaaagcgagttcctgaaggcaggtgcaattactgcagagcaatatgcaaaaaatgtttctcgtattaacgagatgtacaaagatccgaaaccacccaagacgccaaagggtaaagcatataccgaggacgcagcaacccggctgcttgatcagataaaccagcagactgctgccatgcagtcccagctggatgccagtgacaagcttaacagcgcgacacaggcacggatcaagttcgagcagcagattgctgacctcaaatctaaaacgcagctcaccgctgaccagaagtcgattctttcccgttcagatgaaatcctccaggcgtataagcagcaggaggcactgcaaaattccgtaaaaaccctggacgattaccggaagatgcaggaacaggtaaagacgaaggatgagcggaccaacgatctgcttaaaacccgtcttgaactgctggagaaggccaaagcaacggggcaacttaaacccggtgaatatgaaaaaacgcgggcagatatttatcaaaacaccgatatgcaactgccctcgacggttcgtaatgttgtaggaaacctgacacccacaggagggcgactctctggaacttttgaggggatgcaggggcaaatcaatgaatatgaccaggcgcagcaggagctccagcgctggctggcagctcaggaggaagcttatgcgaaggccggcgaaataactgccgagggtgaggccagaatgacgtcgattcgtcagcgtgcagcggatgcaaatcaggtcatcgaggctcagaaaaacaccatcatatctgcggccacgcagtccttgtttgacagtaccgccgacatcatgcgaacggggtttggtgagcaatcggcaatctacaaggttgcttttgctgcgagcaaggcattcgctatcgctgactctatggtgaaaatccagcaggctatagcaagtggggcagtaagcgcgccttatccggccaacatcatcgctatggcctcaatcgctgcgcagactgccagtatcgtctcaaatatccaggctgtttcaggagttggcttcgcctccggcggttacaccggccccggtagcaagtatcagcccgcaggtattgttcacaaaggagagtacgtctttgaccaggcgtcaacgaaccggatcggcgtgtctcagcttgaggcacttcgaaatggccaaccgctagatgcaactctggggcgtacagggtttggtactggtgttcagaacgttaacagcgataaccgtaggcaaacaactgtacacgcgccgattaatcaggtgtttcatctccagggtattactccggagcagttgagcgctacactcaatcagaataatcgacagctttccaggcagttaaaaggtgaactcacaaaggaggttaccatgccacaaggggcttttggcaacgctctaaaaggaaactatacacgacacggtcctaggtaa

SEQ ID NO: 202893 - DNA, 336 bp, Klebsiella oxytoca
atggaagcgttgttaacatttacatttaaagacttcatagcttttataattcctctttttattggcggacttatcttcaataggagacgtaaacgtaaggaggtccgagtgaagttttcatttctttggcttgttttgatagtcggtggaattcttgaaataagcgatgacatctacacaacttattcctataggcataatcacttatataataatgatacgcttacaaccgtgtttaactatgattttgcaaaaattgttttttgtggggttttgatttttgtttcaattgcgcttcttcttcaggagttgcttttaaacaagcagtcacattga

SEQ ID NO: 202894 - DNA, 189 bp, Klebsiella oxytoca
atgttttatctatatgaaatacaggcaataaatcatataagccagtacatgttaaccaaaactgagagtggcggggtgataacagcgtttgatgccgccagtgatgaaggggccatggatatggcatcgatttatatcactaatacactcggcaaaaaaaaggagtttggtatttcactgtctctgtaa

SEQ ID NO: 202895 - DNA, 288 bp, Klebsiella oxytoca; identical to SEQ ID NO: 182627

SEQ ID NO: 202896 - DNA, 384 bp, Klebsiella oxytoca; identical to SEQ ID NO: 197970

SEQ ID NO: 202897 - DNA, 276 bp, Klebsiella oxytoca
atgtctcaaaaaaaagagcaaaaaacagcagaaaaaccaactgcagggccactgagaaaacacagaactagaactgaaaaaatagacgatttgaaaaaacagatcagcgatttgagaaaagctgaaagagaagaacgccagagagcaagagatgaaaagttacttgctattggtaaagctgtatatgagaaagcaggtaaacccaaaaatatttatggcttgcagcagtttgttgagtcagaagaatttaaagtagattttaaaaacgatttttaa

SEQ ID NO: 202898 - DNA, 279 bp, Klebsiella oxytoca
atgggaagtaaaaaaacgttagagcaaagaatggcacttgcacaagatagattatctaaacttaaaaaagaagcgtcagagaaggaaaggaaagcaagggagcatataaaatttaaagccggaggagaagttactagggtgtttggtttagattatgacgaagccgttttgttgggttttctagctgtttatgacaagctatcagaagaccaaaaaagacagataaaaaaagacggtgaaaacatcataaaatcacgtctagaaaacgctgagaagtga

SEQ ID NO: 202899 - DNA, 366 bp, Klebsiella oxytoca
ttgatttttataagcgagatcgatattgaagatattaaaaacgatttcattaatgacgaagttaatgaagatgtttttaatagatgtttaaagctgtattacgctatcgatgatgcaatctataacaataaaaaatcattgtttgaagcgttgatatatttgataaataaagatcgtgaaaataaagaccataagaaatcaattataactgattatgatcttgtgtatttaacactgaataattatataaatatctatgagctgaaaagattgtttttattacagaaaaatatcaatgattttgattttaaaagtatgatgtcagaaatagagaaaattaaaagagaggttgaagatgggaagtaa

SEQ ID NO: 202900 - DNA, 1260 bp, Klebsiella oxytoca
atggctttatatagattagaaatgcagaacgttagccgttcggatggtgtcagctcagttgcaaaagctgcataccgtcatcgttgcgtcatgttcgatgaacgaacaggagaaacacacggcgagaaatcgctagaccgcgacgatctagtttatgctgaaatattagcaccagataacacgcccgattttttaaaaaaatctagcaacgatttatggtgtttcgtcgaaaagacagagactagatcgaactctagaaccgccaaagaattcaaaattactttgccccgtgatttatcgaatgaacaaaatatagaattaatgaaagattttttattaaatcatttcgttgataaaggcattatatgtgactttgttttacataatgataaagataataaaaacccacatgcacacgttatgattacaacaagagaaataacgccgacaggttttggtaaaaaagtaagatcatgggatgaagaaaaaacgcttcaacaatggcgtaaagattgggcaaaagttcaaaataggcatttaaaaaatgcaggcttaaaatctcgtgttagtcatagaacattggaagcacaaaaaaatataatgatcgatttagctaaaaaagcagaagatgcaaaagattttgacaagtctattttatatctagcaaaagctattgaactagatcgcccaccgatgcagaacctatcacgtaaaaaatggcgttctaaagaggggcaagaacaacgcaaacgtgaccaagcgatcagagacaaggcaagagaagatgcaagggctttcaggatgttgaggggtgttgcagttgttgatgttgcttcattcacagttcaaccgctacagaaaaaagagcattcaaaaaataatgatttttcagttaaaaaatcttggtggcgttccactgttaattttataaaaaatattaaagctaagttctcaactaaaaaagatattaaaaacgttcacgaaaaagaacctgagttaatgactgatccggtgactggtttgattattacgaagcagaaatggcaagagatggcagaaagagcaaacgtaaggactccacaggcggagatttcgtacaaggtaaggcaatcgggcggggaaggtctaaaaacggctcagaatgcgttacaggacgttttagacgtatcagagggtaaaacgttaaaggtgaagtctgtgcatgttccgggttctcgtaggcgtcgagtgatagaccaagacagcagtgacaagggttag

SEQ ID NO: 202901 - DNA, 861 bp, Klebsiella oxytoca
atgatactacaaaaagaatatagcagaagtgattttataaatcaaattatatccaagcctttttgcactgatgactttaatcgtgacgggatttatagagcaaacaaaagacaagctttaaacaagatttacattgaacataataacgatagttttattaactctatcgtgtttgatatagatacagaaacagcggcgatctcttggcaggatgccaacatacctatacctaactttataactcaaaatccggctaatggtcatgctcatttgttttatgctttaaatagcccagtttgcattacagataaagcaaataaaaaacctcaaatccttttaaagggtgtcacagaaggtttaacggctcgtttaaatgcagatgtatgctacacaggcaagataacaaagaaccctttaaatcctcattggaggacgttttggaataacacagaacgatatgaattaaactatctccgcgagttcatagatgaaggtaaaagactaacaaaaaaagtattggttagaacgtcagaaaaagaaggaagaaacacaactttatttgataatcttcgcttctttgcttatagcgtgattttcaaataccaaaaggcaaatgatttttgcggttttttatcagcattagaacaagaagcagacattataaacaacgagtttaaaccaagattaggtcacaaagaaatccagcacacaataaaaagcataagtgaatgggtctggaacaagtttgattatgaaactttcagtgacatacaaaaagcaagaagagaaaaaagaacaataaaacaaaaagaaaaaacaaaaaataaattatcagagatgttaatgataaatgaggagtag

SEQ ID NO: 202902 - DNA, 1509 bp, Klebsiella oxytoca
atgccgcagatttacgacatgggcctgaccggtgattatcctgtcaggtttaataacgagcaaacagcgataattaaagacgatatatcgctgtcaaatgttccgtttggtatggtaccggtcgtcaggcgctgcgctataaacccgagagttaatggcaccggaattggtatctcatggtcaaagatgttcgatggcagtatcagcctttgtgagatagcaaactttgatatcgatgtactgctgaacgggtgcgacctgaacagggtgtccatgaatcgcatcaggaatgcctggcgctatatgattcttgaattaagcgccagtaccttcgggtctcagaatgaaatacatcttaacgatatcctgcacgttggctcgccaaactgcatcatgattaagaccacggcccgacatgcccgtatttatgacaactatcttgaacaggcgacagggaccgacgggcaggcgctcatagggtttattgatgcgacagccgttgatgcgcctgcttacgcgggaaacgtatcagccggtcgttactcgactattatcagggataaccggatagatggtttctcaaagtctaaaaactttgtttacaaatatcagccaaagggccagacgtacggggaaattgaagacgtatcaacagtaggttctaatgtcggtctggggtcaaatgccctgacgctggttgatgagactggtgcgacggtggacagtgttccgcttctgtataatcagcagcagccgtgctcgtttgtctttaaggggccacgctttggcaaatggaacgggtacacctcagaggggcagttttctgacgttatcaatgggctgaatgtcggcgcgttcggcacctctctctatggcaacctgctgtctaattatctgcgtgcccgcggtaatgaaatagtgctgatggcgggtttcgccagcaccggcatttttagctatgctgcctcatcgggactgtttgaaccggagaaatcatacattatcgaggtggaggcatactgcgccagcggtactgaagacttcactttcggcggtattgtttccgggacaggtaaagtctcgacaactttcacgctgtcaacgacacccagaaaaatgcgggtggagttcgtgacaggaattgctggctcctcaaacggtatttacttctcacgctcaaataacggcgcggatattgtgattaagcgcgtccgcttcctgaagaaataccttcatgaaaatgccatgactctcagtgcatcgaaaacactacagataaccagccagtccggtgagattcagatagccgccaacggtggttatcagttccctgcatacaaaatactgagattcatcaatggctatctggtggagacattttcacaaatcaataatgccgcccagatagatatcgcctggacatattcatcagggttcctgacggtaaacgtcacaggcacaggcggctctaaacaactggcagtcagtcagaccagccagccgggataa

SEQ ID NO: 202903 - DNA, 873 bp, Klebsiella oxytoca
atgaaaagaggtatagtttctcttccggcaaaattaaaccatattcctggtggtttttctatcactgatggcgggttaacacaactggaaatgaatttccttgctctatactgggatgagcttttagtccccgtaagctttattcattacattactctgccaaatgaacaagcgtatatggattcaggttttcttaaaagaccacgcattccacttacaaatgatgatggtagtgctgctaatgctatccctatgtacttatgggcgcaaactcactttttagatataaaaagaagagaggaaagcgatagcgattggaggttaaaccaaattggagtagatagtctttgtttgggtaacgatggcattgatttaattaaaggctttcgagtggatttagtgaatgcactcccagttcctgatgcatctgtaagtatatatgatatcttagagtttaaactaaataggaaaagtgagattgaggcatttaataattatttagatgagctctatcttgaggttgcaaattcaggagactttaatttatctagattgaaggcatttaataaacttaagttggcaattgaagatcttgaaaagttaaatgaagaaggatggcgaagcccgataaggtttgatacttcagcggtttttgaaagtaataacggagatatcatcgctggaatttcagcgctttacgccatatgggagtcgagtcaaggaaatatagctacagccttgtctattggtgttacttctgctttggggcaggggtttgcaaggttaaaacctaaatttcaaagtgtgagaagaaagcctgacgttaatatggcgtatctatcttctgcccataagtcagggatcataaaatga

SEQ ID NO: 202904 - DNA, 1236 bp, Klebsiella oxytoca
gtgcaatggtcgacaaaggacactaaaaccttaaatataataaatcatctattcccttatttcgacattgaaactcgtcatgttgacttatatgactgggataaattgtgggtattaattagcaaactaaaatcatttaacacagagaaaatatctaatgaagagatagttgctttttttgatagcaaaataggtgagaatagcaagtcgtactctgattacattaataaaataaaagaaatcactaaaacatctaagtatggatataaagagaaagttctaaactatgttaaagtaggattagatggtcaaacatttcagatcgatggtaaaaaactagaaattcaatcagatggaacaaattctttcaaatacattgaaatatttctatccctgttaatatcccttacaagaagagactatataacaccaatagtattcattgatgaacctgaaatagggttgcatccaaaaaaaagtgagcaactaatagaaaacctctatggaatatatatgtcatttaaaaaaagcaaagaaggaatagagcaaaacaaatatgcaacaccatatccaaacattttcatgtctacacattcgcctaatatattaaaatctgttgttaaagaattcggcataaaccagcaggtattacatttttctatgttaaatgaaaatactaatataagaaaaatgaattcaacatatgatgaccatcgctttttaaatatattcaatgataatgaagcaagactgttttttagtgaatttatatttttcgttgaaggtgtaaccgagcaagaacttttctcaaataaattgcttactaataaatttcagcatttaaaaaacattgatatatatgccacaagcgatgttgcattaaaatatataaatccatcctattcaaacactgcaattccatatatcgtcttatatgacgccgatcatttattttcatttgataatcaaaataaaaaattcacattaaagactggcaaattaagcattgctcaagttagaaacaaatacaagtattcatatataggctctagcaactttcaagcaaaaagaaacatagatatgttccttaaaggattaaataacacctctattcagacggacagcaataatatcaatataaccaacattgattggcatggattaattaatcgcattaataagttcatacctgtctcttatacacatctgacgctgccgacgactccttacgtgtag

SEQ ID NO: 202905 - DNA, 279 bp, Klebsiella oxytoca
atgctggaagatcttagtagttcaaaaagcgttgttgcaagattaggaggtgatgaatttggtgttctattacccgagtcaacctataaagaagcagaagaattccttcataaattgagggccgggattaccagctacaatcttaattctcaaaaaaaatacaacatagatttttctgcagggattattgaatatgatgagaaaattcatactgaatgctctgctatcatgcaggatgcagacgaaagaatgtatgaaattaaaaagggaaaacgatag

SEQ ID NO: 202906 - DNA, 756 bp, Klebsiella oxytoca
  misc_feature (632)..(641): n is a, c, g, or t
atgcatgaactgaacatccagactatctgtgcagaaaccagtcccgccaaagggcgtgtagaacgagctcacctcactttacaggatcgtctggtcaaagagctgcggttacagggcatttgttcaatggaggctgcaaatgacttcgctgaggcctatatggctgactataaccgccgttttggcaaagtaccgcgacatgattttgacgtacaccgtgctgtagaacatgatgaggacctggggcttattttcactgttcgtgaaaaacgtaaagtctcaaaatcgttgacgatacaatatgataaaatgttgtacctgattgaagacagcgaactgagtcgccgtgcaataggtaaatatatcgatgtgtatcactatcctgatggcagaaaagagctgcgcctgaacggtacgctacttccctactctacctacgaccgactgtcagaaatcgaccagggcgcgattgtcgataacaagcgtcttggccgaaccctggagtttatcagtctggtgcagagcaagcgggataacacgcgctctcagtcaattcccgctggagatggcccttcccgacgacggccaaagcaggaagggaagaaatcccagcgctcactggataatgatgnnnnnnnnnnctcaaacagcttcagtcacgttcagaggacatttttggtaaaagagcccgctgatggtactcactggccggacagtggttgctcaccagttgatattgtccggccagacccatga

SEQ ID NO: 202907 - DNA, 192 bp, Klebsiella oxytoca
atgatgtgtcaagttgtttgtaaagtgagaggtttatttttggaagaaatgcttaagagaagtatatatgatatttgcctgaatataattattgatatgcaaggttggcagaggttttctttcttttctaaccgaagggaagaaaagcaaggggaactcgaagaagcaagcgcagcggcttcgcagagttag

SEQ ID NO: 202908 - DNA, 489 bp, Klebsiella oxytoca
atggatgcggtcagattcgatgatcacttattgttaactgcttgtcctggttcgggtaaaactaagacattagtatcaaaactatgctatatattagagaataaagaattatttaaaataggtaagaaaaaaataattgctttaacatataccaatatagcggcagacacgattcttgaaagaatcatgtcattcggaatcgatagtgattcgttatggattggtacaatacatagtttctgtcttaattggattattaagcctaatgtggatagaataccaagacttcgaaaaggttttagtgtaattgatgagcatgaaaaggaatttttaattaatgagataaaagaaaaatataaattatcaattcatgataaggtaaatacggcattgaatttaaatttcaagccactttatcatcctggccaaaaagagcattccgtcttatctaaattccaatcgtttaatagatttcgacttaattcttaa

SEQ ID NO: 202909 - DNA, 351 bp, Klebsiella oxytoca
atgggccaggtatttagcgtactgatggaaaatgccgtacgctacgggcgcagggggggacatctggcaattacgctgcgccgcggcgagggcgcttacaccattgattttgtcgatgacgggcccggcgtggcgaggcattttttaccggaaatgtttgaacgttttacccgcgaggaggcgtcccgcgccagacactccggcggaagcggcctcggattatccattgcgcgcgctatctgcgtggcgcacggggggcgcatcagcgcgtcgctaccggcgagcggcggcctgcagattcgcgttgttctgccgtacgctcccgccgcagaagaaaacagcctgccttga

SEQ ID NO: 202910 - DNA, 768 bp, Klebsiella oxytoca
atgtttgcattcttgattatccctttgttggtgagtggttttattgttataactactcacccttttcattttttccgactgcatcgttatgacggtcagctcttatacatgaaagctgcaaaatatgggctttggtgtttggtgtggtcagtaatcattgcttttattgcaaaatattatttcccttccgctcatcttgttactgaagtttcgcagtcgttggggctgggagaaagcttgtatcaaaaacgaattacaggttggctaatttttctttcgtgtacatctgttttaattgcatggttgtcaggtataatcgcaaattggtttactacttttcgtagtctaatgatttataaaatattctataagaaggatattagtgtagaagaaagtaaagagttggtgaaattaagaactctgcaagatttggtgactgaaggttcgatggatagtgtcttcttcgattcacttatagatcgaaagtcgatattaattagtatgagtaacaaaaaggtttatgtcgggattgttaatgcattaggcgagcctaatgagaaagatggaccaaatcagcaaatttctattttacctattatgtcgggttatagagagaaagataccttaaatgtatgctttacaaatgattataataatgtgaaggactatgatactagcgttattattcctgtctctcaaatcactcatgtttcttggtttactatggaagtacatgatcaagtgaataataattgcaagtctaattag

SEQ ID NO: 202911 - DNA, 2256 bp, Klebsiella oxytoca
atgagtgaactagaaagacctattaaggtcataaaaacattagcaaaagattttaatgacaaaaactatgcttttggcgagaaagatcctattcgccctgtcacaaaagagttgctttctaggctcaaaaatgaagtgcagcaggtatccgagcatttcaaaaactcattccggaagtggccgggagttccagccgtagcaaaagtcactttacatgataaggcattggcaaaatctcacaggcccacaagtctactaggtgataagacctgccctgtaataggtagctgtaattttggtgagctactggtgagtgttacagaggaaggacttacaaaactccaaacaaaaatacaaaatagcactaaaactaagagtggtactcttcatattgctgtaattgataaaattgaaccttatgtttgcgaagaaatagtcgatcacgaaactactacttatatcttaaggttgtttgaccataaaaaccgaaaaataaacaaatgcctcgaagagtcattaaaatcgattttagacgagttagacattcccgaaccaaataaatataatataggtagtgatgtttcttactttgaggtacctgcaagccctaaaatttttgagctatcaagttttatcggagtaagaaaattgcaaccgatgccttgctttaaattagataatagtgacatggcattatctaaaatagcatcccagcggaaggcattattaccacttccaaatacagatatgcattatcctttggtagggatcattgatagtggtattgacccaaacaatagagatatttctccttgggtgtgggggcgaagaagctttctaaatggaagaaaagctgactatactcacggaaatatggtggcaagtctaattattgatggtaagggtctcaataataactccattggattccctaatactcatgcagaaatagttgatattgcagcttttcctgctgatacggagctatctttaccagaactagcaaatatagtttcaacagctgtagaagaatttcctgaagtaaaaatatggaacctctctcttggacaaaaagaagcttgccatgatgataatttctcggagatggggcatcttttaagttacctacatgatgaacatggatgtctttttattgttgcatcaggcaactatgaggcgatgccccaacggacatggccaccccaagaattatctggaggggatcgagtatccgcaccaggagattctgtccgcgccttaactgtcgggtctgtcgctcacatggattgtgctgattccatcgttaaagcaaaacagccttcatccttttccagaagaggccccggcccctcctgtattcctaaaccagaagttactcattttggtgggaattgtagggagaatctcgacttctcaaatttaggaatccgcgctataggagataagggacaattatcagaatctattggtacaagtctttctacaccattaatatcaagcatcgcggcttctacatggcacgaactccaattacacagtaatacaccaccatcaccagaaagggtgaaagcattaattattcactccgctatgctagagagaaccgatcaagttgatccaaaagaaattaattatcatggcttcggaataccaaaagataatattctagaaatgttgtcttgtaaagaaagcgaaattacttttctttttgaagttgatactcgcgaaggtgtagagtttggccgctatccatttgttattcctgactctttaaaaaatgatgatgacaaattttttggcgaaattttaatgaccctagtctactctcctcctctggaccctaattatccttccgaatattgtcgctctaacgttgatgtctcatttggtacatatgactttgataaaacacaaaagaggaagcatataagcaaagttccgcaaatcaaggacaaaagtgaattatatgagaaataccttatcgaaaatggttttaaatggtcaccaataaaagtatatagaaaaaaatatccgcaaggcacgcaaggtaatacatggcgactgaaaatagatgtgcagcggagagcagaacaggatccacttgagtttcctcaaagagcagtgcttttgataaccctacgttcattaacaggacaaaaagatatttactccaaggctattgcagaaattgattcgctaggatgggaaagtgatgatattatcataagtaacgaggaaaggattcaaattcgttaa

SEQ ID NO: 202912 - DNA, 1170 bp, Klebsiella oxytoca
atgaatactagtgagctaatggttagcctcataaaatcaggagttacaggggataaaatcaccttccaacggatggccgcaaaagtagcccgtgagatggatgcggatggtaaccgtgaactcgcgcaagctatacggaacttactgaaacagggagcatcgttctcacttcagaaagcaaacttcacctcaagcgagctatctactagtgatctgtcattacccacagatagtgaaactaaattccacctcgctgacaaagtggcccctgatgataacgcacgacctccagtacttaacgactcgattaatgaaaaaattgatgaatttattgtctctgtagaaaaaagaaacgagttaaaaaaatatggattgaaaccagcttcttcaatgatactttttggccctcctggttgcggtaaaaccttggcagccaaacatattgcatcagtgcttgaccttcctcttttcacggcaagatgtgatgctctggtttcatcatatttagggtctacagccaaaaatattcggaccctgtttgaatatgcaagtaaccagccatgtgtactttttttagatgagctagatgctttggcaaaagctagagatgaccagcatgagttaggggagctaaagagagtagtggttgcattgttacaaaatattgatgatctacctgaacatacggttctcatatctgccagcaatcacgaaaatttgttagatagtgcagtttggcgcagatttgcatatcgaattgaaatcggtttgcctgatataaaaattagagctcatttatttgaaagattacttaacgagcatttttcaaccttagaaattgcctatgacgctgcacttctttctaaaggcctttcatgcgcttttatcgagcaaatatgtgagcgtgcacttcgtcattctatactatttaacaacggcgaatttgataatacttttcttatgaaatctatcctagaatcacagggtgaaaaatttgatgatcctgatcaaacaattggaaaattagctagattattaagaaattgtgattcaaaggtatttacagtaagaaaaattgctagtttactttcaatatctccggctaaagtttctcgtttaacgaaagagaataaatcaactataaatcagggtaatacagaagaaaactag

SEQ ID NO: 202913 - DNA, 915 bp, Klebsiella oxytoca
atgcaaaaaacaacaattgtagatcaatttggtgctccactttataggaagccacaactagttattgcgagcttgaataatgacggcagcattgatctatcaaatatccagccacttaatgactggaatttcgggatgcgaaacagcggcttggtagcacacgcccatggttatgacttgatgactatattgtctgaagagttgggtttagttgacgtaaatgatgaaggatttttatatgctaaaatcattgtcacgtcagatccaaacgtttcggttatgcgtctactcggcaaaattgcagaagcaatggtggtaaaagaatgcaatgaaagcgtagtagcaaaccgcttatggggaatgtatgctcgaaaaggaaaaatcccacataagagtttggattcctttagagcaattggaacaggattgaattcaacccagaggctatatccgacaaaatataacccgacagatccgcagcgtgatgttatatggataaacaaggagaatgaaaaagaggagctattacagataactaacagttcgaattgcgctatcattgcaggtattcaactaaaagttagcacggatggcttcaggtatatttttaaatcagatatagcaagaggaaaatatgaggtgccactcgtgtattttgatttatcaaatgattactacaagttgactaacgcgatttatgatcaagaatttaatgtggggatcggtacggatatagttcgtgggcgagatatttccatttctattcatgaacttttattatcgtattactctgtaatacatgacttggtaatgggaaaaatgactatagaccaaatcattaaagatgagctccttttcgatgttttcaaaaaagaagtacaagagcaaaaaggcatgaaaatcatatcaatataa

SEQ ID NO: 202914 - DNA, 222 bp, Klebsiella oxytoca
gtgcgcgattatcccttttctaagctcttcaatctcaactttttcatcaacatcatcaccataatctttcttatccattcagcctggaatgctgactccctgcttttcgcccttgaagcgattactaaagcgattgctatcgtttcgacgatgacctgtaaatggattgaggcaatagaagccaataagcccgctggtggtaaaacaacgggcaaagcgtag

SEQ ID NO: 202915 - DNA, 441 bp, Klebsiella oxytoca
atggccacgatcaccaaaatctacgagaagatagctccaaaacttgatgacatggtgcgccgtggattcagcgacatagagctaaagtatgggggccagcacgaaatttacgcttatggtgaaaggaagctgttagccgaagagtttcgtaagctctaccctgagaaggtgaatgacattccgcaagacttcccgccagatgctaccgtgatcgtagaagacatagttttactctataaaccccgcaacggacaattcacaaagacagcttctgaaacacagctaaaacatcatcaggctttcaatgcctggtgtcatgccaatgttggcaaggtaaaaggctacacccagacgacgaagagcacgattaacgtgattaacattattggcgcaatcgtattggctggcctgatcatctgggggctttcacacgttagctga

SEQ ID NO: 202916 - DNA, 552 bp, Klebsiella oxytoca
atgcgtattaagggattatctcttttcttttgtgccgtttgcgctggttgtagtgggtattctcagccacgagagcatttagatgtgccgacttactcagaaagctatgatcaagccttgggatggcttgtaaccgctcgctacagagatgtcgataactcagagatcgtaatgtcacttgtcggagacttttgcagaggcaaagggaaggaagcaaccctgtataagacgaccgctggcagcgcatccactattcaagaagtttgggcttgtcagactcccccaatgctaaatgatactgacatacttagcggggtttattgccatttcattgctaacgcgcctcgctattctgttgatttttcaaaccgtcagaaagaagtagcagagcaaaagtttgttaaggcttttgtcgctaaagggattgaataccctgtcggcggtttttacgagaagtaccaaagtaactttgcttcgtgggcagttgccaaacacgaggagagcaccaacaccgataaagtgcggcaatggtttgataagaattgccagtag

SEQ ID NO: 202917 - DNA, 225 bp, Klebsiella oxytoca
atgatttttctcaaattaagccaaaaggtaaccgtagagcggcagggcgaatatggttgggaaccagaaacagtctacgagcctgtgtttgttgccgcagagcatatcgtcagcatgtatttcgctggtctgacaatcctgaaaatgacatccggagaacgcattgacgtgaaagagaccccggaagaaatcatcgccatgctcgccgaaggagcagccaaatga

SEQ ID NO: 202918 - DNA, 546 bp, Klebsiella oxytoca
atgactatcacactacaggcagtaaacgagatcaccgcctccctggagagcgcaggcgagctgtcgatcagagagcagaagttcctgaagctggcgaaagcacatgtacagttggctgcggagaatgtggcgctgaaaaaatcagcgccggcaccgttcagtaagctgatgatggaagcgcttgatacttatcattcgaaagctgacgacgtgcctgagttggccatgctgagcgcatacgtaaaactgcgcgatgggctaaaaacccccgccaccgatcgcatcgtagccggctttaaggctgatggtgtagcagaacgggaaaagaccatcacattcacggcagctaaaaagcgcacgcaggatggagtagcgttaatcgctatcggaaagccttataaaattcacaacgatgatgtgatcggcgagttcttcatcggtgagcgaggtcgttacggcgtaatcaccatggacagactcaattacttcgcaacgtctgatgaatacgcatgggcgttttcgctgcgcgagggggccgacaaatga

SEQ ID NO: 202919 - DNA, 597 bp, Klebsiella oxytoca
atggcgcaaacactgcaatttgagaagagttatcaaaacgtactgattcccgcagagccgggaaccagcgaatacctgcaacttatcccggtagggcaactgctttgcggtgagttccgcaagcccaggaattacgcattccacaagaagttcttcaagcttctgactctcgggtatcactactggacgccttccggtggtctcattgagcccgctgagcgcaccctcatatccgggtttatcgacttcctctcatccgacttcgatcagcgcgctgcgctccagaacgccgcggagatgtatctctcctctgtcggtatttctcgttcccgcgatatggcgctgctgaaacacttcgaatccttccgcgagtgggcaatcattcaggctggctttcatgacgaataccagatgcctgacggcagccttcgtcgtgtcgcaaagtcgatctccttcgccagcatggacgacagccagtttaacggcgtctacaaatcagtgctgaatgtgctctggaactacattctgcgtcgcaaattccactcgccggctgaggctgaaaatgccgccagtcagctgctgagctttgcggggtga

SEQ ID NO: 202920 - DNA, 294 bp, Klebsiella oxytoca
atgctggtcttcagctttaccggtgctgccgcctttgcatttaaggaagcatacattgccgcttttgactggatggccgatatgattgcgcaagggacgcgaaatttagagtctgagcgtaatgccgtcatgctggagttcatgaaagagaaggatgtcgccagtatgtcgggtcgcctgctacgacgctggggaaaagagaagaagccgcagttactttcacgcattgagcaattggaaaagcaaggtcagttggcattgccaggatttcctggtgcgcttgtcgaatcatga

SEQ ID NO: 202921 - DNA, 1950 bp, Klebsiella oxytoca
atggcagcaacggtaattgacgccctcctggttacgctgggccttgatacttctcagttccgcaaaggccagcaggaagtcagtgatgacctgaaaaagcagcgcgaagacgccaaaaacaccgccaaggaaatggcggagcaggggaaaaaggcagcagcattcttcggcagcataaagacggaattgctggcactgactggcgttaccgtcactgccggtgggctgatgagccttgttaaaaataccacgtctagcctgatggacctttccattcagtcaaaggctcttggcatgacagccagggaacttgatggatttggaaaggctgcagagtcggcaggtagttcttttgagaaaattactgctgccttgcaaggttttcaggccgcaaagcagggggctttattcggtgataccagcagccctatctttaacggcatgcggatgcttacggcgctaacaggggatacctttgacgtctactcaaaggacgctcagtcacttgcaaggtcataccttgagtcgcttaggaaagttaaggatcctaatattcggcgtcagattggggctatgggtggattcgatgatgctaccatgcagcgcaaccaagagggtaggttccttcctgatgttgatcgccttgcaagaagctctggatttactgacgcagcaaccaagggtgccaaagagttcactgctgtttgggccgaacttgggcaaaatattgataccgtcaaaacaaagatatttgttgggctgataccgacaattagagaccttaacagcgttcttattgaatggtcttcggacaatgctaggtcgacggatttcttcaaagagttgaagaaagacatcaacgatataacgggtattgatttgggtggctggactttatcagctgatctaaaagacctgaaagataacttttccatgctcggaagagtcatgagccacttggggaatgcgttaaatgagctgaataacgggaacttctccaaagctgcggatgagttcaagaaagcatggtacggaaccgaagatggaaacccaacggggaaagacgcccttcctggagtaacagaagccgcgcagcagtcattgaaaaaaaatggcggaactcttgatttcaagcccgatcctgaagcggtacctttaagccctcagcagttagccacccagaagatgcttgattctgtgaagtttcaaccgtctccagaacagcgtcgtcagcagcaggacgagcgctcttattgggaggcaacaaaaaatctgctgtcaaaaatagcggatgccattattactccggctggcgcagcaacaacttcaccaggctatcagtcaaatatccctctgaatgctcaggctgccaggcttggagctaaaggaaaggcgtttcttcaggccatgacaggcgagtttggcgcacttgaaggaaagtatggtctgccggcaggcctgctgtattcggttgctgctacagagtctggtggcgatccgtttgcagaatccaaggcaggcgcaaaggggcttttccagttcatgccaggcaccgcaaaagatatggggctgaaaggtcgtgacgtttacgatccccacaagtctgcagaggccgcagcgaaatatctaagatggttaatggatgccacaggcggcgatctggaaaaaactcttgcttcctataactgggggctcggaaacgtccagaagaaaggcatggataacctgccgtcggaaactcgcaattacgtccctaaagttatggccggaatgcgtcccggcgccggtatggccgtagaccgcgcgatgccaggccaggctggcggtgtttataacttttatggcaccaaaatcaccacccaggcccagaacgtggaacagcttaccagcgacatcaaaaagcacggtgacaaccgcgtcatgctaatggctggctactcaggacaataa

SEQ ID NO: 202922 - DNA, 2424 bp, Klebsiella oxytoca
atgctaaaaaaaacgagtctcatcgccggtctattgatttcccctttaacgctttacgcatcaaccgcctatacggtagatgacattcgtttcgaagggctacagcgcgttaccgttggcgctgcgctactgagcatgcctgttcatacgggagaagaggtttctaacgaggatatcagtgattcggtccgcgccctgtacgccagcggcaactttgagaacgtgcagatcctgcgcgatggcagcacgctggtggtgcaggtcacagagcggccaaccatcgctaaaatcagcttttccgggaataaatccgttaaggatgatgccctcaaggagaatctggccgccagcggtattgaagaaggcagcgcgctggatcgcaatgcgctcacggaaatagaaaaggggctccaggatttctattacagcgtcgggaaatatagcgctcaggtccatgctgtcgtcacgccgctaccgcgtaatcgcgttgatttaacctttgtctttcaggagggggtatcggcaaaaattgcgcaaattaatattattggcaaccaggcctttagcgcagaaacattgctggaccagctgcagcttcgcgacagcgttccgtggtggaacgtgattggcgataagaaataccaaaagcaaaaaatggcggcggatcttgagaccatccgtagctattatctcgatcgcggctacgcgcgttttaccattaactccagtcaggtcagtattactccggataaaaaatcgctgtatatcacgatcaatcttaccgaaggcgatcgttataacgtggccagtacggtcgtgaccggcgatatggcgcagcataaccaggaaattgaagcgctggtgaagcctttagcggggaaatggtacagcggcgcggaaatcacggcggctgagaacagcattaagacgctgctgggaaaatacggctatgcctggccgcaggttaataccgcgccggatattgatgagacgaaaaaaagcgtcgttttgcatattaacgtcaatgccggacgccgttattcggttcgtcagattcgctttgagggtaacgatacttcccgcgatgcggtgctgcgtcgcgaaatgcgccagatggaaggcgcgtggctgaatgacgagaaagtcgagcaggggaaaacgcggctggatcgtaccggattttttgaaaccgtcgacaagcagatcgttccggtaagcggtagccaggatcaggtggacgtggtctataaggtgaaggagcgcaataccggctcctttaacgttggtctgggctttggtaccgacagcggcgtgagctaccagctcggcgtcactcaggataactggctggggaccggcaatagcgtcagcttcaacggcacgcgcaacagctaccagtcctatattgagctgggagcgacgaacccttacttcaccgtggatggcgtcagcctcggcggcaaaattttctacaacagctacgacgcctcggatgccgattccggaagctacaaccagcaaagctacggcgttggcagtacgctgggattcccgattagcgagaataacgccctcaaccttggcctggactatgtccataaccgcctgaccaatatggagccggagctcaccacctggagctatcttaactcacgtggcatctatcctgacgtcgtcaccaaagacggcgacagcggtgcgacctatagcgccaatgactattttgccagcgttggctggagctataacaacctcgatcgcggtttcttcccgcgggctgggaataaaagcagcctgaccgccaaggtcaccgtacccggttcggataacagctattacaaagtgactttcgataccacccaatatatgccgctggccgagagcaaaagctgggtatggatggagcacctgcgcgcgggctatgccgatgggctgaacggcaaatcggtgccgttttacgataacttttatgccggcggatcgtcgtcggttcgcggtttttcgtcgaatacgattggcccaaaagcggcttattatcgttgtaatggttctgaaagcagctacagcacctgtccgctggactcatcatccgatgcggttggcggtaacgcgatggcggtgctgaacagcgagtttattgtgccgacgccgtttgtgaatgacaaatatgccgacagcctgcgaacgtcgctattcctcgacgccggtacggtatggagcacctcctggcaaaataccggccagacgctggcggccgggatcccggactatggcgatccgtcacatatccggatgtctgccgggattgcggtgcagtggatgtcgccactgggcccgctggtgttctcctgggccgaaccctttaaaaaatacgatggtgataaagccgagcagttccagtttaatattggtaaaacctggtaa

SEQ ID NO: 202923 - DNA, 1605 bp, Klebsiella oxytoca
atggaagaagtacgtaaagggatgtgggatagttcgatcttagtcgtagagtctatcgaccgtttcagccgtcaaaatccgtttgacgtaatggggtatatcaatgctcttatgtctcacaatgtagctattcatgatgtaatggctaacattgtgatcagccgtagtaactctaaagatctcccttttgtgatgatgaacgcacaaagggcatatgatgaatcaaaatataaaagtgatcgtattcgcaaaggttgggctaaaaagagagagcaagcctttaacaaaggtacgatagttactaataaacgtcctcagtggatcgatgtagaagataataagtataaattaaatcataaagcggctgtaataaaagaaatatttgaactttataaaactggtttagggtgtccaactattgctaaagaacttcagaaaaaagaaggcgagcagtataaatttaatcgggcatggacaggggaacttgtgcataaaattctcactaaccgccgtgtgactggtaaaattttcatttctgaaaccatccgtaaccatgatgatttagataattcagtaacacagaagaagtaccaaatgaatgtctatccagtagtagttaatgaagatgaatttgaattagtacaggatttactgaaatctcgacgacctaatgctggacgtgttaccgtaaagaaaactgataacgaagaagtattaattaaaagtaatctatttagcggtattgcccgttgtatggattgcggcgggccaatgtaccataatgttgtacgtgctaaacgtactccgaagaaaggtgatccaaaagttgaggaatatagatatattcgttgcctcagtgaacgtgatggactttgcaacaacaaagcaatgacctatgaaacagtagagcgttttgtcgtagagcatttgatagggatggacattagttctgtaataaaggagcaagagtttaatccagaattagaagtaatacgtattcagattgaacaagttaaagatcagattgctaactatgaaaatggtattgaacgtcgtaaaagtgttggtaaggttatatcctttgaaatgcgtgaagagttggatgatgcaaaattacaattagaagaactgttagcacggcaagcatcattagccactgtaaatgtagatatacaaatactaaaggatgtagatatcaatgaattgtttaatgtgaataacgtagatattcgtacacgctatgaaaatgagctaaacaagattgtttccactgttcgcttaaaacgagtagataactcatatgttattgatatgaaatacaaaaatgatgatcttaaaaggcatgttatttttgtagaacataaaaagaaacaacaaaaattaattagtgatgtgatcattgaaaatattgaaggtacaattttatattcgaccccttcattctggatcagggtaaaagatggtgcaatacgttttcaacagactaaagatgatctttctatcattgattatcatctactgctgaactacatagacagtttagagagagataatatggtggctgtatggatgcgacagaatacgaatttcttattcgataagtaa

SEQ ID NO: 202924 - DNA, 174 bp, Klebsiella oxytoca; identical to SEQ ID NO: 107918

SEQ ID NO: 202925 - DNA, 384 bp, Klebsiella oxytoca; identical to SEQ ID NO: 197970

SEQ ID NO: 202926 - DNA, 903 bp, Klebsiella oxytoca
atgaataatgagtactttactgatgcggaaaaggaacagcttaatatcacagcatggaaagatctcaataagtacaaagacgtatcaatcacctttctcggagctaatttcgaaaattcattaatctataaaggcaataaagaactctttgaaagtactgaacttgaagggttactgaaacgaaaaacagcactcaaagacaggttgaaggtttattatttttctaaaaaaatcaaactatcaaggacatggaaaacgaacaatcctgataaagtacaaaaaatatactcgtttattgatggagaacttgagaaacaggatttctactggacgaagaacaaaagcgattctcagagcctcaagaacggcacagagataagcccggatgccagaggattcaaccagtaccagcaccttatgacatgcgtctggttggcttgtatgcgtccctctgaaacagaggctaagcaatgtgaattgttctttgagattgacggcgaggcgatacacatcgcaagggagtacgaaagtctacaccagttcgtactacgagggatttcgaggaatttcgacagtactgaaacgcagaccgtttatgtttttgatgaatggcaggccaagtcacttacagacaatattgagtacatagatctcggtattgatgatgatgaacaagggcagagaggcaggccgcaaggctcaatgaacaaagaaaagcgtttcactcttgctgataccaaagcaaagcgtttccgccgctggaaaggcagcaatccggggcttgagttagaagcgttcagaacgtttcttgccagtgctactaacaccgatctcagtactgaagagaaaaaggcgatgtgggacaaatatgaaaatgaagtacaaaaaacacgcaaaaaatga

SEQ ID NO: 202927 - DNA, 771 bp, Klebsiella oxytoca
gtgagagttgtacaactgataatttatggactttggggagtctttctttgtctggcagcattggaaaagtttggtgatttcttcaccgctggtactggcttctggtcggtcgtcatgctttccgtcgcaggattgtgccagctactggcaagtactgccgcgataggctgggctgttttgggttctggttctctacgggctaagtacttaccctataaactcgttaatcattatacggttccagtactgattattgttcttgcttttgtagcaagtgctgcccgttcttcaagcgatgaggccagagcacaaaaacttggttttaaagacggtaaagagttttctgttgcccgtgaaaataatatttcgaatgttgctgattatgccaaatttgccgaagaacaacgcattaaatcagcagaaaaagcggctcaggatgctgtacttgccgcagaaaaggagcgaaaagcgaaagaagaggaagctaaatgtcttgatgatgcctattgctatgcctcgaaacatgagggcggggattatatttgtaaggttgctgttgaaaagtctgctcaataccagtttaaatggactgatggaattactgaaccaaaattctcgtcatatagctggtacgacaaaagcaggaaattagtcactctttacgggcacagagcacaggctcaaaacgggtttggtgcgtttaaaaatatagagtactcctgtacgttcaatgctgatacaggcgaagtattaagtactaatcttcaataa

SEQ ID NO: 202928 - DNA, 264 bp, Klebsiella oxytoca
ttgttatggcggattatgacggcacaaattttgaactataccgtcctaatcactcacctattacactgtctcttgtgctggaacatattcaaagtacttgttaactgtctcggcaattccagttccggtattattgctaattaccagatcagcacaggctttgacttcatctacggcgttacccatagctacacccagaccagctcttttaagcatgctaagatcattgtggttatccccaaaagcgataacctggttcattga

SEQ ID NO: 202929 - DNA, 594 bp, Klebsiella oxytoca
atgaataaagtacttataatgtatcacccaagctttgcatcgtctggtaagtttgaaagaaagcttactaaaatactttcaacattggatgattatcaaattctctactttgatgatccagcaaaccttattagtaattacttcgaatcaaaattattaaaacatcttagcaataatgtacttggcagcattgttcaagatgaaaatctgactcatgcggtaatatttgattctacctattcaccagagttcacaactgttaaatcatatctttcagaggtgatacccgttcgatatatccaagataaaattacatttgtctccaataaagataaaggtgatcattttgatacttatatcggtcgtggaactttgtggggaaatccatatgcaataggtcaagatggtgatcgtgaagaagtgataaggaaatttgcgtatgattttaaccgggggtttttacgaggtggcgaagatttcaatgaaaaattacaagctctaagagggcatactttagggtgccattgcaaaccttacgcatgccacggagatgttcttgctgagtaccttaataaattggatgatggtgaatag

SEQ ID NO: 202930 - DNA, 453 bp, Klebsiella oxytoca
atggagtacgaattgtataataaccatgaaattcatgagtgtattgttttgttagatattaatattataaatgtaattttaaatgattataatcatgatgatgatcttttatgggtgaaaaataactgcactgaagagcctaagtatatttggataagccatggaaggttttttcctaagttcaacgtgccacttttagatgtcaattatgacaatgaaattcgagttattgatgggcgacacaggatttgttggatgaaagaaaaaggtatgaatgcaattcctattgcaataacaaaacctgttttggaatttttccaaaaagaaagcattaatttaaagatgattaccactttagatatgccctgctctgtaaagccgaaccttcaaaatatagtagagtcagaaccattggaggcataccatgtaataaagagtttagtaaaaaaataa

SEQ ID NO: 202931 - DNA, 141 bp, Klebsiella oxytoca; identical to SEQ ID NO: 36145

SEQ ID NO: 202932 - DNA, 162 bp, Klebsiella oxytoca
atgatctacgctatcagcggaccgcttatcgccatgatcctgtttattatgcccacgctgtcgacatggctcattccggcgctgaagccgtaccgctcggtgggtaacgccattacgctggtggttggtctgctctgcgtgtcggtgatgttcttcggctaa

SEQ ID NO: 202933 - DNA, 522 bp, Klebsiella oxytoca
atgcgtaaatcatttattgcagctgcagttgctactgtttttgcaatccctgccgctcaggcagctaccgctaccggtacattaaccgtaaaggcaacagttgccgcaagttgtactgtcaatacaagtgctaccggcacgaccactgatgctgtactggattttggtactgtatcctcttttgcggctaatatcgatgccagcacttcctcagctggcggcagccaggtcggggtattgtgtaacaatggtaccagctggacgcttgcactggatggtggtcagaatgccagtggtacttctcagcgtcagatgtctggagggacttccgaattaattccttatgatctctatactgacagcggctatactactgctattggtataagcacgactgcgttatctggaaccggtaccggttcagaacaaaaatatgatatttatggtcgtatcccggcaggcagcactttaccttctgtaggttcatatattgatacagttactatgaccataacctactaa

SEQ ID NO: 202934 - DNA, 519 bp, Klebsiella oxytoca
atgaagaatattttaatagtggttacagtttcttctttttttgcagtgcatgcggtttttgctactactgtgaccggcagtctgagcgtcactgcaacgcttgcggccagctgtaccatcaataccagcactaccggcacagtcacgaatgcagtactcaattttggtaccgtgacgtcaatggcgtctgatattgacacaggcacgtcgtctgcaggtggaaataagatcactgtgctttgtagtaatggaactgcatggacaattgcgatgaacgcgggtaacaacgtcagcggttcacaacgcaggatggccggtggaatttcagaatacattccttataacctttattctgacagctcccgttccaccgctattaatattaacaccagtgcattgagcggtaccggaacgggtaccctgcaatctttcgatatttacggacggatccctgccggaagcactctggttagtccgggtaattatatcgataccgtaacaatgacattaacatattga

SEQ ID NO: 202935 - DNA, 1047 bp, Klebsiella oxytoca
atgtcagtaactctgatttatcccaccgctgagattgctgaagcaacttacgccaccctgcaaaaatatgcagccaataggtgggtaagaatattattttttattatgctgttactcagtggttttttattgtctggtaaagtgaatgctgcctgtactttcacacctacaacatcaaccacatcaacgtcaacactgacgtcagccactatttcttcggcgtcttcgcaaaccattacaggtacctggaaatgtacccgtccatcatcgactaccgcggcagtcagcccgtacatatgccttaaaactatttttactggtactactggtgcaattaacggctcagctatgtcttataccgtctatggggctgcgggtggtgcggttacatcggccagcgcagtttccggaacctattatggcccggccagaacaatatctaacaacaacattatctctggatctgtcagagtgacgattcctgcttccagtacatattatccggcgggaacctacactgctactgtaagctattttatcgatatgcaggccaacagcagcagtgtatgtgagggcgataacggagggggatgggattcgggctctcagacgctgacctttaactgggtggtcccaagtgtctgctcactggtgtcgaccagtactgtagccttcggtaccatcacagatattggtaccgcattgactaatcatgacggtaccggtgccgtagtgactaagtgtaactacggaactgactataccatttatctgggcgatggtaataaccgattaccaggcagttatcggcaaatgatattcggcacaagtcttatgccttatcagctctataaggactctacacatgcgacggtctgggatgacactggaggtctctccacaaccgggggcagcggtggcgtatcttcaaccggcacgggtaccaaccagacatttgtggtttacggacgaatacctcagggtatcactttacctgcaactcctggcacttattctgacactgttgttgtcactgtaacatactaa

SEQ ID NO: 202936 - DNA, 2022 bp, Klebsiella oxytoca
ttgaacaacagctcgaaaactgacaataatttattgaaaaaaaatgcacttacatcagctattataaattacaacctgtacaacactcactataacagtgatgattatatttctgccagtctggaggcaatattaaattccggaattggtaatttttataccgctggtctttataataataaatcctactatggtgatgaaggcacggtccgcctggattcctactggcagtatattgatgcggagaaaatacgctcttacacgttaggtgatttcacaaccaacactgtgagttggggaaatagcgtcaggatcgccggcttccagtgggccagtgcctattcacaacgatcagacattgttaccaccgcactgcctcaattttccggctcttcagcggtaccttcttcactcgatctattcgttgaccagcagaaaatctactctggcgatatcccctcgggaccatttgacattaaaaacttgccctttgtatctggtaatgatgtcaccattgtgactaaagatgccaatggtcagcagatcagttcaacccattcttattattattcacctgaattattacaagaggggattaacgaattttcaatcgatataggtattccgcgttttaattacgcgacggaatctactgattatgacaaaaatatcgtgttcatgtcaggttcaaaaaaaaatggccttacaaacagaaccagcctgacatttaatggccagggggctaccaatgggttgacgaatggtggttttggcgtagcccagagtctttttggcgtcggtatattaaactttggcgtcgccggtagtcactttaaaaatcatgacggaatgctcgggcaggtcagtcttgcgggaagagtttctcataacataacctttaacagcagttaccaaaaatccggaaataattattatgaccttgcaaaagtatcaaattttatttacagaaaaaaatatcagactaatgctgataatgacagtgaactaacctatacgtctcagtcgagtgaaattgccagagtcggagttaacttttctccggcacaaagctggtctttcgggacctattataaccacctggtctatccggaaagtcgttacaatctgatatcgcttaatgctaataccgggataattcccaatctgaatatctctgctaatatctataaaaatctttccggcaacgatactggaggttatattatcctgacctatcagttaaagaataaatataatatatcatcttcaatgaacagagatagcggacgtaacggctacactcagcaaattgacagtattcctgactcggggattaatacttactcgtggggggcatcaggcacgcattactccgacaatattaccagtacccaggtttacggtaactatcgcggccgatacggtacttataatgcgagcctccataagtatggtagtttgacagagacgtctttaagcacaagaggtgctctggtatttgctgacaaaggcatttatccggccaatgaaattggtcagagttttgcgctggtgaaaaatgccggaccgggcactcatattctgaatggcggagtggatcttggcgctgcagacagtcgaggtcattttctgattacagatatgacgccatacaccgagaaccatattttcctcgatacaaccaatctgcctgttaactggcagaccaggaatacagaaagagttgccgtatcgggatatcgtcagggtagtttagtgaattttgaaggcagagaagttatttctgctactgttctgttggttgacaaggacaataatttattacccccgggatataaagttatattgaacaacagcagcgaaagcattaccggatatggcggtgaagtctatctggaacagctcgcacctgttaataccctcacagttaatctgctggacagaggaacctgcattacccattttagttacgattccagaaagtcatctatcgttaagacagggccatacgtatgtcagtaa

SEQ ID NO: 202937 - DNA, 297 bp, Klebsiella oxytoca
atgattaacataaatagcaaaaaatccgttatctgcatgctgtttacctgtaaaacccttactgctacagtagcatttgcatctcagatacacagcttaaacgatatcccatcggtgcaaccgggaacacagctgcagccagttgatatgtctttatatcttttaattaaaataaataaccaaagtactcagcgtttaataaacgtaagatataaccagcaggaaaaagtttttatgatccgtgcagaggatttaaaaaaaactgcgtatcaaattaccagagtttcctgcggataa

SEQ ID NO: 202938 - DNA, 708 bp, Klebsiella oxytoca
atgctatacagattactaaacaaaagagcactggtattttattttttattattaccctcgatgagttatgctgggggtattcgtatatcaccagtttccgtcaatatttcttcccaggacaaagcaagtatcgtcacattattcaatatgtctgatgaatcaagcagtgtacagattcgcgtttataaatggacacagtctgatggtaatgacaatcttaccgaaactgatgatatcatcgccagccctccatttattacattatcaccaggcggttcatttaatttcaggctggtcaggactaatgatgatcccattacaggagaaaaaagttatcggataattatagatgaagtgccaaagccacaggataagagaagtaccggttcgggcgtcggtattctgatccgtaactcattgccactttttattgtaaatgatgatgctgtacctgaattacagccctccatctctgagtcagggttgctgatgactaacaacggttatcgacatgcattactgtctgacgtaatggttactgatctgaatacagataaaaaaatcagtcttgacattaatacagttaatggttatgtgctgcggaactcctataaaaaatacccacttaacagcaacttctataagactgaacataaataccaggtcacttataaagtgaaccgactagctgcaaagaatattttgtag

SEQ ID NO: 202939 - DNA, 1209 bp, Klebsiella oxytoca
atgctaattcttagccgcagtccggtcagttggttgtggtatacgcttttgtatcaagtagtggattaccatctgcttgagcgtgtacgtgctgctacctccgatctacccatttccactgcgattacgctgttgcagaattacattcaggaaagatatccgccccttaaacaaatggcacacgaggaaatgcgctttgttggtaaaaattgtagtggccttaccaggccagagctgaatgctgttctcggtttactgaatggatgcagtgcgaatgcccaggcaaaacgctgtggcataagccgaaaaacactttatacccaacgaactgcaggtctgaaaaaaatggttaagtaccatcctcaactggcgaaccggtttcctggcagccagacaaaagagcaagaagtcgtaactgatgtcgcgctttctgcatttgagcgcgaatttgttgatgccattcaatctcggctgattttccctgtttttcagcctattacagataaacatctgcagatctgcgggtttgagatcctatcccgctggaaccgtaatggcaacattttattccccggggcttttttaccgcagatacgttctaagtatgtgtgggttgtccttaccgcatttgtcctccaggaagccgtgcaaaaaatcaatcaatatgagggggatttttatttctctgtaaatatccctgcagcgattgcctgcaatgaaaacctgaaccgcatgatggaaactgctcgcaagcagttgcatcaaccgcaaatgtcggccagactggtattagagtttgctgaaaacacagacgcgcatcgtcacaaagaaataaccagaaatatcgcccggcttcaaaaacgcggctttcgtattatgcttgatgactgcttctcacaaggcagtgtgatgtttccggtgaggtcgttcaacttcaattcttacaagctggatatgagtatcgtcaatgatatgttgagtgatcctcacgcagttgccctgacaaagagtcttgtttactactgtcaacagactggcagtagttgcattgcagaaggtgtagacagtctgattaaatttgagaaacttaaagatttaggtatcgatttttttcagggaaattatatttctcctcctgttgatcaagaaagagttagtgaaataattgaaaaactattaaagaataaaaaaccagaagatacatattaa

SEQ ID NO: 202940 - DNA, 909 bp, Klebsiella oxytoca
atgagaaaaatattaaccctgctgatgacgctgctgctggcgggctggtcgctaaacgcctggtcattcgcctgcaaaaccgccgcgggcgtgaccattcccatcggcggcggatctgctaacgtatatgtaaatctggtaccttcgattaatgttggacaaaatttagtggttgatttgtcaaaccaaatatcttgtgtgaataactcggtgaacggctttattactgactttgtatccttagaacaaggatctgcttatgggggggtattatcaaattttaaagggactgttaactatgacggtaactcttatccttttcccttaatgtcaccaacttcaacgaaacgatataataatactagctatgcaccatggcctgctctgctttacttgacccctgtaagtgttgctcaaggagtagttattacatcaggttcactaattgcgatcttaaaactccatcaaaccaatgattataataacgattcaaactactttacatggaatatttatgcaagtaatgatgttgtaattcctaccggcggctgcgacgtgtctgcacgtaacgttacggttaatttaccggattatccaggaacgattgccgtacctctgtcggtatattgtgcccaaaatcagaatctgggtttttacctttccggtaccacggcagacagcgccaactcgatttttactaacaccgcttcggcctcccctgccggtgggattggcgtccagcttaagcgtaacggcagcgtactttcgactaacagtacggtgtcattgggtacagtagggacttctgcagtgagtctgggtttaaccgccacctacgcccgtaccaccggccaggtgacggcagggaatgtacagtcgattattggggtgacttttgtttaccagtaa

SEQ ID NO: 202941 - DNA, 621 bp, Klebsiella oxytoca
atgccacaatttggcgctgacggtgccgtaaccgatattggcctgaccacggtgaaagtgcagaactgggataacaccatcaccaccgtcccaacttggtcgctggtgtccgactcgtttaaaaactggaacggtatgtccgcttccggcgggcggcgcatcaaacgcagcattaatattgataccaccagcatccgtttcctcgatgaggcggagcaggagcgtctgattcaggctaaattgcttaagccgtatatggatagccggcgtcaggagatttccgaatggaacctagcgcacagtagcagcgattcggtgctcgacagccggaagatgaccaacgtaggcaccttccgcgcctatctgaatgagtatctgctcaaccatccgcgcattcgtaaagatatgaccctgatggtacgccaactggcccccgattctaacggtctccccgttgaaatttactgctttaccaacaccgtagcgtggctagagtatgagttaattcaggcagatattttcgaccatgtttttgcagttgtggatcagtttggtttacgggttcatcagacgccaactggtaatgatatccgttcactggaaaaggcctttaagtcataa

SEQ ID NO: 202942 - DNA, 660 bp, Klebsiella oxytoca
atgcaagagttattactaaaaattcaggacctgggtatcgatgttaatcacaccacgtcgctgattatccgctttggtattatcatactgacggccattgtacttcatgtggtactgcgcgttgtgctacggacgtttgagaaacgcgccactacaagtaaccggctctggctgcaaattattacccagaataagctgtttcatcgtctggcgctgacgctgcaggggattgtggtacaggttcaggctgagctgtggctgcaaaaaggcagcgaaccggccaccattctgattacctgcgcccagctgtgggtaatgctctatgcgctgctgtctttcttttccttgctggatgtcattcttaacctctcccgccgagctccctttgcggcacatttaccattaaaaggcattttccagggcattaagttaatcagtgccattcttgtggggatcctgataatttccatgctgctggggcagtctccggctattcttatcagcggacttggcgccatggcggcggtcttaatgctggtctttaaagatccgatccttgggctggtggccggtattcagctctccgctaacgatatgctgcgactgggcgactgggcgactggctggagatgccacaatttggcgctgacggtgccgtaa

SEQ ID NO: 202943 - DNA, 387 bp, Klebsiella oxytoca
atgactgacgcttggctggatctcgtactggatctggaagatagcgatggtcgcttcgccactcccgatgccaaagtggataataaaaagggtcgcgtctttttcaccgatatacaccgaaaggatctgaaagacaacgctcacaggatgcagaaacaagactaccttaacgtcggcaacttcctgctgggcattggcgcgccgggcctggatgcggtcccgattgagggggttgatattgccgcgctggacgccgagtttagcctcaaagagaagggttacaccagcgtggtcattgtgcctgtcggccatcacagccgcgaagacttcaacgcaacgctgccaaaatcccgtcttccgctctccgtcaccctgaccgaagtataa

SEQ ID NO: 202944 - DNA, 234 bp, Klebsiella oxytoca
atggtcatttctggctcagaaacacaactttatcgctgtaaacattgcctgaaaaccttcctgctcagctatttctacaacggcgctaaacccgaagcccatcagaccattgttgatatggcgataaacggctccggatgccgggatacggcaatagtgctgaaaataagcttcaataccgttctgcgtcatctaaaaataaaatgtaccgtactgggtagcataaaacgttga

SEQ ID NO: 202945 - DNA, 333 bp, Klebsiella oxytoca
atgatggccgtgtggcgtcgaaaaccggacggcgaggttatcgtacatagcgatcagggccgccagtacggcagtgacgactggcagcgcttctgccgggccaataacctggcgccgagcatgagcaggcgtggcaactgctgggataatgcggtggccgaatcgttcttcagttcgctgaaaaaagaacggatcagaaaacgcatatataaaacccgggatctggcccaggcggatatcttcgattacattgaagtgttctacaaccgggcccggcgccacagtcatctcggcagcgtcagtccggaggccttcgaacaggcctcgtcgtga

SEQ ID NO: 202946 - DNA, 435 bp, Klebsiella oxytoca
atggtggttcgaacgttgaggaggaaggctccacccgaagctgcacgggtactgacgcttattcgtgactcctattcactgagcggaggcgtatacggttaccgtcgggttcatggcaacctgaacgaaatcggggaaacctgcggtaaaaactgggtgggacgtattatgcaactgaaccggattaaagccgtgcgcggctataaagctcggcgtcgtatcgctggcagaccttcagtggttgcgcctaatcgtgtgcagcggcagtttaccgttgtccgggccaatcaggtctgggtcaccgatattacttatatccgcacctggcagggctggctgtatctggcggtggttatcgatctcttcgcccgtaacgtggttggctggtcgatgaagcccactctctctctctcgaactcgcgctggacgctctga

SEQ ID NO: 202947 - DNA, 261 bp, Klebsiella oxytoca
atgtcagcgcagtatcatcggggaacgcttgacaacccgaacggcatactgcattcaagaacctcccggatacagcgtacagtaatgtcattgtctatacggaaatggactagcagtgagattacgtcgggtccaaatcgcgccagcgctggctattttacacatatgagtgtcatccacgacgtggatggctgcgatttctattccctggctgtgatagtccccattgtatttatacgagaagaatcaggcaaaaaatag

SEQ ID NO: 202948 - DNA, 834 bp, Klebsiella oxytoca
atggacgaatcagttaagtcacagcatacggaattactgagcaaagcagacacttttttggatcagggcatcgcagccaacaagcctatcgttgtagcatgggggttgatgaatgcgggtaaaagtttcctgctgaacatgttaactaatcatattgaaacagaatgttttcgcaccaatgatatccgcgaaaccgccgaattaaaatcattcgaaaccgagagttttattttccttgatactcctggtctagatgcaaacaatgatgacgacctgatcgccaacgaaggggcagcaaaagcagacatcgtcctgtttgttcaccagccgcagggcgagctggagaaagttgaaattgatattctgcgcaagctcaaagactccttcggtcgatttgccgaacagaacattgttttggtgctgagtaaatctgatgacgaaacgcccgacaaaattgccgccattgaacagcgcatgcttgaacaatgtcggggtgatctgggctttacccctcgctgcttcgccatttctggctcccgctttcaggccggagtgacccaaaaaatagagggtctgattactgcaagccatctttacgatttagcccaacatctggactccttaaatgccggggctagtgcagtaaaacgcgagcgccagatgattgccattgagaaaatgattgcggagttcaaacaagctgaatcagccctgcatgccagacaactgcaagccaaacaaaaaatccagaatggttttgcctcttttgataaggcgatgggcgattttcgcgtttggatgaaacagaacctcaataaatttcctgccaaataa

SEQ ID NO: 202949 - DNA, 537 bp, Klebsiella oxytoca
atggcattaccttggttaattggtgctgcggtattaggggttggcgcatggatcgcatcctcatccagcaatgacagttcaaacggcaatggtggtgacgatgaggaacgccgtcgtcgggaacgcgccgagcaggagcgtagagctcgcgaacagcaagagctacgcaacagcatcaaagcgactttcagtcaggaagggaaacagcgcgccaacgattttcaacagttgctgtccggctgggtgaatgtggattatcaatcccaaccgtccttcaaagccaccattctgcagactggtaaacagtacatgcgtaccgttgaagaacactttactgacattaatgatttacatgtgctgaatgccaccactcgcgaaaacctgaaagtgttcgaagagtgttacgacgttgagctgaccatgacagaaaccttccacaaggcggtcgatgagttagccgattgcgaggaacaattgcagaaacttcaggattatcgccgccattttgagcgcattcatcaacatttacgcggataa

SEQ ID NO: 202950 - DNA, 1824 bp, Klebsiella oxytoca
atgaacgaagagatgttacgcgaggatctcctcgcgtcttttcagcaattacagaaacaatttgattcatcattgaatggcgccaaatcactagatgcaaaattcaccagccgctaccagaaatttcacgcaaccctaacggatctattggcagatgcgcgcgtaaaactccctgccactagcccgttaagtcactcccttactgaatttattaacggactggaaacactggataaagcttggaaaaccaagctcgaaaaccaagataaagggctaagttttcggaaaaacttcgaagactccctgctggtctacgtttacggaaaagtaaaatccggaaaaagttcactaggtaattacatggcatggggctataccgatccgtcgccggaccagcaggttggcaaaaagcaccattatcaaacctacgagaactctaatgctgaaaacggtgatgcgcataatgacgcggaacagcaggcaaagtttcgggttggcgcaaccgaagccaccagttctatccagagtttccgcctgccaggcctgacttgggtcgattcaccgggcctgcattcggtacgtgccgaaaatggaggactggccaaagagcatgctgaccacgccgacctcatcctctataccatgaaatcttccgcacctggtcgcgccagcgatctggcggaaatttgcgacctgtacagcaaagaaaaaaacatcatgctgctactcactggtagtgacaaaaaagcgcatggctgggacagcgaaaaaaacgaagcgacagaacgttgcttgatgaaatctgctcaggatcgccagcttcaacgcgattacatcaaaaaagaacttcaggaagcaaatctcgatatcagtaacattgagattttgtccctctcagcccgctatgcggaactgaatgcggataacccggaagccattaaggagagcggtatggggcaactgtttgccacattgcaccagatctcccaagcgcgtggtgtgcgtatgaagcgtgccgtgcctatgactaatttcaaaaactttctcactggatgcatcagtgaagtgactgagtaccacaggctgacgggctcattcacccaagagctcgagagtctgagtgcggttttgccaaaacaaatggtgcccatcatccgtgaagcacaagcaaaaatgcgcgcaaatattcaggccacgttcgacatgctggcggccgatcgcaatgacgagtcgcaagtaaatacagccttaaagcagtcaaaatctacatgggacagccagatggaaaagtgtattggcagtgcgctgaacgccattctggctgacgtaatgaaagagtttaaggcaaccataactgcgacatggcagacatcatcgctatctttgcccaccttctcaatagaaaaagttactgagcagattcccgacggttatattaaaggtacacgaagccgaaatagtggcctcggtgggttaattggtggaggtctggggctgttactggggccagttggcgtagctgtaggggccagtatcggtgccgggttaggcgcgatgactgggaacagctctcgatcgggtatgcgtaatatcgaggtggcggtcggagataacctcaacgacttacgcacacgcgtgctggatatttataacgaacgcatcgaaaaagagattcagctgcaggtcgatacccatttcagcactctgctccgggatatgagcgattcctgttccacgctggaaacggaaataagggatttcaaaagcacactggccgcgctcaagaagagcgcagaagacacattaataaaagaggtgggttaa

SEQ ID NO: 202951 - DNA, 1650 bp, Klebsiella oxytoca
atggaaatgtcagcagcagccctttttggaatctatgacctggcagcaaagctatcaggccaattcccggaactgactgaaaaattcaaacccattcaaagtcagtttgaggacaaacgcagccagcccgatgccagcatcatggtttacggtgtctataacgcaggaaaaagtacgctcattaacgcccttattggtgaagaggtggcggctacaggggacattccgcttaccgacaaggttaatgcctaccactggaataacacccttatccttgatactccaggggtggatgccccactggcgcatgaaaaagtcacccaagagcaaatgctaaaagcagatgccattattttcgttgctaatccatccggagcggccgaagaggaaaagacgctccaggtactgatagagatcctccatgcaaaaaaacaactttttctggtactcaatgaaaaagacaaaatggatgtggaagagtttacacgcctgaaaaatgacatccgcagccgtctacaggcacttgcggatgaaaaggggatgcaggaggtattgcataacatcccgatactacgcgtcaacgccgagatggcgctgcaagctaaacgggaaaatatagacggtctgcttaagttaagtgcatttcccgcttttgaagaggtgctcaaaacctttattgacggtatcgacaatcaggccatctaccgccgcctgagcagcgaactgcgtcgatttctggacaatttacttgagacgctgagtaaaaaaaacaccagtctaaccgtccgcggctacgatgcactgcttaaaaaaatcgttgaacagcaacatctctgtcgcaaaacgattgtcgatgaaataaaacgtcagcgcgatgtgatgtaccgcgggagtaaagccgctctccgtcaggaaccggagcaggcacaagcgaaaattgaagccctgtttacacaggccagtgggcaagtcgaagcggtgcaaaggcaggaaacgaactatctggtgcagagattccaggatgacgtcgaaagtctcgaagacgctattctgcgccaggcgcaagctacagcgacacaaggtattccgcagaaaccgggtgaacaaactccttgtgaactgggcgggaatgatgcaaagaacgttctgaatgccgaaatggtcaaccatgcggtaacctctctgagctcgcttgccacacctgagcacgtagtgactggcctcaaattggtgaaagactggctgccctcgctgatgaaaggtatcggacctaaaaccatggagaaatggggtgctgctataatcggaaaatggattccttacgtaggcccagctatcacggttatcagttcactgtgggacatttttgccgaagacagtgagagcaaacaggcgcgtgaacaaagcgaacagcagcgccgcgagtgggaacgctatcaacaggaagtcgatgattttgctcacacgactgcagcgcaattcgaagccagtgccatgcaattaattaatgatgtgcttaccccctggttcaaagagctcgttgataaggtcaaagcgtcgcgggatatcgccagcagtcaggaccaggccataagtgacgcacagtttgaagcacagcgtttgtcattacaattgcgtgatgttgcatga

SEQ ID NO: 202952 - DNA, 264 bp, Klebsiella oxytoca
atgagtgagccacagctcacgccttttccctgtaatgcctgcggcaaatgttgccgcagggtgagtgccagccccgaaactgcattccttgatcgcggggatggggtttgccaccatttcgttgaagagacccatctatgcgatatctacgcgtctcgtccgctggtttgccgggttgaagagtattaccggacaaaactggctgatgttattccgtgggatgagtttgtgcgtctgaatgtcgcgatctgcgagaaactctga

SEQ ID NO: 202953 - DNA, 468 bp, Klebsiella oxytoca
atggaagagctacgcttcaactattttgatattgagcacgcgattactgttcatgattggataatagtaaagtcaggtggtttcgaaggaatcagggatatcggtattttagaaagtgcattagaccacatccaaaatgattggtactaccctggttttgtagacaagcttgcacacttgttttttgccatcaataaatttcatgctttcaacgatggcaacaaacgttcaagtattgccctctccacatatttcttagaaatcaatggactagggcattgtgttaatttttttgcgcaagaaatggaaaacattgctgtttgggttgcagatggagcaattgagaaagagttgctcggcgcaatcattcatgacttggttctatgtgaagagcttctggaaagcacaaaactggaaattgctcttgcagtttcagcttatgaagcccgcaaggcagagcagccatga

SEQ ID NO: 202954 - DNA, 1014 bp, Klebsiella oxytoca
atggctaaagacttaacaacctctgctcatgacagacagaacatccttaacaattcttatgccttgagccatgcagaaaaacacatggccttgggaggcattgagttcaacggtgaaaggctttttactaaaaatcagctcatggagattttcagtattagcgatgcgactgtggaacgatacattgcaaatcatagtgatgagttgaagaacaacggctaccgtttgataaaagggaaagagctaagagaattcaagagcttagaccatgtctccctcatcaatgagggtaacaaggcaccaaccatcggggtgttcaattttagagcagttttgaacttcgcgatgctacttgctgagagtgaacaagcaaaaatcattcgaacaagattattagatatagtgattgatactcttgctgagcgtgcaggcggccatactaagtacataaaccaaagagatgagaactatcttctcgcttcatttcaagaagaaagctatcgcaagcagttcacagatgctttggaagagtgtgttgaaggcaataattggaaatatgcaaaattcacgaaccttgtttatcagagcatttttcatgaagatgctgcagagtaccgtaaggtactgaatttagcccaaaaagataaaattagagatactatgtactcggaagttcttactctgattgcaggatttgagtctggtatcgcgcacgaactaaaaaacgagtttaatcgactaggaaggaaattgactcagccagaagctgaaacattattcaggcagttcgaatcacatcccctctttaagcctatgatgcttgatgcgcgctcgaaaatggcaagtagagatttgtgttttcgtgacgcgctgcacgaaaaattagaagcttatgttagagccgttcctgaagctgatttcgagagattcttaggtgaaaaaagcaaatcgcttgaagaacggttaaatgaccctgaaaccttagaagttttcaagcgacttaaagatcgctaa

SEQ ID NO: 202955 - DNA, 270 bp, Klebsiella oxytoca
atgatcaaagcacagagaatgatggtgttgccagaaggtgagccttacaagcagatcactaaaacttatgaaaccaacttactgcccacacctggaatgttcattcaggattcaatgtggcatgagtcacttgagatctctcaggttgtctgtcagttcgatgaagattgttattacattttacttccggaattgaaaattaattcacctgaatcggtggagttggaaaaagaggttcttgcgatgcatgggtggtcagtattcccgtag

SEQ ID NO: 202956 - DNA, 621 bp, Klebsiella oxytoca
atggctaacgatattttagaaacagcatgtaatacgttgtggcttgatcctaaactagtaattcctgcaattacggcagtgctagcatcagtaatcgttccaattttaatacatcatacaaaggcaaggagggaacttagatataaaactttagacatcagaacaaaagtttatactgattacttcaaaaagtatgaagaagctgctgctggagtgggcgtagattacgagaagtttaccaaggttacattaagaaacgcgtttagagagttactcgagtccaatagctcaccagaagcaatggtcaaattcagcgatgaaataggtcgatttccttcacaaatccaagattctcatcgaaaggcgactgaagaaatcacctcactgaaaattttaggttctgatgaacttttcatgctaactgctgagtttgagcaattgaatcaggaaattatgaaaatgacttctgaatggttaggtgaactcaatcaagtgcttattgcccctgatctggatgccccaatagctaagaaaatgaaagctaaagctgaacaaattaaagaactcaaggacaagataattaaccaaatgcgctctgagttagatctgggaaaaaagtaa

SEQ ID NO: 202957 - DNA, 585 bp, Klebsiella oxytoca
atgttgttaactaaagcagcttatgcccgtcactgtggtgtgagccgccagactgtctatgattgggtagccaagggtgaagtagtgatgtccggtagcaaaattgacgttgaagctactgaacaaatgcagcatggcaacgaacattctgagggcaaggactacctggttctgtctgcctcacaggtaattgaatggattcataccaatcaggacaagttccctgcggcgcaaagccaggaagaggcaaaacagctactggaagccgccacccagttaatttcatacgatattgagtacctgtttgatagagacggagaagaggttgtcaggctttatcacgaacccgacgattgcgagcactatttccatgggttccaccagctgggcaatgctatagccttcatacaggattttatcttggcagattgcctgaggatgaaattacgcgggaaaggagaccatattgaccctgagtgggaccgttggtcaataaaggggcttaaggcattgtgtacgccgactgaaacagatgaggctcgtttaaagcgcttccacgaacacatgggggaggatgaaagttag

SEQ ID NO: 202958 - DNA, 981 bp, Klebsiella oxytoca
atgaattcacgtgatgaagctggttcgtttggtttacctgaaggagagaaaggtgaaatcatcaccatgatagattttggtgagtttatggaggtttacacagaacaatccacatataaactcatgactccagatagtattgatcctaagagagaacatcaaaacgtaccctgggtgtatactaaaatttctgactttggagcatctaatcctttagttgctaatactgtaattatggttaacgagtttttaaggcaactttactccaatgaggatagtaatcgcattcaaattattagtaaggcgagagatataaaaaatgttttgttgaattacttgctctctctgcagtctttgatagacaattcaaattctgaaatcaaaaagtttattgaaaatggaagtgtcatgaatggtaaggctcatgcttatttccctcagttaaaagagctagatggatatgcaacggattttttgatttcagccaagcgatgcatccaggaaatttctgtgatggtgaattttttcttaccattaaagagcaagcatgggcgaattgataggttgttaaaggatgtaaagacaaatcatcaggatgcgacaatgctaatcaatgttctaaaagaacacttgccgatgtgcgtacatatatataaccttaggaatgcacaggaacacgccgccacaactgatgcgccgttgatagtcaataactttagctttgaaaatggaaatgaaattaatcctcccaaatgggggataaaaggacagggatttaagtgtgttcatgaagaagcaaatgaaatactttggttcctgattacattttttgaagaggtatttttatcatgtgtgtcgttggtctttccaacattcccaaaatatgaaatagtttttaatgaaaacccagtgaaaaagaaccccgtgcgctacagactccatttatcacttccagatgaatttattaataaagagcagtaa

SEQ ID NO: 202959 - DNA, 1143 bp, Klebsiella oxytoca
atgaagaaaactttgattgcaacattagtgggcataacgatgttaaccgggtgtgggccacaagagttaaccccggaacaaaaacaggaagttgcggctcttaagactgagctatcacagactgagggcgaaatctcagcagcgaaagaagttgatcaacaattttctggtgggctgatcaagaatttaaccaccgcaagacttgaagttttgggaacgaataaggctcttttggaacagcgtataaatgctattgagtccggtgccaaaattgatttagtagtctctggtaccaagccagaccctgaacttgcggcctccattaaaacagagatcgataatctgactgcaaaaatcaacgaagctaaagcagatgccagccagtacactggcggtttgatacaggtactcaaactatcagccgttgccactgaagaacaaagcatggctatgctgcagcaaaaatatctaaccgctaagtatggtctcgctgaagttaagctggcaccaattcaggacagtgcagcaaccgccagtgacaagaaggaagcaacggctaaaactacacaagaacaaccccctcttttgccacccgctgaaggcccgttcggtcttgaggctggtctgacccagaaaaatatcgaagatatgatcggggcaaagctaaaaccactaccggacagcgtgaatctctatacttccgataaactaccaaagcaaaacgcggattttgaaatgtatggtttgttgatctcgcctaaagctggcttatgtcaaattagggctgtcggtaaaaacattgataccgatagctatgggcttgccttaaaatcccggtttgaagatttaagtagctcgttaagctcactttatggaaaggcagaaaccacagaccttttactggctggttcaatctggaaagagcctcaggactggatgatggggctaaataaaaaagagcgcttcctatccgccacctggaaaggcacaaaagaaacgccgctaaaaaataatattggcgctatttctatcgaagccagagcgaacagttctgcacagggatatgtttacctacagtatacatttacaaatgatgatgtttgtcaggcggagattgagggagcgaaaaagagctctctgtaa

SEQ ID NO: 202960 - DNA, 1746 bp, Klebsiella oxytoca
atgagcgatcgttcaaacgtgatagatgaattactgatgtccctgaggctggaaactgatgccagctctttcagaaaggccagcgacacaatcaacgggataaaaagcagcatgcttcagcttgctgcagcgaccggaacggggatgggatttaaggctgtcaccagtgacctggcagttaccgtccagggcatgatgaatctttcccgcaatacaggccttgcggtagagaaaatccgggcgttaaagcattctttcgccatgctgacgggcaacgggaatgatgctgtcgggtttatccagaagatgaagcagctgcagtttacaattgacagccatacactgaatgagaaggcgtacatcagcggggcgttttcaccggaaaaatttaacgccgaatataaacgggatccgatggctgcagttcgctattacctggagtctgtaaacagggaacaggatccgacccggcgtcaggagctgattaactcaacaatcggacaggatgaaaaaatacaggcctttctgaacgctggtgtacagcaccttgataaatccatgcagtcatggtcgcaggtaggaaggaatatgcctgaaaatctggatgccgataccgaactgtttattcagcgtatggggatgcttcagacccagttcagccagctggctgaaagtataggttctgacctttacccagtgattaatgatgtactgggtatcatttcagatttcatcagagagcacccaggggcatctaaggcgctggcttatggcacaatggctggtggcacgctcggggcagcagcgttgctgaaaggcttattcacccgaggggcggcaattaagttttccggtggcggttccgctgcggcggccgcaggaggaagtgcattaggaatggttccgcagctggctcttgctgcaggtacggcttacatgactgaacccttgctggatagtgcactgaatactgcctttgggaactttgattacttccagcgtttgcgtactgcccagacctggggagacttcggtgatgctctcatggggaaaggggatgcccactggaacggagggaaatgggttgataatcgtggcggcttacctggtgtcacaggacaggcaaacggtggtacttcgctcccgcgggggatccgtaacaataatcccggcaatcttaattttgcgggtcagcgtggcgcttcgctggaaggtggccccgggggaaggtttgccacttttgattctatggacgagggcgtagcggcacttcatcgccagctggggctctatcttcaacgcgggaaaaataccatatcctccattgtgaagacctacgccccgtcatctgatggcaacaacgtcggcgcatacattcaggcgctgtcgaaaaaaacaggcttagatcccaatgcggtgatatctgcaggcgatacccagacgatggttaatctcatgaaggggattatcgatcatgagaacgggggcaattatctttccaaaggtgatatatcacgcgtcataagcagcgggatgaattacgaccccatgcagtaccttagtggctatggcgctcctgtggtttcatccaccagcagccataccggaggaaccatcaatcagacaaaccactacaacataactgctggtggcgtggatgccgacggcctggtgaggcgtatcaagcaggaacagtcggaggacattcatcaggcattgaatatgaccaagactgacaaattctaa

SEQ ID NO: 202961 - DNA, 2148 bp, Klebsiella oxytoca
atgaaaaacgcaccgaatttaaaaaatctgccgaaggacaaattcacggaggcgattatttttgctggcgcggatgcctgggtgcatgcaaaagcctggcaggaaaataacccggcgcatgacaccgttcctccggtcacgctgggtacctcccagttaaccgaactggataacctgcgaatcatcgatcacgggcgccgctatgcccgtgtttatcgtgccggggaactggagcaggaaaccattacggccattgccacgcagctggcgatagcaggggtgcaggaagcccgtttttattctgaaagctacgaactgctggagaactggacggcgcagctgccccggctgaaggctgctgccgaagaaaaacagtcagcggtacccgcaaacaaggccacccgcaaaccccatgacacccacggtgacgcgctcaggtcacacgttgagagccgcgctgacggtgtgttctgggtagagccaaaacaggaccgtgattcaggcgaggtgattaaccgtgaaagctggctgtgttcgccgctcgatgtaaccggcatcgggaccgacggtaccgagcgtttcctgatattgcgctggctggctcagggggcatcgactgaaaccacacaggccattcccctggctgatattggtgaacgggagggctggcgcaagctaaaggctggtggggtgaacgtgaccaccagaacaggccttcgcgccaccctggctgactggctgcagcgttctggtaacggtgaggtctggcaggtatcacacgccacaggctggcagcatggcgcatacatcatgcctgacggggaaatcattggtacacctgcagcccctgtcctgtttaacggccgtagttctgccgcagccggctacacgctgaagggcactgcagagggctggcgtgaaagcgtgggacgcttagccgcagggaattactccatgatgacgggtattgccgcggcactcgccgcaccgcttatcgggctggtggaggctgacggcttcgggctgcatttctacgagcagtcgagcgcaggtaaaaccacgaccgccaacgtcgctgccagcctgtacggaaatcctgacctgttgcgcctgacgtggtacgggacggcgctggggctggcaaacgaagcagcggcccacaatgacgcgctgatgcccctggatgaaatcgggcagggtgctgaccccgtggaggtctataagtcggcctacgccctgtttaacggcacaggcaagctgcagggcgcgaaggaaggcggtaaccgggagctgaaacgctggcgaacggtcgctgtcagtacgggggaggtggatttagaaaccttcatcgccggggcggggcgcaaggccaaagcgggccagctggtacgccttctgaatatccctctcagcaaggccattcattttcaggaataccagaacgggaagcagcacgccgatgcgctgaaagatgcctggcagcaccagcacggggcagcagggcgtgaatgggttaaatggctggcggaccaccagcaggaagcgaaagacgctgtgagggcggcagaggcacgctggcgcagtcttattcctgccgactatggggaacaggttcaccgtgtaggggcgcggtttgcgatccttgaggcggcgctggtgctgggggaagtgataaccggatgggacacacagaccagccgtgatgccatacagcacagctttaatgcctgggtgcgcgagttcggcacagggaacaaagaacaccagcagattattgagcagtgtgaggcctttcttaacgcctatggcatgagccgtttcgctccgctggattatgacccgcgcgatttacctatccacgaactgtacggctacagggacaaaggcggcgagtcagatgaacctgtgctgttttatgtcctgcctgcgccgttcagggatcagcttgcaaaaggattcaacaaggacaccgccgcacgaattctcagtgaggccggaatgctgaaaaagtccaccagcgttaaggggtggcaaatccgcatgccacggctcagacacctgaccaatgcccgcccctgggcgtatgcgttgttcttcgcgccggaggctgaaccagagccagaacaaaaactcacacgcgaggcataa

SEQ ID NO: 202962 - DNA, 189 bp, Klebsiella oxytoca
atgctcgcaactaaatatgttcaggctgagaaattcagtggtcgtgtgctggtgacgttcgagaacggcgaaattatccgtgagcaggtagcccgtcaaaacgaacacctggcaacccttgagggatttattgaaaccgcgcgcctggccggttttaccgttattccccctgcagccgtaagcgagtaa

SEQ ID NO: 202963 - DNA, 717 bp, Klebsiella oxytoca
atgcgtaatttcatcactgtacaaaatagccgtatgccgctggtggagtatcaagggcaaagagtggtcacgttctctatggtggatgaggcccaccagccaaataaaaagggcgaggttcgcggcctcgcccttgggtaccaagcggatcaatcttctgacgtatctgctttcttacgacgctgtctgcgcttaatttcgcctttagccgcagccacaagaaaccccgcagtactttcgccggtttctttaagctgttcgatttcttccatgacttcatgggggattcgaaccgtcgtcatttgcgacttagcattcttcgcacctgttgccattactgagactcctttgagcaggtgtatttcagtatacgcaagaaaattagcaaaaaaaaccttgaggtgtatttcacttggggttattttaaactctctaggtgacatacacctaatgagagcgaagcccgcgggtgctaccaacaccaacgggcctcttaccagcaacgttaacggagataacgctatggctgtgccgcagtgtacccaaactcaccctaaatttacatggcgctttctggcgcttggcctctctacccgtgaaatcctgtctgtggatgcctccactgagcgagaagctcgggagctaactccttcaggctgcgtgatcattttcatggcccataccaggctggtggaggtgaattatgctcgcaactaa

SEQ ID NO: 202964 - DNA, 573 bp, Klebsiella oxytoca
gtgacaaagaaaaaatatgacctttctggtcagggccaaactcagcccaaaatcagccctgatgatatttcagtaatcaactttgagggtgtaaaagtccgcattgttaagagcaatggcgaaccctggttcattattaaggatatttgtgcggcactggaaatcgccgatcatctggtacctttgcgccgtctgggcgcacatgaaaagggggagtattcaatacctacccttggaggcattcagcggatgattgccgtttctgaatctggtttctacaaattgattgcccgaagccgaaaggcctcgacagagggctcggcggctttccgattcagcgagtgggtattcggtgaggtaataccttcgatccgtaaaactggctcctatggtgtgccgtttgcgttcctgaacgattttagcaagcgtatggcggcgtaccagcaggaggccagtaaacgcgggtacaagttgcaacgttgcaaggaggtaaaacaggctctggaaagcgaagaagcagagttatggcgcaagtatcagcctgattttctggagggggcgagcgatgcgtaa

SEQ ID NO: 202965 - DNA, 342 bp, Klebsiella oxytoca
gtgttaggattgggatcctatcctgatatccggattttaacctttaaaatcccgactgatttaaatttctctgatttaattatcccgttacgaaccatcagccatcagaaagaggtaacgggatatatgagaaatcaaccttacgcacaatccgcaattccaacaaccggctacatccgccgctaccgtctggcagaaatgctgggtatgagcctttctactctggatcgcaaggtacgcaacggcactttaccgaagccaacaaagctgggtgagaaaatcactgcatttgacgcagtggagatcaatcgctggctggaggaacgtcgccattccgcctag

SEQ ID NO: 202966 - DNA, 1008 bp, Klebsiella oxytoca
atgaatgaagcaatgaaaaaaaatatatgggctgataaaaatatcccagcaatagaatattgcaaacttgaacgttctgcagaattacttggatgtcatattaatgatttactacattgggcagagatcaacgcaattcaattgtgcttaaaaatagactggatgccggcggtcattgaaacatataatactaatgactcatatcttacttggcttaataaacagttaaacagaaaaggcctcttgcaacctagcattagcttctcaaaatcatcaaattttacaccgagtgtgattatggcggaccccaatacatctgatctaatatacactttagacaatgcaacccttgcatatgatatacagcgaaatgatgagggtttaatttatggtcatgccgaaggtttatggtgtttctttgtgagaaatatgaatgataatatttatgagaagttagcaaaccaccattccgtaacttttgaattccttgacttagccattcatgcttcagatagggaagaagaacctgattttcatctttcggcatctgatatcaaagagcttgatttttttggaggggaaaatgaggatttattcattgaagaaaacttgccagatataatcacattgacaaagaatgatttatacatatctaggaaacagatagaatatatttacactaataaaggtagagttatggatagtattgtaactggagataaaactcgtccaattaaagacttaaacaaaattgaagaatcaatcaaaaacaatagaaaggctcctaaaaaagaagctttaatacaacagctaatgattctgaacggtgtgaaccctgatacgccattaaagacccttttggctttgcttggcataacccaagaaaagcaacgggcatatagtgagacacaattacacagagctgttagtaaactactaagtgatgccccccttgatgctgatcctaagacacttgcgagatggttaaaagaagaaggagcccgttag

SEQ ID NO: 202967 - DNA, 1224 bp, Klebsiella oxytoca
atgccaaagcttacagacatgcagatccgcgcatggataaagtcgggagagcgatttgaaggccgttcggacggtaatggcctttatttgaggttcagagaagtagataaaactccaacatggcggttccgctacaagcttgctgggagatctcgtgccatgctcattggctcttatgccgacctgtccctttccaaagccagagaggtagcaaaagagttatctgctcgtatcgcgttgggttatgacgtagcagcagagaagcagatacgtaaagctgaagcgctggcgaagattgaggcggagaaaaatgccctacgcgtttctgatcttgcagccgaatacttccaacgacaaatccttccacgttggaaacaccctgatattcttcgtagacgcatcgacaaggatataaacccatgcatcggtcatatgaaagtggaagaggtcaagcctcgtcatatcgacaatatgctgaaaggtattgttgatcgcggagcccccaccatcgcaacagatgtacttcgttggacacgccgtattttcgactatggcattaaacgtatgcacctcgaggtaaatccctgttctgcatttgaagtttccgatgctggtggaaaggaaattgcccgtgatcgctggttaagccgcgctgaacttatacggttcttccaagctatgcgtgtggcaaaaggttttagccgtcagaacgaacttacctttaagctgttacttactctctgtgtccgcaaaatggagctttgcgccgcccgctgggaggagtttgatttagatagcgctatctggcacttgcctgaagagcgtagcaaaaacggcgatgctatagatataccactaccccagccagcagttgaatggttacgcgaacttcataccttctcatgtaacagtgtttgggtcttacctgcgcgaaaaatgcaacacagaatgatcccccacatccaagaaagcaccctccccgttgcgctggcaaaggtacgtgctgaaatgtcagacattcccaactttacaattcatgattttcgacgtacagcgcgaactcatttagccgcactaggtatcgatccactcgtggctgaaagatgcctaaaccaccgcataagaggcgtagaaggtatttataaccgtcaccagtattttcaagagcgtaaagcagcattgtctctttgggcaaatttactattggagttagacacctattga

SEQ ID NO: 202968 - DNA, 549 bp, Klebsiella oxytoca
atggatgatgataaaaaaattcaagatgctgaggatgagtctattaagagagcagaactactatatgattatcaggttagccaatttgaactagcattatcatctgtaagacgcttggaagataaagcaaccaaaatgcttggtttcatgagcttagtgataacgacaacattgctcattactcgttattggtggaaagatatttttgagggtgatatttatcccgttaaagttatttgttggatatctttactcttattctttgttttatcatctatagcatgggggttctcttttagtgcgatgcaaattgctaattacgaaagaccccaatcatctatagaaatgactaagttctttataaaagggaaaagatacaaaactatcaccgaagttgcaaatgggtattcatattttacagattctattgatgaaactcatagctccaaggtggcaatgataaacaaaagttccgaagctatattatttagtgcatacttatttatatcatttgttgtatcttttatcataataaaattcacagcgtag

SEQ ID NO: 202969 - DNA, 465 bp, Klebsiella oxytoca
gtgcgaaaactgctgttagcgttttttcttagcgtagtattttgcggttcagcaaaggctgagatatctaagtttcagatgaaggcgattcagcttgttcaagttcaaaaatttacgaaatggcagcattatgcttcagcgaccccattcatagctatgaatgggcgacctttttcgataacgttggaagacttctcaggcattctagccaatacatttcgtgagtgcagcgatatggatgcgtatacaaacaggcaaggaagcactgaggcttgtgaagcatatgtttacaaggggttgaaagaatggattgatttatcaaaagatccatctgttagcgataccgcatggaaaatgggtacatcatatgcgttcaatactcacaacccgataccgacaaaaaatgtttgggacttcaacggatgggccgcaggaattcgcgttgccaaatctaaagggtactag

SEQ ID NO: 202970 - DNA, 513 bp, Klebsiella oxytoca
atgagtgattcatccccattagctttaataaaaatcttctttaaagattcagtggcttttcttgcgtcggtattagttctggtagctggttcatattacttggctgcaatttacttttctgaacgagttaacctaatggcttcaataatatatctcatttctgccatctcgttctcggtgctaacgatcatagcactgtgttatgtcggctctgatgcatacaagctttgccgtaggttgcgaagtaagcggatgaggtattttgttatagtaataattctttttaattcgattggttatatagggactgtttttatttctgccgcaaatgtaagacaagcagcaaaaatagtttccatacctaacgaattacgggaaatcaactcagccccaaccatacccgaaggggtcacctggggacagcttgccgaactatatggcgatacactgatttcgctcaagcaatgtaatgccgacaaacaagagatactaaaaaaaatcgataagcagtga

SEQ ID NO: 202971 - DNA, 462 bp, Klebsiella oxytoca
atgaaccgcatcgcggagattacgtgtgccgtggtaattgtcgccctgtccactatgggatggctggcgaatcactaccactacaagtacctgcaggagcagaaacgcgctgataccgccgagcagagtcttaagctggcgaacgcgacaattaccgacatgcaggtgcgccagcacgacgttgctgctctggatgccaaatacaccggagaactggctgatgcgaaagaaaccattgagcgtctgcatagcgatgtcattgctggccgtaagcggctgcagctcaacgcaaaatgtcccgcgaacggagcgaccagcgccggcggcgtgggcgatgcttccggcccccgacttaatgacaccgctgaacgggattatttcaccctcagagaacgaatcgtcaccatcaccgggcaagtgaactacctgcaggactacatccgcacgcagtgcctggagtga

SEQ ID NO: 202972 - DNA, 606 bp, Klebsiella oxytoca
atgtggcaaggtataccatttaagttaattaatactcaatgcttggatgctttaaatataataataaaaaatgtaccgggtgtagtccccccggcaacaacagatttttatggtcctattttaacaggcttggcaactttggttggtggtgctttaccggctttaattgcattcaaggctattaaggcaaataaggaacaaatgctccaccaacaaattataataagcaagcaacagtttattgataatcttagattgaaattgtcggctttttcagctcagatgggccggttggatgtatatattaaccagcaagttcaatataaagggttgacggtacgttcagcaccagaagaaatcagggataaaattgcatgtttagcatatgaactagatcttgaatacaaccatatagagcttatggtgggtgacattcaaagatttgaaaaattattaaatttaatgagagaaattactgatcaatatcttggaaaatttgaagggaaatctacaatcgatgtttttgaacaaatggagcttttaactcaagaagcgattcgttgtatttcagatgaatggaaacaaaccatcgataattttcattaa

SEQ ID NO: 202973 - DNA, 435 bp, Klebsiella oxytoca
atgttcgatcccgtaaacctgcaattgtttgagttaatttgccacctggaagttagcctgcatcaggcatcaacacgccgcagcgcgcagcttttgcagcagttgttgcatgacgaatttctggagataggccgtagcggagaacgttacgataaaacgcagaccgtaacagcattaattaacgaggacgtggaggccatcaacgcttacagctttcagttggctttactaaccaaagattgcgcgttgcttacgtaccgcagcgaggttatcgattcagacggacgcgctgctaaaaaaacgcttcgttcgtcaatctggcagaggagccatatttgtgcaaatcatcaggaatgctggcagctcagatttcaccaggggacgccagtgaaagaagttcaggaagaagagcaggcgagcaagacggcgaattaa

SEQ ID NO: 202974 - DNA, 210 bp, Klebsiella oxytoca
atggaatggtccgtatttgtttcagctgagacgttgaggcccggcgcgtatgcccgtaacctggcttatccaggtacagacgcgaaacgcaccttgggagaaggtgggattgtatgccaccaggtgaacgatgaccggaggtttactctcctgcgtcaacagcgcgctaagcgtatcgaggagcgcgagatgctgcgcctggagtggtga

SEQ ID NO: 202975 - DNA, 3600 bp, Klebsiella oxytoca
atgcacactacagtaaccccgccatggctggcggatgacgagcagctggaactgacctttaaaaagggcaaagaaccgttaagccaccgccgctggccgggagcaccggtgccgcaggtcgcagagggacgtattcaacagctggcgaatgatttgccacaacgcttcgggaacacgcaaccgacaacatttcattacggcgaatgtgatgagcagtggcaacaggctatagcgcaggcgatcggttacattaatatgcccaaaccagcaatgcctgcccgtgtaatggctgtactagtagagctcagtgacagtcatcataccgaatatttagatgctatcgttcaacaggaggggctggagtacgccactgaggtggttattgaacggcagaagataggtattcaatacagtacttccaatatttggcgatcgacaaacaccgtcactttttcccccttcgccaggcaaaatgtctggcgatcctgtacctaccatgagttcgatatccgcctgcgtaagcatttttcgttggcagaagagtatctatggcagcgctgtgtcaacaagctcattgccgcgcttcctgatattccgccagatcgccgtccgttaatggcgatactactgcctgaaagagcagatatagccactgagatggcgacactgccttcttcatcggcagagtggctgaaaacggtgataaccgtcattcccggaacgctggcaaagctccgcaagatggacgtgtttaataaccacgaaaccagcgatgcctggtacgaaaaccattatggttatgctgcctgcgctgcgctgctgcgcgaacaggggttaacagcagtatcacgcctggcaccgtatgctcatggtgacgattgcgccgggctgctggcgcagatcaaccatccgcaggccgtgaccttactgctacacgtcgcagataaaaatcaacgcaacatggcgcgcgtgaacaaatatgccaaacactttccacaggcgacgctggccgcgctggcggaactgttggtgcaaaaaaatgtggcaggaagcctcggctggctaaataaatggggcgatgaaccggatctacaagaacgtgagtgccgccagcccaagctggaggcgatttggcaatccctattgcaggtattactcaccgctcagccatcactggttgagcaaatactgccatggctaacaccacaagccgctgctctgttacagctccgctcagcgaagcagacctcagcccctctccccaccaccgatagcgccagcctgccggaaatcctgctatcgccgccatggcgcggcaaaaagaaaaaagccgccagcccgcgttttgaacttcctgcgctgaccgttgcgccgcaggagtactggctgccgggagagcgagaaacgctggccgccagcaaaccggcctgcttttttaacgatcttccgctgcacgagcgcctcacccgcaaaggcgaagttgtattaagagaactgggctttgaggatatggattatctgttccatcaatatacgcttaacgggcagtcagggcattcgtggtccggatatagcgcatacggaaataaggagaggtggtataaaacggccgtcagggcgctgcacagcggcgaaagcgaggtactgctgcaggcctggcgagaccatctcgaagaaggttataagcccaacgactactggaatctttatctgctgatgcaactgccccgcgaacaggcggcggcgctctggcggcgtatcaatgaagagaacttcaaattcgtcgggaccgagtatacgctgagcattctcggaaccgacgccctccccggcctgctgctggcgctccagcatcggccaaaagagatttttccgctgctgattcatctcggcgcgacggagctggccttgccggttgctcgcctctggcggcgctttcaggcgcagagccatctcgcccgccagtggttactgcaatggccggatcacgccgctgccgcattaattccgctggcgttcgataaaccaggcgataaccgcgaggcggccattaacgccctgcgtcttctgcatcaggaaggccacggcaacctgctgcaaacggtcgcacggcgctggaacgaaccggcgctgtggccagcgctggagcagttgctgttgcaggacccgcttgataactacccggcccggacgccgaaagcgccggacttctggcagcccgtgctctggcgcaggccgcggcttatcagcaacgaccagccgctaaccgccgacgcgctggagatcctcggcgagatgctgcgcttcgcccagggcggccatcattactgcgggctggatctcgtcaaagccgcctgccagcctcaatcgctggctgctttcgcctgggatctcttcaacgcctggcagaattcaggtgcgccgaccaaagagagctgggcgtttcagacgctgggaatttttggcgacgagggcacggtgcgtgatttaacccagcttatcctcgcttggccgcaggaggggaaatccgctcgcgccgccagcgggctgcatctccttacccgcatcggcagcgatatgtcgctcttacagctgcaccacatttctcagcgcgcaaaatctcgcccgctgcgcgacagcgcggaacagtatcttaaagaggtcgccgaagcacgcgatctcagcgaagagcagctccaggatcggctgaccccgacgctggggctggatgacgccagtgcgctgacctttgacttcggtacccgcagctttagcgtacgttttgatgaaaatctgctgccggtgatttatgaccagcagggagcacggcaaaagagcatcccgcgcctgcgcgccgaagatgaacaggcgaaagccgcagaagcgctggcccggctaaaaggtttgaaaaaggacgccactcaggtagcaaaacgcctgctaccgcatctggaaaacgccctgcggctggcgcggcgctggacgtatgcggagttccagacgctgttcgtcgaccatccgcttacccgccacctgacccaaaggctgatatggggagtttacgccgctaatgaaccgcgtcgtctgcttaatgcctttcgcgtcgccgcagaaggggaatactgcgacagcctggacgaatccatcacgctgccggaagatgttctgttcggcattgcccatccgctggaactggatgacgaaacgcgcgcagcatttgagcaaatccttgccgattaccagctattggcgccgttccgccagctggcacgccgcacgatattgctgcgcgaggaagaagcaacgcgaagcaagctaacgcgctggcagggaaggtcgacgacctgcgggcagctgctgggcatccgcagccggggctggtggcaaggtagcgaaagctatttctgttacgatgttgctcagcatcggctgatactggaaatcacgccgggatttgttcactacagcatagacgctaaagctcctcagcagtttggcgcgataacgctctattacggcgaacaacccgttgcgttttcccggctcgatcctcaggatctcagcgaagcgctaagcacaatagagattatttcccgctag

SEQ ID NO: 202976 - DNA, 1086 bp, Klebsiella oxytoca
atgaaaaacgcgatttatcttttaaccggcggcattgctctcgccctgtttgccgcagcaccggcgcgcgcagaggagggcggctgcgaagccgtgggcgggcctgctaattttactaccagctttgccaatgactggacaaaagagcaaaacgtcgccgggactttaatagatctgacctccggcaccacctctggcggcagctacaagatggcttgcaactgccccgccaacaccaaggttaatctctactatgccaccaccacgccgttagctaaccccggctattccggatttcaaaaattaaatgacagtctggatattaaaacggtgattaccgatgtacccggggtatcggcgcttaaggttcccacagatgtgaattcaccggtcagaggagacgggtcttttcaggcctcaaagggcaatagcgtatgcagcggggatcctgaggatcagcgcggggcatttaccgtaggcagtaacgtcagcattacctttcgcgtcacaaggtcttttttaggccggatggagatccccagcacgcatattgctaccctccagtcggcctggagtagcagcagtagctatccaaaatttatctacaaagatattgccgatatatatctccagggcagcatcaccgttccgcaaagctgtaagattaacgaaggcgatgtcattcgggtcgaccttgggcaaatcagcgcctcaaaattcaccactaaggaccacatgcccgacggatatactcaagtagaatttgatattgtctacgattgcggagatacatcattgtttggaagaaatgacactctaaatctgattgttcagggtgatgacccggccagtcagtatgtgttagccgcccgtcgccgggaatcagataatgtcgcagacattggcattcagataggtgaaagaacaaagggaggagttattccttttgagcaagggattgtcaatttagataagtcggcttcaggcgtccttaagatgcgggcataccccattaatctggtcggcggagtactacagccaggaccattccacggctccgcaacccttaccgcaacggtaagatag

SEQ ID NO: 202977 - DNA, 564 bp, Klebsiella oxytoca
ttgcaccccgacaaaaccacggatcagtattgttccattacttgttccaggatgatgctttttcaagcagggtactatattctggttgaactccctttgcaggatataaccatgataacagtagagaaatcagatccattttcttcagaatctcatcgcttaatcgagatgctgtcagctgaacttgccgctattactggtgataatggcaaaaccaactttgctgttgaagctatgaacaatgacaaggcattatgggtattggcaaaaaatgcacatggcgatgcgataggatgcggagcaatccgcccattaacgcaaaacatagctgagcttaaaagaatgttttcagatcgaagtgagcctggcgtgggtaatgcattacttacttttctggaaacctcggcaaagcaaatgggatatcgagaactgaaactggaaacccgacatatcaaccaccgggccgtcagcttttatgagaaaaatggatatgttcgtattgataattatggcccatacataggaagagaagaagctgtctgtttctcaaaaacattgtactga

SEQ ID NO: 202978 - DNA, 765 bp, Klebsiella oxytoca
atgaactattccttagaaaataaaattgccttagtgaccggcgctgcatcaggtattggacttgccaccgcgcgcgcctatgccgaagcgggcgcgtctgttgtgctggctgacctgaatgccgaagcggtacaggctgcagcaaatgatcttatcgctaaaggatacaatgcgaaagccgtcatctgtaatgcggcaaacctcgatgaagtggaagcgatggtccggactaccattaccacctttgggcggctggatattgcttttaataatgccggtattcagaacgtcctggcagagattgccgatgctacggtggaagactttgaccgcgtgaacggcgtaaatctgcgcggcgtgtggggatgcatgaagtatgaacttcagcagatgcgtaaacagggcagtggcgttatcgttaattgctcatccatcggcggtattgttgggggcgcagagcgagccaactaccatgccgcgaaacacggagttttgggtcttaccaagagcgctgcgctggaaaatgccgctcgcaatattcgcgtcaatgccgtctgcccggggttaatctggacgccgatggcggaaacaatggcggcctccggccagaaggacgcactggatgcgatggtcaaaaatgtgcctatgcaacgtcatggccaggcggaagagattgctgatgtggtactgtggttatccagcaatgcttcttcctatgtcaccggccaatcaatttctgttgatggcggcttaaccatgcgttaa

SEQ ID NO: 202979 - DNA, 1023 bp, Klebsiella oxytoca
atgtcattattaaaaaggtcattattgtgctcgtcattattaataacgaatgccgctgttgcggctccaaaccagcctgttgctgtcgccgatggtattaatatcgtgggttcgcagaaagtttcatttcataatgggacaatcataatggcggcgaatttatatctgcctgagaattatgaccgcgcaaaaaaatatcctgccattgtggtctctcatccctggggaggcgtaaaggaacaggcttcaggactctacgcccaacaactggcaaaacgcggcttcattacgctggcgtttgacgcttctcactatggtgaaagcggtggagtgccgcgcgatctggaaaatcccgcagaccgcgtgcaggatatccgcagcgccgttggctatctcagcaacctgcctcaggttgatgactcgcgtattggtactttaggcatctgtaccggagggggctacaccctccatgaagcccaaagcgacctgcgcgtgaaagccgtggctggcgtggtcacttatgatatcggggaggcaacccgcactggtattgaagagctgcccgttggcgaagccgatcgtcagaaattgctgcaaagtgtggatgagcagttgaataaagaagcagctggatcgcctgttctcatccagcaattgttgccttcgcggaatacgctgaatgacagcacgccgaactttgtgcgtgaagccactgactattacctgacgccgcgcggcgctcatccgaatgcccataaccgctatgtaatgaccagcccgggtctgcatatggcgtattatcccctggcgcatatggatcagattgcaccccgttctgtgctgctgattaccggagaaaaagcggaaactcgtaaattcagccagcaggcctatgataatgctaaacaaccgaaggaattagtggtcattcctggcgcatcccattttgatttatacgataagccccagtttgttagtccggctatcgataaacttgccgcattctttactaaaaacctgtaa

SEQ ID NO: 202980 - DNA, 903 bp, Klebsiella oxytoca
atggctcgtgaaggttttggtgacttaatcgcattgatcgctgttgcgcaaacgggaagtttcacccgggcggcagcgaagctcggcgttacgcagcctgcgctgagcgcgagcattcgcggccttgaagaacgactgggcgtccgccttcttttgcggagcacccgcagtgccaccttgacgatggccggacaacaccttgtggatcgtctcgttccggagtttcagcaaatcgataatgaacttaatgctctcaacgatctccgggacacgccgacgggaacgctgcgtattatcgcaattgattacgctattcgttccgttttatggcctaaaatctctcctttcctgaagcagtatccgggtatcaccattgagttcatcagcgaatatgccagcgtggatatcgcggccagaggctatgatgccggggtgcgttttggccaggagctggcgcaggatatgatctctgtacgcatcggccccgatgtaaaaaatacggtggtgggctccaccgactatttttcccggcatgctgttcccgagatacccgatgaactcagccagcaccaatgcatccggttgcgaacatcaacctatggcggactttatgactgggagtttacggatggcaagcgtaacttcgatatcagagtcaccggcccggtgatatgcaataacgcttatgacatcctcgatacggcaaaagaggggtttggtcttgcctatctgccactggatatggttcagccctggattgattcgggtcagatggtttctgtgcttcagtcgtggtgtcctctctggccagggctccatctctattatcccaaccgacggcagcattcacgggccatgacgttgatggtcgatgccctccgttatcagggaaaacaggcgtga

SEQ ID NO: 202981 - DNA, 900 bp, Klebsiella oxytoca
atggctgatgaaatctaccgggatatcgtggcgtttataaccgtcgcccgcgcgcgcagttttacgcgtgcggcggccgaactgggcgtatcccaatccgcgctaagtcacaccattcgtcaacttgaagagcgactgggattgcgtctgctgaccagaactacccgcagcgtttctcctactgaagcgggtgaacgattactcgaacgggtatcgccccggtttgcggttatcgccgatgtgctggcctcattgcgtcagctgagcagtaagatcgccggaacggtcagaatcacggcttcggattttgcctttaacgctttcgtgtggccccgactttcaggtgaattgctaaaatatccggacctcaaactggagattgtcaacgagcctgagctgaaagatattattgccgagcgttttgacgccggtatcagaccgggagacaggatcggcaaaaacatggcctctgtgcctgtctcccccgatctgcaaactgtgattgtcgcaactcctgcgtatttcagggggaatccgattcccctgacgcctggtgatttaagccagcattcgtgtattaacagccgtttttcgatgaaagaggggatcaaagcatgggagttgaagaagggagatatcaatctgacatgccgtgttgaaggaccgctgatctttaattctgtttatgcggctctcgatgccgcgctggcaggatatgggctggcttatctgcctgaaatgcttgctcgaccctggctggaaagtggccgcctgcaaagggtactggaagcgtggtgcccttggcagccgggttaccatatcttctattccagcgagcgtcagctcctgccagcgttatccctgattattgagacgctacgctacgaaccacaatcataa

SEQ ID NO: 202982 - DNA, 213 bp, Klebsiella oxytoca
atgcggaatgtggtcgagatgaagcaacatcgctggtccgtgccgggcgtggattttactcaggtgattgccggaaacttgcaactgttgcctgacgacgccgaacggttcgccgcgatcgccggggatcatcaaacggcagtagaaggcggaatgttcttccgtgaacctgacggatttgctgacattgccgctcgtcttcgtcatgcgtaa

SEQ ID NO: 202983 - DNA, 879 bp, Klebsiella oxytoca
atgaccgaagcagaaccgttgtcgtataacgcactagtctggctgaaaaaacttgatcatcgcctgaaagcgaaatatagcgagaagaaaaatactgacggtaaaatagtgactcaggttttgcgttggtgtactgcgctggatttgatcccggctaacagtttgttgctgcctgagttcatttttacagcggcgttactgaataaaatttcagatacccagcaatgtcttaaacaggcgagctttcgtgacgatcttagtttaaagaaccgcattgagagtgcgcagttaagcgatcaggagattaaaacggcgggaattcgaccacagcagcatcgggtactgctccgtcttaatcagcccttagtcaatgagttggggatgactattgaggttgtcgatacggattggcgtaatattactctgatgcagtttgatgttcttatcgtggtggagaatcaggattgcttctaccatctggcgctttttgattattcccggtgcgatttcagttcgcctctgattatttaccgtggcgatcgggcatatagcaagggggctgttgcgttgaagcgttgctggttgaaaacagggaaaactgcgatctattttggcgattttgacccgaagggggtcagtatcgcgatgaatgaaggttatcattttatgttattaccttcaccatctgtagtgataaaaaaatcatcttcagcgatgtttcctgatgttcagttaaagttcttacctgaattattaagaggtgaggttcattgccattttcgtgactatctgtttgttttggaaaaacatcaggcgctgaggcaacaaaaaatgcagggtgaaatcttgaaaatggttatgttgaaaacatcagattag

SEQ ID NO: 202984 - DNA, 1239 bp, Klebsiella oxytoca
atggcgcaggagatttcttcgttatccggtctgtttaaaaacggcgctgaacggctggcgttgttgggaaaacaccatcacgccttaatgaagggttatgtcgatgggtttattgatgaaacggcttttagcgaccagacattaaaaaagctgattgcagcacgtattgtatggcgtcctgatgagcaacaaccgctgatgctacgcccgctggtgagtgaacttatcgccagcatggttgctgatgagagccgacggcagattaacgcggatgtggcagaaaaactggagcagatccgcaataaggtgcaggcctggcgcgatgcttattataaaggtgattacagtattgctgaacggcaaatgcagaggctgactgagcttgttcacgatctcagcgggcaatttgaagaggcgatcgacagcctctggcaccgtctgaataatgatttcggtttcgtcagcagcctgaatgaaaaaattaacgagaatgcgcgggcgcaaaaccaggttcgtcggttgcttgatgggctggatttgatcgttttccatgaattgatagagtttgctgaaaataatagctcactacgtaaattattagtgagtcagttacaattgcgtgtcagccttcaccatagttcattattggccgttcagcagcgtctggtggatctgatggctaaatttcgccaacagcagtcgcgcacattattagtggcaaatatggctgcttttttgcgtcagcatccacagtatcaacccgccagctacccggaacgccgggaagtgccggatgtattcaatattgcgacttcactttcactgcaagcctccatttcgctcgacagacccgcggatcgacaggtgatggcggagatgttgctcgttttgcctcgggcatcggttatgcctccgccagtgccaaaaagtgcaggctcagtcatacctcccattgatgaggaggtcgctgctcgtcagattgcgcttaaaatggacgttgaggacttttatgttttcgctgccgggcaatcagggccggtgagcgcgctgcattatctggcggaaaaccatctgaactgggacagcgagatatggctttatcaggtcattacggaatatcaatcattgccgttagcggataaaccgcgtttctggcagcgttgtgatgagcgtcaggccagcccggtaaacgatctgcgtattatattggatgtgagtattggcgtgagggtaaaatga

SEQ ID NO: 202985 - DNA, 624 bp, Klebsiella oxytoca
atgctggaacacggacttttaatcaaaaggctactgaccggggaatttatttgccatatcaacgacccggatgcttatcgtcatttacaggatgagagtacccgacaggcgattaataattatttgcgccctcttaactacagaatagtcagtaatgaaacacaaaccgtctattatgcgggcttttgtgagatgaatcgcgatacccgcagccagcttatgaatcagtttaaggacatcatctcttctctgttgcctctgcttgagtggttacaactcatacaggagacgcaagggcgggagagtacgctgaccgccggtgactatatcaggttgtcggaaatcatgacgcgtgtagaggataatcagagcctgcaacagcgtctgaatcagctttccagcgatcgttttttcaattgtcgaagtgattccattgatctccagctcaaacaaatttttcggcgtttgaaagagcacggctatgtcagacaacccaacgccgagcagcagatatttattgccaccgggaaaattgattatttgattgatgtgatccgctttatccgtgatgaagaacatttaccggttgaagacacaccgcctgttcagcaggagcttctgtaa

SEQ ID NO: 202986 - DNA, 3666 bp, Klebsiella oxytoca
atgccacaactgcttcgtatcattcttatacacactcacctgcctggcgttgttgaaattcaactggatcagcataccaatatttgtggaactaatgcttccgggaaaacaactctgcaacgcctcgtcccggttttctacggcgaacaacctaataaagtcgtaccaagaacgcggaagaagttcgacgagttttatctcccctgtagcaatagctatatcatttatgaataccagcgagaaacgggcgacaattgcctggttgttttgacgggtaaaggtgaggggggcgtagaatatcgttttgttagcgcgccttatcatgcagactttttccttcgctatacggaagatggtgcgaaagggctgagttataacgaatggtctgctcagatgcgcagccgggatgacgtctcagtttcagccaaaataggttcaacgacggagtaccgcagcatcattcagaatgatgtagcgtcattacgcggtaattcgacagagacgatgcggttacgtcgtttggcggcatcgttcagtctggtgagtggtaactataagctcagacatattgagaaattagtgagcgccgttcatgccggtgaaggcaaaatggaaacgctcaaaaccatgctggcggcgatttttgccgatgatggtgttacgctcccgcaaacaaaagtaaaaagcagcgttgcgcgggaatggatccaaaaaatgcgccagtctctgcgttacgataaattgcagcaggagtttgagctcttacagcgcctgggcctgaaactggatgataccgaggcgcagttagccgcgcttcaccctctgttaagaaatgatgaacaaactcagaagcagaaaagggcggatgcagaacagcaacttattcagcggcggggagagcttgtccaattagaggattattttaatcaacagagtcgtgaactgaacgatcaattaagtaaaacacaaagcgaattaaaaacggttcagtcatggctggattatgtccaggaagaaaacgatcgttatgaacgtaaagatatccgccttttgcagacgcacatggacgaattaccccagtggcgagagacgcttttagcgcaaagtgagcaatatcagcttatgcaggatcaagtgggggagctttccagaaaatttgaacagcacaaagcaaaacttcaggaagtcttttaccgccagaatcagttgaaccagcaaaaaattcaggattgccagcgggaaaaggagggcgtcagggataaatttgatagccagaaagagatatttcggcagcacttcgaagaacgaaaacaacagcaggaaaaccactatggtgaacagctggagattatttctcgcgatcggacgactgttaacattgagcttaaacattctcagttaaccaccgaagaaaatgaagaacgccagattgctgaattgcgtatcgagcaagctcaggagtgttcattgcaactgggcgagcgacgacaaaatgcgcagacaaagctgtccgaggcccgcaaacagcaagatagcgcagaaaaacaactgcacgatgcccgcgccagcctgcatcggtttgaggaacaattgctgcaactgcaccgccagttagatcctgaacaggggacattacgccacttcttgcgttcacgttacgagggctgggagcagaatttgggcaaggttctgaatgaaaacctgctggaacgtaaagacttgcagcctgatctaagggagctgtcggaatcgctgtacggcctgcaactggaattaagtgtgctggatatgccggattttgcgcaggatgaagcttcaattcgacacagtcttgataaggcagagcaaatcagggcgcatgctgaagaagtgaagaaaacggcagaagccagctttcaggagctgtatcagaacgtcaggttcctacaatcacaagcggacgagtgtgaaagacaatatcaacgccaaaatcaggaagtcggctatgcccgtgatgcccgtactcgtttaatcgcagagcatgaggcgctggagcaagaacgtcggcgggaaaaacgagcccgcttaagcacattagaaaaagcacatattgaattaacgcagcagaaagaacacgatctccgcgcgttaacggacgagcacaatgcgcaaacgctgcaatggagtgtcgaccttcaaagtgaacagcagcaaattgatgagaaggtggaagaactgtcccggcagataaacaaaaaacgcgccgatatggaagaacagataagaatatttcagcaagctctggacgatgatttagcgaagaagggaattgatcctagcgaagttaaaatattgcgggagcgcattgaaacgctaaaaaaagatattcaggctgttgaagaacgtcgggatgagctgaccgaatggcagcgttttatcaaacttgactgggaacaggagcgccccgagaaacagaagcaggaaggtgaactctctcagcagaagcgtgagctattgcagtcagaacgtcagttaaaagcagagtatcagaataaaaaagacaggcttaatgatgagagaaaaaaacatgatacgctgatgcgtcaggctggcgagcttgttagccaattaaagatattgctggaccgattattgcctctgccgttggctgaaattgttccggcttatattgattccgccgctgatatcaatgaacggatgtcacgtaccagcgatatgctggagcaacacgccagcgtaagccgtacgctggagagtaaactcaatgagtttaagtcacgctttaatcaggacgcagaccccacttttcttgaattaatggattctgagatagataaattacccgctccttcaaggaaccggcaacaattgccaatacttgagaaactcctacagcttcttaaagataaacagcagcaattgctggaaatgggggaaaatatcggtggcgatctgaaaaaattctttgatgttttcagtgatatcaatcgccggatttcgcaacaaagtcgacgcttaagcgatgcggttaccgacgatttgcaactggaaggcatcaataaatcagaggttcgcattttatcgactatcgaccaattacgattctggataccattaaagcgttttgctcaaagctatagtgactggcgctcgtctggtcagcaactccctcccgaaagctatttgaatgcccttatggatgtggttgaactgctgcataccgatgagcgttttactatggaatcgttattaaatctcgaacttcaccttaatgaaggcggggaagatattgttatcaaaaacgatcgccagctactggaagcgtcaagccacggtatggcctatctaatcttgtgcaaatatcttttggcgttcacgcgtttgttaagaggcaaatcagacgccgttattcactggcctattgatgaaatcggcacgctggcctaccacaatgtggagaaattatttattgcctgtagccataataatattgtgattgtcggcgcttttccgaatgcggagtctgatgtgttaatgctgtttaagcaccgttatttgcttgatgccgatcagcttgagccgactcagcgcaggctgaaaaggatccagccgaaagtgagccgccttgctgcccgactggcgcagatggaactggaggcaatataa

SEQ ID NO: 202987 - DNA, 972 bp, Klebsiella oxytoca
atgcaatgtaaaaacatctatgacattttgggtgttgaaaaagcggttattcaggggccaatgtcctggcttaccgatgcacgtctggtagcggcggtgagtaatgccgggggtttaggcgtgttagggccccatgcaggacagacggcagagaccgcggcaacgacaccagaagatgcagctaaaaaaatgcgtgatgaaatccgaaaaacgaaaaaatttacccaaaaaccctttgctgtaaacctgctacctcgcatggataacgatgtctggacccctccgctattacaggtcatcaaagaagaaggcgttcgtgcggtcgtatatgtgggccatgggctagtcaatcaaacggtttttgatgagctaaaggccgcagatatcaaaatcatttaccgcgatatgaaccctacaccggaaaacacccgaattgccgaagctgccggagctgacattatcgttgctactgggtttgacgaggggggaacgttgcccggaacggtaatgggaacctttaccatcgtaccgttgattgtcgatgcggtaaaacggatcccagtggtggctgccggggggataactgactcgcgcactgctaaagctgcccatgcgttaggtgcccagggggtactggcaggttcagcctttatcagcactattgagagccgtgttccacaatcagtgaagcagaaaattgtagataccaatggtctggatttacgtctgttccgcactcacccggcttactatcgttcgctcccaggcaaactggctgattcactggtggccctggataatgcaggagcctcccgtgatgagatgttcgccgctatgggcgggggacgtgggctgcgggctggtatgctcgaaggaaatactgatgaggggtacatttcgcttgggactggaataggcaatatccgggctatccgtagcgtggtcgatgttgtgaatgatctcagcgtgtaa

SEQ ID NO: 202988 - DNA, 897 bp, Klebsiella oxytoca
atggacaagataaaaggcatgcaggcatttgtagcggccgtcgaaaccggcagtttcgccgccgccgccaacaaacttagtctgtccccgcagcgggtggctaaagctgtcgcacagcttgaagaggggttatctctaagcctgatcaatagaacaactcgccgacaatcgcccacagaatttggccagctttattaccaacgttgccgggaaattctcaaccaaatagaaaccgcagatgccatcgcctggcagatgaaaaaccaaccagaaggtaacattcgtattagcgcgccagtcacctttggcaattcaagcctggtcgacatgatagggaactttctggataattttcccgctattactattacgctggaattatctgaccatcttgagcggggggaagataatctgagcgatgtcgcttttcgcatcggtgatatactggaccccagccgcattgcgaaaaaactttcgccctatcaacttattatttgcgcctctccggcttatttagccagacatggtataccaaatacgcctggagaattggtagagcacgtttgtctggtctataccatggccaatgacccaaccaataaccgctggttattctcccatggaggccaggtctttgagcaggaagtatcaagcaggttgcgaattaacaatagtcaggggatattggccgctacattagccggaagagggataatggttgccccactactccaggtaaaacgctaccttacgagtggtgagttattgtgtattctggagaactttaatccgccgccccggccattacatttactctactcacaggaattaaaccgccgggcaaaaatacaggtatttatcgatgccgccacaagatggttctcaaagccagattaa

SEQ ID NO: 202989 - DNA, 333 bp, Klebsiella oxytoca
atgcaaattggaaaactggcgatgctgacgggcgtcagcatacgaatgcttcggtactacgaaagcgcgggtttactccaccctgcgcgaaccgatgcgggttatcgtagcttcacgccagacgatatggatattgtcagacgaatactcatcctgaatggcgcaggcttcacgctaccggttgtgcgtcgtttattaaattgcatacagtcgggagttgaaccttgcgaggaactgaaaattaaagtgcgggaacaactggcgcagatagaccgtcagtttgaatcgctctcggaaagccgtaagcttcttaatcagttgattatcggttag

SEQ ID NO: 202990 - DNA, 378 bp, Klebsiella oxytoca
atgttaaaattagttatgtgtgttaaaaggcgtgcccatttaacgcgggaggagttcgaccattactggcgtgagcaccatgcttcattagtgatcaaacacgctgaacgtcttggtattcgtcaatacatccagaccgttccctttgcgaacagtgccgcgcaatcggcacttcagcagacaagaaattcatcgtccgtcgattttgatggttgcgccgagctatggtgggacagtctggaatcgcatcttgcagcccgaaaaacagaagaaggattaagcgcccttcaggagcttattgacgatgaggggaaattcgtggatttgcagcattcgcaactctggtacggtgaggagcggtgtgtgatttgtgagtga

SEQ ID NO: 202991 - DNA, 123 bp, Klebsiella oxytoca
atggtgagtttcatgatttttgaccatatcataaatgacgtctcttctgatatggccctgcagtttcccaccatccagatagctaccgctgaccgcaacggtacccttaccttcagcaagtga

SEQ ID NO: 202992 - DNA, 711 bp, Klebsiella oxytoca
atgttaaacaataatccatttgataaagatcttctacaggcaattaatgactggcaaatagattataatcgaaaaagagcagcggctttgaaagaaaaagctaaaggcttgcctttgaaatataaaacttgcacccatgcctgttataggaaaatagaacttaaccaaaagggggttttctccttagttggaaaagcaaagttaaaagagaaaatatcatcttggagttcgtctgtagaagttgtaaaagtattcaagcgaggagtgacactaaaaaatgatgagcaatctttcattgtaagttataaaccgactgcatccgaagttattattaatcttgaggtggtatatcaatgcccattgtttcattctgcattgaagaaacatcaatcttctataaaaaacttcaatagaggtattggtgcttatggcgcagggcaaaaagaaatagttttggaagttgagtttattacacgtgataacatctatatgatgggagggcgatcatcagacattaatatgatttttgctaatcaagttatcggctggttacctgatggctctacaattgccgtatatgatgattgtaagtcattttgtattttcaaatggattgacccagcgcaaacagttagtgcgttagataagacgttgcagcgttcaggtcagatcattccatataatgtattttctaaaggatacggtttatag

SEQ ID NO: 202993 - DNA, 1902 bp, Klebsiella oxytoca
atgaagctaagaataaatagaatatcattaaaaaacttcaaaagttttaaaaatattactatcaatccaaatcctgattttaatatcattattggggaaaatagcgctgggaagtcaactgtttttgaagctattcatttatgggagaaatgttataaaacttatatccttgcttcaaggaaagggttttataaagttaagaagtcaacaaacagatatgttaattatcaagaactggattttttgcgaatcacaagtgatgaggatctttttcacgatccaagagatccgaatctagggaaatgctctgaaattactctgacattaaaaaatgaagaggagaatgataagagttgggagcttggattcaaagtcacatgtccaacatcaatcgaaaatgcttttttccgtgttcaaccaatagatgaaaatcagttcactaactttgcggaagaattttgtaaagggggggcatttttggatgaagctatctttatttaccagacgagaccagtagcaggagtccatcaatttgagccgtactataatgaggctcagattaagagaaaaatccaaaaaggttattcacacgaggtccttagaaacaaaataatctctaaaagaaagtcaatatcagatttagaattaagcatatctgaaatacttgagaaagatgtcaagttcattattccttcggatgctagaaaaaataaagatgaattcattcaacttgatgtttcaatcgatagatcaaaatattatgaccttcaccttcaaggtagtggttttcttcaaattgtagaaatactatctactgttgaatttatagatgctcccctcaagttactgcttgttgacgaacctgactcacacatccacacaaagctgcaacataaccttctcgcccatttaaaaaaaatagatcacaatcagttttttattatcagtcataacgatcaatttgtgaccagcgcaggagaaggtgaagtattcttcttaaacgaagacgctaaatcaagtggtcacctagaagcaatcaacccaaatagcttcgatattataaaaaactcattggggggggtgattttatccctcgagagacttaacaatgccaaactaatcgcatttgttgaaggtgaggacgatgaaaaatatctaaagaaacttaacctaaagatcaaagaaattactaacccaattggttgtttaaaaaatgtagttttctttccgttacgagggaaagataatattctccaaaaggttgagtataataaaagaactttaaattcgattctaaatggcaaatcatggcatgttatttttgatcgagacttttctacaaacactgttgaccatgatcttaaacaaaatattcttagaaagcgttgtgctccatatagtcatatgggatactgtattgagtcagtgttattttcggacctaaatattcttaaaaactatttgtattctttggctccaggtattgttgaaaacgaattttcaacacacgttgacaccttaattaatgaattaaaagattctgtcaatgatctagcctccccactaaacaaagaaatagagattagattcaatggtcaaaagaaaaatcgaccagaattcgccaatcttaatttcgtggatgtcgtaagatcatggtgcgaagatgaagtattcaaacctgagcgagtaatgtcaaaacctcttatccaaaagtttgttacagatctagaaaataaaatagggatttctcttttcctgcgtggatcaaatgtagatgaagaagtagcatcaaagctattatttaaatactttgaatttattcagacaattaatgatttgtatccatcatttcgacacttgatggaacaactagatgtgctaccaagaaatgaagtcgaataa

SEQ ID NO: 202994 - DNA, 789 bp, Klebsiella oxytoca
atggtaaccgcgaacgccacttctcaggcggcatcgaccggcgcggcggtgtcgataagccatctacatcatgcttttaccctcggcaaacggacggtgccggtgctggagaatatcagcctgcagctgcggcccggagaaagcgtcgcgctgctcggcccttcaggctgcggtaaatccactctgctgcggctgctggctggcctggagccgcagcaggccgggcaaattcagattgatgaggcggcgatgggcgggccggggcccgagcgaatactggtgtttcaggacccgaccctttatccgtggctgacggtgcggcaaaacgtgctgctggggccgcaggcgcaggggaaaaaggggcttgagccaaaggccgacgcgctgattgcgcgaatgggtctgcaggcgtttagtgaggcgttgccgcgccagctttccggcgggatggcgcagcgtgcggcgctggcgcgcgcgctgctgaatgaaccgcgtctgctgctgctcgacgaaccgttgggcaagctggattcgcttacccgcatcagcatgcagcgggagctgatcgccctgtggcagcagcagggctataccagcctgctggtcactcacgatatcgaagaggcgctgctactgtgcgatcgggtgttaatcatgtcgccgcggccggggcggattatcgccgagtttgcgctgccgctggcgtatcctcgccatcgcgacaatccgctactgctgcagcatcgtcaggatattctgcgtattcttggccagggagaggattggtaa

SEQ ID NO: 202995 - DNA, 996 bp, Klebsiella oxytoca
atgtcaacgttttcgcctgaacgggcgctggcgcgcccggcaagcggcaggccgcggtggacggaaggctggctggccgccgcgctgtggctgctgggcggcttgtatacgctggcctggcccgatgccgggcggcgctggccgtttagcgaagggtgggcgctggcgcagttcacactcggcggcgggctgctggtgctgacgctgagctaccgctactggcggcagcgggggacgcgtctgcagcatgccggaaagtggctggcgctgctgccgctgctctttgcgctgtgggaagggctgacggcaaagacggcatttttgccggtgccgtttttcgcgccgccgcaggcgctgattgaggtgctgcacgatgactggccgcgcctgctcgattgccttctgcattcgctggggctgctcgggctcggggtgctgctgggcaccagttgcggttttatcagcgggctggcgatcggctggtcccagcggatcggctactgggtgcatccagtgttacgtctgctggggccggtgccgtccaccgcgctgctgccgctgtgcctgtttatcttcccttccagctttggcgccagcgtgtttctgatcgcgctcagcacctggttcccggtgaccgtgctgacctggtccggggttatcggcatcgataaggcgtggtatgacgtggcgcgcaccctgggcgccagccagcgtttcctgatcctgcgcgtggcgatccccgccgcgttgccgaacgtttttgtcggcctgtttatggggctgggcgcgtcgttttcggtgctgattgtcgccgaaatggtcggcgtgaaatccgggatcggcttttatctgcagtgggcgcagggctgggcggcctatcccaatatgtacgcggcgctgctggtgatggcgctgctttgctccggcctgattagcgggctgtttatggtgcgcgaccggctactaagctggcagcggggagggatgcaatggtaa

SEQ ID NO: 202996 - DNA, 945 bp, Klebsiella oxytoca
gtggctgccttcgtcaagtgcatcgggggtgtaactccagcgtccgtcctcgccggcaaccaccgtacccagcaccgtgtcgccgtcatagatcgtgaccgtggagcccgcctcggcggtaccgctcagggccggcgtggcgtcgttggtcagatcgccgctggcaagcgggccggtatgcccggccacatcgtcggtcacctgcagaccgctgaccggagtcacgactgtatccaccgtcagctcaaacaccggggagcgctcgctgacgttccccgccttatccgtcaccgtggtgctcaggctgtggctgccttcatccagtgcatcaggggtgtagctccagcgtccgtcctcgccggcaaccacggtacccagcaccgtgtcgccgtcgtagatcgtgaccgtggcccccgcctccgccgtgccgctcagggtcggcgtggcatcgttggtcagatcgccgctggccagcgggccggtgtgtccggccacgtcgtcggtcacctccggcgcactggcagacggcgcggtggtatcaattgtcagctcaaacgccggggagcgctcgctgacgttccccgccttatccgtcaccgtggtgctcaggctgtggctgccttcatccagtgcatcaggggtgtagctccagcgtccgtcctcgccggcaaccacggtacccagcaccgtgtcgccgtcgtagatcgtgaccgtggcccccgcctccgccgtgccgctcagggttggtgtggcgtcgttggtcagatcgccgctggccagcgggccggtgtgcccggccacgtcgtcggtcacctccggcgcactggcagacggcgcggtggtatcaatcatcagctcaaacgccggggaacgctcgctgacattcccggccttgtccgtcaccgtagcgctcaggctatgaggaccttcgctaagctccggtaa

SEQ ID NO: 202997 - DNA, 1092 bp, Klebsiella oxytoca
gtgattcggattccgacagcgactctgactccgacagcgattcggattcggacagtgattccgactccgacagcgattcggactctgacagtgactcggattcggacagtgactcagattcggacagtgattctgactctgacagcgatgccgattcagacagcgattcggactctgacagtgactccgactccgactccgactccgacagtgactcggattcggactcggactcggactccgacagcgactccgattccgacagcgattccgactctgacagtgactcggattccgacagcgattcggatagcgacagcgactcggattcggacagtgattcagactccgacagcgactcggattcggacagtgattcggactccgacagcgactcggactccgacagcgattcggattccgacagcgactcggattcggacagcgattcggattcggacagcgattcggattccgacagtgattccgactctgacagcgattcggactctgacagcgattcggattctgacagcgattccgactctgacagcgattcggactctgacagtgactcggattcggacagcgattcggattctgacagtgactcggattccgacagtgattcggactccgacagcgactcggactccgacagcgattcggattccgacagcgattccgactccgacagcgactcggattcggacagtgattcggattccgacagtgattccgactctgacagcgactccgattcagacagcgactcggattcggacagtgattcggactctgacagcgattccgattctgatagcgactctgactctgacagcgattcggattccgacagcgactcggactcggactcggacagcgattcggactctgacagtgactccgactccgactccgacagtgactcggattccgacagcgactcggatagcgacagcgattctgactccgacagcgactcggactctgacagcgattctgatactgaagcacccactgcagcacagaacatcacggttaatgacaatgttggttccatcaccggtgtgcttcattccggtgatgtga

SEQ ID NO: 202998 - DNA, 129 bp, Klebsiella oxytoca
atgtcggtgatgaccgaaaataccctggctgggtctggcggcctgcggcgctgttgcagcagcgcccctgatggattggattatgagcccgtcatcaggtcaggccattatctggtgctgctgagctaa

SEQ ID NO: 202999 - DNA, 1029 bp, Klebsiella oxytoca
atgaacaccgcagaaatactcaagtttcccggcgccgcgccggggcaattcaggagcaaccggatggaaaaccagaaatctggctacatcccgttgtaccggagcgttctgaagcaatcatgggcgaaagatgtattcctccgcaccttgtgggacaaccttctcatgagcgcagccagacagccttacacgtccattttcaaggggcgtgaatggcacttacaaaccggtcaactggtaacaacctcagccgatctcgggctgaacttatgcgacagggatggtaagccatcaagtcgtcacgcggtcgacaggatgctggatttttttgagcgcgaggggatgatttccagggcgggtgagaagcgtaaaggtagcgtgatcaccatcataaattacgccgaatatgctcaaaaagtagacgatttgggcgcgcattatgccgcgcatatcaccgagcttaactccgcgcatgacgaaaccagcaacggtgcacctttgcgaggtggtgccgcgcattatgacgagcataaatgcgagcgtttatccgagaatcatgaacaagaaggtaataacaagaataaaaacattaaaagatcttcgtccgagaattctggcgaatcctctgacgcccgcctgaagaaatttttgtctgctcatcctgatgctgcggtttacacgcccagcggaagcaagtggggaaccgctgaagaccttcgggttgccgagtggattttctccagggtcaggatgatcaatccaacctgcaaagcccctgacatgaccgcctggtcaaacacggttcgactgatgcgtcagatcgacaaccgcagccaccaggatatctgcggcatgtacgactgggccagcaaagactcgttctggcatcgcaacatcctgagccctgatgcgctgcgcaagcagtgggacaagctgaccatgcagcgcagcgcgccaggggttcaggttgccgggaagccaaaagtcgacctgaacaacactgactggatttacggggtgctcgaatga

SEQ ID NO: 203000 - DNA, 189 bp, Klebsiella oxytoca
gtggaacagattcaaggtgaaggtggctctgctgttggctttggtcgcattcgtaagcgttcagtgctggggtgcggtatgagcagaaatggcattcgttcactgatttactgcctgctgatctgcggcgttatctggacagcgttgattatcaaaattctgcacgttacgggggtgttcaatggctaa

SEQ ID NO: 203001 - DNA, 675 bp, Klebsiella oxytoca
gtgataaataaaacaaaggcagctttgcagagctgccaatgtcactacgaaaaaccgaaacagattaagcataccagggttaatgctggtggtcaaagaatgagccagcgcaattttatacaggattttgcgctcgccagaattggcgggctcaaactaaaccatgagttatccgttacccaaaacttgggtaacgctccggtaaaggtgggttttccccacctttggggtaaaccgcttaaaggctgtgctccccggaacgggggatctcgaacatcgaaggttgtcgccagaaaaggcgtaaaccccagagtgcaaaattgcactctgcttgtaaatcaatatcttaaacacactactaaaagcggggaggctcgttacccagatattgggtatcaacaccgatgcgaagaaaatcgcatctcattactaatgaacttttccaaagcactaaaaagtgctttggaacaaaatcaacaagttaaccttttgataataaagcaaagctcaaaagtgagctccggccaaacgccttttctggcgtctggttactcctgttccttggccttcttgcgttggcggcgtttgatttcgcctttggctgcagttacgagaaaaccagcggtgctttctccttcttgcttcaaactttcaatatcttccatcacatcatag

SEQ ID NO: 203002 - DNA, 555 bp, Klebsiella oxytoca
atgtcgtatacaccgatgggcgatcttgggcagcagggtctgtttgatatcacccgcattttattacagcagccggacctggccgcgctgagcgagacgctgaccggcctggtgcagcagtccgcgctcgccgaccgggcggcgattattctgtggcattccggcaatcatcgcgctatccggcacgcctgcgacgacgcggggcagccggtgagctacgaagatgaaaccgtcctcgccaacggcccggttcgacgcctgctatcgcgtccggatgcactgcattgcgatagcgccacctttgccgaaacctggccgcagctcgccgtaagcggactctaccccaactttggctattactgcctgctgccgctggcggcggaagggcgtatcttcggcggctgcgaatttattcgcgacgacaaccggccgtggaccgaaaaagagtaccagcggctgcacacctttacgcaaatcgttgccgtggtcaccgaacagatccaaagccgggtcagcaacaacgtcgattacgacctgctgtcaaagctcaattga

SEQ ID NO: 203003 - DNA, 1533 bp, Klebsiella oxytoca
atggctcgccataatagaaagctctctttcacctcgccgattgtgatcgggttcgcgggtattttattcagcttcttgctgatagcggtgttcgccacgacgacgcagcgaaatgattttcttgaagattatcatcatattaaccgcaatttcacccacaatatggcgaccaactacacggagacgctgctgcagggcaatgactttatcctcacccgtgccgccactttctttgcccgcaatgatgcgctcaatgaggcggttaacgtcaatcctgaaaaaggtttgatgcagctcatgcagctgcaaaatatgatgcaaaccgtttcgtccatctcgctggcggataccaatgggcactacctgcgcgcgcccgaggttctggagacggaagacagtcagtcttttgatgccaaatcgagaccgtggtttattaaacaagcggaagccagtaccttcagccggtataccagcccgtacaacgactacttcacgcatcatccgacgattaccgtctacaaacccataatttctccagagggacggctaaagggcagtctcgcatttcatctcgatctcacctcaatgggctacgcgttacggcagatggttgctccggtccagggggaattttttgtggtgcaacgcgatggtaaagtcgttctccatccggatcctggcgccttatttaaaccctacgtcagtgaagcgttgatggacagaatgaccagcggcgaaggccagctctacgataccgatacgaacgcctggtactactactactcgtttaccaaccccgactggtttgtcatttatcgggtcgataactcgacgctggtcaacttgactcgccatgaaacggatatcgtcgcctggagctttgccctggccgcgatctttatcgtgctgtttggcctgtatctgcgccatgcttcacgtacggtgttgatgaacatcatcaatgccattaaaaccggggatgttcagcgcgccccgcggctggaagcgatgctcagcaaagccatcgagagcaataagcagcgcgagttaacctacgttcgccaggcgaccatcgatgcgctaaccggctgcaagaaccgacgcgccttcgacaatgatatcgccgcgctgatgaacgatcatcagcctttctctctcgcgctggtggatattgataactttaaaacgataaatgacacctggggtcatctcaatggcgatatcgttctgcgcaatgtcgcacgggaaggactgcagatcctccaacctctgcaaatttcactttaccgctacggcggggaggagtttgcggtgatctttaccaccggacatagcgatgacgccctgaagctgctggagagctggcgggcccgcgttgcgcagcgctcctggcgtgaagaagggctaacggtcacctttagcgcaggtctcggcgaatggaatatggaacccctggagcagcttgtcgtgcgcgttgatgaagcgctgtataaagccaagcagcagggcaagaatcgcatcgtccgcgcgtaa

SEQ ID NO: 203004 - DNA, 474 bp, Klebsiella oxytoca; identical to SEQ ID NO: 111848

SEQ ID NO: 203005 - DNA, 1311 bp, Klebsiella oxytoca
atgaataatttaatcaaatataactctgataaaatgtctttgcatgaacataaaatcgtcagttcgattgaaaacaatggaatcaaaattagagaattgatatgtgttatgaatgaaaaattggtttgtggatttgtatatacagtacaatattattttaatagcaacagctacttgtatgtgaaaagtattgttagaaatatggagaatcttatcagtaaactttctcctacttatattgatgataaggttctaattgaatatcaaaataagcaattatcaaaagccccagcatcatttcgcgttttacgaccatttttgattaaatggtttgagtttggatatcctggaatagatgaaagtgcagtagacctgttaaagcatttggacctaaaaataaaaaaatctggtcagtctgttttacaagatgatccaacaaagggcccactaactaaagaggaacatacttccttgatcacggctatgaatcatgcatatagaataggtgtactgtcactgtcagattatgcaatatcgctattaatgagtctgacaggtagaagacctcagcagttagttatgttgaaatataaagaccttcttcaaaagaacttagataatggtaaagtagaatatttaatttcagtaccacgagttaaacaaaggggtaaacaactacaatatcgaaaactgcctataatctcagaggttgcatcaattgttcaactgcaagctaatcaatccgtgaggtttgttgagcaaacccttggtaaaactcttgatgattataacaaaggcaaggttccagttttcttgaacgaggaaatactgcttgatttagccataatagattctaatttactggagtctaataaaatatatgcaaaaccaacaattgctaatacagcattgaagaatattattaatactgagaacttaatttcaaatcgtacaggttctctacttaatgctactcctcgcaggcttcgctatacgatagcaaccatgctggctagagagggacataatgccaatactatagctgaattgttggatcattcttctacttcaagtacgggaatttatattaaaaatcttgctggaagtgttgaaagaattgattccgctgtttcagaacaattgtcatttgtcgctgatatttttatgaatggaataaagtctaaagagaaaaaagatttcaaattttgctcttcgagaaaatgcgaaagtcagaatttaaatgcaagtttcccttgttataaatgtgttttctttatgccagttgatattgatgaggtaaatgctcaatga

SEQ ID NO: 203006 - DNA, 315 bp, Klebsiella oxytoca
atgaatatcgaagaatttgtgagtgaagataaccatatgtgtaatctgggtcaggaacttttttgtgaaattttcgaacccggagcgatttacgatttacctgataatgagtttaacagaaagattgtttactggttaagccagtatttagtggggaatctaagagaaccgttagattcgatctctgagcttaatattttcgaacagttttatgtctatgaaacatggttctcactaattaaatgccctgtagaaatgaaaagtctttcaaagcgattaatccaatactatattggtctgagaactcttttgtaa

SEQ ID NO: 203007 - DNA, 288 bp, Klebsiella oxytoca
atggctttcaaattatcaacaacaaaaacagtccagatttattatctgggtgggtatctgtgcgataaagagatagacattgacctgatttacgctgtggaaagcgtcaggcaggacgacgctggcgtggtcaaggcttcgctatccgtgcgctacgatgaccaggcaaaaatcatgatgggtgattatccggttactctggacgtcacatcgtctcagtcatgggccgaacaggctgaaacgcaaatcatgagcttggatgaattcaccggcgcaactgctatttaa

SEQ ID NO: 203008 - DNA, 147 bp, Klebsiella oxytoca
atggccacatccgtcagcaccacccagcttaatctgcgtattatttctatcgttgtctttacctgtatctgctatctctccatcggtttgccgctcgccgtgctgcccggctatatccattatcagcttggctatagcaccttttga

SEQ ID NO: 203009 - DNA, 1341 bp, Klebsiella oxytoca
atgtcattctgggatactgagttaagcgaaacattactaaaatccacaaaaattatttcagagtctcaaagtgaaaaatttaaccaatggttttccaattacaatgaagattgcccaacatcttcaaaccaaggaaccataaagcttcctttccagagatggtttcgtttcaaagaagcgttctcaccaaagttcgttgctgacacattatcctcattaccttataaagtgaatttttgcctcgatccatttatgggaagtggtacgactgccataacctgtaatatgatgggaatcaactcgattggtactgaagtaaacccttttttatcggacctgatttcatctaaattgacatatgtatcaccaacaatttttttcaaaaattataaaaacctaattaataaccttgtaattatagaagatgatttcaaattaagcccagggatgcctctttcttttactgagccaggcattaagggaagatttattttctataagaacacttattcaactataagggctatattaagaacttctgcctcactacctgataatgaggctcgattgttgaaagtattattaggctcagtattagttgaaaacagtaatgctattgttaatggtaaaggacggcgatatagaagtaactggaatttaagagttaaaactggacatgacataattgtgtctttaaacaaagcagtaagcaatgctttagaagacattgaaaattttcacgtaaataacaataaaactagtcataaaatttacactggtgacacgagaaagctacttaaaaaaatagattatgcagatgttataattttttctcctccataccctaattcatttgattatacagatgtctataatattgaattatggatgttagattatcttaaaaacagtaacgacaacagaaaattaagaaatgaaactctaaggtctcatgtacaagctaaatggaatagtggtggaaatgattctctccaatcagcaactttgcagaacatctataaaaatttaagcacattgagagataatctttggaataaaaacattcctgaaatggtctattattattttgaagacctatttatgattttcaatgagttttacagaattttagcaaaagaacatcatgttattattgctgtgggtgatagtcaatatgctggaatacatattgatgtagctaaaatccttgaagaaatcgcattacctattggattccttttagagaatagaggtgagatccgttcaatgcgaagtagttcccaacatggcggtaaacttgaattatccgaacactgcttagttttcaggaaaataaggtaa

SEQ ID NO: 203010 - DNA, 606 bp, Klebsiella oxytoca
ttgcaaactgatcgtatcgaacctaaagcatattttgattcattattaataatggatgaagttccacaatcaatgaagcctatctcatttattgaatatcatcttttttcttatctatcgtgtgttttatccctatttagaggcgattctattagtaactggggttataactacaccgtaacgcaatatggattccccttctcaaatgatttgcaaaatgcaattaacctcattacaaagaaggggtttatttttagtgatgataatggcctatttcaacctagcaatgaaataatcaaaaccgaactcgataatttttcctatgacacttctttattaaacagacgagatttaatttcaacagctttaaaatgtggtttaaatataccatcaggtgcaattagaaatgcgataaaaaattcacctggggtatctttgcacagttccttatctcaatcagcaccattattagatgatactgataatatcgagttaatctatgatgagtataaagtaatctcagatatgatcggtaaagacaataaggatcttttatcacctgctgtaatttggttgtcagcacgggtaatgagaatagaaggataa

SEQ ID NO: 203011 - DNA, 1536 bp, Klebsiella oxytoca
atgccggaaagccccgaggtcacgcaccgggttgccccagataaaggtggacacgccgttgggggtgtcgtaatgccagaagtcatcatgatatttagcattgccgccatcatcgaccgacgggaaacagcccccttcaaagcgcacgttgctgtactcggtgaagttgtctttgtacatgctgacgcagtcaaaatgcaggcccagcagacggctggctttaccgataaagccccagcgggagacagtgtaaaagttgtacgtccactcgttatacacgcctgtgaacacatggttctgagcggtaccgtacaccacgccatttttcgcgttgtagtcctttgcagccgctggtccccagtatccgccagaaacgtgcagcccggtaccggtcatcaccgcgatatactccggcagcgtcccggaaacgttattcgcactgcgccacgcctggcgcatagtcacttcagtattatagagcgcggtccagtcacaggcgttacggtacgtaccgcgacgcccgccttcaaacttactgccatcgtgtacgacacggttaaagttgccggcacggcgggtcgctcccgatgccgcaatcgcgctggtgatgtactcataatccagctcgttgttatcaaaggcgtggccgtcacgattgaattttgtcggctccagcatcgcgggcatttcaacctgcgcccagttaaaggtgcttttgatggtgacaccgtgggtgaaaaagccttccgggttcagcgccagaatcgccactccggcagagcactgttctggcatttttcgaatggtgtgatcaccgtcccatgtgccgccgtatatatgacagttctgaagactcagcgacccccagtactcctgtttgttaaccgcccgccatttttcctcaatctccggtacaccatgccgccagccgtcgagacgcttcccggtcatggcataagtgtaagacttaccggcataaaccatgagataagaggagccaaagcgataattgaccccggaatagcccttaataggctctttaccgatgcggtacatattggttggataaatgaggtccagacgagcgccgccatcataggtcgctacgttatttcctgtggacaccccaagcgtcagacgggaaagaatgccgttgctggcctgtcccaggcacacaaaatcgtccgttgtctggtctgtacactcatcataggtgtacgcccgcgcgccgtttgccagaacgatgatggagccccggcatatttccagcgcatactcatcccccttcgcgttataaaccatgccccgggttattgcatgcgtccccgccctggccggggctgttttcccggtaaagcgccatacgccctcgccgccgtcgctctgcgcgtagaagccgttagactggtaagcgtcaggcgtatcagtggaagagagaatttgcgaggtggtgccaatgatattgccgaggccgaaaatcagctgcgaacccccctcagagcccagattcttacgcaggttcgggtcgctgactga

SEQ ID NO: 203012 - DNA, 603 bp, Klebsiella oxytoca
atgaataaaaacctgttacctcagggggcatcttcactcgaaagaagactcgttgatacctctgcatctgtcagtgatttatcggtcccgttacgtgatttatggaacccactgaaatgccccgttaaattcctgccctatctggcctgggccttttctgtggaccgctgggaagaaagctggagcgaagaggaaaagcgacgcgaagtcagtgaagcattctggagccaccaacgtaaaggtaccgtagccgccatccggcgggttgttgaacgcctcggttactcaatgagtattgaggagtggtggcaggtagcggacccggccggaacattcaggatggatatagacctgaatgacgtcgggattactgaaaccatggtgcgcgaacttgaacggctgataggtgatgccaaaccggccagtcggcatattgcccagctgacccttgccgccagaacgcagggggccgcgtttaccggcgcggcggttttcgatggcgatgaggtctcggtgtatccgccagattacgaacccgacagcggtattttttataatggtgtcttcccgtacgaaggcgatgtggattttataggtgagtaa

SEQ ID NO: 203013 - DNA, 909 bp, Klebsiella oxytoca
atggcagttatcgacctgagccagcttcccgctccggaagtaattgaggtgctggactatgaaactatttttgaagaacgcaaagcaacgctcatctcgctctatccggaagatgaacaggaggctattgccagaactttaagccttgagtccgatccaatagtgaaaatcctccaggaaaatgcttatcgagaagtaattttacgccagcgtgtcaatgaggcagcacaggccggaatggtagcctatgccattaaaaacgacctggaccagcttgcagcaaataacaatgttgaacgtctgaccatcactccagctgatgactcacaaatccccccaactgcggcagaaatggagtcagatagtgacttacgtcagcggatccctgcggcttttgaaggaatgagtgttgccgggccaaccggcgcatatgaatttcatgccatgagcgctgatggtcgtgtggctgactcctcagcaatcagtccggcaccggctgaagtcattgtcgcggtgctggcacgccagggcgatggcactgcatcagatgatttactccaggctgtcagccttgctctgaacgatgaagccgtgcggccggtcggcgaccgactgacggtcgtctcagcagatatcgtctattactcggtcgatgcggtgttgttcgtgtatccggggccagcgactgagcccattcttgcagcagcaaaagcacagcttgcaacctatatcaacgcccaacggcgactcgggcgagatattcggcgatccgcaatctacgccgcattgcacgtacaaggggtacagcgggtcgagctgagtcaaccgctgactgatgtcgtcctggataagactcaggccgcttactgcactgactataacgtcattatcgggggctctgatgaataa

SEQ ID NO: 203014 - DNA, 1104 bp, Klebsiella oxytoca
atgtcagatgtaaaaatgattccagtagaccagttggaactcgatgatgcaaacccgcgccttccgaatggtgtagcacgcacgcaagaagccatgattaactatattgcgacatcgacttctctagaagatttaatgagcgcaatatctcaaaacggcttctttagcggtgaaccgctcatcgcgattcctggtgataatggaaaatataaggttgtcgaaggaaacagacgactcacatctgtaaaacttatacttgatccgtacttaagtgaaaaaccaagcttaagggttctcaatatacataaagaaaacgtcagcgtatttgacgaattaccagttattgtcaaaccacggagagaagatgtattaccctatctgggtttccgtcatatcacaggaatcaagcaatgggacccgcttgctaaggcaaggtacatcgagcaaattttcgatggcactgattcaacgaaatcgccttcggatcgttattatgaagtcgcaaaaataatcggcagcagaagagatcatattaagcgaaacttagatgcccttgcagtttataggaaaattgaatcagaagatttttacgggataaatgatttaaatgagcaaagcataaaattctcgatactatcaacagcattagccgatgagagaattggttatttcgtaggtgttgatataactaaagatggggaggtaatgccatcagacccaataatcaacccatcctcacttaaaaatgaatccattaaagagttgactcaatggctttatcttagagacaaagatggaaatactaaagttggtgagtcacgaaatctaagacatcttgctgctattgttaataacacaagagctttacaacaattcagagacggcgcaccactaaacgttgcatatcaacttacatccgatataagtgaagactttttagagattctttaccagatagaaacattaatgattgaagctgctggtatggttgcaaatgttgagttcaatagcagcgcatacgatgtagccaaacgtattaataaaaatattaaaatgattggtaaagagttagctgagaaggaaaaggacgatgacgacttttga

SEQ ID NO: 203015 - DNA, 993 bp, Klebsiella oxytoca
atgacgacttttgatgtaggagatatgcatccaaatacacctcatcttctagctgacttagtagagttgctatgcatcatcaactataccggcaggaatacattccatcagacagacttagcaagtttgctgaatgtatcaaataccagtgtagatgaagtggatcaggaaaggcgtgaagtaaggagaataagttcagatgcagttttaggcgatagaaccgaagcccagcttgaaaatgtctggattcaactaagctataggtttgcaagcctgaacgatatgtatcctttcattgttgaaggggatgaaattcgtatgcgagatgaacaaaccaataaacatagggtatacatatttacactatgttgttcacgcctacgctctttcattcgcattcgtggggctgcacaacgctgggctagagggtttgctattttatgtaaatatgcaacacaagcccttttacctgcgcatggagaagtcaaaatttttgacgcgaactcagaagatcgtcgttcctattatggtacagatttacgtcgagctttacgcgttatgggtagtgatttaggtgttaaacgagttgatgaagaggaatgcgaccgggctggtagttctggtgatgcagggtttgacattattgcgactgttaagtttgacgataatcttaactgcaattttggcattttgggtcaatgtggtgctcaagaagaaggttggcctaagaaaacccttgaagcacactcaataaatttaagcccttatttccatacaacttttgcttacccttctgtgatgtttacacctgttttttatagagactccaacggtcaatgggttacttctcgtcctacttcaggagttattttgctagacagattacgaactttatttctactcgacaaagcaaaccactgggactcgctgacagagtttgcgtggtttgctgaatttgagtcggagttccgcagcgtggtacctgaaccttaa

SEQ ID NO: 203016 - DNA, 945 bp, Klebsiella oxytoca
atgccaactgtagtgtcgcttttttctgggtgtggtggttctgatgcaggagtcttgagggctggatttgaagtgctcatggcaaatgacattctaccttacgcccgtgatgtgtacttggctaaccatccagaaaccgactacgttctgggggatgtttcctctattgaatcgtttccttctgccgatctgcttgttggatgctacccttgccagggttttagccaaggcggggttcgaaaagccgatagaaaaatcaacaccctctatttagaatttgccagggctcttagaatcgttaagccaagggcattcatcgtagagaatgtttcaggtatggtgcgaagcaactttgaacatttgctgcaagatcagttcaaagtgtttgaagaggcaggttatagagttaaatctcagattctaaatgcctctcattatggggtagcacagaatcgtaagcgtatttttattgttggtattcgtagcgattttgatatcgattacgagttccctttacccactcatggtgataatttaaaaccatataccacaattcgagatgctattggacatttgcctgaatggcctataggtgagttttacgattcagattttcattggtattatttgtcaagaaatcgtaggcaagactgggaggagatttctaagacgattgtcgcgaatcctcgtcatatgccgctgcatccaataagcccaacgctggtaaaactcggtccagacaagtgggaatttacatcagatgcgcgtgctcgtcgctttagtttccgtgaagctgctcatcttcaaggattcggtgatttagtttttccggaaacagaacgtgcatcgatgaatatgaagtatacagtggtaggaaatgctgtaccgcctccactttttgaggcggtagcaaaagcattaccgcaagaattgtggtttggttaa

SEQ ID NO: 203017 - DNA, 660 bp, Klebsiella oxytoca
atggatatagaattttttctacttgaacgaactaaatttattgtttttttttacaaaacggcttccgcaccattttctaaaatcattaatgacatagagaatcagacccccccttatatacctccttacagtgaagattctgaaccaccattcttggctgaatggttagatgctaaatatggcttagatacctgcggtcatcatgccatatcaatgctatcttcttctcttcagctatttttaaaagaatgggtaggcagattagatagatttcacgggataacattcaaggttaacttccaaagaaaagggtggtttgatggatatcgtcaaattttcaaaaagttagatttgaatatggatgattgtcctgcaaatcttgaaattattgagcaaataccccttgtgcgtaatcgtatccaacatcctgaacaccttacatcaatctatatcgaacattcagataatgatttaacaaagctttcaagaccatatttcattcaaaaatcagagtttgattcagtatctgatcaagaaaataactcttggttactcccccctgtgatatccccatcacatgaaaaaataatggaagccgttaataatgtggaattattatgctcgtggttggaaaaccagtactggaaaagtaggaattaa

SEQ ID NO: 203018 - DNA, 1008 bp, Klebsiella oxytoca
atggttaggggagatacaactatagatgtcatgagggctgttggtcttatgatgatcatactagctcatgtttcaccaccgaattttctatttcagttgcggacattcgatgtccccatgatgcttttcgtatctggaatgtcttatttcattgcagccaagaaaaatgtatcgttagtaccatatgtaatttcaagatttaaaaggttggttttgccagcatgggtattcattagtatcttttttatctgcatttttatatttaacccagggggattttcaaatattagaaactcaagcgttgttatatcttcatacacgctaaatggatttggttatttctggataattcgtgtatttcttatcatcgcagttttatcctctttatttgtaagggttaccgatgggagtaacgcgagggcattaactattactattataatgctactgcttgcatcatttttatcattgataggaaaaggaagtggggttacgggaaaattgttagagcagataataataccaacgttatcatatggtgctgcatttataataggttataaatggctgtctcttaataatagagacagggtaaatgtatttattgtttctgtttttgtttgtttggtctttttaatcgctgggtttattgttaaaggaataatctcatatccgcaagatttcaaatacccaccaagcgtatattttatcgcttactcgtttgtaatctcaattcctatttactttattttgtcaaatattcaaataaatagcgggtggagtggtgtgatattactatttatttcatcaaatacgatatggatatatttatggcacattcctattgttgagtattttaatagaaatgatagtggacttaactttctaatcaaatatgctgttgccttttttattccggtgttaatagtatttgttcaggtgcaccttgttaagaaaatcataattcgcaatgagaaaatgaaattcctgaacgttttaaggggctaa

SEQ ID NO: 203019 - DNA, 909 bp, Klebsiella oxytoca
gtgcagggtaccgtcggagctgtgggtgacacgctgaccatcgaccaggcgaaagtcccggcgtacacgttctacaacgaccgcaatttcaacaccgttaccgcaacctcagtgaccattaacggaacctcagtagcgactgctcatcgctccactgtatctatgggtatcggctacggcggtgcatccggcactaaggcgctggaatggtattttaacggcggcaccacgccgtcgcacaggctgattgcatcatcagcgtccgggatgaccctggaggcgggcggtaatttttcagtggccggaaatacgttccccgctgccgatggtacctattcactgggcacctcatccggtcgctggtcgcaggtttttgcatcgaacagcgttatcgggacatcagacgagacgcataaaacccgcccccgggcagacactcctgcggaaaccaacgcctattatgaaatcggacagctccccggcgtctggcagtggctggaaaaatatatggtcgaaggggatgacgcccgcctgcactccgggccaaccgtacaggcggcgattgccgtgatggataagtactgtctggactggcgggaatattccgcgttctgctatgacgagtgggaagcacaggatgccatcattgaaacgtgggatgacgagtgggaggtgatacccggcaccccggctgaactggacgaggaaggtaacgttgttgttgaggcggttccggaaacgcgcaccctcatcagagcggccgggagcaatgttatccaggaggcgcgagaagccgggagtgtctacgcatttcgtaaggaggaactgctcttctggatttctcgagcggtcattgcaaagcagcgagatatcacggaaagactggaaaagatagaaagtagaatttag

SEQ ID NO: 203020 - DNA, 243 bp, Klebsiella oxytoca
gtgatacccggcactccggcagagctggacgaggaaggtaacgtggttgttgaggcggtaccggaaacgcgcactcttatcagagcggcggggagcaatgttatccaggaggcgcgagaagccgggagcgtctacgcatttcgcaaggaggaactgctcttctggatttcccgcgcgaccatcgcaaagcagcaggccctgcatgaccggctgacagcgcttgaaatgaaactggcgtcctga

SEQ ID NO: 203021 - DNA, 222 bp, Klebsiella oxytoca
atgattctcagtatcttgttgctgttggtgataatgatattcgtcagcaggtccagtatcagtttgggcagtggttgccatctgctgtatctatttttagttcaacagacacctactctgctgttcatgtacgtggtttctattctcaaaacgacggcggtgcaggaacctggattgctacaggtaactctttcccgaataattcagggactcatgatgtag

SEQ ID NO: 203022 - DNA, 204 bp, Klebsiella oxytoca
atgaccacgactatcgcggacagcgacaatcacttcgcctttatcgctataagccgagaagacgtgcttcacctcaacaccatcaaggtacacagtgatacgctagcgaccgggttcgatgcgttcgcccagttcgtcatcgagaactgtcaggcgcatactgcctccaataaaaaaaaccaccagcgggtgccagtggcctga

SEQ ID NO: 203023 - DNA, 384 bp, Klebsiella oxytoca
atgccatccagtatcgtgtttgttaatgcttttactgtttttattaatgcagccaatttgttgtctggtcttaatcgtgagcaagcaaaactgactagtgatgctattaagcacttaactaaggctataaacgaaaccgaaatttacttttcggaacgtgaagaaggtcttgaaagagattcaattagggagaaacaactatcgagatactggagtgaggcggctgaacctttgcgcactatagacataaatttttctgatttatgtgctatgaaagcgcagtactggctgttcccaaatcgttatgatcgggaaacggtcagggatttaaatattaccttagaaggtatgaaagccaatcttcaaaggctaagacgcccgtaa

SEQ ID NO: 203024 - DNA, 486 bp, Klebsiella oxytoca
gtgacgtcaataactgacactctgtcaaaggcaccattacgatgccttttgcacagtgctaatcactggatctataagggtcagagcaaagcgattaccccggctaccagcacgccatcagcgaggattgacatcattttgctggtgaagtcgatagcaaccaccagaaacaaaagcaccccagctgcggcccagcgaagtttaccgatcacaggtactggtccagaggaagttgcagagcctgggcaattttcttcagctgtttctcttcttcttccccgataccgtcattatctgctacatcaagacacaggcaaagaacatcgacagcgtcatccgacccggcaacgtcagccgcaaggtcaaaagtcggtattgtcgccactagcacatttaccgtactgcgccacgtttcagatgcaaaaaaaccgctttgacagcgggtttaagttgtgtggcaaagcaaccactcttaacagattatga

SEQ ID NO: 203025 - DNA, 1149 bp, Klebsiella oxytoca
atgagcaaaacaagcatacgccacgtaatcgttcatgagctgttaaaagaatctaataaagacttcgatcactccaaaccatacaatcttcgcgatacagaactagataaaacaaatgatatagttaaaaaattagtagacggtgttattgatttgtatggttcaaaagggaactcagcgcattatggtgtttttattaaaaataaaacaaagcaaggtcctgtacctgaactatttcataaatactctttagttcaacaatctgtttcaagtgacttcattgaattatcgaaggaagttatgaaacaaatgtataaatctgctcaagagcagatttgggcttctggagggtatgttgtttttactgattatatttcatctggtttccgttatctattggtgacaatgatcaaaaaaactaatggcgtaactattagtgaaaatttagagccagaggaaatgattcacttagaacttgggaatattaaccaagcagcaaaaataaatttcagatattatgaagaataccaaaaagcagatgacgtaaaaaaaacagagttaagttatctaagttttataagcaaaactacgggacagtcagcggcagcatattttatagcagcattaggatgtgacaaggggattgcttcagcaggtgcaacccgtaagttaccagatgaaataaggcgtttctttaagaaagaacctcttttaaaaaatcaagccgagtcatttagaaatgatgttatcaaatacttagaaaagcaatttgacaacgatcactctgcaaggctttctgatatcgaatcgcttgcttcaggccatatgtcctatttgaaagaggaagaaaaaacagaacttgttgataaattaatgaaacacctcaatgatgaggaagttagaatcccatcagagtttgtaatcaataaaagctccttagataaaatccgcaatgtgatatataaaaccccatcattgagttttcacttcgacaaggatttgcttggtgtcacagctgatgctaaaatatattatgatgacgaaaaccaaagccttacatttaataatttgcctgttgaagcattaactaagataagaagagcgttgaaagaaactgataatccgagtaatgaagaagataaagaatga

SEQ ID NO: 203026 - DNA, 1227 bp, Klebsiella oxytoca
atgaatgattttggtataatagttaatttgtatagattatcaagccaccctcattttgacggggctaagttttctgcgcgtatagcttataatgcagacgtaaaatcattgttcaaaagaattttgaaccctacttttcaagctggtacagctgacgaaatagaggtggatggtcatttaatttatgattatgaagactttcctgaaaatggaaattttcttacatactcgtttaaaatttcacaaggaagtgcgaatcgtttttataaaaataaaaaagagcttgtaaaaataaacacgctcaagaaaggcataatgccagagtatttctatattatagaggatgatttctgttcattagaaacgccaaaaccttcttatatccaaaaaattgaggacatttgtgagctaatcaatgctctttccatgcttgctcatttccatgatataaaaaaagatagcaaaggtacattctatcgtttagtctttattttaaactcagagtctaaatcttcttctgctgtaattgaaacaaatattacagaagaaatttttaatgataaaacagtaaatactgaattagttaaaacattagtaagtagtgaagccactactgatgcccatcacattgaaaagattaacactttcagaaacacagttattgagtatgttaataaaaatggaaattcctttgtcgggttaattaacaactgggatttcatatgcgagctttatacgaacaacttagctgcttatatgtcggcattttcttttcataaagcaaggaaagaagttgttgatgctgaactcgattactcagaaaaactgtcaaagataatttcagaaatttctaacaaagctcttgccatacctatttcactagctggctcaattgccatttttaaattaacaacaaaagctgattggattattgctttaattgcattaatcattacagcaataataacatctgcgatgattgtgtcacaaaaaaaacaacttgctcgtatttcacactctaaagaaatactttttggacaattaagatatagaataaaggatgacaccagcgatcttaaagagagtttagaagaggctattaaaaaattaaatgacaatgaggatttttgtcataaagtgcttgacagtttattatcactagcatggatgcctacgttcataggcatcatcggaattttatttaaattaatgccaaatattatttga

SEQ ID NO: 203027 - DNA, 345 bp, Klebsiella oxytoca
atgcgtgatatgtatgacgttttggaccactggggagcatgggctgcagcagataacagtggtgtggactggcagccgatagcagcaggctttaaggggcttttacctcatggtaaaaaaacacgggttcagtgtgatgatgatgaaggcatcatgatagacggctgtgttgcccgcctgcgtaagtataaaccagacgaatatgagctgatcattgctcacttcgttataggtatctcactgcgttctattgcgaagagacacagatgctcagatggaacaatccggaagcaattgcaaactgctttaggtttcattaatggggttatgtacatgctcaaataa

SEQ ID NO: 203028 - DNA, 291 bp, Klebsiella oxytoca
atgaacccaataagatcctttcacacttttttcagtacccggctgaagcatggatattttcttttgctgaaaacaatgtgggcaagcatgcaccatgagctccgtatcatccacaataacttgcttcgaatacaccaaagtacctccttccgttttgtggagtccataaccttcagcctgagttttaaagttttcgaactctgcaatctctgctttcagatggactacttcttcgtcacgaagacgaatagcatcgccaagagagaaacattcagcctgaagagtgattag

SEQ ID NO: 203029 - DNA, 555 bp, Klebsiella oxytoca
atgactgatatcaccgaactggcgcagtccctgaaagcgacagcagagccaataagcagtggatatttacgaaactggattgtttcccatgacgacgaaacctgctgggtaggagcaaatgacgatgacggtaaccttacgccattcattgaagtgtcaattgctgactggtcaggaaataaagccgataacgagaaactcgctcgatttattgccctttgccgccccgccaacgtcctagcgctggtagaggcgctggagaaggcgcaaacaggcgaaaagcaatggcgcgaagttgtcgatgcgttctgcgctgacgacgccgattggcacaagctgaccaattcaaccaatgcgctgatttctctattgtcccaagcgttgtacaaacaagctgaccgcatcgccgagctggagtccctcaccgtgaagttgcctgaacgttacgcctgcgaggtgggttacaacgccccagacccgaacggcgacatgctcgaccgggatgatgtaattgccgtgcttaccgccgctggcatcaaggtggaggctgagtag

SEQ ID NO: 203030 - DNA, 405 bp, Klebsiella oxytoca
atgaccaataaccagttaacagatgaagagctgcaaacgttaatcatcgagttgcagcagaccgcttaccgccttaacgggactaattctgcttacctgatgtcagatgcgataaagccattgcgcgagttacaggaacgccgcaagccagcaatggacagtgagccagtggcgcggttggcgatttatcacggagaggtgtacgacgaagcgatcggcattactcgctccgttgttgaggcccaagcggatcattttggctgggagtcggcgttaacggaaatcatcccgctctatcgccacgcgcagcaaccggtaacaggagagccagaccaccagctttgcaaaaagtgtaatgacgggcttcgtggaggatgctctgcttgttcgtatagtggcagataa

SEQ ID NO: 203031 - DNA, 366 bp, Klebsiella oxytoca
gtggccacggctaccggcggcaaaaaagtcgttaacagccaggcgcttgataaatgcaaagatggagtgtttatcctcaacgtgggtcacgtggcggaagagattgattgcgagtacctgcgccagttcagccatcaagaggtcatgccctatattaacgcttaccggatgggacagaaaacgatctatctgatggcgaacggttcaatgctcaacctgaccgcgggttttggcgatagcctgaacgcctttgacgtcaccctggcggtgatggccagcggcatccagcatattgtgactgacggcatgacggcgccggcggacgtttatctgctgccgcaaagcgtatggcaaaaagcgctgtaa

SEQ ID NO: 203032 - DNA, 123 bp, Klebsiella oxytoca
atggaatcggaaatcaaaaaacagcaagagaattacagaaacaatggtcgggtatttttcttttcagagatggattcagagtgtttccatatggagaagatgacgatgattggttatcactag

SEQ ID NO: 203033 - DNA, 324 bp, Klebsiella oxytoca
atgtttgccaaatcctttatcgctctcgacggtaatggttgcctgatcggggcgagtactgcacagaccgccgcttacgacaggtatgcctgccacctctgcggtagcgtgctgcaataccatcctgaatatgatacggaacgtccatggttcaaacatacattcgcgggtttcccctgtaacggcctgcaccactttctgtatgtcaatcctaatgcctgttggattggccccctatatttccatacactatttaccacttgccatccggacatagtgacaggattttcaccatgcaattcgcaccatgcgtactgtccttga

SEQ ID NO: 203034 - DNA, 378 bp, Klebsiella oxytoca
atgttttcttacattatgctgggaaccaacgaccggcctcgcgccattacattctacgatccgctaatggaactgctgggatatccccgtggcggcaggaatgaggacgtcgcttggtggggattgttcaacggtaatcacacgacggcactgggtgtcaaacaggacgccacaaccggaaatagtgtgagggtcgccctgattgcgcgttctgccgaacatattcatcagcttcacgcgctcgcgttaagacacggcggcactgacgaaggagtaccgggcctgcgttcacattacagcgaaggattctacagcgcttacatcagagaccctgatggcaacaagctagctttcgtctattacaccgcacaatcctga

SEQ ID NO: 203035 - DNA, 405 bp, Klebsiella oxytoca
atgttttcttatgtgatgctgggtactaacgatctgccacgcgccatccgattctacgatccgttgatggaattgcttgggcatcctagggcaggccggaatgaagaaggcgcatcctgggggacgttcagcgataaccataccatcggattgtgcgtcggcaggccctttaaccaacaaccagcgggcgttggtaatggcacgatggtggcgctgaacgcccgttctattgaacatatcagacagttgcacgcgcttgcccttagtctggggggcgcggatgaaggtgcgccggagcacaggccgcaatacggacagggattccatagtgcttatgtacgcgatccggacgggaataaactggcgtttgtgttctatgccaatgaggggggaacttcaaactga

SEQ ID NO: 203036 - DNA, 810 bp, Klebsiella oxytoca
atggaacgctataacaacctgtttgccgagctgaacacccgtggagaaggtgcgtttgtccctttcgtgatgttaggtgatcccaatccgttgcagtcactcaggattattgacgttctgattgaatcgggggctgacgcgctggaactcgggatacctttctccgatccgctggcggatggtccaaccattcagaacgccgcactgcgggctttcgctgcggatgtcacgccgacgacctgttttgagatgttagccactattcgccataagcatcccgacatccccattggtttactggtgtacgccaatctggtttttaaccggggtattgatgagttttatgccaggtgtgaacgtgccggagtcgattcagttctggtggcggatgtaccgttcgaggagtcaacgccgtttcgcgaggcagcgacaaaccatcacatcgcgccaatttttatctgcccgccgaacgccaacgatgaactgatacatcagatagcaacctacggatgcggatatacctacctgctatcccgcgccggggtaacgggtaccgaacagggagcattaaagccgctgcaacatttggtcgaaacactggcgagtctccaagcccctccggcacttcagggatttggtatttcaacccccgatcaggtcaaggaagcgattaaggtcggcgcgatgggtgccatttcaggctctgccatcgtcaaaatcattgagaaacatggtgagaatgatgtggcgatgcgaaatgaactgagggcatttgttatgagcatgaaggcggcaacgcgtcgggtttaa

SEQ ID NO: 203037 - DNA, 468 bp, Klebsiella oxytoca
atgaatgaaatgaagctgaatgaaattggtaaaattaacctgacagaagacgccgtaaaaatctctctgcatccttcttaccgaaacggtttgcaaggcctggaagggtacagtcatgtcaacattttatggtggagtcatgactgtaataacgccttatctcctctgaacatagttacatcaacgccctattcgccagatgatatgggggtatttgccacacggtcaccggaacgtccaaatcctatcgcgctaacaacagaaatcttacatgttgatttagataaaggactactcgtggtctcatggattgacgctaatgagggtagctcagtagtagatatcaaaccctatataccttgtttagatcgtgtagaaatacctaaaacgccatcttatctggctagctggccaatctcactggaggactccgctgaattcgactgggcttcagttttcagtcattaa

SEQ ID NO: 203038 - DNA, 354 bp, Klebsiella oxytoca
atgaagccaaaagaaatactttgccaatgggttgatgcatttaataatgcagatgcagaaatgatttcagaattatatgatgataatgcaataaaccatcaggtagccaatgagccagttattgggaaagaggctataaagaaaatgtttgaacaagatttttcaattccagaaatggtttgtatcgttgaaaacattttcgaagatggacaatgggcaattttagagtggcgtgccccattaggtttgagaggttgcggtttttttcaaatagtaaataataaaattatatttcaaagaggctattgggataagctatctttcttaaaacagcacaatttgcctgttgaataa

SEQ ID NO: 203039 - DNA, 1098 bp, Klebsiella oxytoca
gtgagtgatggcgataatgagaattattatctaaaaaggattggtaaactgggcgctgaagaattagcaaggccagaagaatctccctatgagggagggaaccgctttaccagtcctgagagcaaatttagtgtcgattctttgccagaagacgagtctgcgcaggtggccgaggattgtgatattgaagacaggacaggagaaccggcctcaggcaatccgatatctgaaagcagcaaaaacgccactggggctgatgaagctattaagcgtttgatgcaaaatatacaggctggggaaaaacgcaatgttaaaagtaaaagtcttcatggtggagattcttcatgtctacaagacgtcgatttaaagtggttgaagggggcggttaattcacgtgctattttttggttttgggcgtatatacgaaaagcctctgcgcgggagctttgtttacctgaaaatactgcggggttaattccggaatgggatcgaaaaaaggaaaacttatactcttttttcagactccctggtaatccaacgagttcagctgaaagaagccgggtgattattaccttcatgaatgaactttcttgttccctcagtccagaacaaagtaagaaaacattcgattatattcgtggtatctggcttgtttttaatagtcaggttcaaagccccaaatggttaaagaaaaatgataacgaagccattgagtgggcgtggtcatatttgtcaaggaaaaaggatataaaaagaaatgttctgtcatggttcaaaccagcagatcttaatgagcgatatattggtgtaatgggcgcaattgattgctgggccatcccgaataaattagatgtgggaaattatagaaaatttctggatgacaaagatgcacttctaaaaaatatgagggattcctttaagcaacgaaaaagaaggtctggaaaaaatgatttgacaatctctgccaaagccagcaaggaattatctgagttagcagtggcacttgataaaaaagagattaaagttattgaaaaacttattcatgatgagtatctaagatataaaagcaagctttttgattacaaaaatccatcctaa

SEQ ID NO: 203040 - DNA, 342 bp, Klebsiella oxytoca
atgaatactttacctgcaataaaccagcgggctgttcagttatgcccatcgcccgtaactatctggcaaacgttgctaactcgtttactggaacaacactacgggctggcgctgaacgacacaccgttcggtgatgaaagcgtcattcaggaacatatcgatgccggtattacactcgttgatgctgttaacttcttggtggaaaagtacgagctggttcgtatcgaccgcagggcgttaggctggttggaaccatctccatacttgcgagctgtagacattctgcgaatgcgtcgggacatggggctgttgcgaggcagcaaccacactgcagcaatgtga

SEQ ID NO: 203041 - DNA, 1959 bp, Klebsiella oxytoca
atgaatgacctaattaacctccttagtgataataaaataaaaaatgcattaattatagatgattcttttaatataaaacctaatgtttcaaatatttcttatacattagatgattgggatagattctttgatgacttgcagaatgatgatataaacttaatcagagcccatgtaaaagattatgatgacacagatgctgaagatcttaaaacatcagattcatttatagaaacattatgggatctaagagacgaaataccggcaagtaaaactcttttcgcaagatatagtagtgatatgtcccacgatttagagcttctcaataaattaaaaaacactctaaataaatttaatatacatagcgaagaactcggaattgtagatgcatataatgatccgaaattatatgagagcaaaatacttagcaacgatgtagacattatattcattgacttatttcttggtggagaacaggacacatccgctcaagaaaggtctagtaatttaataaaaagaattatctcaaaaagaaaaaactcacctcctctagtaatattgatgtcacggagtacattacttcaagaaaagagaatcgaatttagagataacattggtattattgaatcaatgtttaggatattatcaaaaaaagagttatcagatgaaagtagagtgacacaggtactattcaaccttgtctctgcaaaagaaaactcatataaaatattaaattttattaacgcatggagtgatggcatatctaacgccatggataaaactttagatataatgagatcctttgatctttcgacctactcaaaacttaaggagttattacttgatggggagggtgaaagcactggaagttatatcgtagatatatttgagttgataatgcagcataagctagaggaaaacaatggaattattgatgctgctattgatctaaataatattgcagatagtaaatcatattatccatacattaccacagataaatatttacatgaactcctctatagcgtaatgtttaaaaataataatagaataagaataagccctgaaaattatgatagactagcttttggtgatatgtttatcataaatatcgaggatagtaccgatccacattattttattgaaaaatatgaatcagacaatatattcattgtcataactccagcctgtgacctacaaagagaaataaaaaacaatgtaattctactgaaaggtaacattagagaactttctttaaacacctgggtttgtaatgacaatgaactaataacaccaatagttaaaatagaagattgctacaaatctattaaatgggatgcaaaaagtatagaaactctctctgctaaagatattgcatttttgctgtcgtcgaagaaaataaaaaaagttgctagattgcgtgaaaatgcaacactttcattacagcaagtttgtttgtctagtataggaagaatagggcttatagctccgatgccagcgtcttatgctattgagttaggcgcttactatatggatagtaataaggagttaaaaggagtacatctgaaaaatgacgaatcaccaaatgatgactatggagtatgttatgtaggtcgacataacggtagaaaaaatataaaaaaaatatctcttagtgaagatttagcctcaaatctccgcagagcgatatctaatattctaatcaatgatgttcatcctaaaaaccaaggaattattagtaaaatatcagagtcaatacaattgcaagagttgatttgtcatagtctagaacttgaaaacctaaaaaataaaccctatccacttcatttagatattgatggagataacaaaaaagtgggatatataatagaagatccatccatagaggcaatgactaatctgtcaaaaaaacaagatgcagcacttgtatttgtaataaaagaatgctgcaccgatgtgtag

SEQ ID NO: 203042 - DNA, 837 bp, Klebsiella oxytoca
atggaacgtcatgttctcggcttatctggcggaaaagatagtgccgctctagctatttatatgcgacagaattatcctgatcttaatattgaatacttttttacggatacaggaaaagaactacctgaagtttacgactttctggggaaattggaaggtttcttgggcaagtcaattgtcaaacttaaccctaagcgtgactttgatttttggcttcgcgagtataatcattttctaccctcacctcaaactcgatggtgtacgcggcaactaaaattattaccttttgaacaatgggtccggccgatgttggcaaatggtgacaaagtatattcttatgttgcaattcgtgcagatgaggattatcgagaagggtattcatcaagtaatagaaatcttaaaatagtgctcccattccgagatgatggaattgacaaaactggagtaggtgaattactcgaaaaatcaggagtaggctggcctgattactatcaatggcgctcgcgtagcggttgtacattttgcttttaccaacaaaaaatagaatgggtaatgctcaaagagtatcatcctgataaatttattgatgctaagaaatatgagaaagatgccttagagcatggatctccctttacttggacccaaggggaatcactttctgaactcgaaaagcctgagcgaatagctcaaataaagaaagactataaacttagggttgaaagggagcgacgtcgtcgaccagtaaatccactaaggccgaacgacgtatgtattgatattgatgatttatactacgaagatgaaggaggcggggcttgtaatatctgccataaataa

SEQ ID NO: 203043 - DNA, 1047 bp, Klebsiella oxytoca
atggtgaatgttggtgatatatactccatgtggagtagagcgccctatggtatacatgatggaataaaaccaatcatatttttggcatatatgctatctcgaagaaacatattgtcactttataaagatgacatgttccttcctgattttggagatgtagaagtcgacgagctgctacagaatgaatgcaagtttaagctgagaaaagttataattggcctagatgagaaggcttttcttaattctatttctggagtaatcagaaagcttacagggagaggtttggcggatcatagtccattggaagcagcgaagggattggtgaaaattatattcacattacctttgtggacattgcatacgaatcttttatctcagccatcaaaaattgtcagagatctactaagcaaagctagtgatccgtacaaaatactatttgtagatctaaaagaagcactatgcttggacgaagaatatgatcagtattccaaacgattagaagactctatttctgagttactatcagcatatccaaatatgctggagaattttaaaattcatattcaaagtgaaattggaactgactatgatatccatcagcgttgtaattatgtaaagcaatatacagatgatttaagatttagagcgtttattgatcgtttggatggcattttttcacaggagtttaatgttgagaatataattagtcttgcactgaataagccaagggatagttggcgtgatggtgatatcaaagaggctagactgattgtatctgagtgggcaactaaatttaagcatatagaagcttatgcagttgcagattgtcgaaaatcgaatagaaatgtcgttgctgttgtgcttggctctggggaacaggctaaaacacgaatctgtgaatttgatatcttagaacatgatcgattggccgcgttagctgtagtaaaaaaattatttgatgattgtgagcataatggactaagccctaaagctttactcagtgctttagctgagtatgggatcgattttgtgaaggaggaatattaa

SEQ ID NO: 203044 - DNA, 2169 bp, Klebsiella oxytoca
  misc_feature (2104)..(2113): n is a, c, g, or t
atgaataaaaataaccatttcttggctgataaggtttcaatctctgttcagtatcaacgatctattcgtctcgatgctgacttcggtaagctcgagccttttcaagggtttatatgccatgagacagcgtcaaaagttgttgaaaatatggctctgcaagctgtaagtactaatcaacgagcatttacgtggactgggccatatggcagtggtaaatcttctcttgcattagtatttgcatcggctatatgtacttctgagagaatacgtatatcagcaagaaaaatgttccctcaagcactacttaaagttatagataacgcgtttcctattcataattctggatgggttgtacttccagtagttggaaaaagaagtagctttaaaaatgaaattattactgcgataaataacgcactggaagatgaaagcatccaatcagatatttcagaaactgaattagtgcgcgagttggttagaatatctcgtaattatgatggacttttactcgtaattgatgagatgggtaagttcctggaaaatgctgctattgaaggtgatgatatccatttttttcaggatcttgctgagtctgcatccagaactgagagtaatctactaaccttaggaattttacatcagtcatttagacaatatgctgataaattacaggaaaatgtaaaaggtgaatggtccaaaattcagggacgatttgcggacatacctgttatagttaatagtgatgaaatcgtagatcttgtagggagcgctgttacaagagaatatgagccagtttatagtgatattttcaagaatgtttgtgatgttgttaaacaaaatagaccggcaataagtgatagtttttcagagcaactgaaaaaatgttggccattacatcctgtaatggctattttgcttggtcctatatctagaaaacaatttggtcagaatgaacgtagcacatttactttcctttcttctgcagaaccaaatggttttcaggattttttgaaaaatacttactttgacgaaaccgctagttataaacctgattactattgggactatatacgtgctaattttgatgtgtcggttcattcatcaactgaagggcatcgttgggcgcaggcggttgaatctgtagaacgagcggagtctagagtaagtaatgttgaagatataagggtatcaattgttaaaactattgctattttgaaccttttccgaaatggtactggtttagttgcaagcgatgaagttttgcaaacaatatatccaaatatcactgaaatagaattatctgatgctttaaaagatctttccttatggcgtgttatcgtttatagaaagtatctaggagcatgggctatattcgaaggaagcgattttaatatcgatgaagctatcaaagaggtaaattctgggatagagatcacagatactaagcttttgtcccgtttggcaggattacatcctataatagctaagcgtcattattatgatacgggatctttgagatggatggatgtctctctccaaaataactcagaattgcttaaaactctgaagaaagaatttatttctaatggttcattcggacgattcatacttcttctttctgaggaaaatttacttaatacagacaaaatagatatctcatgttctctaggcgagcgtaaagattttgatcttgtcgttggagtgccaaaaaatagcaatattatattatcgctagggaaggagttaattgcattaaatactgttaaagaaaatcttggtggtgtgctggaaggtgactcggttgcgcggcgcgaagttgatgcgagattagatgcaatcagaataaggcttgaggaagaacttaaaaaagcaatgacttcagctcgatggctgattgatgggaaatggtgcgaggatgtgaacatccatatacttgcctctaaattggcagatattcgttttcataatacaccaataattagaagtgaaattatcaataggaataaattatcttcaagtgctgttaaagctcgtcgcgaattaatgtatcggatggtcgaacgagagaaatttgaaaatttagatttagaaggttatcccgcannnnnnnnnngcgtggaatatatgaaattgtttttaaacatacaaatattcatagaagagatatag

SEQ ID NO: 203045 - DNA, 948 bp, Klebsiella oxytoca
atggctaacctagacggaatagaacttcatttctcaggacatgagacttttccacttaggcaaatgtggttgaagaaagtgtgtgatcaggcggatagtgaaggatggatagctaaatcggttttcacagatgaagatgctattgcgaggttcggagtagggaaaaatatggtttcctctatacgtcattgggctttagcaacgagaactataaaagatatccctgggaaatcttgtttccaactgacggatttaggaactaatattttttcagaaaatggatgggaccaatattctgaaaatatttcaaccacatggctaatgcattggcagttggcgggtaggaatgttgctatttatgataacaaacatagaagtacaacatggtacttgctctttaatacatatacggctcaagaatttaataatgaagatattattcaacatatcaaaaaatatttaactgatcataaatataaaatggtatcagataatactttaaagcgtgacgttgagacatgtactaaaggctatgtaccctatcagtctagtagaaatattgaagatattgcagagccaatgctagcagaactgtccttgattaaaatttcagagtcagggaagctatgttttcagcgtggtccaaaaacaagcttgtcggatgaaatatttgactattgtcttatgatgtattggaaaactatttctgaaatggaaagttcactttcactaaatgatataacatattctccgggttctcccgggagagtattcaagctagatgaagattctgttgctgagcgtttagttaatatttcagatagaacagatggtctcgtccaatggatgagtaattctggaatacatcagataatgaaagatgcaaatctacatggtaatagtttaaataaattagccatgacgcgtctacggagtgcatataaatga

SEQ ID NO: 203046 - DNA, 492 bp, Klebsiella oxytoca
atggttgttgattatgatgactacgtacataaagacatatccctatatgttaataaacataaagatgagaacggttggtttatcaacaaaggttactattattctggtggtaatctgttagttaaaaccaataaatttgatatgaaatgtggtacttctaatattttgaaagtgtcattagtatatgaatttaatgatggagagaaagagttacctattctattgataaaagaattactgggaagtcatcgtttcttaaaacaatatatgtctgaaaagaaacttaaattcaaaagcttccctttttatgcagccttatataacattggtctacctggatcaacaagtggtactatggctattaggaatcattttttttcgctaagtgttttgattcggcgtcctgatcgttacataaggaatgctttaaatataagatggttttcttccaaaaagaaaaatttgttcggcttggtgtatttatataggtga

SEQ ID NO: 203047 - DNA, 999 bp, Klebsiella oxytoca
ttgaaagtattttattacaaatcgaaaaatggtaattttggtgatgatattaatagttggctgtgggatagattgttacctgacttttttgatgacgatgaaaccacgaggctctctggtataggcacaattattgattcttatatgccgcatgcacaaaaatggtatgtactgtcaagtggagtgggttatggctttcctccctctcattttggaaagaataattggaatatactatgtgtacgcggtccattatcagccaatatcctcaatttgccaaaagaaaaattcatcactgatggcgcagcatttttaaacaagatacctgagttttcacctatacccgagaatcaaaggcgtggagtaatttttattccacatcattatgccgttcatgctggcgaatgggaaaaagtctgtaaacttgctggagttgaatttgttaatcctgagagtgattctaaatatgttttagaaaaaataagaaatgctaagcttgtattggcagatgctatgcatgctgctattattgctgatgcatttcgtgtcccttgggtgccaatggtaacatcccctcaaattaatacattcaaatggcttgactggacttcgacaattaatcaaagatatacacccatagttctgggaagcagttctttgaaagagatggttaggagtaaaggtttatttctgcatggtgaaaaatattataatgaaaagcttgatgtcgagtcttctattaagcaatttaaaattcaaagaaaaataaaatcgagtgccctatggccctattatagaaaacctgcgagtttcatagtaaatcgaattgctataaatatagcgtctatggttgaaaagacacaacaccagaaatttctagataaaagtgctttgatactcgctaatgcctctcaacaacatggatttttaagtgatgataaaatctttgaaagtaatttagggcgtttgcatgattgcctccacgcattaaagaaatga

SEQ ID NO: 203048 - DNA, 210 bp, Klebsiella oxytoca
atgattaacaaaattatactctgtaactatgaatttttcgcctttgtctacttctttaatttgcaaggtaagtttatcatcactccaaatatcatcactatcaatgaatgcaattactggctcagtactaatatcgattcccgcatttctactatctgcagcaccgatgttcttttcattgttgataatcgtaattcgattattatttaa

SEQ ID NO: 203049 - DNA, 174 bp, Klebsiella oxytoca
atgaccttcgagcacggcctttttaaaacgcagggtatcatcattcttactatcagaatcccagttaagtatgctcacgccctcaccgagtacatcattaaccgaccttgggctggtaaacgcccccccggggaaatgggtaacaatggtatcgccaaaacccggcgcgcctga

SEQ ID NO: 203050 - DNA, 231 bp, Klebsiella oxytoca
atgaaaataatgattttcaattcactatactacccttatcgtgtaggaggagctgaaatatcagtccagttgttagctgaagagcttgtacgtatcgggcatgatgtgaaagttattactttacatgaaaagaagtctaggcttgaagatgtgttaaatggcgttaaagtagtttatttacctttaaaaaatatctattgggactttcctaaatatattttcgacttatag

SEQ ID NO: 203051 - DNA, 507 bp, Klebsiella oxytoca
ttgctatcggggttggcctcaatatcgctgtcggagtcgctgtcagagtccgagtcgctgtcagaatccgagtcgctgtcggagtcggaatcgctgtcggaatccgaatcgctgtcagagtccgagtcgctgtcggagtccgagtcgctgtcagagtccgagtcgctgtccgaatccgagtcgctgtccgaatccgaatcgctgtcggagtcgctgtcagagtccgagtcgctgtcgctatccgagtcactgtcggaatcggagtcgctgtcggagtcggaatcgctgtccgaatccgaatcgctgtcggaatcggagtcgctgtcagaatcggagtccgagtcgctgtcggagtcggagtcgctgtcagagtcagaatcgctgtcgctatccgaatcgctgtcagagtcagaatcgctgtccgagtcggagtcactgtcgctatccgagtcactgtcagtagactggccccatgaatctccagacagttggtatcacttaaattag

SEQ ID NO: 203052 - DNA, 594 bp, Klebsiella oxytoca
atgcgtattgcaaaaataaagtgggcgatgccacactgctacgctctgattttcttcattattatattagtagcgctgctgacatggtgtattcccagcggcagttttgattatcacttagtgactttacccggcggtgaaacgaaaacattagtgatcccggggtcttatcatctgctggaaaaagtcagcagcgagggcgatttacgtcagggtattgccgccgtactggccgcgccgatggagggaattatcaaggccgccgacgtagtggcgtttgtactcattgttggtggtgcttttggcgttattttacgtactggcgctattgagcgggggctggtggcgctggctgaacgtctggctggtaaagggattctggttatccctatcgcaatgaccttgtttagcctggggggcgcaacttttggtatgagcgaggaggtgatccctctttatgcgatctttatatccctcatgttcgcgctgggttatgactcaatgaccgcgatcctgattctttttctgggaacccagattggctatgttggcgcaatgaccatccgttctctgtactcattgcccagggcgtag

SEQ ID NO: 203053 - DNA, 396 bp, Klebsiella oxytoca
atggccagggtgcaagcatatcccagtgatgaggttgtgcagaaaattaatgcgatagttgaaaagcgcagaactgagggggctaaggagaaggatatcagcttctcaagtgttacgacgatgctacttgaattaggcctcagggtttatgaagcgcaaatggagcgaaaagaatcaggtttcaatcaaatggaatttaataaaatattacttgagaatgttatgaagacgcagttctccatgtcaaaggttctggctatggagtcacttagtccgcacattgttggtgacgaaagattccagttcaaaaatatggtccgggatatcatcgatgatgcaggggatgtagtaacaatgttctttcctcggcaggatgattctgaggaaaatgaataa

SEQ ID NO: 203054 - DNA, 675 bp, Klebsiella oxytoca
atgtgtgcgaaggatcgtagtcaaattgctgtacgccgtcaaacagaatccattcagaatgttgccgaaatgcttaacatttcgtcgagtccttcttttattcgtaactcctctggtgagttcatctattccagccccctttttgatcaaatttttttaacaaaatacgatcgtaaatcatggttttcctccatttccgtcgatgcaggtatggagttgattcattcagagctaaaagcattaacatcaagaaatgcttgcttggtgaaaaatgtaaaggctgaaaagcaaatatggtcagtatttatagaatgcatcactttgaataatgaagttttcacgaaatgggtttttttaaatgaggttaatagtgttatcgatcgttctgggaagcatggtgcattttcttcaaagatggataaatatttagcgaaggttgcaaatatggctagttctgaatgggctgttctgaatctttactctgtagggttcactcattcaactatttctaaaataacaggattggaagagcaaacctctaagaacgttgttcataagatgaggaaagaattaaactatcccgacagagactaccttatattatctttattgcactcttgtagttacagcaagatcttacaaaatgttattgaagtgctaagagtacactgttaa

SEQ ID NO: 203055 - DNA, 363 bp, Klebsiella oxytoca
atgaatgctgtattaagtgttcagggcactgctgtctctgaagaaactaagccgtcttttctgtcccgtgttttcaacaaaaagaatgcgctgaaaatgacaaaagctgtcgtacctgttgcggcgctggcgtcgttctttccagacttagccatggctaccacaactgacctgatgaagtccggtgataccacggtcaaaggcaccttcggtaagtcttccagcgtggtcaagtgggtggtgcttgcggaagttatcgtcggggccatcatgtatatgaccaccaagaacattaagtttctggctggtttcgccattctgtctgtttttatcagcgtcggcatgaccgtcgccggttactga

SEQ ID NO: 203056 - DNA, 567 bp, Klebsiella oxytoca
atggaacatggtgccagacaaagtaccacgcgtgttatcgccgtgggatttatctgtctggggacgttttttaccctcagccttgcgacaaatatcattcagggtattaataactatcgtcttcagacagaacagaaagtcgcggtgacaccgatgttattcagtgcgccgtttgccgtttcgcagaatcaggcggacgcctcttatcttgagcaactgggcctgagctttattgcgctgcgccttaatgtcacgccggaaacggttgatgcccagcatcagcaacttctccggtatgtatttcctgcctcgcagaacagtcttaagattcagctggctgaagatgctaagcgcatcagggaaaataatgttaacgctaccttctatatgacgtttatccgtgcatatccggcagagaaccgcgttgatatccggggcgagctgaaaacatggataggggattcgaagccctatagtgaaattaaacattatgttctgcagttcagtcgagtcgatggtgtcagctggctggcgcgttttggagaaataaataatgaaaatgattaa

SEQ ID NO: 203057 - DNA, 294 bp, Klebsiella oxytoca
atgagtgaattattcaaatggagtctcgcgctggtcattttagtggccgtatacgttgtaatctttgcttcaggaagtcataccgtatccgacgcacagtctcaatactggataaataactgccggttgcttgaggttaatattgacagggggttcctctctcccgcacaaaaccggcttcagtgtggtgatgttattgaaaatgtcagcaaggctgattatgacagcgcggtaaatggcggtaagaaaataacaactatcaaagcattactcgaagaactattcggtcgttaa

SEQ ID NO: 203058 - DNA, 222 bp, Klebsiella oxytoca
atgcataccttcatttttctggtgctgatgacgccgagtagcggcggcggagtctggaaccttactcccatgcccaatacggatgtctgcctcaaaatgctgcgggcagtcgaagcgcgtggaggcaggggctacggaagtaacacaggggagtgcattgaggttaaaacgcgcgagcccctgaacagtacgatggaaacactgaacggaggcagtcaatga

SEQ ID NO: 203059 - DNA, 231 bp, Klebsiella oxytoca
atgaaagttaattttcacaaatatcctgccattgatttctcgctgaggctggtactgaccctcattattatttccccggtggtgtatttctcatgggatgcggtcaccgggacatcgggcagcgattatgtcgtgagcgttatctttattctggttacaggtggtatcggtctggtgaattatctgtttgtttctgccctgctcgggcttttacagaaggtgaaaaaatga

SEQ ID NO: 203060 - DNA, 327 bp, Klebsiella oxytoca
atggaagagaaaaagggagatggcctgatgatgttctgcgtcgcggccttcgttatttttctggtcagtatcatgtccttcagcctgtggcgggacaaacagattaatgcgtttatggcgaccaaccgtgcatggggtatccagtgcgacagggtctcccaggccgcgtgggtggtccaggacggggagcgggttaatttaacgataaacgatttccccctttactgcagcggctaccgctttgaactgcgcaatggtcagggtgaagtcattcacctgctcgataaacacgctgcctaccggcaactttcccgccagccacactga

SEQ ID NO: 203061 - DNA, 537 bp, Klebsiella oxytoca
atgttaacccatcaaataatacaaagtgaaatcgaagaactaaaacagatcctgactcataaggacttgacgatcccctcattctggagctgtatctggcccggcatagtatgcatgttatggttttttctttcatcatatttctcctatgggataagtgatctttctactggacttgataggatcgcagcaatggtttttgctggggctgtgggcgtattttctatcattgcaactgcgaatacccgatcgctcttcctttctttacctgaatctttcaggaaagaatcgttattttttggttttttagctaagaaatgcaaagtgtatggtatggtggtttttgttatattctcatgcttggcatttttctttgcatacaacggaattaatgcgattatctttattgttgttacaggatttagccttatactaacaattatgataatgaatatcgatcttggtcgatatcaattagcaacactcacgtcagttgttgagtctttcagaaataaagaggctaagtcggtacaataa

SEQ ID NO: 203062 - DNA, 594 bp, Klebsiella oxytoca
atgagtgaagaaaaacgccctgtactgagtctgaaacgaaaaccggcgccggacagcacgcctgctcccgggagcgatgccacgcctggtgtggttcgtcggaagaaggtggtggtggtgtcagccccgccggcctggaaggtcaaaaaagagaagctggagcaggcgaaaaaggctgccgaagccgccgcacgccaggctgtggcagaaccggtcaaagcagcaaaggttccgcctcctgtgcgttatcttcagctgcttccgccggagcaggctatcatgaccctgaaagcgttctggccgcagctgtttgataacaactcgccacgccttctggccacggggatgcgtgaacagctgtttgccgatatcgagaggcgagacctgccgctgtcgcataagcaggtgattaagtgtctcaaaagcctgacccggtcagcaggctatctgtcccggatgcgggaaggggcctcccgctatgacctgcagggaaatgttgtgtccaccgtcactgctgaggaagcgcgctacgccagtgagcgcatgatgaaagagctgttgcgggccgagcgtaagatgagccagacgatttaa

SEQ ID NO: 203063 - DNA, 417 bp, Klebsiella oxytoca
atgagagtctgggttgatacggataagatttgtgaggatacacaaaacattattaaaatgttatcagcgtcggatgtgaataaattcagttgtgtcagcgaaaaaatcatattactggaggagtgcctcgatgaggaagaatacgaatgtggctggttctcagatgctgcgtttaaacttatgaaggccttgctcagagtccgcattaaactcagaaggacagatcctgttcaccaccttgttccggtactgactcaggctgtcgatggtctgaaagagcagctcaggttaaacaggaggcacgctaatgagttgattgaagtgcatgtgttctcgggacatgcccgcaactttttctggcttggttgtgctacagcaatgatacttgtacttgccgcaatcatttatatgacatga

SEQ ID NO: 203064 - DNA, 645 bp, Klebsiella oxytoca
atgtttcgatatttcgctctgcgttttgaacagcagttgctgtgttatttatccggcggtgtgctggcggtatttctgacaatactcattccgtctgtaacggtcatggttttcgcgctcatcctggtactgtcgacggcggtttgctggaccgcgctggctctgtatatctgcgacaccgaccaggtgagaaaaacggaggtgtccccccaggtccgtatacgtgacggtattcaggtggtggccatcctgccgcgtcatgagaaggcccggattgagtgggacattctccgggatgatgaggtgtttcgccagcaaagtcgggagctcgcagccctgaccgggcgggttatccgtcgggggctgttgtatgcgccggtggtgatgctggcgggtacgggcattctcgcctgcagttttacgcaggacgccgtccggctggtcagtgcgcttcggactctgcctgcggcagaactggtacatcagaccggattcgctctgcgcagtgttctgctgatttccgtggtatcggtgctgacagctgacgtggtggccggaagaggtttgccgaatgcctttcgccgcgcattgctcgacaggctgccggcagaggcctggcatatcagaagagggacagagcgatga

SEQ ID NO: 203065 - DNA, 651 bp, Klebsiella oxytoca
atggcaaagatactaatgatggcaggcattgctgtcgttctgatgagtctgctgggattcgcggtgctgcttctgagaggtcggataatggccgggacgtcaccggtcctgatgtcactgaaagcactggggattcggccctcagaagcggagaagcggctgtgtcgcgagcgggtctgggtgggcaacgacacgctgatgacgttacgggaacagcatttttaccgggcattgctggggcataccagccagaagcgctggctcctgtgcccgcaggtccgggtggcggatatcgccacactcgctcctcacatccggcctcgctcccgggcctggtggcaacttttccggatggcgtctcagtggcactgtgacgtggtcatcgttgatatccggaccttcgccatcgtcgctgctattgaacttgatgatgcctcacacctgaaaaggcatcgtatccggcgcgatatcctgctggaagaggttctgaggcaggccggtattccgctgctgcgcgaccgggattcagagaagctggtcagaagaatcagagagtttctcaggcaccatgaaaccgacactgacatcatatccactggcggtatggcgccatcaacagaacagactgaacccggggagaaagcaaaatga

SEQ ID NO: 203066 - DNA, 309 bp, Klebsiella oxytoca
atgatagttgccactgacgtaaaacgtgatgagcaggggtactggacgcatcctgcgctggcgcgcagtggctgcgaaaccccggctgaattccgctactggctgaaaacccacgggctccagtgcttcgtgatgataatgcgcgatgaagcgcctgaggtctacgcagccggattgactgatgaagccccggatgcccgtgactggatacctgagccgccggatgaggatggctggttcctcggctccgtccatgctaccggcgacgggcctgtctgctactggttccgccagaccacaatagcctga

SEQ ID NO: 203067 - DNA, 261 bp, Klebsiella oxytoca
atgtcgcagaacgataatgcagtgacttccgcttctaaaaataagcgggcctatcgaaaaggtagcccaatgtcagactctgaaaaacagatggctgcagttgcaagaaagcgcgtcacacataaagaaatcaaagtctttgtacgtaacccattgaaagatattcttattgagctctgtaaccgtgatggaataacgcaagcccaatttgttgaaaaattgctcgaaaaggaattcaaagctcaggggttatttaagtaa

SEQ ID NO: 203068 - DNA, 411 bp, Klebsiella oxytoca
atgaaattaatgacccgcattgcattaacagccgctctcgccactgggttctccatggcggctcaggctgcggatgttaaggctgcacccgctccggcgcaggacccgattgtccagcacttaaaactgactaacgatcagataacgaaaattaaaagcctgcatcagcagctggaaaaaaacgttcagcagatttcccagaaagatattaaagacggcgtgttgtttgaggttattgattctggaaaatggaacgaaaaggcggtcaaagagcagctggcggcatttagccaggtagagcagcaggctcgctattatcgcgtgaagtactattttgatgtgaaccaggtgctgacgccagaacagcgtaagcaggtacaaaaagacttagctcaggagctgagtgagtaa

SEQ ID NO: 203069 - DNA, 162 bp, Klebsiella oxytoca
gtgggcaagaagaaaacaaaaaaagtggcgctatcggcgcaacagccgcaatcggaaaccgtcactacgatgagttttggctatgaagagatgttaagcgagctggaggcgatcgtcgcggaagcggagatacggctccaggaagaagagagcgtcgcctga

SEQ ID NO: 203070 - DNA, 702 bp, Klebsiella oxytoca
atgattacaacccgaacagccaaacagtgcggtcaagcagacttcggctggctgcaggcccgctacaccttttcctttggccactacttcgaccccaaattgctgggctacgcatcgttgcgcgtgctcaatcaggaagttctggcgcccggcgcgtcgtttcagccgcggacctacccgaaagtcgacattctgaacctgattctggaaggtgaagcggaataccgcgacagcgatggcaaccatattcaggcaaaagccggcgaagcgctgctgatatcaactcagcctggcgtaagctacagcgagcataacctgagtaaagatcgctcgctgacgcgaatgcagctgtggctggatgcctgtccacagcacgaaaacccgctggtgcaaaaaatcgctatcgccgccggatcgcagcagctgctggcttcgccggacggcagccagcatagcctccagctgcgccagcaggtatggatccaccatatcgacctggcgaaaggcgagcagcttaacgtgcagcttcacggcccccgcgcctacctgcagtcgattcacggtacggtgcatgcgcgggtgcaggaagaagagaagcaggctctgacctgcggcgatggcgcttttattcgtgacgaagctaacattaccctcgttgctgatacgccgctgcgcgctttgctgatagatttaccagtgtaa

SEQ ID NO: 203071 - DNA, 897 bp, Klebsiella oxytoca
atggctaaagagagagcattaacgctggaagcattgcgcgttatggatgcaattgaccgacgcggaagctttgcggcggcggccgatgagctgggtcgggtgccttcagcgctgagctataccatgcaaaagctggaagaggagctggacgtcgtgctgtttgaccgttcaggtcatcgaacaaaattcactaacgtgggccgaatgttgctggagcgcgggcgcgtactgctggaggcggccgataagctgacgacggatgccgaagcgctatcgcgcggttgggaaacgcacctcactatcgtcaccgaggcgctggtgcccaccaccgacctttttcctttaattgaaaagctggcgaccaaatcgaatactcaactgtcgattattaccgaagtactggccggggcatgggaacgccttgagcaggggcgggcggatattgtcgttgctccggatatgcattttcgctcctcttcggaaatcaactcccgcaagctctattcggtgatgagcgtctatgttgccgcgccggatcaccctattcaccaggagccggagccgctttctgaagttacgcgcgttaagtaccgcggcgtggcggtcgcggataccgcccgcgagcgcccggtgttgaccgtgcagctgctcgataaacagccgcgcttaaccgtgagcaccatcgaagataagcgtcaggcgctgctggcaggattgggcgttgcgacgatgccgtatccgctcgtagagcaggatattgccgaagggcgtctgcgggtggtcagtccggaatacagcaacgagatcgacattattatggcctggcgtcgcgacagcatgggtgaggcgaagtcatggtgtctgcgggaaatcccgaagctgtttatgggaagataa

SEQ ID NO: 203072 - DNA, 369 bp, Klebsiella oxytoca
atggactggtatcttaaagtattaaaaaactacattggatttggcggccgcgcccggcgcaaagagtactggatgtttattctggtcaacatcatcctcaccggcgtactcagcatcattgataagatgctgggatggcagcgcgcaggaggagaagggattctgaccactatctatggcgtgctgatattcttaccgtggtgggccgtgcagttccgtcgattgcacgataccgaccgctcggcatggtggctgttattgctgctgattcccgttatcggctggctggcgatcctggtcttcaattgccagaacggcaccccaggaaataatcgcttcgggccggatcctaaaccgacttcttactaa

SEQ ID NO: 203073 - DNA, 987 bp, Klebsiella oxytoca
atgggacaattagttgacggcgtctggcacgacacctggtatgacaccaaatccaccggagggcgatttaagcgttctgtttccgcctttcgcaactggttaaccgccgacggcgcgccgggcccaagcggcgaagccggattcgctgcggagaaagatcgctatcatctgtacgtttctcttgcctgcccatgggcgcatcgcactttaattctgcgtagcctgaaagggctggagccgtttatctccgtctccgtggttaatcccttgatgttcgagaacggctggactttcgacgatagcttcccggcagccaccggcgatacgctctaccagcacgaatatctttatcagctttatctgcatgccgatccccactacagcgggcgcgttacggtgccggtgctgtgggacaaaaagcagcacaccatcgtcagcaatgagtcggcggaaatcatccgcatgtttaataccgccttcgatgggctgggcggccgcgcaggagattactacccgcctgagctgcgcgatcagattgatgagctgaacggctggatctacgacaacgtgaataacggcgtctataaagccgggttcgccaccagccagcaggcctatgatgaagcggttgatgcagtgtttaccgctctggagcgtctggagcaaatccttggccagcatcgtttcctgacgggtaaccaactgacggaagctgatattcgcctgtggaccaccctggttcgtttcgatccggtgtacgtgacccactttaaatgcgacaaacgccgcatcagcgattacctcaacctgtatggcttcctgcgcgatatctaccagatgccgggcattgcggaaacggtggacttcgcccatatccgcaaccattactaccgtagccataaaaccatcaacccgaccgggattatctccgttggtccgcagcaggatcttaacgaacctcacggccgcgatcttcgtttccgctaa

SEQ ID NO: 203074 - DNA, 393 bp, Klebsiella oxytoca; identical to SEQ ID NO: 191539

SEQ ID NO: 203075 - DNA, 300 bp, Klebsiella oxytoca
atgagccgcgaacagcaggaacgcgaacgacaaaaagcgcttttgctgcgcctgatccaacagcagcggctggaccttagcgccagccaccgccattggcttgaggcaactgcgcccattgatcgaggctggaataccctgctgaatctgcgttcatgggcaatggtcggcagcggcctcgtggcaatatggtcagttcgtcatccgcgctttttgatgcgctgggcaaaacgcagcctcggtatctggagcacctggcggatggcccgcaatctgctgcgccagtcgtcatcacgctga

SEQ ID NO: 203076 - DNA, 399 bp, Klebsiella oxytoca
atggcgaattctaaaagcacgcaaggccccggacaaagcgttttcggcatcggtcagcgcatcgtcactttgctggttgagatggtggaaacgcgtctgcgcctggtcgtcgtggagctggaagaggagaaagccaacctcatccagctattcctgatgctcggattgacgctgctgttcgccgcgtttggtttgatgagcatgctggttctgatcatctgggcggtcgatgcgcaatatcgattaaacgtgatgatcggcaccacggcggttctgctgctggcagcgctcattggcggtatctggaccttacgcaaagcccgacgttcaacgttcctgcgcttcacgcgtcaggagctggcaaacgaccgcgcattgctggaggacgataagccatga

SEQ ID NO: 203077 - DNA, 306 bp, Klebsiella oxytoca
atggctaaagataacgttgcagaagacctgcgtgcggaactgaagacgctggctgataccctggaagaagtgctgaactcctccacggataagtcgaaagaagagatcggtaaactgcgtagtaaagccgaaagcgcgctgaaggaaagccgtgttcgcctgggtgaaaccagcgatgccctcatgaagcaaacgcgagaaaccgctgcgcgtgcagatgaatacgtccgtgaaaacccgtggaccggcgtgggaattggtgctgccgtcgggctggtgctgggtgtcctgctgacgcgtcgttaa

SEQ ID NO: 203078 - DNA, 369 bp, Klebsiella oxytoca; identical to SEQ ID NO: 191535

SEQ ID NO: 203079 - DNA, 384 bp, Klebsiella oxytoca
atggcgataaagcgcgcctctctacgtcagataagctggatgctgggcggttcgttactcctgtgcggcctgttctggctctggctcaccgtgcagcagcaggaatcaaccctggctattcgtcccgttagccagggtattagcatgccggacggtttttccgtctggcaccatctcgatgccaacggcatccgttttaagagcattacgccacagaatgacggtctgctcatcaagtttgactccagcgctcagggagccgcggcaaaagaagttttgggtcgcgctctgccgcatggttatattatcgctttagtggaagatgatgattcgccgacggcctggatttcccgcctgcgcgatacgccacacagattcgggtaa

SEQ ID NO: 203080 - DNA, 663 bp, Klebsiella oxytoca; identical to SEQ ID NO: 191533

SEQ ID NO: 203081 - DNA, 777 bp, Klebsiella oxytoca
atggaaatcactgaatcgcgtcgtttgtatcagcagcttgccgctgagcttaagacgcgtattgaacaaggtgtctaccttgtaggcgataagctacccgcagagcggtttatcgctgacgaaaaaagcgtaagtcgtaccgtcgttcgcgaagccatcattatgctggaagtggaaggctacgttgaagtccgcaaaggttccggtatccacgttatctccaatcatccgaaacatcagcaaattgccgatgaatcgctggaattcgccaattatggcccttttgagctgttgcaggcccgccagctgatcgaaagcaacattgccgaattcgccgccactcaggtgaccaagcaggacatcatgaagttgatggaaatccaggaaaaagcgcgtaaagagaagtgttttcgcgattccgaatgggatcttcagtttcatgtgcaggtggcgctggcaacgcaaaacaccgccctcgccgctatcgtggaaaagatgtggacccagcgcgtacataacccgtactggaaaaagctgcatgaccatatcgactcgcgtaccgtcgataactggtgcgacgatcacgatcaaattctgaaagcgctgattcgcaaagatccccatgcggctaagctggccatgtggcagcatctggaaaataccaagctgatgttattcaatgaaaccagcgatgactttgaattcaatgccgatcgctacctgtttgccgataatccggtagttcatctcgatacggccgccaacggcgcaaaatag

SEQ ID NO: 203082 - DNA, 1302 bp, Klebsiella oxytoca
atgcgtaaaattaaagggttacgttggtacatgatcgcactggtgaccttaggcaccgtgctggggtacctgacgcgtaacactgtggcggcagctgcgccgactctgatggaagagttacacatctccacccaacagtattcctatatcatcgcggcctattccgctgcctataccgtcatgcagcctgtcgccggctacgtgctggatattttaggtaccaaaatcggctatgccttctttgctatcgcctgggccgtgttctgcggctctaccgcgctggcgggaagctggggcggtctggcgctggcgcgcggcgcggtgggtgccgccgaagcggcaatgatcccggcgggtctgaaagccagttccgaatggttcccggcgaaagagcgttctatcgccgtcggctacttcaacgtcggctcctctatcggcgctatgattgctccaccgctggtggtttgggctatcgttatgcacagttggcagatggcctttatcatctccggcgtactgagctttgcctgggcaatggcgtggctggtgttctataaacacccgcgcgatcagaaaaaattaactgacgaagaacgcgactacatcatcggtggccaggagtctcatcaccagactaacaacggcaagaaaatgtctccgtggcagattctgcgtaaccgtcagttctggggtatcgccctgccgcgtttccttgccgaaccggcatgggggacctttaacgcctggatccctctgttcatgtttaaagtctacggctttaacctgaaagaaatcgccatgttcgcctggatgccgatgctgtttgccgacctcggctgtattatcggtggatacctgccgccgctgttccagcgctggtttggcgtgaacctgattgtttcccgtaaaatggtcgtgacgatgggcgcgctgctgatgattggcccagggatgatcggtctgttcaccagcccgttcgtcgctatcgccctgctgtgcgtcggcggttttgctcaccaggcgctgtccggtgcgctgatcacgctctcttccgacgtatttggtcgtaacgaagtggcaaccgcgaacggtatgaccggcatggccgcatggctggccagcaccatgtttgccctggtggttggcgcgctggcggatactatcggctttagcccgctgttcgccgtactggccatcttcgatgtgctgggcgcggtggtcatctggaccgtactaaaaaataaatctgcggatgacgacagcactccgctggaaaccagtaagcctgccacgcaaagctag

SEQ ID NO: 203083 - DNA, 1413 bp, Klebsiella oxytoca
atgacaccgtttatgaccgaagatttcctgcttgataccgagtttgcccgccgtctgtaccacgattacgcgaaagaccagccgattttcgactaccattgccacctgccgccgcagcagattgcggaaaattaccgctttaaaaatctgtatgacatctggctaaaaggcgatcactataaatggcgtgcgatgcgtaccaacggcgtagccgaacgtctgtgcaccggtgatgcttccgatcgcgagaaatttgacgcctgggcggccaccgtaccgcataccatcggtaacccgttataccactggacgcatcttgagctgcgtcgtccttttggtattacaggtaaagtcctctctccggctacggcggacgaaatctggaatcagtgcaacgatctgctggcccaggagagcttctccgcccgcggcatcatgcagcagatgaatgtgaaaatggtcggcaccaccgacgatccggtcgattctctcgagcatcacgcttccgtcgctaaagacagctccttcaccgtgaaagtgctgccaagctggcgtccggacaaagccttcaatatcgaacaggcgaccttcaacgactacatggcgaagctgggcgaagtgtctgacactgatatccgccgctttgccgatctccagtccgcgctgactaaacgtctggatcacttcgccgctcacggttgtaaagtttctgaccatgcgctggacgtggtgctgtttgccgaagccaacgaaagcgaactggatagcatcctggcgcgtcgtctggcgggcgaggcccttagcgagcatgaggttgcgcagttcaagacggcggttctggttttcctcggcgcggaatacgcccgtcgcggctgggtacagcagtatcacatcggcgcgctgcgcaacaacaacctgcgccagttcaaactgttagggccggatgtgggttttgactccatcaacgaccgtccgatggcggaagagctgtccaaactgctcagcaaacagaacgaagaaaacctgctgccgaaaactatcctctactgcctgaacccgcgcgacaacgaagtgttgggcaccatgatcggcaacttccagggggaaggtatgccgggcaagatgcagttcggttccggctggtggtttaacgatcagaaagacggtatggaacgtcagatgacccagctggcgcagcttggcctgctgagccgctttgtcgggatgctgaccgatagccgcagcttcctctcctacacccgtcatgaatatttccgtcgcatcctgtgccagatgattggtcgctgggttgaagcgggagaagccccggcggacattcagctgctgggcgagatggtgaaaaatatttgctttaacaatgcgcgtgactacttcgccattgaactgaactaa

SEQ ID NO: 203084 - DNA, 1488 bp, Klebsiella oxytoca
atgcaatacattaaaatccattcgcaagataacgtcgcggtagcgttggcggatatggcggcaggcacggtagtcaccattgacggcgatacggtcacgttggctcaggatattgcgcgcgggcataagtttacgctgcgcggcattgcgaagggagacaacgtcattaagtacggtctgccgatagggcatgcgctggcggatatcgcgccgggggaacatatccactcccataatacgcgtactaacttaagcgatctcgacgcgtacagctatcaaccggatcttatcgaacccgccgcgcagccggcggatcgcgatatccagatttatcgtcgcgccaacggcgaagtcggcgtgcgcaacgagttgtggatcctgccgaccgtcggctgcgtcaacgccatggcgcgtcaaatgcagaatcgattcctgaaagagacgaatgacgcggaagatattgacggcgtacatctcttcagtcacacctacggctgctcacagctcggtgacgatcacatcaacacccgtaccatgctgcaaaacatggtgcgccatccgaacgcgggggcggtgctggtggtcggcctgggctgcgaaaacaatcaggttgatgcatttcgcgaaacgctgggcgagttcgaccctgaccgcgtccactttatgatctgccagcatcaggatgatgaagtggaagccgggctggagcatctgcgtcagctatataacgtgatgcgccacgataagcgcgagccgggtaagctgagtgaactgaagtttggtctcgagtgcggcggttcagacggtctgtccggcatcaccgctaacccgatgctgggccgtttctcggactacctgattgctaacggcggaactaccgtgctgaccgaagtaccggaaatgttcggcgccgaacagctgctgatgagccactgtcgcgatgaagagacgtttggcaagctggtgacgatggttaatgatttcaaacagtactttatcgctcatgaccagccgatttatgagaacccatcgccgggcaacaaagcgggcggcatcactacgcttgaggataagtcgctgggctgtacgcagaaagcgggctccagccaggtggttgacgtcctgcgctacggcgagcggctgaaagtgcacggtcttaacctgctgagcgcgccgggcaacgatgcggtagcgaccagcgccctggccggcgcgggctgccatatggtgctcttcagcaccggacgcggcacgccatacggcggtttcgttccgacggtgaaaattgccaccaacagcgaactggcggcgaagaaaaaacactggatcgacttcgatgccggtcagctgattcacggtaaagcgatgccgcagctgctggaagagtttgtcgataccattgtggcctttgccaacggtaagcaaacctgcaacgagcgtaatgatttccgcgaactggcgatattcaaaagcggcgtcaccctttaa

SEQ ID NO: 203085 - DNA, 555 bp, Klebsiella oxytoca
atgaccgcatactggcttgcccagagcgttggcgttatcgcctttctgatcggtattacgacatttttcaatcgcgatgagcgccgctttaagctccagctagccgtttatagcgccaccattggcgtgcatttctttttgatgggcgcctggccggcgggtatgagcgccgagctgaataccgttcgtaccctcgtctccatgcgcacccgcaggctgtgggtgatgaccctgtttattgtgctcacgctggtactggggctggcgaagctgcagcacgctatggagctgctgccgattattggcaccctggccagtacctgggcgctctttcgctgctccgggctcaccgtccgctgcgtgatgtggtgcgcaaccgcctgctgggtgatccacaacttctggctgggttcgatcggcggcactctgattgaaggcagcttcctgctgatgaacggcctgaatatcattcgtttccggcggatgcagaagcgcggtatcgatccgtttaaagtggaaaaggcggtacagaaggaaaccccctccgcgcgttag

SEQ ID NO: 203086 - DNA, 1248 bp, Klebsiella oxytoca
atggcaaccccatcaccccgatcgaccctgctacggcggctggctcagggcagtctggtcaaacaaattttaatcggtctggtactcggcgtactgctggcgacggtctcaaaaccggccgccgtcgcggttggactactgggtacgctgttcgtcggcgcgctgaaagcggtagcgccggtgctggtattgatgctggttatggcctccatcgccaatcatcagcaggggcaaaaaaccagcatccgcccgattctgttcctctatctgctggggacttttgccgccgcgttaaccgcggtgctgtttagcttcctctttccgtcaacgctgcacctgaacgcagcggcagagagcattactccgccgtcgggcatcgttgaagtcctgcgcgggctgctgatgagcatggtttctaacccgattgacgccctgttgaacgctaactacatcgggattctggtctgggccgtcggtttagggttcgcgctgcgccacggcaatgaaaccaccaaaaatctgatcaacgatatgtcccacgcggtgacctttatcgttaaggtggtgattcgctttgcgccgctgggtatctttgggctggtcgcgtcaacgctggcgacgaccgggtttgaaaccctgtggggctacgcccaactgctgctggtgctggttggctgtatgctgctggtggcgctggtgattaacccgctgctggtgttctggaaaatccgccgcaatccctatccgctggtgatgacctgcctgcgcgaaagcggcgtatacgccttctttacccgcagctccgccgccaacattccggtgaatatggcgctgtgcgaaaagcttaatctggatcgcgatacctattcggtctctattccgctgggcgcgaccatcaacatggccggcgcggcgattaccattacggtactgaccctggcggcagtgcacacgctgaacgttccggtcgatctgccgaccgcgctgctgctcagcgtcgttgcttcgctgtgcgcctgcggcgcttccggcgtggcgggcgggtcgctgctgctgatcccgctggcctgtaatatgtttggtatcccgaacgatatcgccatgcaggtggtcgccgtcggctttattatcggcgtcctgcaggactcctgcgaaaccgcactgaactcctcaaccgatgcgctgttcaccgctgccgcctgtatcgctgaagacgaacagctggcgaagaacgccctgcgcagttaa

SEQ ID NO: 203087 - DNA, 969 bp, Klebsiella oxytoca; identical to SEQ ID NO: 172776

SEQ ID NO: 203088 - DNA, 990 bp, Klebsiella oxytoca
atgatacgtttcgcagttgttggcacaaactggataaccaagcagtttgtcgatgccgcccatgaaaccggcaaatataaactcaccgccatctactcccgcagccttgagcaagcccaggctttcgccagcgactatcccgtcgaacatctcttcacttcgctggaagatttagcgcaaagtcctgacgttgacgcggtctatatcgccagcccaaactcgctgcactttccgcaaacccgcctgtttctgcgccataaaaagcacgtcatttgcgaaaaaccgctggcctcgaatctgcaggaagtggaagccgccattaagacggcgcgggaaaataacgtggtgctcttcgaagcgttcaaaaccgccagcctaccaaacttcctgctgcttaaacaatcattcgacaagatcggcaagctgcgcaaagcctttattaactactgccagtactcttcccgctatcagcgctatctcgacggtgaaaatcccaacaccttcaatccggccttctctaacggctcgattatggacatcggcttttactgcctggcctcggcggtcgcgctgtggggcgagcctcgcgcggtgcacgcaaccgccagcctgctggagagcggcgtcgatggccagggcacggtcgttctcagctacggggattttgatgtcactttgcaccactcaaaggtcagcgactcggcgatccccagcgaaattcagggcgaagccggcgcgttagtgatcgaaaaaatctccgaatgccagaaagtgtgtttcgtgccgcgcggcggcaagcctcaggatctcacccagccgcagcatatcaatacgatgctgtatgaagcggaggagttcgcgcgtctggtcgaagccaacgaggtggttcatccgggtctggaagtgagccgcatcacggcgaagctgctgagcgaaattcgtcgccagaccggggtcgtgttcccggcggatagtcaaccggtggcgtaa

SEQ ID NO: 203089 - DNA, 504 bp, Klebsiella oxytoca
atgagcactttaacctatctccagggctaccctgaatccctgctggcgcaggtcaccgcgttaatcgaacagaaccgtctcggcgaggtgctgaaaaagcgctatccgcagggccacgatatcaacaacgataaagcgctgtatcagtacacccaggatctgaagtcccgctatctgcgcggcgcggcgcctattaacaaagtaatgtacgacaacaagatccacgtgcttaacaacgcgctcggcctgcataccgccatctcccgcgttcagggcggcaagctgaaggccaaagccgaaattcgcgtcgccaccgtctttcgcgatgcgccggaggattttctgcggatgatcgtggtgcacgagctggcgcacctgaaggaaaaagagcacaacaaagcgttctatcagctgtgctgccatatggagccgcagtaccatcagctggagtttgatacccgcctgtggctgacccagctttcgttagagcgttctgcgccatag

SEQ ID NO: 203090 - DNA, 1644 bp, Klebsiella oxytoca
atgattcagaatcctgtttttaaaggttttaatccggaccccagtatctgtcggcgcggcgatgattattatgtagctgtctcttcctttgaatggtttcccggcttgccgatttaccattcgagagatctcaaacattggcaattactcacccacgttctcaccgatgatacgaatccggatttaaaaaagctgccctccgccaaaggtatttgggcgccaagcctaacctggtgtgaagaggaaaagctgttctacgttatttatggcgtaatgaattccatgaattcgcgttattttgatgtagataactatcttattaccgccagtgaaatcaccggcccgtggagtgagccggtttatcttcactcggccgggttcgatgcttctatcctgcacgacagcgacggtaaaaaatggatcgtttcactggagtgggaaacccgcgaaggttacgaaaaaccgggcgccatttgcctggtggagtattcaccgcaaaggcaaagcgttgtcggctatccgcagcggatctggcgcggcgggaccgatcgcggttgtatagaagcaccacatttgacgcgccgcggcgactattactatctgatggtcgctgaaggcggcaccggctacggccatgcggtcactatggcgcgcgcaacgcaggtcgctggcccctatgaaggcgatccgcaaaatcctatcgtcaccgcctggccggagaattttaacgagcgccacgatgcaggtcatctcaaaccacactacttcaatccgcaaatctatctgcaaaaggccgggcacggcagctacgtcgagaccccgacgggggaagtctggttaacccacctttgcagcagacccttccgccaggagttgcgctgcccgctaggccgcgagacggcgatacaaaagatggtatggagcgacgatggctggctgcgcatggcggccggggggaacctcgctcagcaccaggtggaagagtctaatctgccttctcagccgtttccggttaaaccagacagggatgattttgatgggcagacgctggataacgccttctatgcgccgaggatccgctttcagcgctttaccagccttgagcgtcaagcgggttaccttgccttacgcggtcaggaatcgctgagctcgctgaataaagtcagcctgctggcgaaaaagctcacctcggtatacgccaccatcaccacgaaaatggatttcagcccggagatttatcagcatagcgcgggcctggcgctttactacgacaatatgaactatctgtttttgcataaaacctgggatgaagcctccggcgcagcgcagctggccatcatttatatggacaacggtgagcgtcacgacgacccgcagaaaatctgccttacggagggggaaatctatctggcgatggcgattaatggccgggagatacagtgctcgtggtccgtggatggcgaaaaatacctcaacatcggcgcggtctacgacacctcgcgtttttccgatgaatacagccgctatggcgagtttaccggcgcgtttgtcggcatggcctgcgtggatagcatgctgcatcgtaaagaggcgctgtttgacttctttagctaccgggcggtcgaagacgcgataattgagtaa

SEQ ID NO: 203091 - DNA, 867 bp, Klebsiella oxytoca
atgagtgacgaatctcccgttttcgaaaagatccccgtgggcgccggcgagctatttaccttacgggtagataacataaatgatttcaatggcataaacgtagtcccccattttcatatgatggacgaactgatgtggttcagagagtcggcaggcagctattcgattggtgatgagaaatttacgataaaaaacaataccctggttttcgtccctgccttattgatccatgaaatgacgctgccggccgctgccagccacaagcgttatcttatgcaattcgaaaaagagtggcttgagggatatgacctgtcgctacccgccgcgcactgcggcgcagtcgcttacctttccggcgaggaagccgagcgtctggagctgctcctgagctggtgcggcgagttcagcgactttgccgattcgctgttccgttccctgatgcagagcgtgctgctgcatgcctttaacagcctgaaagattccgtccccattaccgaacggaccaaccaccgctacctcagcgagctgattgaacttctgcaatccattgatgaaaatgaaaattttgagatgacgacagaagaagccgcccgccgctgccggtggtcgaaatcctggttttcccgcacctttaaatccgccttcggtatcagcttcaaaaaatttatgctgctgcgaaaactcaatatcgctatcaacctgctgaccaataccgacctgaagatcagcgatatctcgcaaagcgccggcttcaccgacagcgcctacttctgcctcaagtttaaggagatgatgaacgacaccccgctggccttccgtcataaagtcagaagcaccgatgccgtaggcagccgggcggagaaataa

SEQ ID NO: 203092 - DNA, 1344 bp, Klebsiella oxytoca
atgaacactgcccgtatcagtattaacgaaaaatttagctatgggttaggggataccggctgtaatttagtctggcaaacagtgatgctgtttatggcctggttttataccgacgtatttggtttaagtccggcgcatatgggaaccatgtttctcgcggtaagggtattagacgcggtgaccgatgtattaatgggggcggtggcggatcgtacccgaactaaatatgggcaattccgaccttatattttatggttcgccattccttttggcgttctttgctgcttaactttttatacgccggatttcggctataccggcaagctcatttatgcctatgtttcttataccttattatcgctggtttatacggcgattaacgttccgtattgcgcgatgatcaataatatttctaacgactcccgcgagcgcgtatcgctccagtcctggcgctttgcgctcagtacgcttggcggcctgattgtttcgctgaccgcgctaccgctggtggcgtggttgggccaggggaacgtacaaaacggttatttttacaccatgatcgtaatggggggcctgagcatcatcctgttctttatctgttttggcctgacgaaagagcgttacaccacggatatcgcggtcaacaaccaaagcagcattcttgacgatctaaaaactctgctcgccaacaaggactggcgcattttgttcgcgctcaacgtcgttaacctgattgcggtgctgtttaaaggcgggaccacgctctattacgtcaacaacattatggggcgggcggatctgggtagcctgctgctgaccaccaccctggcctcgggcgtgctgggggcgatgctctcaccgtttatctttaaaaatattgataaagtgaaagggtttaaaatctcgatggccatcgaggcggcgctgctgacgggcatgtacttcgtcccggcggggaacgtagccgctatctttgcgctggtgattatcatcaatattatccagctggccgccacgccgctgcagtggagcatgctgtccgatatcatcgatgcggaagaaaaacgcagcggtaaaaagctcagcgggatcgttttttcaacgaacctgtttgccatcaagctggggatcgccatcggcggcgcgctggtgggctatatgctggcctggggcgactacgtcggcggcgcagcccagcaaaccgagtccgcgctgcagatgattaagctgttgtttaccgtcttccccggcgtgctggtggcgctgctgattgttatcatgagcaaatatagtctggacgataagcgcctgtcgcgcatggcgcaggacgacctcccggcgtaa

SEQ ID NO: 203093 - DNA, 1131 bp, Klebsiella oxytoca
atgagccaggtagagttaaacggtgagttattcacattagagcggttcccgccgaatgctgaagaggaagcgcttcaggcgtgggaagcggcggatgaatatctgctgcaacaggtgaatgatgtcgacggcctgacgctcattttcaatgacagcttcggcgcgctgggctgcgcgctggcggaacgcaatccggtcagcatcaacgattcctacgtatctgagctggcgacccgctacaacctgcggatgaacggcattaatgaagagagcgtacgttttcaggatcccctgagcgaactgcccgcagctccggcactggtgctcattaaagtaccaaaacagctggcgctgctggagcagcagctgcgcgctctgcgcgcggttgtcacgccagaaacccgcatcatcgccgctgcgaaagctcgcgacgtccacaattccaccctggcgctgtttgagaaaatccttggcaccaccaccacatcgctggcctggaaaaaggcgcggctgattttctgtacctttaccgcgcctgaggtagccgatgcgccgcaaacttacagctggcagctggacggtacaccgtggacgattcacaaccacgccaacgtgtttgcccgcagcggcctggatattggcgcgcgcttcttcctggaacacttgccagtaaatattgaaggcgagatcgccgatctcggctgcggcaatggcgtgattggcctgaaagcgctggctttaaaccccgacgcccgggtgatgtttaccgatgagtcctatatggcggtcgcttccagccgactgaacgtcgaaaccaatctgccggatgacctcgagcgctgcgagtttatggtgaataacgcgctgtccgatattgaaccggaccgcttcgccgccatcctctgcaacccgccgttccatcagcagcatgcgatcaccgatcatattgcctggcagatgtttaacgatgcccgtcgtagcctgaagtacggcggcgagctgtatgtcgtcggtaaccgccacctcgattatttccgcaagctgaagcgcgcgttcggtaactgcacgacgatcgccaccaataataaatttgtggttttaaaagcggtgaaattgcgtaaggcgcgttaa

SEQ ID NO: 203094 - DNA, 828 bp, Klebsiella oxytoca
atgaatcatcaggaagatgaatacaataacggagccgccactccgcgcaaaattgtcttaggcaggcatcctgccgtatttgtttgcgttatacaatgcatagtttatatatacatcactggctctggctggctcgggtttagtgataataccggtggagggtataatctgctattcgctgtcctgtgggcagcaatggccttcggaatctataaatatagccgcgcctgcgctgccatggcgctggttctttattttatcgatcaactggcggtggagttatttccgcccggacgcagctttaatgtggcctggctggcagggaccacgatctggttactctgtttttgccgcggaatcattgcctgctggatgcggcgtaaacataaagtcatcgggattgatgacagtacatatattaataagcgaacgttaacgctgtatctcattgtgctcgtgcttttccattcatcctgtctgggcctgaaacaggcgcagaagcacacccgcaatatcctctggcaggcgttttatcaatcggtcatggaagataagagtaagatcccgctgccgataaaaatcgataataatacttccctcaccgacatctattttgatcagcacaccttgattgttgaacaccatgttcgccagacaaagctggccgatttaccgatggcgctctactacgcgcacgctaaaaaactttactcgcgttattgcgccaacgatgtggcgagctcgcttgatttaaaaatgatagtccgctttgcgcaggggtatgagacgcgtgacctgtcgtttacgccaaaagactgtcaattttaa

SEQ ID NO: 203095 - DNA, 2022 bp, Klebsiella oxytoca
atgagccgctacccgtcgcttttcgccccgcttgagctggggttcactacgctcaaaaaccgcgtgttgatgggctcaatgcatactggcctggaggagctcccggatggcgcgcagcggctggcggctttttacgccgagcgcgcccgccacggggtagcgctgatcgtcaccggcggaattgcccccgccccttccggcgtcaccatggcgggcggggcggtgcttaacgacgccagccacctctcccatcatcgctatattaccgacgcggtacacgaggagggcggcaaaatcgccctgcagatcctgcataccgggcgctacagctaccaaccgaagctggtggccccttccgcgctgcaggcgccgatcaacccctttacgcctcacgaactgagccacgaagagatcttacagctgatcgatgattttgcccgctgcgcccagctggggcgagaagccgggtacgacggcgtcgaagtgatgggctcggaaggctatctgattaacgaatttcttgccgcgcgcaccaaccttcgcgacgaccagtggggcggcgactacgcccgacgcatgcgttttgccatagaggtggtcagagccgtacgggagcgcgcaggcaacgactttattattatctatcgtctgtcaatgcttgaccttgtcagcggcggcagcaccctggcggaagtcaccgagctggcaaaagccattgaggccgcaggggcaacgattatcaataccggtatcggctggcacgaggcgcgtattcccaccatcgccacaccggtaccgcgcggcgcctttagctgggtcacccgtaagctgaaaggcgcggtgtcgatcccgctggtcaccaccaaccggattaacgatcccgatgtggcggaagcgatcctggctcgcggagacgccgatatggtatcgatggcccgccctttcctcgccgacagcgaatttctctccaaagcacaaagcggacgggcggaagagatcaatacctgcatcggctgcaaccaggcctgcctcgatcggatcttcgccggcaaggtcacctcgtgcctggtcaacccgcgcgcctgccatgaaaccctgatgccgatagcgcccgcgaccacgccgaagcggctggcggtggtcggcgctggtcctgccgggctggcctttgcggttaacgccgcctcgcgcggacatcaggttaccctttttgatggtcattgcgagattggcggccagtttaatatcgccaaacagatccccggcaaagaggagttctacgaaaccctgcgctactatcgccagatgctcgatcttcacgctgtcgatctgcgattgaatacccacgtcacggccggggatctgcgggcatttgatgaaatcgtcctcgccaccgggatcgccccgcggatgccggatatcgccgggatcgagcatcccaaagtgctgagctacctcgatgtcctgcgcgataaagcgccggtaggcgagaaggtggcgattatcggctgcggcgggatcggctttgatacggccatgtacctcagccagtccggcattgccaccagccagaatatcggcgagttctgtgcagaatgggggatcgataccagcctgcagaacgccggcggactgcgcccggaggggatgcagctggctaaaagcccgcgccagatcgtgatgctgcagcgcaaaaccagcaagcccggcgacgggctggggaaaactaccggctggatccatcgcgctaccctgctggcccgcggcgtcaaaatgatccccggcgtcagctatcaacggatcgatgatgccggcttacatgtgacgatcggcggcgaatctcaggtgcttaacgttgatcatgtgattatctgcgccggtcaggatccccgccgcgagctggccgatccgctgcgggcggcgggtaaaacggtacatttgatcggcggctgcgacgtggcgctggagctggacgcccggcgggctatcgctcagggcacccggctggcgctgtcgatttaa

SEQ ID NO: 203096 - DNA, 1593 bp, Klebsiella oxytoca
atgagttacctgttagcgttagatgccgggaccggcagcgttcgggcggtcgtattcgatctccagggccgtcagattgcggtcggtcaggccgaatggaagcacctgagcgttgagaatgtccccggctcaatggagttcgatctcagcgtcaactggcagctggcctgtcagtgtatccgccaggcgctggccgccgcccatctctctgcggcggatattcagtccgtggcctgctgctcgatgcgtgaaggcatcgtgctttacgaccgcaacggcgaggccatctgggcctgcgccaacgttgacgctcgcgccagccgcgaggtggcggagctcaaagagatccacgacgaccgttttgaatccgaagtgtactgcgtgtcggggcagaccctggcgctgagcgccatgccacgcctgctttggctggcccaccatcgcccggatatctaccgcaaagcggcgaccatcaccatgatcagcgactggctggcggcgaagctctccggcgagctggcggtcgacccttctaacgccggaaccaccggcatgctcgacctgttcagccgcgactggcgcccggcgctgctggatatggccggactgcgggccgatattctctcgccggtcaaggagaccggcagcgtactgggggcggtgaccgacgcggcggcggcgcaaagcgggctgcgcgcaggcacgccggtggtgatgggcggcggcgacgtccagctcggctgcctgggtctcggcgtggtgcgcgccgggcagacggcggtgctcggcggcactttctggcagcaggtggttaacctgccggaagtccgtactgacccggagatgaatattcgcgttaacccgcacgtcatacccggcatggcgcaggcggagtccatcagcttttttaccggcctgaccatgcgctggttccgtgatgctttctgcgcagaagagaagctcattgccgagcgcctcggcgttgacgcctacagcctgctcgaagagatggccagccgcgtaccggcgggttcccacggggtgatgccgattttctctgacgccatgcactttaagcagtggtaccacgctgcgccatcgtttattaacctctccatcgacccggaaaaatgcaataaggccacgcttttccgtgcgctggaagagaacgcggcaattgtctccgcctgcaacctggcgcagatttcgcagttttccggcgtgcagtttgatagcctggtctttgccggcggcggtgcaaaaggggcgctgtggagccagatcctcagcgatgtcactggtctgccggtgcgggtgccggaagtccgcgaagcgacggcgctgggctgcgcgatcgccgccggcaccggcgccgggctatacgccgatatggcgacaacgggtgagaaactggtgagctggtaccgggaatttacgcctaatcccgcgcatcgggagctgtatcaggagatgatgaccaaatggcagtcggtgtacgccgagcagctcggtctggtggacagcggattgacgacctccatgtggcaggcgccgggtctggcgcgccgcgagcgcattgccccctcaccctaa

SEQ ID NO: 203097 - DNA, 972 bp, Klebsiella oxytoca
atgagcgaaaaacgcattacggaagagagccgctacgccgggctggcgttagccgaggaagagctggtggcgcgggtggcgtggtgctactaccacgacggcctgacgcagaacgacatcggcgagcgtttagggctgccgcggttaaaaatctcccgcctgctggaaaaaggccgccaatcgggagtgatccgcgtacagattaattcgcgctatgagggctgtctggcactggaaaccgaactccagcagcgctttggcctgaaaatcgcccgcgtgctgccggcgctcaataccccgccgatgaacacccgccttgggattggcgcggcgcaatcgttaatgggcgtgctggagccgggacaactgctggcggtgggctttggcgaagccaccatgagctgcctgcagcatctgagcgggtttatcggttcccagcaggttcggctggtgacgctttccggcggcgtaggtccgtatatgaccggcattggccagctggatgccgcctgtagcgtcagcatgatccccgcgccgctgagggtgtcatcggcggatgtagcggagatcctgcgccgggaatcgagcgtacgcgatgtgatcctggccgccacggcggcggatgcagcagtggtaggtatcggggccattgaccagcgccgggacgccaccatcctgcgctccggctatatcagcgaaggcgagcagctgatgtacgcccgcaaaggcgcggtcggcgacattttaggttatttcctgcaggccgacggtaaaccggttgaagggctggagatccatcgggaactgcttggcgtcacccttgatgaactggcgcagctgccgactatcgtgggcgtcgccgggggcacagaaaaagcgcaggcgatttacgcggcccttatcggcaagcggattaatggcctggtaacggaagagacaacagcacgcgcggtgctgacgctggcctcataa

SEQ ID NO: 203098 - DNA, 1488 bp, Klebsiella oxytoca
atgaagccactgcttgaagctcgccaaatctgcaaacagttctccggcgtgatcgtgctgaagcatattgatttcacgctgctttccggccaggtgcacgcgctgatgggcggcaacggcgccggaaaatcgacgctgatgaagattattgccggggtagagacccccgacagcggtgagctcatcctcggcgaacgtacatttgtgcgccttactcccgcccaggcccatcagcagggcgtgtatctggtgccgcaggaaccgatgttattccccaatctgacggtgcgggaaaatattctttttcgtctgccgaagcgggcggatagcgaggcccatctgcaggaaaagcttcagcagcttaattgccagcttaaccttgaggcggcggccagcacgctggaagtggccgatcagcaaatggtggagatcctgcgcgggctgatgcgcgacgcgcagatcctgatcctcgatgaacccactgcctcattgacgccgggagaaaccgatcgcctgtttcgccagatccgctctttgcaggcgctcggcgtcgggatcgtgtttatctcgcacaagctgccggagatccgccaggtcgccagccacgtctcggtgatgcgcgatggcgcggtggtgctgagcggggaaaccgcgcactacggcgacaaccagctgattggcgcaatgacgcccgtcagtcgcgatcgagccctgagcgacacgcaaaagttgtggctggcgctgccgggcaatcgtcgcactcaggcgcaggattttccggtgctgcgggtcgaagatctgaccggagagggctttatcgatctcaatctggagatccgcgccggggagatcgtcggcctcgccgggctggtcggatccgggcgtaccgaatttgctgaaacgctctatggtctgcggccagctcgcgcagggcgggtgtggctggaaaaccgcgatatcagccgcgacagcacgcgcgccaggctggccagcgggctggtctatctgccggaggacagacaggtttccggtctgtttctcgatgcgccggtgcgctggaacacggtgatgtttaaccagccgtcgctgtggcagcagaaccggcgcgaagcggcggtggtggagcgctatcaccgggcgctggggatcaaaatggccgatggcgatcgcccggtgcgcacgctctccggcggtaaccagcagaaggtactgctggcgcgctgcctggaggctaacccgctgctgctgatcgtcgatgaaccgacccgcggcgtggacgtttccgcccgcgccgacatctatcagctgctgaaaagcgtcgccgcgcagaacgtggcggtattgatgatctccagcgatctcgacgagttcgttggcctggccgatcgggtgattgtaatgcatcagggcaggcagagcggcgagctggcgcagcaggcggtcagcgttgaccggatgatgaccctggccttcggagggcaggcatga

SEQ ID NO: 203099 - DNA, 1011 bp, Klebsiella oxytoca
atgaaaacgttattaaagaatcgcgaactgagcgccttcctcgccatcgtggtgctgtttgccgggctggtggcgctcaacccggcttatttcagcttacaaaccctgggcatgattttcgccagctcgcaaatcctttgcctgctggcgctgggggcgacgctggtgatgctcacccgcaatattgacgtttcggtgggctccaccgttggcctgagcgctatcgcgacaggcgtggcgctaaatagcgggtatgggctgatgaccgccatcgcctttgcgctggcgatcggcgcgctggctggcgcctttaacggcctgctggtggtggggctgcgcatcccggcgattgtcgccaccctcggcaccctcggcctttatcgcggggtgatgctgctgtggaccgccggtaagtggattgaaggtttgccgaacagcctgaaagcgctgtcggaaccggcattcatcggcatttctccgctgggctggctggtgctggcgctactgctggcgggcggctggatactatcgcgtactgcctttggccgtgatttttacgccgtcggcgataaccttgccgctgcccgccagcttggggtggcggtgaaccgcacgcggatgctggcattcacctttaacggcatgctggcggcctgcgccgggattgtgttcgccgcgcagattggatttgtgcccaatcagaccggcagcggcctggagatgaaagccatcgccgcctgcgtgctcggcgggatctcgctgctgggcggtaccggcacgctgctcggcgcttttctcggcgccttcttcctcacccaaatcgataccgtgctggtgctgtttcgtctcccggcgtggtggaacgacttcattgccggcctggtgctgctcggcgtactggtgctcgacgggcggctgcgtcaggcgctgacccgccatcagcgggcgctgaaatacagtcgctttcagcccggcaataaaggggggcaagcgcgtggccccgtttcctga

SEQ ID NO: 203100 - DNA, 978 bp, Klebsiella oxytoca
atgaagctcaactgggaaagcgcgctgctgggattactggtggtggagatcctgctgtttggcaccctgaatccgcgcatgctcgatctcaatatgctgctgttcagcaccagcgactttatctgcatcggcatcgtggcgctgccgctgacgctggtgatcatcagcggcgggattgatatttcgctcggttccaccatcggcctgtgcgccatcgcgctgggggtgatgatgcaggcgggctggccgatgagcctcgcgatccccctgacgctgctgctcggcctgctgtgcgggctgctgaacgcggcgctgattcactacaccggcattagcccgctggtgattacccttggcaccctgtacctctacggcggcggcgcgctgctgttttcgggcatggccggggcgaccggctacgaaggcatcggcggattcccggatagctttaccgccttcgccaatctgaccctgttcggcctgccgataccgctggtgctgttcgccgttatcaccttttttttctggctgctggcccaccgcgggcgctttgggcggcacctttttctgctcgggcagaacccgcgcgccgcgcgctacgccgcgctttccgttaacgggatgccctacgcgctgtatggcctggtgggcgtggcgtcggcggtggcggcgctggtgatggtctcctatttcggctcggcgcgctcggacttaggccgcgacctgctgatgccggcgctgaccgccgcagtgctcggcggggccaatatctacggcggttccggctcgatcgtcggcacggcgcttgccgcgctgctggtgggctatttacaacaaggtttgcaaatggtcggcatccccaaccaggtgtcgagcgcgctgtcaggggcgctgttggttgtggtggtgatggggcgttcgctgagtctgcaccgtgagtgggtgcggatgacctggcggcgtctttctcgcgcataa

SEQ ID NO: 203101 - DNA, 1014 bp, Klebsiella oxytoca
atgaaaaccaaacgaatcctgcaaacgagcgccctggcgctggcgttaagcgtggcaaccgctcaggcggcggaccgcatcgcctttattcctaagctggtcggcgtcggcttctttaccagcggcggtaacggcgcgaaagaggcgggcaaagcgctcgacgtggacgtcacctacgacggcccgaccgaaccgagcgtctccggccaggtgcagttgatcaacaacttcgtcaaccagggctacaacgcgattatcgtctccgccgtatcgccggacggcctgtgcccggcgctgaagcgggcgatgcagcgcggggtcaaggttctgacctgggactccgataccaaaccagagtgccgcagcatctatatcaaccaggggacgccgcagcagcttggcggcctgctggtggagatggcggaaaaacaggtgacgaaacccaccgccaaggtggcgtttttctactccagcccaacggtgaccgatcagaaccagtgggtaaaagaggcgaaagccaaaattgaaaaagcgcatccgcagtgggaagtggtgaccacgcagtttggctataacgacgccaccaaatcgctgcaaaccgccgaggggatcttaaaagcgtacccggatctcgacgccattatcgccccggacgccaacgcgcttccggccgccgcccaggcggcagagaaccttaagcgccagggcgtggcgattgtcggcttcagtaccccgaacgtgatgcgcccctatgtagagcgcggcacggtaaaagccttcggcctgtgggacgtggtacagcaaggcaagatcgcggttaacgtcgccgatcgtctgctgaaaaagggcgatcttaacgtcggcgacagcgttgatgtgaaagatctcggcaccctgaaagtcgagcccaacagcgtgcagggttatcagtatgaagcgaaaggcaacggcatcgtgctgctgccggagcgggtggtgttcaccaaagagaatatcaataactacgatttctga

SEQ ID NO: 203102 - DNA, 888 bp, Klebsiella oxytoca
atggctgatttagacgatatcaaagagggaaaaaacttcggcttagaccgtccgcagcagaacacgctctatacgctgaagggctgtgggtcgctggagtgggggatgcagtcgcggctggcgcgtatctttaatccgcagagcaatcgcacggtgatgctggctttcgatcacggctattttcaggggccgactaccggtctggagcgtatcgatctctctatcgcgccgctgttcgaggagaccgacgtgctgatgtgcacccgcggcgtactgcgcagtcaggtgccggccgcgaccaacaaaccggtggtgctgcgcgcttccggcggcaactcgatcctcagtgaactttccaacgagtgcgtggcggtggcgatggaagatgcgctgcgcctgaacgtctgcgcggtggcggcgcaggtctatatcggcagcgaacatgagcatcagtccatcaacaacatcatcaagctggtggacgccggcaaccgctacggtatgccggtgctggcggtaaccggggtgggtaaagagatggcccgcgacgcccgctacttctcgctggccagccgcattgccgctgaaatgggggcgcagtttgtaaaaacctactttgttgaggaaggctttgagaaagtgactgccagctgcccggtgccgatcgtcatcgccgggggtaaaaagctgccggagcaagaggcgctcgagatgtgctggcgggcgattgaccagggcgcatccggcgtcgatatggggcggaatatcttccagtccagcgcgccgcgcgcgatgctgaaggcggtgaaaaaagtggtacatgagaacctgagcgcccgcgaggcgtatcagttctggcaggaggaaaaacagggagagctgcaatga

SEQ ID NO: 203103 - DNA, 297 bp, Klebsiella oxytoca
atgaacgtaacgctggtagaaattaatatcaaaccggaacgggtcgacgagtttcttgaggtattccgcgccaaccacgagggggcgctgcaggagccaggcaatcttcgctttgatgtcctgcaggacccggaggtgaagacgcgcttttttatttatgaagcctataaagatgatgaagcggtgttggcgcacaagaaaaccccgcactatctggcctgcgtagagaagctggaggcgctgatgtcgcagccgcggcagaaacgcagctttatcggcctgctgccggaggtgtaa

SEQ ID NO: 203104 - DNA, 2352 bp, Klebsiella oxytoca
gtgaagattaccactactcttacgccgctggcctgcgccctactgctaagcttttccgcccacgcgctgaccgcggatgactttaaaaatgttatcaaccgcagcggcgcgccgcaggcgatgcaggattttgataacgatgaccaccagcgcttcaacccgtttttcgatttgggcgcatggcatgggcatctgctgcctgatggtccggccaccatgggcggatttccggggcccgcgctgctcaccgaggagtacatcaactttatggcgaccaatttcgatcgcctgacggtataccagaacggcaagaaagtcgccttcaccctgcaggcctggagcctgcccggcgcgctggtgcaaaagctctccgcggccggcgtacaggtcgagatgaccctgcgctttgccagcgcgcacacctctttactggagactaaaatcaccagtagcagcccgcttaagctggtctgggacggcgagttgctggagaaactctccgccaaagaggggaaaccgcagtcaacgcaaaccatcgaccaggctttcccggactatcagcgccgcctgagcgcgacccacgacggcctgaccgtcagcttcggcaaagtccgctccgcatcggatttaatgacctccggcgaatcgcagtatcagatccatcgctccctgccgacggtcacccaaatcgacggccatcggttcaccagcagcgcgcaaatcaacggctcgaccacgctctataccacctactcgcacctgctgaacgccgagcaggttcggctcgagaaagcgcaaatccgcgatattctggcgcgaccggcacactatctgcgcgcttccgaggcgcgctggaacggctatctgcaaaaggggctgaccaatcctgatgctacggcgcagcaaacccgggtggcggtaaaagcgatcgaaacccttaacggtaactggcgcgcgccgggcggcgccgttaagcacaacaccgtcacgccgtcggtaaccgggcgctggttctcaggcaaccagacctggccgtgggatacctggaagcaggcctacgccatggcccacttcaacccggagatcgcgaaagagaacatccgtgccgtcttctcctggcagattgccgccgacgataaagtgcggccgcaggatgccgggttcattccggatctgatcgcctggaacctgagcccggaacacggcggcgacggcagcaactggaacgagcgaaataccaaaccgagcctggcggcctggtcggtgatggaagtctataacgttacgaaagataaagcctggctggcggagatgtatccgaagctggaggcctaccatgactggtggctgcgcaaccgcgaccacaacggcaacggcgtgccggagtacggcgcgacccgcgataaagcgcacaacaccgccgatggcgcgatgctgtttaccgtgaaaaagggcgataaagaacggacgctttccggcctgaaaacctacgagcaggtgacggcgaaaggcgattacgatagcctggagatcccggcgcaggtggccgcctcctgggagtcggggcgcgacgacgcggcggttttcggctttatcgataaagatcagttggataagtacatcgccggcggcggcaagcgtagcgactggacggtgaaatttgctgaaaaccgggataaaagcggcaatctgctcggctattcgctgctgcaggagtcggtcgatcaggccagctacatgtacagcgacaaccactatctggcggagatggcggcccttctcggcaagccggaggaggcaaaacgctaccgggcgctggcgaaaaagctcgccgactatatcaacacctgcatgttcgacccgcagagcaaattctattacgacattcgcattgaagcgcagccgctggcaaacggctgcgccggtaggccgatcgtcgagcgcggcaaaggcccggagggctggtcgccgcttttcaacggcgcggccactcaggcgcatgccgatgacgtcatttcggtgatgctggacgccaaagagttcaacactttcgtaccgctgggtaccgccgcattaacgaatccggcgtttggcgcggatatttactggcgcggccgcgtgtgggtggaccagttctggttcggcctgaaggggatggagcgctacggccaccgcgaagaggcgctgcagctggcggacgccttcttcaggcacgcccgggggctcacctccgatggcccgatccaggagaactacaatccgctcaccggcgctcagcagggcgcgccgaacttctcctggagcgcggcgcatctgtacatgctgtataacgagtttttccgtaaaccatag

SEQ ID NO: 203105 - DNA, 1062 bp, Klebsiella oxytoca
atgatgaaaaagaacaggcctatttactgggcgcttgccgcccaggctttttgcacaccggctattgccgtcgatgtggcgcatccggcggaacatgatgacatgaaaacgcctgaacttaatgccacctcataccgtttttacggtgaattgggggttggcggatatatggatctagaaggcgaggacaagcataaatatagtgatggcacctatattgaaggcggactggaaataaagcatggcagctggtttggtttaatttatggcgaaggctggacggttcaggccgatcgtcagggaaatgcctgggtagcggaccatggctggggcggatttgaaggtggaataaaccgcttctacggcggatataaaaccgagagcagcaccgagattatgctcagcctgcgccaggattcatcgctcgacgatctgcagtggtggggcgatttcacgcccgacctcggctacgtgatccccaatacgcgcgatatcatgtacgcgctcaaggtgcagaacctggcgggagattttcgctacagcgtgaccgcgaccccctccgggcaccacgatgaaggcaaagcatggctccatttcggcaaatacgaccgctacgacgataaatatacctacccggcgatggtcaacggctacatccagtacgatctcgcgaacgaggtgacctggatgaatgggcttgaggtgacggatgggaccggccagctatttttgaccggtattctcacccccaacctcgccgcccgcgcctggcatcataccgggcgcgccaggggaaaagacgtgccgggaacggagaccggctttatggccagcgctatgtatgaagcgctcaagggcgtgtatctctctaccgcctatagctacgccaaacaccgcccggatcgcgccgccgaggaaaccacctcgtttatgcagttcggcatctggtacgaatacggcggcggacgttttgccaccgctgcggacagccgcttctacatgaaaaatgcctccggcgacccgagcgatcaggttttcctgatgcaatatttctattggtaa

SEQ ID NO: 203106 - DNA, 1434 bp, Klebsiella oxytoca
atgtctgatatcaaacgtaataccatcggcaagtttggcctgctgtcgctaaccttcgccgccgtcttcagttttaataacgtgatcaataacaatattgagctgggactggcgtcggcgccgatgttcttccttgcaaccctgctctactttgttcctttctgtctgatcatcgcggaattcgtttcgctgaataaaaactccgaagcgggcgtttatgcctgggtaaaaagctcgctaggggggcgctgggcctttattaccgcctatacctactggttcgtgaatctgttcttttttacctcgctgctgccgagggtaatcgcttatgcctcctacgctttcctcggatacgagtacattctgacgcccgtggccaccacgatgttgagcatggcgctgttcgccctgtcgacctgggtttccaccaacggcgcaaaaatgctgggcccaatcacctcggtcacctcatcgttaatgctgctgctgacgctctcctacattctgctttccggcggcgcgctggtgggcggtattcaaccagcggatccgattaccgtggatgcaatgatcccgaactttaactgggcgttcctcggcatcaccacctggatctttatggcggccggcggggcggagtccgtcgcggtgtacgtcaatgacgtgaaaggcggatcgaaatcatttgttaaggtcattatcctcgccgggatcgtgattggcgtgctgtactccatttcctcggtactgataaacgtgtttatcagcagtaaagagctgaaatttaccggcggatcggtacaggtcttccacggtatggcggtatggtttggcctgcccgaaatcgtggtcaaccgttttgtcggcctggtctcctttaccgccatgtttggttcgttattaatgtggaccgcgacgccggtcaaaatctttttctccgaaatcccgcccggaatatttggtaaaaaaaccgttgagctcaatcaaaacggcgtaccggcgcgcgcggcgtggatccagttcctgattgtgattccgctaatgataattccgatgatgggctccagtaccgtgcaggatttaatgaataccatcatcaatatgaccgccgccgcctcgatgctgccgccgctgtttatcatgctggcgtaccttaatctgcgccgcaagctcgatcatctgccgcgcgattttaaaatgggttcccgcaccaccggtattacggtggtctccatgctgattgttattttcgctatcggcttcgtcgcctcaacctttcccaccggcggcaatattctgacgattattttctataacgtcggcggaatcgttatcttcctcggatttgcatggtggaaatacagcaaatacgtaaagggattaactcgggaagaaaaaagaattgaagcagcgccagcctctgacgcgtcttaa

SEQ ID NO: 203107 - DNA, 1434 bp, Klebsiella oxytoca
atgtccgaatcagttcgtgccaaaatagggaagttcgccctactgtcgatggcgtttgccgccgtatttaacgtacgaaatatcgttaataataacatcgagttagggctcagttccgcccctatctttctgtttgctacggtggtctattttattccgtttgtctttatcatcgccgaattcgtgtcagcgaataaaaattccgaatcaggcatgtacgcctggctgaagcagcctttaggtacccgcgcggcctatctcggctcgttcctgtactggtttgtgaacctgttctttttcctgtcgctgctgccgaacgtggtggcctacgcctcgtacgccattatgggttacgccattcccttctcgccgatggtcacttcgctgatctctatcgttctgttcgccatggccacccacatttccaccaaaggcgcgacctggctggggaaaatctccgaatgcgtggcttatggcgtcttcgcgctctttgcgatttacgtggtcggtgctattaccgcgctgggcgcgggccatgtccccgcgcagccgattacgctgcacgccatggcgcctaccatcaactgggcgacgctggggattatgtgctggatcttccaggcggctggcggggctgaaaccgttgccgcatatctgaacgatactaaaggcgggcagaaatcgtttattaaagtcatcatcaccgccgggatcctgattggcggcatgtatgcgctgggttctctgctggtcaacgtctttgtggcacgagaagacctgacctatgcagccggtatggtggaaattttcaccggtctcggcgcttatttccatatttccgaagcgctgatgggccgcttcgtcggcatcattctgtttatcgccattttcggcagcatgatgatgtggaccgccgcaccggtaaaaattcacttctcggaaattcctgccggcatctatggcaaaaaaaccaccgagctgaacgtccacggtgtgccggtgcgcgccgcctggtggcaatttgtcttcgtctttctgatgctcatcgtgaatggtttcggctccgccagcgttcagcaaatgatgaacaccgccatcaacctgaccgccgggaccgcaatgctaccgccgctgtttatcatggccgcctactttgttttccgctggaaacatgacgacacgccgcgcgactttcgcatgggttcaagaaaagttgggatggccgtggtgtcgatgcttatcgttattttcctggtcagcatgaccgcctccgctttcccgccgggagtcgacctggtgaacgccttcttcattaacgtctttatgaccgcagtcttctccggactcgcatggtggtggataacccgctttgagaaaaaacagcgcaagaatcaacaaccaggcctgaaatcagcggcaaatacggtgaaataa

SEQ ID NO: 203108 - DNA, 450 bp, Klebsiella oxytoca
atgagaattctcgataatttagaacaatttaagcaaatttatcacagtggacgtaaatggcagcgctgcgtagaagctatcaataatgtcgataatatccggcctggagttgcccattcgataggcgattcgctctcctatcgcgtggcaagcgacagcaccacggatgcgctgttcgttggcaaccgccgctatttcgaggtgcattactacctccagggtcagcaaaaaattgagtttgccgctaaagagcagctgcagaccgtcgcctgctatcgcgatgaaactgaccgtgaatatttgaaaggcattggtgaaaccgtgcaggtccatgaaggacaaatggtgatttgcgatacccacgaagcttatcgctttatctgtgactcgccggtcaaaaaggtggtgctcagagtgactatcgaagacggctacttcctgaataagtaa

SEQ ID NO: 203109 - DNA, 3093 bp, Klebsiella oxytoca
atgaatcgctgggaaaatcttcaactcactcatgaaaaccggctgcctccgcgcgcctatttcttctcttacgattcgcaggcccaggcgcgaaccttcgcccgtgaaaccagcagccgctttttgtcccttagcggacagtggaaattctgcttctttaacaacccgctgcgggtgccggaagcgttcacctcgcaatacatgagcgactgggggccgattaccgtaccgggaatgtggcagatggaaggacacggccagctacagtataccgacgaaggctttcccttcccgattgacgttccctacgtgccgaccgacaaccctaccggcgcctatcagcgcatctttaccctcagcgagggctggcaggaccagcagactctgattaaatttgatggcgttgagacctattttgaaatttacgttaacggtcagtacatcggtttcagcaaaggcagccgcctgacggcggagtttgatattagtcacgcggtaaaaaccggcgacaacctgctttgcgtgcgcgtcatgcagtgggcggactccacctatatagaagatcaggatatgtggtggtcggcgggtatcttccgtgacgtgtatctggtgggcaaaaacccgcttcacgtccaggacttcactctgcgcaccgattttaacgatgactacgtcgacgccaccctctcctgccagctggtgctggaaaatctcgccgcgcagccgggcgcagccacactggaatacgcgctgttcgacggcgaaaaggcgctgtatgaaggcgtaacgccgcgcctgagcatcagccagcagctgaacgtcaactttgcgatcgacgtgaaggcgccgcagcagtggtcggcggaaaatccttatctctatcacctggtgatgacgctgaaaaacgccgccggagagattatcgaagttatcccgcagcgcgtcggttttcgcgatatcaaagtgcgcaacggcctgttctacatcaataaccgctacgtgatgctgcacggcgttaaccgccacgacaacgaccatctgaagggtcgcgccgtagggatggaccgcgttgagaaagatctgctgctgatgaagcagcacaatatcaactcggtacgcaccgcccactaccccaatgacccgcgtttctatgagatgtgcgacatttacggtctgttcgtgatggcggaaaccgatgtcgaatcccacggcttcgccaacgtcggcaatctgagcgccatcaccgatgatccggcatgggagcatatatacgtcgaacgaatcgtgcgccacattcacgcgcagaaaaaccatccgtcgatcattatctggtcgctgggtaacgagtccggctacggctgcaacattcgggcgatgtatcacgccgctaaagcgatcgacgatacccgtctggtgcattacgaagaggatcgcgacgcggaggtggtggatatcatctccaccatgtatacccgcgtgccgctgatgaatgaattcggggaatatccgcatgccaagccgcgaattatctgcgaatacgcccatgcgatgggcaacggtcccggcgggttgagcgaataccagaacgtgttctatcaacacgacagtattcagggccactacgtctgggagtggtgcgatcacgggattcaggccaccgatgacagcggcgcggtttggtacaaattcggcggcgactacggggactatcctaataactacaacttctgtcttgacggtctgattttctccgaccagacgcctgggcccggcctcagagagtacaaacaggttatcgctccggtaaaagttcaggcgaccgacatcgcccgcggcgaactgcgcatcgataataagctctggttctcgacgctggatgactacaccctgcgcgtggaagtgcgcgccgaaggggctacgcttgccagccagcagcttaaggtgcgcgatcttgcgccaaacagcggccgcgatatcaccattgacctgccggagctggacgatcgcgaaaccttcctcaacatcctggtgaccaaagactcgcgcacgccgtatagcgaggccaaccatccgatcgccgtttaccagttccagctaaaagaacagacggcaacgaaatcgccgctgatgaatgccagcgcaaccccgctacagatagttgatgaacgactgagctacagcatcaccgggcataacttccgcgtagtcttctctaaagtcagcggcaaactgagcgaatggcaggtgaacggcgtagaccaggtgacccgtgagccgaagattaacttcttcaagccgatgattgataaccacaagcaggaatatgaggggctgtggcagcccagtcacctgcaaattatgcaggagcatctgcgtgaattcagcgccgaacagcgtggagacacggtgattatcaccacccgtagcattatcgctccgccggttttcgattttggcatgcgttgtacctatcgctggcagattaccccgcagggccatattaacgttgaacttgcgggggaacgttatggcgactatccgcatatcgtgccgtgcatcggttttatgctgggcattaacggtcagtttgaacaggtgaattactacggtcgcggtcccggtgaaaactacgccgacagccagcagagcaacatcattgatgtctggcgaaccaccgtggacgacatgttcgtgaactacccgttcccgcagaacaacggcaaccgccagcacgtccgctgggccgcgtttaccgaccgtcacggcagcggcctgatggtggtcccgcgcgatccgctcaacatcagcgcctggcactatacggcggagaatctgcacgccgcgcagcactgtaacgaactgcgtcgcagcgatgacatcaccctgaatatcgacgcccaactgctcggcctgggctctaactcctgggggagcgaggtgctggatagctggcgggtgtggctcaaaccgttcaactatggctttacgctgctgccgctggaaggcgggagcgcttcctcgcagacgctggcgaatcatagctttggcgccggtttcttttcctccgattcatacagcgaggctgaaaaatga

SEQ ID NO: 203110 - DNA, 984 bp, Klebsiella oxytoca
atggccacactaaaagatatcgcgaccgaagcaggcgtttcactggcgacggtttcccgggtattaaacgacgaccccactctgaacgtgaaagaagagacaaagcaccgcattcttgaggtggcggaaaagctggaatataaaagcaccagctcgcgtaagactcaggttcattccgtcggccaccatcatattctggctatctacagctaccagcaggatctggaaatcaacgatccttactatctggcgatccgccacggtatcgaaacgcagtgcgaaaagctcagtatcgagctgaccaactgctactttaacaacgcgctacccgagctgaaaaaagtgaccggcgttctgattgtcggccagccttcacgggcgattcgcgatgcagccacggcgttaaccgacaacgtctgctttattgatttccatgagccaggcagcagctacgacgccgtcgatatcgatctggtgcgtatcgccaaagaagttatcgacttttttatcgcccagggcgcgcggcgcatcggctttattggtggccaggatgagccgggtaaagccgacattcgcgaagtggccttcgtcgaatatggccgcctgaagggggtggtttcggaagaagatatctggcgcggcgggttttccagctcctccggctatgagctggcaaaaacgatgctggccagggcggatttccccgccgcgctgttcgtcgcgtcagactctatcgccatcggcgtgctgcgggccattcatgaacgcggcctcgcgatcccggaagatatctcgctcattagcgttaacgatatccccaccgcgcgttttacttttccgccgctctccacggtgcgcattcattcagaaatgatgggcagccagggcgttaatctgctagttgaaaaagcccgcgatggccgtgcgctgccgctaaacgtctttgtccccagcgtgctgaagctgcgcggcaccacccgctaa

SEQ ID NO: 203111 - DNA, 333 bp, Klebsiella oxytoca
atggaaacggtgctttatgatgattttgccagactggaaatgcgtacgggaaaaattgtagctgtaaaacgacatgagaatgccgataagctttatatcgcgcggattgacgttggcgagcgcaccttgcagacggtgaccagcctggtgccctattaccgagaagaagagttgctgggaaaaacggtcgtggtcctgtgcaatctggcgaaagccaaaatgcgcggtgaaacgtcggagtgcatgctgttatgcgccgaaaccgacgatggcggcgaaagcgtactgcttacgccggaaagagcgatgcctgcgggcgtgcgcgtcgtatag

SEQ ID NO: 203112 - DNA, 3699 bp, Klebsiella oxytoca
atgaaactacttgataaaaagtattacaacctcgagcccaaatatgagtaccttaaggactcatttattttaggactggcatggaaaaaaacagatagttttgtaagaactcacaattggtatgcagatattttagagttggacaagtgtgcgtttgatattagtgatgaagtcactaattggtcaaacgagatctcaaaggacgctctttccaaaagtgatattgaattgataccggctccaaaaggagcaagctggttcattaatcaaggtaagtggactaccaataaagataatagaaagataaggcctttggctaacatatctattagggatcagtcttttgctacagcagtaacaatgtgccttgctgatgctatagaaacaagacagaaagactgttcgttgagcaatcttggctatgctgagcatgtaaagaacaaggttgttagttacggaaataggcttgtttgcgattgggacaatgaaagggcaagatttcgttggggaggaagtgaatattataggaagttctcttccgattatcgaagctttctacaaagacctatctatataggcagagaaacagtaaataaagttagcggaattgatgatgtatatatcatcagtttagatctgaaaaattttttcggttctataaaaataaaccttttgttagaaaaaatcaaaaaaatatccgctgaacattatggagctaaattcataaatgataatgaattttggactttggcgaatcggattttaagttgggattggcctgaagaatctttatctttacttgagagtttggatataaaagaaaagaatgttggtcttccccagggattagcttctgctggtgctctggcgaatgcatatctcattgagtttgatgaatcgttaatttctaagcttcgtactaagatagaagacagccaaataatactgcatgattattgtcgatatgtcgatgatattagattagtaatttcaggagaagcactagaaaataataagattaaggaatctattcatgcattagttcagggcattcttgatgagacattggctcaaaatccgtcagataacgaaccatatttaaaaattaacgatagcaagacttatattcttgagctttcagacattgacaatggaagtgggcttacaaatcgaatcaatgaaattcagcatgaagtaggagcttcgagtatcccagagcgtaacgggctcgataataatataccggcacttcaacaattattactgaccgaacaggataatttttccgaggatgttgatagtttatttcccgggtttaaaaatgataagtcgataaaagtagaatctgtacgtagattttctgcccataggctggaaaaaagtttggctaaaaaaagcaagctaatttcgcctgaggagaggaaacaatttgataatgaaacctcactgattgcaaaaaaattattaaaagcttggctaaaagatccatcaattatggttatcttccgcaaagcgatagctatcaatcctaatctagatgcttatagcaccattcttgaaattattttttcaagaatacaacgcaatcgtgataaacgtgataaatatataatgctgtatcttctttctgatatatttcgtagcgtcgttgatgtctatcgaaacctagaatcagaatacgtcgacgattatcaaaaattgatgggtgaagttacattgcttgcccaaaaaatactttcctgtaaatcttttattccaaattacgcatatcagcaagcattattttatctcgcagtgatcaataaaccgtttatagctagtaataaagcatcttttgatcttgcaaggcttcaaagcgtcttaattaaacagcatttagaaccgttgaatagtagtgatggattcctatttgaggtatctgctcaaatctgtaaagactaccgagcaaatgccgcttttctactttctcatacaaatagtaacaaagtagtagacttaattatcgaaaaatttgctttccgaggaggtgaattctggaatgcaatttggaaagaaattgttaggatgcaagataaagataggattaacgaatttagatgggccatatcaaaatatgagtcaaagccaaatagttcggagcactacctttcatcagtgatcagtttcaaggaaaacccatttagatatgaacatgcgcttctcaagcttggtgtagcattagttgaactctttgatgatacagagaaaaacgtatggcaacctgatggtaagcagtattccccacatgaaataaaagtaaaattagaaggtaactcaacctcatggggtgaattatggcgtccaaattttagtatttcatgctcgatagataagaaaggtgaacctggtaaagacccacgctatgtaagccctgagtggttggcaaattatccacagactcaaaatgatgaacaaaaaatctattgggtttgcagtgttctaagaagtgctgctttaggcaatgtagattatactcaaagaaatgatttaaaacttgataaagctaagtatgatggtatccattctcagttttacaagcgacgtatgggaatgttacatacaccagagtcaattgttggttcatatggaactataacagattggtttgcaagttttcttcagcatggattgcaatggccaggtttttcttcttcgtatataagccaagaagatatattgtcaattactaatcttattgagtttaaaaactgtttattggaaaggctaggctacttaaatacgcagatatgtatttcatcgaatgttccaaccttaccgactgttgtcaataggcctgaattagcatctaaccattttagaattgttacggttcagcagttatttcctaaggataataatttccatccttctgacgtgactttggctaatcccgatgtgcgctggaagcacagagagcaccttgcggaaatctgtaagctaacggagcaaactttaaatgcaaaacttaaaactgagtctagggaacatacaagcacagctgatctaatcgttttttctgagttagcagttcacccagaagatgaagatatagttagagcactggcatttagaaccaaagccatcattttttccggctttgtcttctgtgaacaagatggccgaatagttaacaaagctcgttggattattccagactcttcagagtctgggacccaatggcgtgtccgtgatcaggggaaacatcatatgaccagtgatgaagtggctcttggcattcaaggatatagaccatcccaacatattatttcaattgagggtcaccctgagggaccatttaaagtaactggtgcgatttgctacgatgcaacagatataaagcttgcggcagatctgagagatttgactgacatgtttgtcattgcagcatacaacaaagatgtagacacatttgataatatggcttcagcactacaatggcatatgtatcagcatattgttattacgaatacgggagaatatggaggctcaactatgcaagccccgtacaaagagaaatatcataaattgatttctcatgctcatgggactggtcaaatagcaattagtactgctgatatagatttagcagcattcaggcggaagctacaaatatataaaaagaccaaagcccagcctgctggatacaatagaaaacattaa

SEQ ID NO: 203113 - DNA, 435 bp, Klebsiella oxytoca
atggatactttagttaagttagctacgatcatttctccattagttagtgctggagtagctatttgggcaattttggttgctaaaaaaaccatcagtgaaagcaaagaaattgccaagaaaaccatcgctgatacggcctaccaagcatatttacaattagccatggagaacccacaattttcgaaaggctacagcgcagattgtagacaggagcgagaccctatgtatgatcaatatgtttggtacgtggccaggatgatattctgctttgagaaaataatcgaggttgaagtaaacttaaaagatagttcttgggcaaatacgttggaaaaacatttaaagtttcattctgaacattttaagaaaacgaatgttgtcgaagaggctctctatattccccctattttggatctcataagatgtgcagctaactaa

SEQ ID NO: 203114 - DNA, 360 bp, Klebsiella oxytoca
atgaaatttaaacacatgctgttacccgcactgtttgtactctcagtccagtcccttgcagagccaacgccgcccatcaaagtggagaccagtaatcaggtccaccctgccggaacacgctacgtcactgtcgtggtcacctccctggatgacagtatcaaagttgaaaacatagacgtgaaccggggtaactgtcgtatcgataaccagaagtacctgtattcaaaaaataaggaaaccattctgcctgtcactctgcgctacgggcagtccgtcaaagtgaatttttataataactgtgtggcttcggaagtcgtcgtcacaactgacaaggggggatggcgttacacctacaattga

SEQ ID NO: 203115 - DNA, 960 bp, Klebsiella oxytoca
gtgacagtgttcaatatgtctgatgattttcgttttatattcccgaaaagggcagacaagtataagaatgtgatgttcacatctgttgatttccgtcgactggaaaaagaatattgcatttgtttctatcataaacctaatgatggtagcattgaagaggttttcaatgttattactgttttaaggtctgagtacgcaggacttaagcatgggaaactgatttttaattcagaaggtaaggaaaattgtgaacaacttaaaaggcttctattggaggcgataaaaaaagatatagataaaaagatgagaattttcagtactgccagagagtttcataacgagatgaaacacaggcataaagattcgggtaaactctgtttctctttattcgtcgaaggtgtctccggagagtccataccagagcacatgaaaacactaaaagcgctaagctcccgcttttttaataatatccgatccagaactacatttaagcaccatgttctgggctatttctgggttgtgttaaagaacagctatgataatcggccttacttacatgttaatttttatatagatactcggggttttaataatgttattggtgaggaaataaatgcttgctggtttaatgctctcaaagccatggaggacagagaaggaggagtattacaccttacggtgacaaaagaatttcagaatgggttactcttaagaagtaccagtggttacagtgagcagtctggagagaatcacgctatttttactcggttcaattctgatgcaagtataattactcaggatttgaatgctgcgaattcagaaatatataagcagttcaccaataataaagataagcagtatttcatacattatctttatgcactcgctaaagagtcttactttattgctgaaaacactcatttctttggttcttcctcagtggtaaaacggttgaaataa

SEQ ID NO: 203116 - DNA, 231 bp, Klebsiella oxytoca
atggctaccagtacaaccccatccgccgcgtcattacttaatgcagaagactctcttatcgacatggcatacatcaccaaacacaccaagatgaccgacaaatggttttacaagttgattcaagatggcaggttcccgaaacccatcaaactgggacggtgttcccgttggtataaaagcgaagtagaaagctgggtgcaacagcgtattgcagactcgcggggagcctga

SEQ ID NO: 203117 - DNA, 255 bp, Klebsiella oxytoca
atgaattttaagaccattaccagtgaggaacagaacgccggaattcgtatgctgaaatgctacctcgccagtgaccgccgtgggcattttgtgacgaccagtgaagcggcaaacatgccgggacaggtatggggctgtgtatcctatggctgccgactcatcttacataccggcacgcacgctgactcccccctggttcgagcacgaccaagcgtcagtagctgccaatacgctaatgaactgtgcgcatattga

SEQ ID NO: 203118 - DNA, 213 bp, Klebsiella oxytoca
atgaactgtgcgcatattgacccggcagtgaaagcggaggaacgcagtagaatattacgcagtcttttcaacaaaccgaattccacggtaatgacgctggcctggtactgcgtctggtgcggtgagcattacagcggggaaaagctctgcactacctgtgggaccggtatttacagcattgaggaggcctgctggcagataaattacacctga

SEQ ID NO: 203119 - DNA, 1008 bp, Klebsiella oxytoca
atgaagacaggtttattttttattccgctggcggggctgctgttagccaatgcggctcaggctgccgtctgtcaaaacgtcaacggcgcgcctactacggtcgattacgatctgagtaccaccctcacggcggcccaaaacgcggcggggaatacggttcagttgaccaaaaaccaggaagtgaacgttcaggccgtgtgtcccgctggatcggcattctcgaaccggacgtatcgttcctatgtttcaccctacgccgtggttgaaaccagcggcccctggaagtatttaaagctcgaccctgactatctggagggggcgatgagaattgacgactccgcggcaggaaccctttatctccctaccaactacgcctatatgggcaccgatgacagcgtaaacgccggcaaaccgttctacatccgcgactctaacctggtgtttcagctcaagattgccaggcctttcgtgggtaccgtcactatcactccgaagaccatgtttaacgtctacgtgacgacaggggcgagcgatcccctgagcaacgtggtttacaacattgcttacagcggaacggtaaccgtgccacaaagctgcgaaatcaacgcagggcagaccattcttgtggatttcggctcgctttatagcggtggcttcaaccgcgccggggcaaagccggtgagcgtcagaaataaaaaattcagggtgccggtgaaatgcagcggcgtgaattcgcaggttaatttaagcctgcggctgattgcgacagcggatactcaccttaaccaggctatcgcctcggataacccggacgtcggcgtggtggttgagaccaacgatggcgcggtattgacgccaaacgatgccagcagcgtggtgcctttcgtcactgacgatgccggcaaagccaacatcgcgctgcaggcttatccggttagcacgaccggtgaaatccccgcagagggcgtatttaccgcgctggctaacctgcgggtggacttcgactaa

SEQ ID NO: 203120 - DNA, 549 bp, Klebsiella oxytoca
atgaatactcagcttatccccgttttctctggttcaatcgctgatcaaaataccctacttgttaatgctcgtgaccttcattgtttcctcggtgtggggaagcgttttgcaacttgggttaccgagcgcattagcgaatacggatttgttgaaaaagaagactacatagctatttcccaaaaacgggaaataggccacgggcgaggtcgaagagactatcacctcacactcgacacagccaaagagctggcgatggtagaacgaaacgacaaaggccgtcagatccgcagctactttatcgaatgcgaaaagcagcttcgggagaagctgaacacctcgcctctctctcctggttacgatagtcgcacactctgctataaacgcgccggtataaccgtcagcgaactacctctgaaagatagcgatctgatcataagccttgaatcatggctacaactcgcgaatgaaaatggatggtttgttatcaggcgggaagaattaaaaagtaagttggctggcataattgagcagtgtttgctaactcattaa

SEQ ID NO: 203121 - DNA, 327 bp, Klebsiella oxytoca
atggctaagaactttgtagaattgggtgaaaccatcgacacgaaaaattcaaccgctgaagttatcaaaagcggatcaccggtggccgttggtgagctggtagtggtggcgctcactgatattaagccggacgattacggcgcggctatggctgtcggcgttttctcactgcctaagctgagcactgacgcaatcaccgcaggggcgcgcgtctatctcaaaggtgggaaaatccagctcgacaaaacctcagctgtagccgctggcatcgcgtgggaggatgctggcgcggatactactgaggtggcggtaaaactgaatgtgtaa

SEQ ID NO: 203122 - DNA, 1986 bp, Klebsiella oxytoca
atggcaaaaaataaaacatggtttcgaatgcaagccaaagccgtggccggacaagctgaaatctatatttatgatgaaatcggctttatgggtgtaacggctaagagctttgtaactgagctcaaggcgctgggcgaactctcgcatattgatttgcatatcaattcgccgggcggtgaagtctttgaagggatcgcaatctataacgcgctgaagacaaccggcgcagcgattacggttcacattgatgggcttgcggcctcgatggcgtcaatcctcgctatggtgggtaacccggtgattatgccggaaaacactatgatgatgatccacaagccgtggggctttgctggtggcgatgctaacgacatgcgcgactatgcgaacatactcgaccagctcgaaaacgtgatgattccggcgtactgcaacaaaacaggcaaagagcctgaagaaattgccgcaatgctggccgatgaaacatggctgaccgctgctgagtgtgtcgcgctgggttttgctgaccagattacccccgcagtaactgctatgaactgtatcgactctaaacgaattaaggactacgaaaaaatgccaagctctatccgcaacatgattacccgcccgaaagccactaccattccggggaacaaccctgcaccggcaccggcaccggcagcaccggcaccggcggcaaccaccgacgcggcgacaatccgcgctcaggttatcgcggagcagaaagcccgcgttaacggcattggtgaccttttcgcgatgtttggcggaaaacaccaggacattttacaggcatgcattgcagaccctgagtgtgatgtggctcaggcaaaagatttgctactggccgcgctgggtaaagactcgacgccatccaacaaggcgggcagcgataactctcacatttacgccggtaacggtaactttgtgggcgacggtatccgacaagccttgatggcgcgtgctggctttgaaaaccaagaccagagcaacgcatataacgctatgacgttgcgtgagtatgcgcgtatgtccctcacagaacgcaatatcggcgtggccagcttgaacccgatccagatggtaggggcggcgctgactcactccacctcggatttcggtaatatcttgctcgatgtggcgaataaagcgctgctgatgggctgggataacgctgaggaaacttacgacaagtggacgaagaaaggccagctcagcgactttaaaaccgccacccgcgtaggcatgggggcgtttcaatcgctgcgtaaggtgcgcgagggtgccgagtataaatatgtgactgtgggcgacaaaggcgaaaatatcgcgctggccacttacggcgaaatcttttccattacccgacaagcgattatcaatgatgacctgagcgcgcttactgacacgccgcgtaaaatgggcgaagccgcaaaggcgacgattggcgacctcgtttatgctgtgctgattgataacccggagctgtctgatgatttaccgttgttcgataaaaaacacaataacctcaccggtggcgcgctttccgttcaggcgctggacgatgcgcgcacattgatgaaactgcagaaagaaggtgagcgcaatctgaatatccgcccggcctttgtgctggtgccggtggcgctggaatctaaagcactgcagattatccgatccgcaagcgtggccggcgccgatgttaacgccggtgtagataacccgattcgcaattttgcggaggttatttctgatgcccgtctggatgcgaacagctcaagcgcgtactacctcgccgccgctaaaggccgggacactatcgaagtggcctatcttaacggcatcgatacgccgtacatcgaccagcaagagggctttaacactgacggcattgctacaaaaatccgcatcgatgcgggtgtagctccgctggattatcgcggccttgcgaaatctaccggcaaataa

SEQ ID NO: 203123 - DNA, 1461 bp, Klebsiella oxytoca
atgagcttgcttgatgacgccataggggtattcagccccgaaaggaagttagcccggctgcgtgcgcgggaggctgtcagggcgtatgaagcagctatcccgacccggacacacaaggcacggcgcgaagctcgatcggctgaccagctcagccaaatgggcgcgcaatctctcaaagagcaagcgcggtttctcgacaataaccacgacattgttataggggtatttgacaaattagaggagcgggtaataggccggaacggtatttcagttgagcctatgcctttaactaaaagcggccacctttccaagaaactggcaaaggatatccggcgcaaatggtctgaatggtcagttacgccagaggtaaccgggcaatttacccgcccgatgcttgagcggctgatgttgcgcagctggttacgagatggggaggtattcgctcagatggtatctggccgggcgcaggggctcacaccgcccgccggtgtccctttctggcttgaggcgctggaatctgatttcgtgccgttcaataccagcgaaagccaaaacttgatccagggcgtttttgttaacgattggggaaagccgcgctcatatcaggtctacaaacggctaccgctccgcacgctgggcggcgacataaagcaaattgatgcggaaaacatgttgcatctaaagtttgttcgtcgcctccaccagacgcgcggaacatcgctcttatccggtgttctgaagcgcctttccgcgctgaaagattatgaggattacgagctgatagccgcccggattgccgcatcgctggggatgtatatcaaaaaaggcgatggccagagctatgacggggaaaccaacgagccggaggatcgcgaggttgagatagagcccggcacgttatacgacgaccttatgccgggtgaggaaatcgggatgattaaatcagaccgaccgaatccgaaccttgagagcttcaggaatggccagcttagatgtgttgctgccggtagtcgcctgagtttttccagtaccgcacggaactacaacgggacatacagcgcgcagcggcaagagctggtggaatcaacggacggctattttatcctgcaagattggtttatcgggatggttacccgtccgatgtaccgacagtggctcaggatggccattgccagcggagaaatcatcgtgccgcgtggtgttgatgaggaatcgctattcaatgccacttacaacgggcccaccatgccgtggatcgacccggtgaaagagggtaacgcgtggaaacttcagattcgcggcggcgcggcgactgaggccgattgggcgcgcgctggtggcaggaatccagaggaggtgaaagcacggcgtaaggccgaaattgaggaaaaccaagcaatggggctggtttatgacactgacccctcaaacgacaaggcgaaaaaagatggcaaaaaataa

SEQ ID NO: 203124 - DNA, 219 bp, Klebsiella oxytoca
atgacagctcaggaattgaaaacgatgattcggcattacaccaatgccgaaatggcagttttggaaggtaaaagcattcgctttaacggtcaggaaatgacctacgaaaacctttcagaaattcgcaaaggtagacaggaatatgagcggcgtttagctgggctgacttccaccggccagcgtcgaaagtttggggctaagctggtgaggtttggatga

SEQ ID NO: 203125 - DNA, 2223 bp, Klebsiella oxytoca
ttgagctttcttgaccgtatagcttcccgcaagcctcagcccgcatcggctgagagaatcagaaaggatatggccgaactaatccgcgcgccgcgacgtatgcgcgttagtgatgccgttcaagagtttatgagggtgccgctgggcgcgggtaactctgtgccgtgggagcctgatttagcgccgtacatggttgagccgatgaattgcctggcatcgcgtgaatatgatgctgtggtgtttgttggcccggcgcgaacgggcaaaacgatagcccttatcgacgggtggatcgtgtatgccgtggtgtgtgacccctcagacatgctcgttattcaggtttccgaggagaaagcgcgcgaacactcaaagaagcgtttagatcgcacgttcagatgtagcccgcatgtgaaaaagcgactcagcccgcgaacgaatgataacaacgtccacgaccggactttcaaggccggtaattatctaaagctgggctggccatcggtcaacattatgtcgtcttcagattataaatttgtcgcactgacagactatgaccgattcccggaaaacatcgatggggagggcgacggatttagcctggcatcgaagcgaacaacaacattcatgagtagcggtaaaacgctggtggagagctcgccgggccgtgacattaccgatgttaaatggcgtccgacctcctcgcatgaagcaccgccgaccaccggaataatgtcactctataaccgtggcgaccggcggcggctttactggaaatgcccccattgcggtgagcattttcaacccgaaatagccaacgttaccggctaccgggaaagcactgatttagtagtggccagtgaatcggcttacctgcaatgcccccactgcagggggaaaatccttcccagcatgaaacgcgaacttaacaagggctgcgtgtggctgcgtgagggtgaaagcattgataaagatggcaagcggagcggtaaaccgaggcgatcacgcattgcctctttctggatggaaggcccagcagcggcttaccagacgttagcacagcttatctataaattccttgctgcagaagttgaatatattcagacccgaagtgaggaggcgctgaaaacggttgttaataccgactttggccgcccgtacctaccgagggcgagtgaggagcaacgcaaaggggaaatccttgaggcgagagccgaggatgggccaaagcgcgccgttcccgacgatgtgttgttccttactgcgaccgtggacgtgcaaggcggcaagaaacgccgctttgtggttcaggttactggctacggtgagaagggcgagcgctggatagttgaccgttacaacatccgatactcagcccgaccaaatgagcacggcgaagcgctaccgatagacccggcgagttatcccgaagattgggatctgctgctgagcgacgtttaccacaaatcgtggcggctatcctctgaccccagcaaacgcatgcgcatcatggcgatggccgttgactctggcggtgaggatggcgtgacggataacgcttatcggttctggcgtaaatgccgccgagagggaatcgggcgcaacgtatatctgtttaaaggcgacagccacaaacgtagcaagctgattactcagaccttgccggacaataccggcaagagcgcccgccgtgcgaaagcgaccggcgatgtgccgctttacctgctgcagacaaacgacctcaaagaccgcgtgaacaatgcgctctggcgcgacgttcccggccctaattacgttcactttcctaagtggctgggtagctggttctatgacgagctcacgtatgaggagcgcggcgtggatggctgctggaaaaagccgggcaggggtgcaaacgaagcattcgatttgatggtgtatagcgatgcgctggtgattctgaagggctacgaaaaaataaattggtcaaaaccgcctcagtgggcgcgtgcggaggcgtggatagaatgcgactcctcgccagtgtgcgagtcaaaagcaccgccagaggaggcgacagaggcgctcaccgagcgtgaacaatgcgactctgaccagttaccgccgccggtgattgaaccggacaaccaaaaaccaccagaggagaagccaaaacggaagcgtaaacgcaataaagccgcttcaaaaaataacccgtggaaaaatgacagtggaggctggttatga

SEQ ID NO: 203126 - DNA, 516 bp, Klebsiella oxytoca
atggatagagaaattcaaacagcaacgctaaacataaatcagcttgccggtattaccaacatgcaccggcagacgatagccgcccggctcaaagatgtaccgctggcaccgggcagcaatgcaaaactgaagctctataaaatccaggacattctgaagcattttctggatgccgagccgcccgcagaaactgaagacgtttcgaagatgaaaccgggtgaacggttatcacattaccgggccgagaatgagcggattaagttagagaccgacaccgccgagcttatccgggccgaggaggtagtgagggaatatgcagcgctggccaaagctgtgatccaagttctggaaaccctacccgatgtactggagcgcgattgcgctctatcaccgcaagcagtatcccgcgtgcaggaaaccatagacgaccttagagaccagatggccgataaggtgatggcctgtgatgaaattcagatgcaattagcgcggggagaagaagccgaggaggcttaa

SEQ ID NO: 203127 - DNA, 165 bp, Klebsiella oxytoca
atgtcccaagatacaaaaattgaacgtctcgaaaacaaagtaaccgaactgcagcgcgccgttactagccagaacaaccagcttacgcagattgccggtgttgtagatagtctgcgcgctgaagtcgtccagctgaaaaagcaagttgcagaacagggtaaataa

SEQ ID NO: 203128 - DNA, 282 bp, Klebsiella oxytoca
gtgaaaaagaatacacgtaataagcgctctcatagggggcgtattttaaggacactgaaacggcgcgcggtagctttagaagaacgtctccgcctattagaaagggaggtagaaggaaaggccgaaattgtgccattgattgatatgcaatcgcaaattagtgaattaaataatgccctcaatcgtgagggctcttttttatccagattattcaagccgggcggagtgattgcgcaaaatctctctttccgcaaaaacgtaaaaactaaacggaacaattaa

SEQ ID NO: 203129 - DNA, 906 bp, Klebsiella oxytoca
atgaaaattgatactgaaaataatgattatttacctggcgatattaatgttgaactttataaagatttattagacgaatttgatgcagtagtctgtgaatctatttccatgaatcaatttacatctggtcgatacgttgtgcctcacgtaggttacggctctcaaattttcacaagattatgtattcatagtgaatgtttgttgagtgcagcacctatgtcaagatggtttaaaaaagattttcatttttgggatttaagttgcatcgccgcacatgtcagagcaattatggaagggtatctcttatatatgtatatttcagatgaacctctttcagaagatgaatggaaagcaaaactatggaccttgcacatgaatgattgtgtcaagcgcttgaagttgatgcaatcaataggtgaagctgaaaaagccgccttttttgaagcagaacaacacagaatacgtgaggagttgagttcaaatgaattttttctgggtttgtcagctgctgttaaaaaagggtgcttgaatggtaagtatttgatgatctaccctagagatgagttagtcttaaaatatgaattagataaaaaagtctttgataatatgtttgatattttgtctaattacatccatatactgcctatttctttctatagccatgagccgaataaaagaggttcaggattgtttaatgatgctgatctaggttatctatgcatgtgcttaggtatagttataactcttataggtcgatgtaatgataggctagtaagtcatttcccagatgcacaagtgtgtagaaaagggaagaaatctacgttttctccggggcctaagtcgaacttacctcagttagtcagagagcatcagaatcggaacaataaaaagaaaagaaaaaaataa

SEQ ID NO: 203130 - DNA, 447 bp, Klebsiella oxytoca
atgaaactaggagctgaactaaaaaattgtagtgctcaggggattctgtctagcgatagtgcgaataatacagaagcagaagccatgcgtgatatgtatgatgttatggatcgctggggtgcatgggctgcagctgatgatagcggtgttgactggcgatcagttgccgctggatttaaagggttgctaccacatggcaaaaaatcacgcctacaatgtgatgatgatgaagggatcatgattgattgttgtgtctcacgcttgaggaaatataagccggatgaatatgaattgttcatcgctcacttcgttatcgggctctcgttacggactattgcaaagaaaatgaaatgttctgatggaaccatcaggcataagttacaatctggcttggggttcgtttccggggtccttgcaactataaaggaatatcaaaatgaaaattga

SEQ ID NO: 203131 - DNA, 882 bp, Klebsiella oxytoca
atggtcagctccacggttttcgtctgccagctggtcgtcacgccactcagccacggggattctgaggatagccaggcgacaggattgcccaaatcagttatcacaccaacggtatcagacgatacgctgttcatcgtttccgatgttttgtactcaaatgagacggtaagcgtcagcccggcctcagcggggatacgcgtcacgttggcaacccggacagagccggttgtcgttctcagcgctttttcacctgcatcatacgtgaatgccgagccggtaccggagttctcccagaacgacagatccacatccattgcgccgttgctaatcaggctcccttcagccagggtgtttttcagcatcgtcagctggccagactgtgtggtcaggttgccttccgtcccggatacccggttggttaacgccgtgaccgcgctcgcatcggcctttttactgacgtctgaattggttgtcgtcaggtcgttctgcagtttagtgatcgcgctgccctggctggtcagcgttttatcctgctggctgacgctggactgcaggcccgtgatggcgttgctgtttgcggccacgcccgactctgttttaccgacacggttagacagcgaggtcagcgaattcccctggctggttaacgtggtgccctgctgttcaaccttttgcgtgagggactgcagcgcggttgcatcggcttttttacccagactggtttccagcccgctgattttgctggcctgtgcgctttgtgcggtcgacagggaactcagctcctccgcgaccgaggatttattctcgttgaactgcgtctgcagcgattcccgggctgtcacctctgctttatcagcagtgatacgggcattcatctcctga

SEQ ID NO: 203132 - DNA, 384 bp, Klebsiella oxytoca
atgaggatttttttaactgtatctttatgcgctatttgcctggcaggctgtaagccaggtaatgatcagattacagatatcgcgaagaaagaaattaaaaggataatgaaagatcctgatagtgccgaatttactgatttggtaacaagagaaataaatgatagagatattggaaatggcgcgtattgcataatcgggaaagttaacgggagaaatagttttggtgcctataacggaccgaccccctttgctataacactggttgctgagcctacattattgccatttatgtcaccaaagtattatttatccagtaaagtatacgttcgtgatgaggccgatactattaggtacatggctatacgtaagctatgcggacagtaa

SEQ ID NO: 203133 - DNA, 273 bp, Klebsiella oxytoca
atggctgtgaaaaataagtctgtggaaccggaagaaacggttgcagaggatagccatgcgaccgtggtcgcacaggcggtaagtggcccagaacgggaagcagtggtgttcctcggaccgcatcatcgttattcccgtggtgatgttgcgtgttttgaacgtcagcacgcggaagagctggttgagcgtcatatcgctgtgtggccgaaagatgccgaacgcgcaatggcaccaaaaccgggagatagcgactttgatactgacattggatga

SEQ ID NO: 203134 - DNA, 921 bp, Klebsiella oxytoca
atgacaacgaaacaaattaaccttccgcatcttgcggagatggtctttggcgtgccgcattatgtgtcacggcaggcaatggatgctgtaaaagctgttttgcttccccgcattcagggaacggtgactgaccctgtcattacgatggcgctcaatccgaatgataacaacgctcctgaacaggtcccgccatccggtggtgtggccgttatcccatctcacggcttactggttccccggcgtggacaaattacacaggcttgtacagagctaaccagttatgaacgaatccgcagtcagctatatgccgcattaaatgatccctcgattagcgaaattgttctggatattaattccggtggtggttttgcatcagggtgtaaagagctggctgactacatttaccaatcgcgagaaaccaaacccattaccgcgattgtgaattttaatgctttttcagcagcctattttatcgcctctgcctgtagcaaagtcgttatcagtcaaaccagcggtgtggggtctatcggggtaatcatggaacaccttgatacttcgaagatggaagaaaatattggtgtgaaatttacgtctctgtaccgtggagataacaaaaataacggcacttcgcatgagccgttgagtgacgcctctctcgcgatgtacgacaagatgcttgacgatatgtaccagacgttcacgacctcagtagctgaatatcgcggcctcgatttgcaggctgttattgatacgcaggcaggcgttttcttcggggctgacgctatttcagcgggtcttgctgatgaaatagctgaccctcagactgcgataaatgctatcgcggcaaagcataagcagccccgtcaaaaaacctccattcagatgcaggcagccgcgatggacctgcgaaccaaaatgtaa

SEQ ID NO: 203135 - DNA, 135 bp, Klebsiella oxytoca
atgaaagttaatagccaagatgccgaggcgttatataaacagcaaagagaagctgcggagaattgcaaacggattattgaagaaaccaggcaaacaataagccggatgatgaagatgaaatataaaggtcgctaa

SEQ ID NO: 203136 - DNA, 270 bp, Klebsiella oxytoca
atgaaaataccattagtcggtggaccttatgatgcgaaggttttcgacatcgatgtagacagaaacggaatgccggaacttgaagtgctggacctgccgcgccggacgactattgaagaaggacgcattgaacttctagccgatgctcctgtggctccagtaaaggatttgcgctaccgattggtccgggttaatgggaaagagtggattaatggacgcttttgcgattctccaacgaaatggcgttgggagtatcactatgaaagttaa

SEQ ID NO: 203137 - DNA, 1278 bp, Klebsiella oxytoca
atgagtaataaacgcctgaggctggtggatgtcatgcgcagcctaaatataattcttaaagaggaaggatttgtaattgagaacgctgcaggaaaagctttctacgacaaatctggaattcgcggaattgttgaaggtattcctgaatattttcccattagcctttcggttgatgacaaaagtaaacccatgccaaaagcggagcaatcaaaagccttgcaaaatcttgacgagcaagtctctgctcaacttactcaaatcagtaacgctggtacgtcaattacccgcctggcttcagggctggataaagccaacactgacattacccgaaagaccacctcctgccttggtacgttgacatcccgccctatttttgggctaactgacgcggcaaatgatgtgctatatgcgctatttttccgtggtgcgcttgcatctggcgaccttccgtcaaagagcggagccgccgaactgcgttcgctggggcttgctgagaccgggcatgttgccaccaaataccagggtgaagattacttcacatggcttacctcggcggggcaggaatttgctatttggtatctggttaaaacgcaattttgtaagcggtctgcaaatgcaaaagcccttgagaagccatcggctaatccggagggggttagcttcaataatgtcattatgagaggagagattggtagcacagcgcatattggtgaagcacgtatttgtggcaataccatcgaacaagaaacgctttcaggcgtgctgactagcaccctctatcaagttaatccaaaagaagccggctatgttgctgaacaactggccaaagctgttaagtctgcattttacgtgctgcagcatgcatccggtgaacaggataaggaacagccaaaagaaccggacttatccgtcggtactttcaaaatttatcacgagggagaggtgaaggtggctgcaggccctctctcaacggacgaaacagaagccgagcgtaaagctcgtaaaacagttgggactattaatttaaagctggagcttgataccagtgaggctaaggagcgccttgatgaattccgtactcttatctcaaaagcggttaattcagcaataaccgatgcacttaagccgggtggaaaactatgggaagcaataagtcagaagactgatgttagcggactccaggcgttaagcagtcgcgtatcccatttggagcttgccctagtaagacagggcagtcaaatcacggcgttgcaggctaaacatgcccgcacgtgctaa

SEQ ID NO: 203138 - DNA, 504 bp, Klebsiella oxytoca
atggctgttcagctctgcttgaggaaagggaaaatggcgataacgctgaatcttcaatttatggagccagatggggctatccatgactcaccagttgaacgaggggcaccggtaataaaaatatatattcataacaggcacaacccttcaatcacggcaccacagataagtgaggcttatgcgatggttgatactggtgctgactttctttacatagatgaggactactgtcgccgtttcttgctaccacaaatagcaagtacacaattacaaggtgcaacattcacaacacaatcatctgttcatgaaatagaattaagcttttcagtacacgggagagtataccgttcatcaataacatctgccccattgaatgcaaaccacaggccgtaccaatttgttattggaatgtcagccatagtccagggctcacttgtaatagaccgtaataaaaaattataccaattaaccttgccagaaaatctgaaactaactggtatttga

SEQ ID NO: 203139 - DNA, 348 bp, Klebsiella oxytoca
atggccttaaaatttgtggtcgagatgccgtctcaggggcatcgctttgttccggataaagagccggaatcaacggttctccattatgggggatttcccgcaaccctggtctcgacactggagaccaaagttatcgtgactggactgacgggagatgcgctggatgctggcaggctggtcatccgctacagtgaagactatgactcttctggttctctggatgattatttccggcaagccaaacgtttcgcccgtcagtattgcgaaagtataggttttacggttggtgatgagccagcagaggaggagcgttgcgcaaccattggcatactgactcgtggagattaa

SEQ ID NO: 203140 - DNA, 636 bp, Klebsiella oxytoca
gtgagcgatcgcatgttcagcgagctggatcaggtctttcaggacattctcgacggagtcagcccggcggggcgcacccgtaccgcgcgcaaaattggcctggcagtgcgccgcagtcagcagcgccgcatcgcgtcacagaaaaacccggacggcagcggctatgccgtgcgccgccgcaaggtttaccgcacccagcaggggatcaagttcgtctggaataacgaggtgcgggcgctgaaaaactggcgcggcgggcgcgggaaatatggccggacaatcacgggctttgacgagaagcgccgggatatccgcacattttaccgggccgatatcgagcgctatctggaaatcaaaacacaatcagcgacgcattcagagacaaaaaaaacgccgatgtttacccgcctgcgcaccctgcgttttatgaaggtcagaccggacgcgggcggcgtcaccgtaggatttgacggcattgctgcgcgcattgcccgtattcaccagtacggcctccaggatgaagttggcccgggcgcctacgcacagtacccggcgcgtgaactgctgggcatgaccccggcagaccttatcgcgacggaaaacgccgttatcagcagtctgggcggtgcgtcatga

SEQ ID NO: 203141 - DNA, 123 bp, Klebsiella oxytoca
atggataaagcatacgaagactattttgaaagcctcgctgaaggtgaggaggcattgagtttcagcgagtttaccgcagcactttcaggtcagcaggcagacagcacctctcctgaaaggtaa

SEQ ID NO: 203142 - DNA, 1065 bp, Klebsiella oxytoca
atgttgcactggagccaaattacgacgcaatcaatgggcagaccaagaaaagatcctaaagacaagcacctcccgccacgcgtaactaaaaaccgttatagctatgtgtggaagccaaaaggaacaaaacaaagcgtaacccttgcacctattaccgggacgagtatgtcccggctatgggcgcgttatgaggaagaaaaagccaaacgttcagacgtaatgacattttctaaattatggaaattattcaccagcagcccagcttttgctgaacttgctccgcggacacagactgattacaggtcgtatgaaaaaaacctggtccccgtgttcgggaatatgcgcgctgatgacataaaaattgagatggtcaggatctatatggacaaacgtggccaacgcagtattaatcaggcaaaccaggaactcggcgggatgtcgcgtgttttctcatggggatatgaacgagggtacgtgaaaggaaatccatgcaaaggagtgcgcaagttctctttaaaagcccgtgacgtgtacgtgacagacgaagaatatcaggcaatttatgaagaggcagcaccagctctccgggttggcatggagatatcttacttatgtgcggctcgcgtttcggatgttctttctctcaaatggtcgcaagtaagcgaggaaggaatttttatccagcagggaaagaccggcactaaacaaataaaagtctggacagaacggcttcataacgccatcgaacttgcaaaaactctgggtgggcgggaaacggttatctgtagcagcaaaaaaactaaatactcgaaaagtgggtttaacgatctgtgggaaactgcaagggaagcagcaggaaaaaaactagatagaaaactgtcgtgtacatttcatgatctcaaagccaagggaatatctgattacgaaggctcgagtaaggacaaacaactattctcaggtcacaaaactgaaagccaagttgtggtttatgacagaaaagtgaaaatttctcccacactggatctaccaaatatacaggctgtaaaaaaaatcaaagcctcctag

SEQ ID NO: 203143 - DNA, 1041 bp, Klebsiella oxytoca
atgaagaaaatcaaagtgttcgatttcttctccggttgcggtgggactagtcaaggcttccaccaagctggtatggatgttgtttttggtctggatttcgatgtagatgcggccaattcatttcgtgcaaatttcccgcaggcggagtttattaattcggatatccgactaattgaaaatgatgttataaaaaatctggtagagaatcatcgtaatgattacatccttttttcaggatgtgctccttgtcaaccatattctaaacaaaactcaaataaaaaatctgatgatcctcggttggatttattaaaagaattcagtcgttttgtagaatattatttgcccgatttcatttttgttgaaaacgttcctggaatgcaaaaatttaacaaaaatgaaggaacattcatgctttttttagaaatgctcacttcaaacggctacagtgtggattataaagtaatgccggctgcatggtacggtgtgccacaaacccgggagcgcttagtgcttattgcatctaaagattttgatgtcgctttaccttccccgacacatggaattggaaatactccttattcaacggtcaaagattggatcggtaatctaccgaggatagaggcgggtgaaaagcatcatagccttcctgatcatgaggctgcgcgcttatcagagcttaacttgcgtagaattaaatgtacccctgagggtggtagtagagagttttggccagatgaactgattttaaaatgtcatcgtaaccataaaggccacacagatgtctatggccgtctgagctgggataagcctgccagtggactaactacgcgctgtattagttattcaaatggacgttttggacacccgacacaaaatcgagcaatatctgttcgtgaagcagcttgtttacaaacttttcctttggattataagtttactggttctttgcaatctcgggctcgccaaataggaaatgcggttccacctaagatgtctgaggcgatggggaagcatttacttaatgtaatcaaagcctcctag

SEQ ID NO: 203144 - DNA, 1830 bp, Klebsiella oxytoca
atgagtacttcaacttacaagggcaagatccgttcccttcaacgtgcactgaatgccggagaatttgagcctttcatacagcatatccgttttccatactttaaaaacatagagcagaatgcaagaatcgactttcaattcccgataactgctttggttgggcaaaatggaactaataaaagttctgttatcaaagcgttgtttggttgtcccaatggaaaaaatataacacgctattggtttacaaccgagacagatgaatttcctgatctacaacttgcggatggaagttcactgaaacccagatatatttatggttataaaaattctgatggacgcttagttgaaatactgcaatcacgtattaatgcgaccaaacagacaatcgattattgggaaaccagtcgcccattagttggcgataatatggaaaatgtttctgaggttttaggtgcaaataataactcaactcgttggccaaaaatcaaaaaaggtttggtttttttggattttagatcggaaataagtgcatatgatagatgtatgtatcactcagattttaaattaaggaaaagaaaagatggtaaatttattacaaaacaggattacattagaagtaaatctaaatatataaaaaaggcgtttgatgaaaaactaaagactttgaggctttggggttcggaaactattgttaaaaatgtgaccttaacacctgagttagttaaatctgtttcatatattttaggtcgaaattataaggatataaagttccttgagcatagactgtggggagccagagggggtactgctttactttcaacagataagttgaattatacagaggcttttgctggcagtggtgagtttgctatagtctcgcttgtacttagtatatacgcagctaagcctaactcattaattcttcttgatgaaccagaagtttcacttcacccaggtgcgcagaagagaatgatggaaattctctactcgattgttgaacaacataaacaccaagtagttgtgtcaacacattctcctgttattgtaaatttacttccgaaagaagcgattaaattatttatttttgatgaggagagtgaaacggcaaaaatagctcaaaatatatcaccagatgaagctttcgtagagttaggtcatgatattacaaagaaaactataattgtagaagataagttggctaaagagataatagccaaagcaattaaaagtgatgataggctaaaactatcgtttaacgtaagctatatacctggtggatctgagactatattaagtaagcatctaccaagttacgctatggtatctcgtgatgatattctatttttgctggatggcgataaaaataaaaaagttaaaccggtaagaattaatgagatcgcagatgctaatttagttaaaacaatgcgcgaatattatgggtgtgaattggttatcaatgcaagtggtagtaatggtaaggtaaatgaacttgaagcaaatgctctgaaaagacaagtgcttgagtatgcttttcagaaagtacagtacttaccattcaatacccctgaacaattccttattgaatctgctatattgccgaatgaaaaaaacataattgattcacagagttgggatgctaatgatttggatatgtataaaaaacagattagattattagcgcaacatcaatatgataaagaagaagtagattcaggagagattttttgcattcaaaaaataatgattgctagacttaaagatgatttaccagaaatggtggaaataagaaaggtaattactcaagctattgaacgtggtatcattaagtga

SEQ ID NO: 203145 - DNA, 549 bp, Klebsiella oxytoca
atgaatgcaattaatatcctagaaagagagcaattgccggtaactactgaattggcaaatttgataaacggtatttcgattgaccacaacatgtatgacaacttgtgtcggtttatgatttatttttccttagctgagtcaaaactggggccaatgggtgagggtattggcggtaccgatgaactggccacagtattaagagaacatcatggaattgataacgatgtaattaatgattcatatgcattctttgttagacgttatcgagatagtcctgactccgaggatcgttttagaaagcttgcccctgttaaatatgttggtgctcgtcaaatgcgtaaatttgaaaacttgcttcaactgcggacaccttccatggagcaaaaagtaagttttgttttcaaagttatttttcggctaagacataatctttttcatggagaaaaatggtcgtataaacttgaggggcagaatgacaatttttcgcattctgtaaacgttcttttatccgcattaactctcacccgaggaagattgtggaatccttga

SEQ ID NO: 203146 - DNA, 576 bp, Klebsiella oxytoca
atggatgcgtgggttggatcaatgcttggtggtgccgttggcgttgttataggccatattacgaaccattatattggttggtataaagaggataagcaatcttcaccagaaaggaagtttatttgcgctgaacttatctttcttctcgaggattatgcgaaaaattgtgcagaaattgcgactgacaatggtgagtatactggtgaacaaggagaagcacagccggtgacatcgcctccagaactgcttgactactcttcgattaaaggaaattggaggtcactcagctccgacattatgtatcgggtttgcagcttgcctgcggaacagaaagacgctggcaaaaagatttcagcatcgtgggagtatgaaggctaccctcctgattacaaagattactttgaaactcgccaataccagtattctttacttggtcttaaggctgcacttatagcagaagacgtaagaaagcaatgcgggttccctgatggtgatttatggaattgggtgattcctacgatggagaagaaggtcaagatttatgaaaaaaaacaccctaagaataaaaatctttag

SEQ ID NO: 203147 - DNA, 234 bp, Klebsiella oxytoca
atgaaaatagaaatcacaattgatcgccgtaaaaaattacctgaaggtgctttgccagcacttgagaaagagcttctcacacgattggagcaaagctttaataactgtagcctggtaattcgccgaactagttctgatggacttagcgtgtttggtggtatggacgtagataaaaaaagggtggagcaaatccttcaggagacatgggaaagcgcggacgactggttctattga

SEQ ID NO: 203148 - DNA, 261 bp, Klebsiella oxytoca
atgaatactttaactggcttcatactttttttaatcattgctctggtattcggatacttgtgtcatattacggcggagcgaaagctttcaaaggcaagggctaagatcaaagcggcggaggaaagagggagaccatactcagaagaagttgtaagttatatgctgggaaaaccaggtataattgcaatcttctttgcattcatcagtttcctttcatttattgcgtcaatgtttaatctggtctactggtttttcccataa

SEQ ID NO: 203149 - DNA, 222 bp, Klebsiella oxytoca
gtgaatactcataaacttatcgatacatacatgctggttggggaaggcctttctcgcatcaaatatgagattttctcaggagatgacggattatatgcgtttattacgatttatgcatatgagcctcatttccatattaggggttatgactctttgaagttaaacgagagtatagatatcagggcgcagattgaagagcatttcgcggcccgctatccctag

SEQ ID NO: 203150 - DNA, 462 bp, Klebsiella oxytoca
atgaaaaccgccactgcgccgttaccaccgctgcgttcggtcaaggttctggaccagttgcgtgagcgcatacgctacttgcattacagcttacgaaccgaacaggcttatgtccactgggttcgtgccttcatccgtttccacggtgtgcgtcacccggcaaccttgggcagcagcgaagtcgaggcatttctgtcctggctggcgaacgagcgcaaggtttcggtctccacgcatcgtcaggcattggcggccttgctgttcttctacggcaaggtgctgtgcacggatctgccctggcttcaggagatcggaagacctcggccgtcgcggcgcttgccggtggtgctgaccccggatgaagtggttcgcatcctcggttttctggaaggcgagcatcgtttgttcgcccagcttctgtatggaacgggcatgcggatcagtgggcactgttgcaaatag

SEQ ID NO: 203151 - DNA, 2391 bp, Klebsiella oxytoca
atgtccaacgtccaggcgttgacgcggctcgataaaaacgattcgcagctggccgccctgcgcgctcaggccaaaaaactcggtgcggaaacagccttcaccacgcgtgacgccgccagcggccaggccttcctggcgatggcgggctttacacctgatgctattcgtgacgccctgcccggcgtgcttaatatggcactggcgggagggatggacctgggcgccagcgctgatatcggttctaacattctttctcagttttctcttgatgctggagagatggaccgcgtcagtgatgtgctgactggcacctttacccgcaccaataccacgctaagcagcctgggcgaaacaatgaaagttgtcggccccgtagcggcagggcttggaattaacctggaagaagcagcagccatgaccggcacgctggcgcgcgtgggtattcgcggtagcgaggcggggacagcaatgcgccgtgccctctcccggctggcctcccccactacagcagcaaaaaaagcactcaaagagctgggtgttgaaactgccgacgccagcggaaaaatgcgccgcccgttcgatattcttctggaccttcagaaaaaggcttccagatttggcgatgttgatcagatttcatttttcaaagacattgctggcgaggaaggtttcaccggccttcagtctttggttagtggcgcgggcgatggctatctccagtcactctatgagcaaatcgctcaagcgcacaaaaatcaggaagcaaacacggtcgcaaaggtcaaaacgaataaccttggcggcgatctgaaggagctggacagtgcctgggaggcatttcgcatctctgtcgctgaaacggtggacgggcctttgcgccgactgacgcagggactcagccatgttattggcaatatcaaaagctgggtggaagaaaacccgcgactggctaagacgctgtttgttgccggtggtgttgcgctggcgctgactgccgcagtcggcgggctgtctcttgctgctggcttactgctggggccgatggcaaagctcaggcttggctttgcgctgctgtctggcgggagtggtattggtggcacgctgtccgcgttccgggcgctgtctgccattggtggtagctcgctcgcgaaattcagcggctggcgcatcgtgttcgggagtatttccgcgcacgccagcaccatggttaaaagtatcggcgcactcggcggacgcttcaccgcccttgccggcggtctggcccccgttcgcggcgcgctactcgcggcgtttgtctcccctggcgctgcgcttggctccctggctaaaggaattggtgggctgactctcagactgaccggcctcccagccctgtttaacgtggtaagggtgggattttctgcgctgggtggcgggctgtctctgctgttgagtccgatcggtttgctgggtactgcgtttgtggcggcagcagtgctgatctggaaatactgggggccaattaaggcgttttttgcgggtgtcttcacggggctgatgcaggggcttgcaccgcttcgcaccgcatttgcaggtttggtgcctgtctttggcttgattggtgatggcgtcaaacaggtctggaactggttcaagaagttgctcgctcccgtggagcaaagccgtgagtcgctgaataaatgcgcgagcgtaggtgaaaggttcgggagggtattagcgggcgcgttagggatggcgctaacacctgcaaaagccttgctgagcgcgctcacctggatccttgaaaagctcggcgttttgcccgatgaaacggaaagagtacgtaaaaagctggaggaggcgcaaacgacgtcgcttttacaagaaaagctgacgctccttcagggtgacattggagcgataacacctaaaaaagctgaagaaccaaaaggtgatgcgtcaccaaatgaaaagcctcttactggtgataagcccctgcgtcgcctgggtgagattgcagacaatacaaaaggccttttagatgaggaaaagcgcaagcgcgtcggaccgggagatatcgtatttaaaaacctgccgcctgcactggcggtgcggggggaatggcaggagtcgcggcttgtccgccagtccgtcagcgcccgccctatcattgcggccggtgagccggtggtgttgcagacgccggcccggaaaccagtgcgcagggatgaggttaagcgcgcggcagctgcggcgcaggccggagttttttctggtgagatccacgtccatttgcatgacgtgcgtagtgataacccgcgcgagctggcgcggctggttggcgaagctgtccgcgcggaaatggataaacggcggcgcgctgaccggggttcgttccgggataatgattaa

SEQ ID NO: 203152 - DNA, 786 bp, Klebsiella oxytoca
atggctaaagattcaaaagttgtatatggcgcaagtggaaaaactaacgttctgatgtttgaacccgaaaagttacatctggtaacggacaagtctcacccgctttacgatgaacgtattcacttacccctagatgaagctatggtgctgaacatcatggatcagggtgttcttgaaccaatcattgtctggaaagaccctgaaacagggcttacgtgtgtggtggctggacgtcagcgggttcgccatacgatggaagcaaataaacgcctttcgaaagaaggcaaatccccgttgcttgttcctgcagttactaagcgtggttcagcctttcgcatggctcaggcaatggtcagtgaaaacgaaatccgccgggctgatacgccgttaggccgcgcaaagaaaatggccgacgccctaggacgagggcacgatgaggaagatcttgcgctgatgtttggcgtcagtatccctacagttcgcgcaactctttccttgctcgatgctacccaggccgttaaggatgctgttgaatcaggtacggtaacagttactcaggcgcgacagctcgtatctttcccaccagaagaacaacgggagaaggttaaagagattgaattagcgaccgctggaacaactggccatgaaaaagcccgccgtcagcggcaggtgctgggcgaggcaaagccgcgtctaaaaactcgcaaagaaattaccaaggctctcgaaaccgccagcggacattatgccgatgctttgcgctgggtacttggattccaggtgtga

SEQ ID NO: 203153 - DNA, 216 bp, Klebsiella oxytoca
atggccgatattactcaagatgatgagtgggtgatggaaagaggaataattgcaaaaatgtatatgacgcctcgccaaataaaatcatacagagaggggagatggattgaaggaattcattataagaaacattctcctaatccttccgcctctgaaggaagagcaactcttctctacaactataccaggatcaataggcttgttggagatacttaa

SEQ ID NO: 203154 - DNA, 681 bp, Klebsiella oxytoca; identical to SEQ ID NO: 30073

SEQ ID NO: 203155 - DNA, 192 bp, Klebsiella oxytoca
atgattgatgaacgcttaacgcatgaagagttagaatcactatacttggcgatgaaatcacacttcgaggttatggctgaatccgcttcagaggctgaggttattgaatgcagccagatagtaagagcattgtgtgagttacaggaacgccgcaccgcaatgctcgcagtcgctccacaggaggtgaaatga

SEQ ID NO: 203156 - DNA, 507 bp, Klebsiella oxytoca
atgatccttcaactcagtaaaagttcgatttattcaacaaagccacctggagatgaaaacaggagttttaacatgtatttaagagtgttgtcagcgcccatactcaccctttttctacttataactgcctgttcaaaccatactcaaaaaacaaacgtcagggttatgcccgacagcgataaatctgcggaagttgatgatcttttaggtggcctacgatctccaacagttcccccggagcattcaaaaatactcggatatgcgacacaaataaggaatgccattgttgccgaaatgtatgaacccgatgcgcataaaggacaaacctgctctatccgtatctctcttcagcctgatggttcagtgaacagtgcgacagcaaaagagggtgatgcaaaattgtgtaaagcagccatttcagcgattacacgagcaaaaatacccgccgcaccagatgacgaaacatatcagagggtcaaaaatgccgatcttgatttcagactatag

SEQ ID NO: 203157 - DNA, 243 bp, Klebsiella oxytoca
atgctgtcagcctggctgctgatatccttttccgtctgcgttacccgattagataacgcgtttaaggcagtggcgtcggctttcttcgtcacgttcgcattggtggtcgacaggtcattctgcagctttgtgatcgccgacccctgggaagttatgttgccctcggcactggtcacgcgcgtggtcaggtcactgattgcggacgcgttcgctgaacccgcagtttcatcagtaacgtcataa

SEQ ID NO: 203158 - DNA, 477 bp, Klebsiella oxytoca
atgggtaaagcgataaaaagtgtctggaaatataggggccaatccagtcagaatccgagtcgctgtcagaatcggaatcgctgtcagagtcagaatcgctgtcgctatccgagtcactgtccgaatccgagtcactgtcagagtccgagtcgctgtcagaatccgaatcactgtcagagtccgaatcgctgtcggagtccgaatcgctgtcggagtcggaatcactgtcggagtccgagtcgctgtccgaatccgagtcgctgtcggaatcggagtcgctgtcagagtccgagtcgctgtcagagtccgaatcgctgtcggaatccgagtcactgtcagaatcggaatcgctgtcggagtcagaatcgctgtctgaatcggaatcgctgtcggaatccgaatcactgtcagaatccgagtcgctgtcagagtcagaatcggcatcgctatccgtatcatcagccaggccgatattaa

SEQ ID NO: 203159 - DNA, 144 bp, Klebsiella oxytoca
atgctgattttggtattgctggcattgctgacggccatgtcgccagacctgcgcacccaggcacccacgcggtacgtctggccgccggtcagcttcaccacctggtcacaggccgttgagccgctggatgtcttcgtggcctga

SEQ ID NO: 203160 - DNA, 528 bp, Klebsiella oxytoca
atgtttggcccgttgatgctggacctgttcgctgatgacagcaatgcaaaatgtcctgtctggtacaccgcagaagataacgcgctgacacaggactggtcggaaatgctggactcaattggtggtgctgcatttggcaacccgccatacagccgctctcaatatcatgaaaagcaagccatcaccggcatgactcacatcatgaactacgcaactgcgcaacgagagaagggcggccgctatgttttcctggtgaaatccgcaacgagcgaaacctggtggccagaagatgcggatcatgtctgctttatccgtgggcgaattggtttcgatctgcccgtctggtttaaacctgctgacgataaacaaaggccaacaagcgcgttttttgctggcgctattgctgtatttgataagacctggcgaggtgagaaattcagttatatcaaccgcaccgaactggaggcaaaaggccagtcatttatggcgctggcgcagtttgccattgataagaaggtgaccgcatga

SEQ ID NO: 203161 - DNA, 168 bp, Klebsiella oxytoca
atgatatattctaatattacctttgaattgcccatattcatcgaaataaccatgaaaatgatgatctgcctgctcaaagtcctcacttgtaaaaaaatgttctttatcaattatatcaacatatgtatcgtcatggctgcggtaatccctgaaaacgatatccaataa

SEQ ID NO: 203162 - DNA, 189 bp, Klebsiella oxytoca
atgacgccgaccattgagctgctgcgtagccaccgttctattcgccattttaccgacgcgccgatcagcgaagaacagcgcgccgcaattatcgccagcgcgcagggagcctccagctccagttttttacaatgtacctcaattattcgcgttaccgacccggaaatacgcaacagctggtgccgctga

SEQ ID NO: 203163 - DNA, 147 bp, Klebsiella oxytoca
atggttatatccatacccataataattactcgcttttttcacaattccattgagtatacaacctttaatatttacaccactttgctcgaagcgcttaatactaacttcaatttccttggctgtattttgctcaaaacgagcaactaa

SEQ ID NO: 203164 - DNA, 2559 bp, Klebsiella oxytoca; identical to SEQ ID NO: 104880

SEQ ID NO: 203165 - DNA, 2088 bp, Klebsiella oxytoca; identical to SEQ ID NO: 104881

SEQ ID NO: 203166 - DNA, 5841 bp, Klebsiella oxytoca
atgttagatcccattggtggttttcgccgcattcaggacttcttcgtttcatatatagaaactaacttccgcatcgctgatccttctgttgcgacagcgagacgcgagttgcttaacagtagtggggagtttgccgcagagccttatattgaacctgtcttacggtatgaatcttcaaataaaaccctcgaagatctggctgatatggatggtggaccgctgaatagcctgtctcctgaaggtcgaaaggcgtttgttgaactagcgttgtccggcctgttcgattccaagcccggcgatgcggcttggccgcgtcagtcagttcatgcgccgtatagccaccagactcaaatgctggagcgcggcattcgtcccggttgcccaagcattgtgacatcaggaacaggttcgggaaaaacggaaagctttatgttgcctatcctggccgcattatcgaatgaggccgtccgttgggcccgacctggcggcggctatctgcaaaaccgatggtggaatagctcagaaacgaactgggtttctcgtcgcgaaggcgaagaacgcccagctgcggtcagggcactggtgctttatccgatgaacgctttggttgaagatcaaatggcgcgtttgcgtaaaacgctggattctgctgacgcacgacaggttatggaggatcgtttcgccggaaacaggatcttcttcgggcaatatactagcgccactccggttaccggctacgccagccatccccgtctctccaaaattagttcagaaaaaagccgtcgcgttcgtaatcttgagaaattacgtaaggcgttgaacagaattgatagtgatcaacaagcagcacgcgcattcgacgaaaaagaaaatccttcggaaaagacccgatatatattcccttcagcggacggcggagagatggtttctcgctgggatatgcagtccgccccgcctgatgttctcgtcactaacgcctcaatgctgggagcaatgctttcgcgtgaagtcgaagacaagatttttagcgctacgcatgactggctcatgaacaatgatgacgcatacttctatctggtattcgacgaattgcatttaatgcgaggttccgctggcacagaaaccgctatgctgattaagtctttgattattcggctcgggctggatgatccgaaacaccgctacaaattgcgtttactggcatcttcagcatcgctgccgatggatggcgcggatggagagcaatcccggaaatacctgcgtgatctctttgcgcccttcggcacttgctgccatgcactggatcccggcagcgataagccggatttctggcataactgcgtcattcagggaaaacccttcatacctttgaagccgtcagggaaaatccccgtgcggccttttgccgcattaatgcgcgccgcccttgcagaccagggcaatgtcgtccgcaatctggatatgacggaagctctaaatcaggcgttacttgatgtcttccaagctcttggcgtaaaagagcaaaatatcaaacagggcataaaacaggcagcggaaatcgctgctgcgttattgacaaacgcctgtattgaaaatgacggcgaaatgccacgggcgatgccgccaggacttatcatcgataaagtcttcttgaaggaggagccaagtaaaccgagtgagtcagaactggcattacgcggattaatgctgacgcgcgcgctgccggagtccgggatagattgcgataagccaaccaatgttacaccagcctttcgcgtgcatactttcgttagaaatattgaaggtttcttcgcttccgtatcatcgggagagagaaaggcaaaattcgccgatttttgccttgagcgaggcttgtcgcacgcgccatcaactctagacggaaaacgcggtcgccgtctgttcgaaatgttgtactgcgaagcgtgcggcgagttactgctcggtggtcagaagggacaaaatgaaggctcgacgatagagctattgccttcagcgactaatctggaaaatcttccggaacgccccggctcagaatattacgatgatatgacactggatgagtttgcggttttctggcctgtcgatgtagttgataaaaatccagcaggcagcgaaaaaggttgggatgtatgggaaaaggcgacgcttaatcctgttaccggaattgtgactgtcggacaagactcatcggcggcaaatgccgattcggttcgcggatatctctattttcagaagccggccccgagcaaaaaaggcgaaccggcgaaaaaaccttccgcgcaacctttttgttgccctaattgcggtatcgattattccagtcgaccagccagcaatcgttccagaacacccattcgcgcatttcgtactggtgtgactaagtcatcccagctggtggcgacagagttatttgaattgctacatgcgatcggcgcggaggccaagagtattgttttttccgatagtcgacaggatgcagcatcgatggcgctggaaatcgaacgattgcatttacgcgacctgcgaagggaaattttggtcgcagccgccagagaaatgctccgagaggctgaaagcgagtatatttctgaagacagtattaatgaaaaaatggatttagccctacaagccaaagacatggatacgtttggtaaattatatgaactcaaaaaaaaccaagctgatattgctgacttatgtaagtacaggcgagtaaaaattgataaattgctggaaccagaaggcgattctatcggaaaaatatcgtccgatttggcaggactgggaatatcaccttataaatatcgcccatgctctgatggggatgacagcgacgtctggcacgccaattttacaaaagacaagaacatcgttaaatatcatgagaaactttcttcatctgaccgattggtactcaaaaaaaagatatttgatacccagtccgaattaattgatgatgtcattttcgccaacaccttcttcgcgctggaagagacgggattagcatatccgtgtgtttcagatagagaggatacgagcgagctcgatgcctggctaagggtattcgctggtgtttatcgcgtcaaagaaaataaatattttgatcccgaaaactctgtcgaatggaaaacagggaaagatgttaccaaagaaaaagtaaaacgtattgctaaagctttatttggtgaaaaaaattatctggataatttaacacaaatcttagatcaattcgcaacccgagggcatttagctggtttattcaatatcggtaaactattcctcaaggtagccaaaccaggcgatccttattggcaatgcagcaactgtgaacggatccacttacatttagggtttaaacgttgtacccgttgcacggaactgcttgatatcaagcccaggggtgtcgttgaaacgctatgggaagacaattttcttggcaaacgtatagtgcgaggcgaacgcgatggcgttaaacgcttccggttgaacgtcgaggagttgacgggacagacagatgatttctccgatcgactacgcaaattcaaggggatcttcgtcgatgagatgagcgagcttgaaaaacttgatgcggaaatcgatatgctcgccgtcaccacgacgatggaggtcggtattgatataggttcgcttcagtcagtttatcaggccaacatgccgccccaacgatttaattatcagcaacgtgtcggtcgtgccggacggcgcggccaggcattttcttttgtgatcacattctgtcgtggacgtactcacgatgcttattattttgcccatcctcatgcgatcactggcgatccgccccctccgcctttcctagcggtcgatcacgacgctattcccaaaagacttttgcggaaaatctggcttaagagcgcctttaactatttgcgcgaagaatgtcacaaaaacaaaacgactttccctggcgataagctcgttccgcctgatgttcatggcgaatatgtttcaacgcatgattactaccatgatgataaagcgaactgggccaaactattgtatcgcgcgctaaaagcaaatcaggacatacgagaacgctttattgatgcagcaacctttgatcccgatcagcgccgacgcctttattccgaaattaacgccgaaaaaataattgaagaaattggaaaactagggccttctgcgcctgatgacaacacgggacttgctcgctttctggccgagcgaggtctgttgccgatgtatggaatgccgactcgggtacgtaacctttatctggggctgcgcaaaacaaaagggctaaatggtcagactgaatacgaatggtcaacaatggaccgcgatcttgatcttgcggtttttgagtatgctcctggttcggtattaattaaggataaaaaaaagcatcaggtgatcggtttcacaggtaattaccgagaacctcaacttcgcgacaatcgagtttctgatctctcaactgcatgttcatgggatgaatcgagccactacattgcaacttgccagtcatgcggctccgcaaaacttgaacaaaataaacctgttaaaatgattaattgcgaggattgcgatacacctataagttcagatgaattcgagctttatattactcctgccgctttccgtacggatttcgagccaaaagatgacatggacagcttcactcgtatgtcgttaaaaactacggcaaccgtattgcataagggtatcccggaaaattgtggaccttttaaagtacggcgcggcggcgttactattttgcgtcttaataatgggccgattaacggagagaaggaaggcgaacgttttactgttgatttagcgacggaccaaaaggcaccgattccattagctacctactactcgcccattaaaggggagcaagcgattgattcaaactgggccggattacgcaataactttagatggcggtgttctggcgaaaagcaaaagtttggacttgtatcaagcaaagagactgagtcgcttcacctagaattaatgcattttgatgctcgccttaatctgaatatgatcgccagatacggcgaatatatgaatttgcctacacgcgcggcggctgttagtgcaacacagatattgacgcataaggctgcgctctatctggatgtttcgccagatgaattcgaaacccttgagccccgactacatcatgagaaacctatattgcaaatcgcagatgcgttgatcaacggttcagggttatgccgacggcttgccgagccaaccgtcgttggggccccgcctttgatagtcacattattacatgagattctggaggataagcgcgcctggccaatggttgattttcttaagaaggatcatccagctcagtgtcaaacagcctgttacaagtgcatacagcgctatggtaaccgccgatatcacggtttacttgactggcgtttaggaatggcatatttacgatcaatggttatgcctgaatttgcctgcggtttgaacgatgatgactggagttatcctgaaatggtagggtggcgagacagagcatttgagctggcggaagacgtcgcggctttaaggccaggaacaatcaaattatcaaaagagtactcattaccggttcttactgaaattcaggatggaaaagagctctggcgcgcagccgttacgcatcccctttggcaatggagagaacctgagcgaaacgctctgattgacaccctgggactagctgatgggagatcttcgctgcgattcatcgatacatttgagctggaaaggcggccattgcgcgcgcttgccaatcttaaacggaattaa

SEQ ID NO: 203167 - DNA, 834 bp, Klebsiella oxytoca; identical to SEQ ID NO: 104883

SEQ ID NO: 203168 - DNA, 945 bp, Klebsiella oxytoca
atgtatagagcatggggggattttgtcgtttccagcatatgtacggaactcgtagataacaaatgccgcaatcttaaaagctttttgaaacagccagcaactccaagagttaaagaaaaagaatctctaatcgataaagcctttcatagacgtgaaaagtcatatgaagacccttataaggaaattgaggataaagttggtgttagatttgttgtattgcttacatcagatatagatgatgtatgcgatgtaataaaaagaagtgataaatggatttataagacatcaaggcattacgacgaagaacggctaaatacgccgttaatctttacatatcaatctgtccattttatcgtgacagcaaaacgatcatttgatcataatggagtattcattgaggaaggcattccttgtgaaatacaggtgagaactctattgcagcatgcttatgcagaattgacgcatgacgctatttataaagctaaaactatcgttgaacctgatatacatagaacggtagcaagaagtatggcattaattgaaacaactgatgattttttttgttcggttgcgaaagccctaaataattcacctgatgcctatacaggagctcagaaaactctcgaccaactttacatgaccttgataaaagaaaagcctaacaatcagaaatcagctatattaatattggataccttcaaaaaagtccttggcgatgacattataagaaatttatataaatttgttgaagatatgccagagctggaatcattgatccgtgatggtaaaactaaaagcagtttctatgaacagagtattatcattttcgtatattggctgattaaaagacgcaaaaatattttacagaaggaatggccgttagaatggaaaatcatacaaaaaatggcttcagatattggtgtttctcttgaaaggcaagcgtga

SEQ ID NO: 203169 - DNA, 1092 bp, Klebsiella oxytoca; identical to SEQ ID NO: 104885

SEQ ID NO: 203170 - DNA, 249 bp, Klebsiella oxytoca
  misc_feature (115)..(124): n is a, c, g, or t
atgacctcgagaattatgggcctggttaaatggtttaacgaagacaaaggttttggcttcatctctcctcttgatggcagcaaagatatctttgtccatttgtctgcacttaatnnnnnnnnnnttcctttgtctgcacttaatggcgacaactttaaaactttatttgaaggtcagaaagttgaattcgccattcaccgcggagacaagggtcctgctgctgcaaacgtaacactttgcgataaataa

SEQ ID NO: 203171 - DNA, 264 bp, Klebsiella oxytoca
  misc_feature (200)..(209): n is a, c, g, or t
atgccctatgaactgtctcaccttaatgacctgtgggatgcgctggggaaaacaacggtcggggatgaggacggtgaccttgtgaccgacgaacccttcctgcatttcccgacaggtacccctctcttccatatctggtcatggtttgaatccctgcacgacgggttcgtcgttgccgtgaaactgtacaacacatctgnnnnnnnnnntgaaatgtacaacacatctgcgcccgacgcgtcaaccgacaggaaaagcaaatga

SEQ ID NO: 203172 - DNA, 909 bp, Klebsiella oxytoca
atggcacagacttttactcataatttacttcatcctcgccactggcttacctggtctggtttgggtctgctgtggcttctcgttcaacttccttacccgattttacatattctgggctctggccttggaaaaatttccagaccctttctgaaacgccgggaacggattgcgattagaaatatcgaactgtgctttcccgagatgacaccgtttgcccggagccagatggtcaataaaaactttgtttctctcgggctgggactgatggaaacaggaatggcctggttctggagcgatgcgagagtcaaaaaatggtttgatgtcgaagggcttgaaaacctgaccggtgcgacaagaggagtaatggtcgtcgggattcattttatgtcccttgagttgtgtggaagagtaatggggttatgccatcctatgatggcaacgtatcgcccacacaatgatccattaatggaatgggtacagacaaaagggcgtatgcgttcaaataaggctatgattaatcgacgtaatttatcaggttttgttcatgcgctaaaagcaggtgaagccgtttggtttgcaccagaccaggattatgggtctaaaggaagcgtttttgcaccttttttctcggtaaaaaaagcagccacgacgaacggaacgtatgctctgtcaaaactcgctggtgcacacttgatcacacttagcatgattcgacgtagcgataaaaaaggttatcacatgtatatcagcaatccgttgtcaggctatccaggggaagacaagatcgccgcagcggcttatatgaacaagatcatcgagcgtgaaattctccgtgctcctgagcaatacctgtggatgcatcgcaggttcaaaacgcgtcctgaaggcgaagtctctttatacaaatga

SEQ ID NO: 203173 - DNA, 477 bp, Klebsiella oxytoca
atgggattatttacaccttttttaaatttaagttcatatatatatagtgaatgcttcgaagaagaagaatataaaagacttgtcgagttatgttttaatagcatagggaaaggaaaactaagcataaatagaccaatgtcaaacggcaaaggaattttaacttttatatatagaattgataataatttattgttagacgagtttataaatagatttgagaagaaaataactaaaaaaagatatatggattttttgctattcattttgattaacgatactgaaaatatagaaaaaatagaaaaaatgtttactcgaatttgtggggtagatattgaggataatgttttaatggctattgagtgtttaaaaaaagacggttatgaagataggatttttaatgatttggttgattattttacgaatttaaaaagggttagattagaaaaagaagaaattgaaaagagggggagattatga

SEQ ID NO: 203174 - DNA, 303 bp, Klebsiella oxytoca
atgaggagaacaccagaacagagaaaagcatatctagaagcccagcttaatagtgtaaaagcaaagataaacaagcagaaaagaaaagattacactgttaagaaaagagaaacggatcatctaaaatatacttttgcaggtgatattttaaaagttatggggtgcgacgttcgggaggttgacttgtctttaatactcggtgccgttttttatgctacaagtgaaaatgcaaaccctaaaaatgtagaaatatatagaaaaaaaggattggagattttaaaagaaaataaaaaagaaatttga

SEQ ID NO: 203175 - DNA, 504 bp, Klebsiella oxytoca
atgcgcaaggcaaagtgccgactcaccgtaccacgcgttcggtatgggtttctgaggaaggtttgcgttggcaatgtggtgaaagtatcgctttgctggccgcgattgccggactttttcatgatttcggtaaagcgggccgcggctttcaggaaagcctgtccgggaaaagtccaaagacttatcagccttaccggcatgaatggatttcggttcgcctgtttcaggcctttgtcggcgatcaagatgacgatgggtggctggctaagctcggagcgctttcgccagttgatgaaactgagctgctgggtagattgcttaaagacaacccgcgattttccaatagtcctttcctcacacttcccccgcttgccagggccgttgcctggctcatcctttcacatcaccgcctgcctgataatttggatggcgataatgaaccgttgctcaaccattgtgagagctggctggaaactcagcttaacgccagctggaattcgctaa

SEQ ID NO: 203176 - DNA, 984 bp, Klebsiella oxytoca; identical to SEQ ID NO: 173874

SEQ ID NO: 203177 - DNA, 384 bp, Klebsiella oxytoca
atgaataaacatataacagaggcagaaggtgcaaaaatcgcaggtgtttttaaatacatattagaggcatctgaaagtatattaatagaccacgggcatgttatcacggggcaaataataaaaaacaaaaaattctttgctgataacgggcataaagattttgaaagattggagtattatcttggttcggcaattagttctcttgtcgagaataaggtaattgaaggtattaaagacattaacacggatgagaaccttgtttttaaaaaaataaatgaattgagtgataaggaaaaattaattttagcagagtgcattattaaacattttgaatattcaaatgttagaggaatgcaaaaagcatttaatatttttggggggtaa

SEQ ID NO: 203178 - DNA, 285 bp, Klebsiella oxytoca
atgagtaaatcgacagcacagcagatcgcagatttgcaaaataaactacaagcattaagaacaaaaaaagcaagacaggacagaagggaagaaacaagacaaaaaataatcctgggtgcagaagtggctaaggttttaggtaaaaaaccagaggaaattaacaaggctttaattcttgggttgttaagtaaaataaatgaacttgacgaagaagaaaaacaagaattcacacgattaggattaaatattttagaagagtggaagaatgaaaatcgtaaaccgtga

SEQ ID NO: 203179 - DNA, 285 bp, Klebsiella oxytoca
atgaattatcaaaataagaatttattaagcgatgaggaaaaagctttttatcaaaaatattttgaaaaagcacttgaagatttattagaaaaaaagaataaagaaattaaagaggagtttgaaaaaataactaatgatttaattcttgaagaagttgataggtttataaatatccacggtgcaagtataacaaacaggcataacttttttaaacgagattatttcgcttcaagggaaatatttgagaatgtgtttaatgatcgtataaataaaaataggtggtaa

SEQ ID NO: 203180 - DNA, 330 bp, Klebsiella oxytoca
atggcgaaattagaacaaaaagaatatttagagttgtttgataaaatattcaaacagcatagttatatttacgaagaaaatagatgtcattacgatagatttatttatgatgtttttacttttatcggggataatttagaggaggaaataacaaaagaacttgaaatatataaaggatcagaggattacgattactattatgatagtttttatactgtgctttttcaaagtgaaatggcaatggtagaaccaattctaaaagactatctaaagaataaaattttttctgtggaaaatggatatttaaattttgactgtgtggagggttaa

SEQ ID NO: 203181 - DNA, 1152 bp, Klebsiella oxytoca
gtggctatatttcatatgagttttaaaatattaaaaagatcggaaggcaaatcgtcggtttatttatctgcatatcaaaacagagaaaagacaatagataatcgaaccggggcaacctgggactattccaagaaagagggatttttcggctctactatcctctcccctgccggcacacctgccgatcttgtggctgactctgccagcctatggaatgccgtagaagcggctgagaaccgcaaggatgcccagctatgccgttatctggacatagccatacccaaggaactggacgacggccagaagaagcaacttgtcctcgattactgccaggagaattttgtagattacggcatgattgccgacatagcatttcatgacctgaatagtcataatcctcatgcccatgtaatgttaactttaaggactgtaagccctgctgggtttggaaacaaagaaagagaatggaataaaaaggagaacatagaagcctggagggaaaactgggaaataatcgcaaatgggagattaaaaaaatatggtcataaatctcgtattgattcccgttcattagaagaacaaaaagaagaagctgaaaggaaggcagtttttgcaaaaactcctcaagcaaaagctgtatggattgctaaatctatccgtttggacagaacgccaatgaccaggatacacaggcataattggaaagagggacagaaattaagaaaattggagcaggaagaaaaaaggattttatataaaaaagcgtcgttaacatatcaccaaatgactaaaccgattgagcctgagcaatctatgaaaatagaaaaaacgccaatagctcagaaaataaaatctatattcgaaactgccaaaaataaattaaattctaaaattgctgatttcttcaaacctaaacctaaaaaagaagaatttcaaagtagttatgaaattgacgaattgggagaacatatcttgaaaaaagatgctgataattgggatcagaaaaacaatgataaaattaaaaaacaggttcgtgagaacaagctgaaagaagaagccgacaggcagaggtataaagaagaggatcaaaaattaaaaaatacttctaagcctactcagcaaaataacaatagcagaaaattaaagcgatag

SEQ ID NO: 203182 - DNA, 189 bp, Klebsiella oxytoca
atgaagaaaagaaagaaatactttactgtcgtagctgaaaaaacacatcgtttctacatgcaatataagagcatttccacactaacaggaattacatcccccaccgattacaccccgcctcgtatgatgactaaaaccagacggtatgaaatcattaaggctatttgtcagaaaactgaaaccccttga

SEQ ID NO: 203183 - DNA, 1557 bp, Klebsiella oxytoca
gtggctgccttcatccagtgcatcaggggtgtagctccagcgtccgtcctcaccggcaaccaccgtacccagtaccgtgtcgccgtcatagatcgtgaccgtggcccccgcctcggcggtaccgctcagggtcggtgtggcgtcgttggtcagatcgccgctggtcagcgggccggtgtgtccggccacgtcgtcggtcacctccggcgcactggcagacggcgcggtggtatcaatcgtcagctcaaacgccggggaacgctcgctgacgtttccggccttgtcggtcacggtggtgctcaggctgtggctgccttcgtcaagtgcatcaggggtgtaactccagcgtccgtcctccccggcaaccaccgtacccagtacggtctcaccgtcatagatggtcaccgtggcacccgcctctgccgtgccgctcagggtcggcgtgtcatcatccgttacgttgccgctgttcagtgtacccgtgtcttctcctgcattatcagtcacctgcagatcgctgaccggattcacgattgtgtccaccgtcagctcaaacgccggggaacgctcgctgacgtttccggccttgtcggtcacggtggtgctcaggctgtggctgccttcgtcaagtgcatcgggggtgtaactccagcgtccgtcctcgccggcaaccaccatacccagcaccgtgtcgccgtcatagatcgtgaccgtgacccccgcctcagcggtaccgctcagggccggtgtggcgtcgttggtcagatcgccgctggtcagcgggcctgtatgcccggccacgtcgtcggtcacctgcagaccgctgaccggagtcaccgtcgtgtccactgtaatttcaaacgccggagagcgctcgctgacgttccccgccttatccgtcacggtggtgctcaggctgtggtcgccctcgttcagggtgtccggcgtgaaagtccagcgtccgtcctccccggcaaccaccgtacccagtacggtgtcaccgtcgtagatcgtgaccgtggcccccgcctcggcggtaccgctcagggccggcgtggcgtcgttggtcagatcgccgctggccagcgggccggtatgcccggccacgtcgtcggtcacctgcagatcgctgaccggagtcacgactgtgtccaccgtcagctcaaacaccggggaacgctcgctgacgtttccggccttgtcggtcacggtggtgctcaggctgtggctgccttcgtccagcgcatccggagtgaaagtccagcgtccgtcctcgccggcaaccaccgtacccagtacggtgtcaccgtcgtagatcgtgaccgtggcgcccgcctcggcggtaccgctcagggttggtgtggcgtcgttggtcagatcgccgctggtcagcgggccggtatgcccggccacgtcgtcggtcacctccggcgcactggcagacggcgcggtggtatcaatcgtcagctcaaacgccggggaacgctcgctgacgttcccggccttgtcggtcaccgtagcgctcaggctatgaggaccttcgctaagctccggtaa

SEQ ID NO: 203184 - DNA, 1068 bp, Klebsiella oxytoca; identical to SEQ ID NO: 174706

SEQ ID NO: 203185 - DNA, 153 bp, Klebsiella oxytoca
atgattggttgtcacccgaagttcaacaccccggccaccgctcaatgtaaaagttgcaaggttatcgtcttcactatcatcgtttcgcacaaccgcctcttttttcttgatgtcagcgagccattcttttggcggtgctttcacggggcttga

SEQ ID NO: 203186 - DNA, 1248 bp, Klebsiella oxytoca
atggctcttactgatatcaaagtcagaacagttaagcctgcagacaaacctttcaaacttaccgatggtgaggggatgcatctgttggttaaccccaatggctcaaaatactggcgtcttcaatatcgttttagtggcaaacagaagatgctggcgttaggggtctatccaatggtttcattggcagaggctcgtaagaggcgcgatgccgcaaagaaactggtatctgatggtatcgatccctctcaaaagaaaaaagaggacaagattgaagaaagcggagcactaacctttgaggctgtagcaagagattggcatgcatcctgtagcaaaaaatggtcgaagtcccatagtgagcgggtgcttaaaagcttagtggataatcttttctctgcgttaggtaaacgtaagatttcggaactgaaaactcgggatctactcgctccaataaaggtagtagaggcgagtgggcggtatgaagtagcttcgcgtctccaacagcgaacgactgcaatcctgcgttttgcggtacagaatggtctacttgaatataatccagctcaagacatggctggcgcaatcgctgtagctaaacgtgtgcatcgcccagctctggatttcgaacgcttctctgaattgctcgatcgtatcgaatgctttaaaggtcgaaagttgactaaattagcagtgaaactaacactgttggtattcatccgttcaagtgaactgcgttttgcaagatgggaagaaatcgattttaaaaatgcgctttggacgatacctgcagaacgagaacctctgaagggcgtaaagcactcacatcgtggttcgaagatgcgtagccctcatctcgttccgcttagccgtcaggcactggaagtgttagaagagataaaacaaatcagtggggattacgagttggtcttcataggcgatcaccagccggataggccgatgagtgagaacaccgtcaacaatgcgcttcgtaaaatgggctatgacactaaaacagaagtttgtggtcatggtttccgctcaatggcctgtagtgccttgatcgaatccggcttatggtcaaaagatgcagtggaacgccagatgagccatcaagagcgtaataacgttcgcgctgcttacatccatcttgctgagcatctcgatgagcgtaggctaatgctacagtggtgggctgattatctagatgctaaccggaaagggatattacggccatacgattttaaaaactga

SEQ ID NO: 203187 - DNA, 909 bp, Klebsiella oxytoca; identical to SEQ ID NO: 190434

SEQ ID NO: 203188 - DNA, 453 bp, Klebsiella oxytoca
gtggccgatgaaaaatgcgacatcgccgcctgcgtaggcgcaacctggattggcggcggcgtagccgggacgatcgaactgctgagtaaaagtctcaagcccggaggcatactgttgattggcgaaccgtactggcgccgggttccggcaacggaagaggtcgcgcaagcctgtggcgcctcttcgctcgccgattttctgacgcttgccgatctggtttcctctttcgatgcgtctggctatgacctcgtcgaaatggtgctggcggaccaggaaggctgggaccgctacgaagcggcgaaatggctcaccatgcgccgttggttagaggacaaccccggcgatgaatttgcgccagaagttcgggcggagctgacaattgcgccaaagcgccatgcgacttacacgcgtgaatactttggctggggggtatttgcgctgatcaagcggtag

SEQ ID NO: 203189 - DNA, 162 bp, Klebsiella oxytoca
atgagctgctccattaatcgcatcctgcacacggatcagtttcatactccatgcgccagccataaaccatccgtctttctggacattctctttgaaatcatcccactggtcgccagtggagaaaactgttcgtactgcagtatcaataatggatacatatga

SEQ ID NO: 203190 - DNA, 426 bp, Klebsiella oxytoca
atgccattcaacttatgctggagaaagccaaacctcccagagggggatctgcaactgctggttcaaggacatgcttctggcgtgttacgccttacacaggctggctatactgacaatggtaaagttattgatcaaacggaatatttccggtatcaggtattctctggattgctatggtatgaaattgatggaaaggaaatggctgaggcaaccttccatttacaaataaaaggtacatcggtaggtacgtttaagcttaaattaagtcataaaccttcatgggaagcaggccagaataattatacaaccggattgcactgggatgacgccaaatatttgattcagcgtcgtgatttagtagggtgtgatctcgaactatacaaggccatcgatgaaaacttcgattttttaatttcaatacattga

SEQ ID NO: 203191 - DNA, 900 bp, Klebsiella oxytoca
atgccagcaccgtcagcagagattctgcacgcactttcaacatcgctgagcgccgcatttacccagggtctcgcgggcatcaaaccgcaatacctgcgcattgccaccgaagtgccgagcagcgccgcctccaatacatatggctggctctcggacctgcccgaaatcaaagaatggattggtgatcgccagctggcgctgctttcccagcagggttacaccatcccgaacaagacatgggaaaactccatccgcgttaagcgggaaaatatcgaagatgaccagttgggccagtaccgcattactgcgcaggcgttcgggcgtcaggtctccgagttcccggacaaactgagcttcccgctgctggttgccgggttcacctcgttgtgctttgacggtcagaacttctttgataccgaccacccgatggcgggcggcacctacagcaatatcgtaggtgatggtactgagacgggtgagccgtggttcctgattgacgagagtcaggtactgaaaccgatcctctatcaaaagcgccgcccgttcgacttccatgcgctggacgatcttgatagcgagcacacgtttaaaaacaacgagtttctctttggtgtggacggtcgctgtaacgtcggctttggtttctggcagacagcatgcgggtcacgtgcaccactgactgtggccaattatgagaaggcaacagatgtattgctgggtatgaagcgcgattctggcgaaccgctggggatcaatccaaccacgctggtagttggacgtaaaaaccgcgcggcagcaaaacgtattatcgacgcaatgctggtcgatggtggcgattccaacatctattacaaggatgtcgatatcgttaacagcccctttattagcaccccggcgtaa

SEQ ID NO: 203192 - DNA, 408 bp, Klebsiella oxytoca; identical to SEQ ID NO: 161456

SEQ ID NO: 203193 - DNA, 597 bp, Klebsiella oxytoca
atgtcaaacagttacgaagaaaaacgcaatcttgtgcgaaaagacttagatcggtttttaattggatatggaataaaccgttttggagagcgtttgaaacaagcgatggacgccaaagggatcacatctaatgtaaaaatgggggaaatgtgtgatatgtcagatacggtcatacgtaactatttgataggtaaaacttatcccactctagaccggcttagtatcctagctcatgttttagattgttctccatcttggcttctgactggcgagatagagggaaaacagcctaatgacaaccatgttcaagataaaagtgacaatccgaacatatattcgagcggcgttggaacggttctggacttactgagtgagtcgcaaagagagactctatctaacgttatcattgcgcatgggatttccggcatcatatctgctctaaacgggacaacgaccgtcagtgatttcctgcagttatcagaaagcgaaagagagcgggttcttaggctttacaaccaagtaaaagggggcgatgctgaaaccggtgggatcataactacaccacccctatcaaagagtgacaaaaaggccggatag

SEQ ID NO: 203194 - DNA, 477 bp, Klebsiella oxytoca
atgtcctggttactcgaaatgaaaaacatgactaaaaccttcggcgcggtgaaggcgattgataatgtcagcctgcggctgaacgccggggaagtggtctcattatgcggagaaaacggctccgggaaatctacgctcatgaaggtgctttgcggaatatacccgcacggtagctatgagggagagattattttttccggagaaactttgcagccgggccatattcgcgataccgaacgcaaaggaattgccatcattcatcaggagctggcgctggtaaaacacctgaccgttctggagaataatttttctcggcgcggagatctcccgccacggtctgctggattacgaaaccatgaccttacgctgcgagaagctgctggcccaggtcaatttagccatatcacccgacacccgcgtcggcgatttaggccttggccagcagcagctggtcgaaatagcgaaagcgctaaataa

SEQ ID NO: 203195 - DNA, 1116 bp, Klebsiella oxytoca
atggaaccaacattgtcattaaccgtgatgttctgtgctgcagtgggtgcttcagtatcagaatcgctgtcagaatccgagtcactgtcggaatccgagtcactgtcagaatccgaatcgctgtcagaatccgagtcgctgtcggagtccgaatcgctgtcagagtcggaatcgctgtccgaatccgagtcgctgtcggaatccgaatcgctgtcagagtccgagtcactgtcggaatccgaatcgctgtctgaatcggagtcgctgtccgaatccgagtcgctgtctgaatcggagtcgctgtccgaatccgaatcgctgtcagagtcagaatcgctgtctgaatctgaatcgctgtccgagtccgaatcgctgtctgaatccgaatcgctgtcgctatccgagtcactgtcagaatccgagtcgctgtccgaatccgagtcactgtctgaatctgaatcgctgtccgaatccgaatcgctgtcagagtcagaatcgctgtcgctatccgagtcactgtccgaatcggaatcgctgtcagaatccgagtcgctgtcagagtcagagtcgctgtccgaatccgagtcactatcagaatcggaatcgctgtcagagtcagaatcactgtcagaatccgaatcgctgtctgaatccgaatcgctgtcgctatccgagtcactgtctgaatcggagtcactgtcagaatccgagtcactgtcggaatccgaatcactatcggagtccgaatcgctgtctgaatcggaatcgctgtccgaatccgagtcgctgtcggaatccgaatcgctgtcggaatccgaatcgctgtcagagtccgagtcactgtcggaatcggaatcgctgtccgaatccgagtcgctgtcagaatccgagtcgctgtcagaatccgagtcactatcagaatccgagtcactatcagaatccgagtcactatcagaatcggaatcgctgtcagagtccgagtcactgtctgaatcggaatcgctgtcggaatcagaatcgctgtcgctatccgagtcgctgtcagcatccgagtcactatcggagtccgaatcactgtccgcatctgagtcagtttctgaaatcgaagagtgctga

SEQ ID NO: 203196 - DNA, 2880 bp, Klebsiella oxytoca
atgactgaacaaacctcccgcctggccattgttattgatagctccggggcagaaaaacaggctgataatctcgcaactgcactggtaaaaatgacgcaggcaggtgaacgtgctgccaccagcgcagtgaagatgacaaaggccactgatgaagaaaaacagtctctttctgaactcttagatcgcatcgacccggtaaacgccgccctgaacaaactggataaacagcagcaagatcttgcaaaattcaaatcaaaggggatggtagatgccgatacattcgatctttattcaaagaaaatcgaggaaacacgaaacaggctaactggatttcgtgacgaccttggcaaaaccggccaatcagccgcacagactgcctttgccatgcgcatgatcccagcgcagatgaccgacattattgtcggcttatctacgggtcagtcgccgtttatggtgcttatgcagcagggcgggcagttgaaagatatgttcggcggtattggccccgcgattaaaggtgttggcgggtatgtgctggggttaattaatcctgtcactctggctgccgcggctgtcggtgttcttgggctggcctattacaaaggctctcaggagcaggacgagttctataagtcattgacccttagcggtaatctggttggtaaaaccaccgggcaactagcagaaatggccgctcgggtttcagtagttgccaactcaaccactggagtgaccgcagccacacttaaccagatagtttcatccgggaaggtggctgcagagtcattggaacgagtaacaactgccgtggttgaaatcagtgaagccacaggcatcgccactgaaaagctggtgggtgatttcaacgacattgctgctgacccggttgcggccattaccaaacttaacgaccagtaccactttctaacactggcaacctacaaccagattaaagcactgcaggatgaaggtaatcagcaggatgctgcacgggtggctagtgatgcttacgccaatgccatgcagcagcgtgcgaacgatattcatcagaatttggggattcttgaacgtgcttgggactcgcttgctaaaacggctaaaggagcatgggatgccatgcttgatattggtcgcgagcaaaccggcaccgagcggatctctcaaattcgtaaggaattagattggatagataaggctgctggtgggaagctattttttggtggaagaaaggctgagctcgaagatgagctaaataatctgcaatctcaaatcacaacagaaggcgttttaactgaaataatcagcagtcatgacaaagccgaacagcaacgaattaaaacgcagcaggaagcagatcgcgttaaccagcaatatctgagcaatgcggataagcgcaataaagctattaagcagcaaagcgagttcctgaaggcaggtgcaattactgcagagcaatatgcaaaaaatgtttctcgtattaacgagatgtacaaagatccgaaaccacccaagacgccaaagggtaaagcatataccgaggacgcagcaacccggctgcttgatcagataaaccagcagactgctgccatgcagtcccagctggatgccagtgacaagcttaacagcgcaacccaggcgcgagttaagttcgaacagcaaattgctgacctcaagtctaaaacacagctcacagctgaccagaaatcgatcctttcccgttcagatgaaatcctccaggcgtataagcagcaggaggcactgcaaaattccgtaaaaaccctggacgattatcggaagatgcaggaacaggtgaagacgaaggatgagcggaccaacgatctgcttaaaacccgtcttgaactgctggagaaagccaaagcaaccgggcaactaaaacccggtgaatatgaaaaaacacgggcagatatttatcaaaacaccgatatgcaactgccctcgacggttcgtaatgttgtaggaaacctgacacccacaggagggcgactctctggaacttttgaggggatgcaggggcaaatcaacgaatatgaccaggctcagcaagagctccagcgctggctggcagctcaggaggaagcttatgcgaaggccggcgaaataactgccgagggtgaggccagaatgacctcgattcgtcagcgtgcagcggatgcaaatcaggtcatagaggctcagaaaaacaccatcatatctgcggccacgcaatccttgtttgacagtaccgccgacatcatgcgaactgggtttggtgagcaatcggcaatctacaaggttgcttttgctgcgagcaaggcattcgctatcgctgactctatggtgaaaatccagcaggctatagcaagtggggcagtaagcgcgccttatccggccaacatcatcgctatggcctcaatcgctgcgcagactgccagtatcgtctcaaatatccaggctgtttcaggagttggcttcgcctccggcggttacactggccccggtagtaagtatcagcccgcaggtattgttcacaaaggagagtacgtctttgaccaggcgtcaacgaaccggatcggcgtgtctcagcttgaggcacttcgaaatggccaaccgcttgatgcaactctggggcgtacagggtttggtactggtgttcagaacgttaacagcgataaccgtaggcaaacaactgtacacgcgccgattaatcaggagtttcatctccagggtattactccggagcagttgagcgctacactcaatcagaataatcgacagctttccaggcagttaaaaggtgaactcacaaaggaggttaccatgccacaaggggcttttggcaacgctctaaaaggaaactatacacgacacggtcctaggtaa

SEQ ID NO: 203197 - DNA, 177 bp, Klebsiella oxytoca
atggattcacaaaaacaaagagaccttattgcaagcctgtatgaagagctggtaatcgcaagagggctcattaaagagatttgcacagtgcgaagcattgcagagccaaagtcttctttgcagagaatggataaagccattaaagatgcaaaagaatacatgctagaaaatagctaa

SEQ ID NO: 203198 - DNA, 183 bp, Klebsiella oxytoca
atgtttagcagcagtggtataaatggctactttttcctgttgcttagtatgtggccagtgctaatggttttattcctgggattgtctcctgcattttacggtgtgttaatgcctaaaacggcaattgcttgtctggtgatcgctgcagcctttggcattggtgggtggttctatggattgtga

SEQ ID NO: 203199 - DNA, 1506 bp, Klebsiella oxytoca
atggacctgatgaagataaaaatcaataacattaaaaacatcaaaaatgcagatatcgaactccctattgaaggaggcttgtatagcctggttggtggcaatggatgtggcaaaagcaccttaatgttgatcatgtcagttttattaagttccaaacgttttaatatgctccaagatgaagattttgatgataactctaccattgatgttgctatttccgctgatgattatgaagaatctaaccattggtttgttaaaaaaaggcagcgaaacaatgaaaacatgtggtggtgttctagcagaccactctcatataagggtgtttatgaaggcagtttattttatggggcccgctttagagattctactattgtcgacaaattactgcgtaacaaccgaataaaagacgatcaaattgttgatgctttcgattacgtaaaggataatttaagctacattcttcatggtgattataatcattacaaagacatgaagaaaataaaaaataaaaatatatctgaaaacttcgagttatctaacctgccttatttcatgacaacccaaaaaggtgatctgcttagtcagtaccgcatgagttcaggtgagtgccttctaatttcacttttaaattatatttatcacaccttgatcaaccaaggcaaaaacagaagcgtaacagatagaacctttttcatactcattgatgaaatagaattggctttacaccccattgccatttcccgattaattggttacttaaattcattattagagtcgtatccaaaattatgtgtttatttaacatctcactccccagaagtgattcgagcccttaagccacagaacatgtacttgattaacaataatgaaggaatattagaattaatcaacccctgcttcccaagctatgctattcgtgaggtctaccgtcacgatggattcgactatctaattttagcagaagacgcattggcatcattagtaattgatagcgtcctctctgatacaggtttaaaaaacagtagattgatacacatatcacctgttggtgggtggcaaaatgttttaaatttgcacttagatttattaagaaacaatgttattggagttaacaaacagatagttagtattttggatggtgatgttgttactgatgttgcaaaaaaaaatgaatacaaaaaccttgctaaacttttccttccgatacaaagcattgaaaaattcatattcagcatcgtgttcaacaaagcaaacgacagattaagaaaaacgatcaatgacaagtatttcccaataaaatcattagatgatcttgctgctgaacatcacaaacaataccctggaacccctaaaagccccgataaattattttatttcagagtaaaaaaagaccttgaaaatagaaatataaacgaatcttatttcataagaaatttaagtgaagatataaaacgggaagtagacttcacatctttcggcgctcaattacaaaggctattgtcttaa

SEQ ID NO: 203200 - DNA, 591 bp, Klebsiella oxytoca
atgaccagcaaattaaccagagagcgcctgcaggaaatcgctgaagatggattcctgaagcatggcgaaagcaaagaactggcccgtatggcgctggccgaaaagtccatcgagccggtgatattgtaccgggagcgcaatccctacaacggcttaaccacaggctggcaagagcttaccgaaaacgagttctcattcctcaaagagaatgccggggaaaatgcagagttcctcacgctctatcgccacgcgcagccagcgccggtaataccggatttcaaaaaactggctcgcgaactggttgttaatctcgtcgattgcggcggactggatgaaggggtgaaagagaagtatctggagtgggtggaaaaaacctgccgcgccgccatgctgcaggctggcaacgctccggtgaacggagtaaccgctggaaaaccgttgaccatcatactacccgatatcagctcaaaggcgttctggagtggttccggtaaaaccgaagtattccatccggagacttaccgccgttgggttaaagaagcgatcgaacgtggctgtattatcgcctgcattgatgcggaggtgaaatag

SEQ ID NO: 203201 - DNA, 222 bp, Klebsiella oxytoca
atgaccaaatatgaattactcgactcaaaaataatgagcaaaattgatgcgcatcctatgccattttccagcctgtacgtcatggatgtagcagaagaatgcagccgcatcgcaaaggatgagaataagccagaacctttccgcattctcgatcgccggcttcaggcgttacgtaaatctggaaaaatccgcagtacatccaaaggctgggtgagggcttaa

SEQ ID NO: 203202 - DNA, 255 bp, Klebsiella oxytoca
atgactgaacacgtcgaaaaatacacaaacaaggctatagaaatcattgccgactatatccagcgcactaacaagaaaaacgagcagttgcaggaagcgaaggtgcgcttggataaaaaaatcgctctgttcgcagacgatgagaactgcaacacaaacaggctgatgcccgtatttttaccagcaatgaccagccatacccgagatggctttttcgaagagatagcagcggcgttagaaggagccaaccaatga

SEQ ID NO: 203203 - DNA, 909 bp, Klebsiella oxytoca
atgcgtgactatgcaacagtcgcaccgcaattctggctggggaaaacaggtcgggaactgcggaaaaaaggcgctgaagcgcaggtggtttcgttttatctcatgacctcgccacacgcaaacatgctcggtttgtattacctgccaattctctatatcgcccatgaaacagggctgggcttagaaggggcttcgaaggggcttaaaagcaccatcgaagcggggttttgtagctatgacgaggacacagagatggtctgggtgcatgaaatggccgcctaccaggtaggcaaggcattaaagccaggtgataaccgttgtgcgggggtcaggagtgagtatgcatcactttcagaaaacccttttctttcatcattttacgagcgttataaggatgattttcatctgaatgtcaaacgcgaatcgtgcccaacgccagaaggggcttcgaaggggctaggaagccaagatcaggaacaggatcaggaacaagatcaggataaagatatttcggggcatggcgacgccacacccccagatggtggatcctccgatgaagctccatctgaaaagccgaaaagcagttacccggaggaatttgaactggcctggagggaatacccaaaacgtgccggaggcaatagcaaggtcgatgcgttcaaagcctggacagcccgaattaaatcaggcgcaacagcgcaggagcttaccgatggtgttcgacgatatgcggattacgtcactgctgccggaaaactcaacactgagtacgtgaaacaagcgtccacgtttttcggtccctcaaagcactacgaggagttgtggagcttcgaagtaccaaccggtaaacgggatccgaactcaatatcccagccagataaattaattccgagtgggttcagggggtag

SEQ ID NO: 203204 - DNA, 189 bp, Klebsiella oxytoca
atgtcagaaacaaagactgaggtaaacgcccaagcgacccataaatgctccttttgcggagcgagcaatattgaggtttcgggcgttctaatcgccggccccggcgtatccatctgtcaaaaatgtgtctttcagtgggttgatattgtctttcaacacgcagaaaagaccgataaaccaacgtcataa

SEQ ID NO: 203205 - DNA, 411 bp, Klebsiella oxytoca
atgagctatagcgacatcgttgcaactattgcaatgattgtatctatcacagcagttcctgcaagcggttactttagctacagatatgcagtaaaaggggaaaaacgcaaagagttcaatgcaataagcgatataataagacaaaaattaagagatcaattgcgacttattgagaatggagtgtttcccggtggcggaaatgtatcaatatcacagcgagagattgatacgttcattgatatctgcagccccaagaacaagaaacacctttcggaactctggagtgaatatcagcgctccctgcaaaacagtattgatgtcagtgacccgttgaaagatcctgactttcatagcccttcatttattcaatcagcgattgaaaaaatattgccgtattgtcagcgccagtag

SEQ ID NO: 203206 - DNA, 129 bp, Klebsiella oxytoca
atgcggtatgacgatgagtttttcgcgaagatgcacccgcaaatagcgcaggttatcggggtagcggttatgcagctactggttgagaagcaagagccgtcaagagaggctctgatagagatgatttag

SEQ ID NO: 203207 - DNA, 663 bp, Klebsiella oxytoca
atgaataatgtgagattggtggatgaggcaagttctaaatcactgcggccatctcctccgctgaacttcatcagcccggaaaccttccgcccctacatcgccataatccctgcaaatgaggtttacagttgggttaacgataacatcctgatggagagcgggcatctctacaaccctgaccattttcatcttcacgctgctgacatcgccttcatgtgggcttcgaatgcttttgataagcgaggtcgtgccgtgcttggccagtgcgaacaggtaatgcttcgcgccggcggctggcagaaagccagaatggagcagcaaatgcatgaatggttcggtcgcatacctaagttcatcatcacgttggctgccgactactgcgagcaatgtaacgatctggaattctgcgcactggtggagcatgagctttaccacatcgcccaggctaccgatgactatggcgcgccgaagttcaacaaagagaccgggatgccggttctgaagcttcgcggccacgacgtcgaagcgttcgttggagtggtccggcgttacggcgccagcaaagacgtgcaggaaatggtggatgcggcgaacaggccggcggaggttgctcatatcgatgttgccagagcgtgcgggacatgcatgctgaaactggcttaa

SEQ ID NO: 203208 - DNA, 336 bp, Klebsiella oxytoca
atggggttcacagctaggtggttttctttagaagcaagcttagatcaggtcggggcgcctagagcacgaatctgtctgggtcaacatattattaatgaaatgggcgtggtcataggatacttatcgacccccttcggagctgaacctgaatgggttttctacgatcgccctatgtataaggcaagcgattttatggttagaaattccattcctgccagtgagaacaatctatttgaaacactttttcaggcatccactactaacgaaccatgccccttccgcacatcaacagaacttcatgaatttttatctaaaataaatttaatcaataagtaa

SEQ ID NO: 203209 - DNA, 243 bp, Klebsiella oxytoca
atgaagatcgcaagaatccacgagttaaatctcgtaaactacctcaagtcatcaccattttacgccactgaaaaaagcatcgattatggagtgcagtttaccctcgcttccggtgtgatctttaactttcactacagctctaaaacccctgattacttcagtttgacgccgcaaaaccagacagccaatcaggagcaggctgatatggtgatgcactttgcgtcatctgtcgcggaaaaatag

SEQ ID NO: 203210 - DNA, 462 bp, Klebsiella oxytoca
atgagtcgcttaaccgccattatcagcgcagtggttatctgcctgattgtctgtcttgggtggctggccaatcactactacgacaacgccaccgagttcaaaaagcagcgcgacgagaaagtgaaagcgctaaatctggctaacgccaccatcaccgacatgcagacccgccagcgtgacgtcgctgcactggatgccaaatacaccggagagctggcagatgctaaagccactatcgatcagcttgagcgtgatgttgcttctggcaagcgtcggctgcagctcaacgcaaaatgtcccgcgaacggagagaccgcaaccagcggcgtgggcgatgcttccggcccccgacttactgactccgctgaacgggattatttcaccctcagggagcgaatcgtcaccatcaccgggcaagtaagctacctgcaggactacatcaaagagcagtgccttaaataa

SEQ ID NO: 203211 - DNA, 573 bp, Klebsiella oxytoca
atgtttgaagaagagatttggaaagaaacatccatatcaagcgattatgaagtcagtaatcatggtcgattccgatccttaacacgcaccgttagcgtgatgagtggctacaagaaggttttagaaggtaaggatttgaagccgtttgacgtgcataccactggttaccttcaaataaagatttgcggcaaaaagtatgcagcacacaggcttgtcgccatggcattttgcgacggttacgccgaaggattagttgttaaccataaaaacggcaacaaaaaagataaccgcgctgaaaaccttgaatggacaactccgtcaagcaatcttcgtcatgcctatagcgaccttggtgttatcccaaatcagctcggaaggttcggtgaggatcacaacgcaagtaaagcggtaatcgctacatgccgtgttactggaaaagaagttcgctacgcagccgctatggatgcggttcgtgatgggttcgacagtggctgcattagcaggtgctgcacaggtcaatcatcttaccataaaggctataactggcgatttgagggtgaagaaaatgagtag

SEQ ID NO: 203212 - DNA, 432 bp, Klebsiella oxytoca
atgagcatgaacaaagacggcatccgtctgcacaaatccaatttttccgccatcgggcagcagatacagccaatgctggaatctggcgactgctatcgccttattatcaagccctggaaggacaagcgcagcctctcccaaaatgcccttctctggatgtggaatggcgacgttgcatctgccatcaaccaccactccgaaaacaagttaacagaggaagaccttcatgagtttttgaaggatatgttctgccccgccaagcccgtaaccgttcttggtgaaaccaagatggtgaagtccaccaagctactcgataccgaagagatgaccttctacctgcgccgcattgaagtctggtgcgctgagcgcggtatcaaattgcggatccctgccaactccgaatatcactcaaagggacacgaccatgtttga

SEQ ID NO: 203213 - DNA, 504 bp, Klebsiella oxytoca
atgtctggttgggataacggtatagatgcagtttctgcgattgcagctatcgcatctgcggcagcaacttatttagcttggcgatcctcagaagctagcagggcaacatccgaaaaagctttgcagatgcaaggaaagcagtatttgtacgagacattaaaagcttgcgctgagagagcgaattcatactcaaaaggaaagaaaggggctgactggagctttcatgacgcagccaatattgttcgatgtttgaacttggcaatggggagcataataaattactcagataccaacaatcaggatgcaatgcagggtctgaagcaattcttcattagccaattaaacatggagctttttgaagagctcaactatgaggttgggcctgatgctttctttcacggagaggagctaaccagcatgacgagcgatatttactcgcagtggttaaacattatttcattctttaacctcatgattgtcacagatgaagacctcgccgattaa

SEQ ID NO: 203214 - DNA, 195 bp, Klebsiella oxytoca
atgaaatcacaatcaccagtgcagcatgacgttaacatcgacggcaaagagtgtgttgtcacgatagtccaaaccggcaagtcaacgtggagggcatggggagattcctgggggcaccatatcgtcgaaataggttctagcgaacagaatgcgctttctcattggaaagccaaagccttagttatgaatgggtag

SEQ ID NO: 203215 - DNA, 843 bp, Klebsiella oxytoca
atgaattttaaaagatatctctgtcaggagtttattgaggctgaagtgggatgttcggatcccactcagttaggtcaatataaagatagaattgattcgattcagttaagtgctagtaaattgtcagacttgaaaaatgctattaggactgactcgacagatgttttttacaaagcatctgtaagttttttggagtcactatacagccttagaaggggtcattcatcatgggccataattaaattatattattccattttttattcgttaagagctttcttgcttcttgagggatatgctatttttaaaaatggaaaaggggagatattttttttggagtgcgtggaaaatgctgtgccaatacgtatttccactaaaaaaataaaaggagatcacaaaactactattaaggcctttgctgagttatgtaaatctcacaagctcaatactaatacaattgattcaattagtgtttttgagtgggctatccagtgtagagaacttgttaattatagaagttcatccttcattgagcctgattatggctatgaagcagtgccagaagatttgagagatttgaatcgcttggcaggacttttagtaagttatattaacgacccatattatacatattgttttattgaagagcatagcttattagcaactgcatcagtattaatgaatgaactggttgatatgtttagaaatgacggggttgcatttttaactgatgagcggcatgtttttttaaaagctattattaaaaagtcagggctcatgaatgtgtccgtattgcaagggttgtttcttaatgatgctgatattttgattatggaagaatag

SEQ ID NO: 203216 - DNA, 1050 bp, Klebsiella oxytoca
atggcaataaataaacttagttatcagtgtctagaaacagtttttggtgatattcctgcatttactttctctatgaaggtaaaagaattgatccccatgtattacgttgctgtacgagggcgagataatgaggaaggagccgttcagcgtgtacttaatagtagaagaataacaagtattaaaaaatatgttcttgatggtaatatattctttagttcatttattttgaactggacgaatgcagataaaaagattgaagttaaagatggtatcatttcttttgattttattcctgcatctattcaggttattgatggtcagcatcgattagctggtttagaagaagctatggaggaagatcctaaagttggagaaatggatatattagttactttatgtgaatcattaacaacgccacaagcagcaaaaattttcttaaatattaatacagaacaaaaaccagtacctaagagcttaatttacgatctttttggtgaactcgaagacgatgaaactcatgcgataaatcgtataactgacattgctcgtgagctaaatgatttagatatatctcctttttataagctaataaagtttccggggtcacctcgtggtgttggtaatatcgagttatctactattgttcaatccttaaaagagcatgttaagccagcgggaacatttgcgaaatataatattaggacatatgataatcaacgcaatttgatcataaacttcttcaatggtatcaaatactattacgacaaagaaaatatttggaatagcaaagctaagaatccatttgtaaaagccgctggctttgcgggtgctgtggatttcttgactgaaaaactactttcacaatgcgttgaaaggaaatcatttactgttgatacaataaagtcagttatttcgttagagaaatcgacacttattacctgggatgaattaaagaatcatgatggtaaaacagcaaggaaaagagtgaaggaattgctggaagaaaacgtactgtcatcactaccgtctcaggatgaatatgaattttaa

SEQ ID NO: 203217 - DNA, 207 bp, Klebsiella oxytoca
gtgattagtcagcactacggtacccagaccgttaaccgcggtgccgttcagccaggcatgctggttaagcatcgcgacggcacctggacggcatcagctcacaagcgcggaaagctgtaccttcaccgcggttgtgaacgcaccttcaccagagagcttctggttgaggtttatcttgatggccgcggcggcggattgagtcattaa

SEQ ID NO: 203218 - DNA, 315 bp, Klebsiella oxytoca
atgctgataaatgaaaaatgctcttccccaatgtactcaactaaagaaatgggtaagcgctcgaagcggaatcattggtttgtgagagaaaaggggagtgaccagccgcgcgatcagtcatggtatgactggtggaaatcacgttcgcttggcttaggcaagaatggtcatatcgcttggcgttctacgtgtatcgcaagaaacgcacctgaccctttcaatccaccgggttcattcgaggtcgacttccaggcacctgatggcaagctgtatcatctggagtttaagcttgcacctcacggcccaaacaaataa

SEQ ID NO: 203219 - DNA, 153 bp, Klebsiella oxytoca
atgactcacgctcacgacgacatcagggttggcacacagtgtcttcctttcattggtaacggctggctaatgccatggggtgaagtggtcagcaatccaataaaggcgcagcggctcgctgatgaatatcgggaaaggcaggaggcggcatga

SEQ ID NO: 203220 - DNA, 753 bp, Klebsiella oxytoca
atgattcattttcacggcggacctattacgccggacacatgcgccctgaaggcatggaaaggaaggcacgctttcatctcctttgctaaccccggccaattagccctggccagcgaagtcacccagtctttcgcgctggataacggcgcatttagcttctgggataagggccagccagttaactggttcgactattacgaattcgttaaggagtggatgaatcatcctcgtttcgcgttcgctgttattccagatgttatcggcggtaccagcgaagagaatgacgctctgatttctgaatggccacacggcaaagtagtcggcgcgccggtctaccacttcaacgagcctgatgagcgcttcatccgcctgtgtcatgaattcccccgggtgtgtatcggttcaatgggagagtacgacgctaaacgcccacgcgcctgccgtgcaaagcttcgtgacctgattcagcacgttgtcgataagaacggttacccgataacaaagcttcatggccttcgcatgctgaacaaagatattttcactcacatcccgctgtcgtcagctgacagcaccaacgttgcgcgcaacatcggaatcgacaaagcgtgggataaatcagcttacgcgccggccagcaaagaaacacgcgcagcagtgttagtagagcgaattgaagcctttaactctgcaagttcgctgaattacgacgcggaacgcgatcggttcacgccacaacttgctttcgaggtgtaa

SEQ ID NO: 203221 - DNA, 612 bp, Klebsiella oxytoca
atgctcccggggctacagctctgcacggtctggtcgcccggacaggcgcgtcaagcaccgcctccggggaaatccaccgtccgcactcacgctcccggggctacagctccgcgcggtctggtagcccggacaggcgcgtcaagcgccgcctccggggaaatccaccgtccgaactcacgctcccggggctacagctccgcgcggtctggtagcccggacaaggcgcgtcaagcgccgcctacgggaaacccaccgtccgcactcatgctcccggggctacagctctgcacggtctggtcgcccggacaggcgcgtcaagcaccgcctccggggaaatccaccgtccgcactcacgctcccggggctacagctccgcgcggtctggtagcccggacaggcgcgtcaagcgccgcctccggggaaatccaccgtccgaactcacgctcccggggctacagctccgcgcggtctggtagcccggacaaggcgcgtcaagcgccgcctccggggaaatccaccgtccgaactcacgcttaccggggctacagctctgcgcggtctggtcgcccggacaggcgcgtcaagcgccgcctccgggaaaatgccgggtaa

SEQ ID NO: 203222 - DNA, 579 bp, Klebsiella oxytoca
atgagtgcaatagacactttaagggaatacgccgaagtatggcatttatttggtggtatgccagatgatgcaacccttagtgctgaagtttcggctctttatcttggtgttagtgtcaaaaccctcgctcgctatcgccagaatggtaatggccctgcttatatccagtaccaagcagaagacagcaaagcacggaatcaacgagtaaattatctactgggtgatttaagagcttggcgggatagtcataaggtaagcagtacaatggaggccgcacaggtccgaggattggcttttacttgtttgactgattttactaagccagaaccgttttgggctattgataataaaatttactctcatgccctcaccatccctgacgatagatttaaagagttactaactacatcccatgcggaagttatttggatctctgtcgaggatgttttatttaaggattggcacaatgtaggtgtccgacagaaatggcatgaactgcttactgattttttaaatggtcttattcaagcttcgggttcagaaaatgaacggtattatcttaaagatattttaccttaa

SEQ ID NO: 203223 - DNA, 1650 bp, Klebsiella oxytoca
gtggactacgccattaacgaggctagtgggaagttagtatcggcttctcaagcattgagatatagtcggtatatatgcccagtttgtaaaaaaggagttagtctccgacggggaaaaataatacctccgtattttgcccattttcgcggatatggcacactcgactgtgagaattttgtccctgctcatttatccttcactacaaaagaaaatatcaacgatattgtaaagcggcgtatggagctgcgtttgttgatctctactgccaaaaagattcgagaatggtcattagagctagcattacccacttgtaacttatgtcaggctaaggtcattcttgacgtagggggacgatctcaaacgattgatatgagaggtatggtaacgcgccgtcagattagtgctgagctctcagctagaccatatcgcatagtatcttttactggcaatcctgatcctgagtttgttagagaagtggaaagggaatgtccgggactaccctcagtaggggctgctgtattcaccgctatgggaggtggtgcatcgaacggatttcctctggcgcaggaattaagatgcactgaaaccttcgctttcctttggcgggagcctgcaagtcccggatttcctgatgaattagacattgatagtctagttagtaggcaaggatggaatttagccattgtgacaatacctgaaactctttccccagagagcatttcatggcttaactccttcacacatcttccaattgttcctgcaaaatcttctattacagctatttggccattccaaactcaagacatcagtattaatcaggtcgagtgcattcattccaattttttactattgtctgcaaatatgatttcgaccccacccaatgaaactgggccgacaatgtgtgctcaaggggcctcttcagtcctctcagcgattggagtagaaaaatcaccggcattctttactcttacccctgataatagtgacatagtaggagtatctgcttcaaatgatcaagatataaaaaaatattattctttttttactaataagataaaaaaccataaatatccttcagttgatctagtttatacaaaaaaaaatggtgtgagagaaatagtctcattgcatcagagaagatgtgttgaacttacaatggaagctcgacagttaggttataagttagaatacttgtctatgccttctggggccgaagggacggccaaaatacagagggaaatagatattagtcgtatcaatcttttttcaagtgatcatatggctcctcatgatagcaatatgagattgctacgttctgatgccttttctaagttatctcaatgtttatctgatgtgaattataatctggatattgagtttaaagggctaggggaattacatcttgctggatttaataaacttggaaaagacattgtcgtaagtaatgaaatatcttcgagcctacgtcttcgtatattgagcttcatattgcagatgcaatcaattaataatgaagttgtcatggttaatgattctaagttacttgaagtattggaaaaattaaaccctaaacaacacctactaccccactatcgagcattggtaaaagaggttattgccagtggatttgaatttaatcgctttagataa

SEQ ID NO: 203224 - DNA, 1215 bp, Klebsiella oxytoca
atgcacaaagatccctcaataatagttaatgtgaacctgcgtgaagcccggttaaaaaagaaggttcgagaacatttacaatcattgggatttacaaaatctgatgcaggagcgctacaggccccaggaaacacgaaagaggtaatcaggacccttcatagcgctcaacgggctgagcgacttgctgcaaaccaaaatttcataacactcaagtcctcaaaattattgaaattttttgcatctggtaaggatgttattcctgacaagatatcgcctgttcttgagcgggtgtcatcaggaacctggcaaggtgatctgtttaggttagcggcattaacttggtctgtaccggtttcaaacggatttggaaggcgtctccgataccttgtttgggatgaaagcaatggaaaattgatagggttaattgctattggtgaccccgttttcaatcttgccgtcagggatagattgattggttggagtacagaggatagaagctcaagacttgttaatgtgatggatgcgtatgtacttggcgcacttccaccttataattttctgcttgggggaaaactggtagcttgcctacttcgtagtcgcgagttatatgatgactttgcaagagtgtatggcaacagtgtgggggttatatctcaaaagaagaagagagcccgtcttttagcaattacaactacatcatcgatggggcgctcttctgtatacaacagattaaaacttgatggaattcagtatatggaacccattggttatactggcggctgggggcattttcacatacctgatagcttgtttattgaattacgtgattacctgcgcgacatggatcatcgctatgcagaccaccatatgtttgggaatggtcccaactggcgtctacgaacgatgaaggcggctttaaatgcgctaggatttagggatgatatgatgaaacatggaatccaacgcgaagtatttatcagtcagttagctgataatgcaactaatattctgcaaacgggtagaggtaaaccagatcttacatcattgctttctgcgaaagacatcgctgagctagctatggagaggtggatgattcctcgatcaatacgcaaaactgagtatcgttcttggaattcagattatctttttgattttattgataataattggttgagcttggaagtggaaactgataaaaaaaagactattagttaa

SEQ ID NO: 203225 - DNA, 561 bp, Klebsiella oxytoca
atgatcgttgaggataaagtattgcctttgattgatcttgctttgagtgagctcaaaaaacaggcagagaggtcgtcagatcagaaaccgttccgctttttccctgcgatgtgggtacaaacaagatgttgctgcaacataatcgctgagtatacattagtcagtgtttccgaaaaaaatgataatttatatctaaaacatcatatcaactattgtgattccattccgcgcattattgaaaaactaagagcggcacaggataatagtgacgttcagaagtgtgagttttgcctgtttatgcaaaaaatgcgacttgctgacaaacatacacttaatgctattgtatgtcttgatacgtataccgatgcttcgctatatctggggttgaaccagaagtcgatctattctagattgtacagtatattaaatcgtatcaatgtaaaagaccgaaggttatttttacgctggtataaatacatgctcgttcactcggatatattttttccagaaagcctggatgttaagcgcccatcccatcaggtttgtcaaaccgtggattaa

SEQ ID NO: 203226 - DNA, 1137 bp, Klebsiella oxytoca
atgatgaataaatttgtaggttgtctgtctggcgttctgatcatgtattttctgacgttgggtaccgcaatcggagcttgctcactggacggggggcaagtcggagtggggcatgtgatgatacctttacaaggaaatcttgaagcaatagcctcgccaaattcatataattctggggtggagaatatattcaccctgaatttatcagtcaggcataatacatctgtttcctgtggaaatacaatgtatcgtgtttatgaaattacagatataccacagggggtgctatcgtcgaaaacatttccgacagagctggaaaatgtagaggtatatttttcttctccattttcctaccctgcatctgtattaccggcagtagtttctgtagggactcttgagtcagtagatataagattaaggaaaatagatatggggcgcccagcatcaggcggggtaattaatggaagttcattaccttcggggagattttatgtcaccgaatcacctactggtgaatttgataatacagcagtggaagtatttactttctcattcagtggttccctgacagtacatacgccaacctgtaatgctgtgaataaagatgtattccttggcgattatactccgaatgacttttccggcccggatacggggaccgcgtgggttgatgccgggtttacggtagtttgtgattcctcgttttatggtggatattactcgatgtcaaatataacgcgtaacgacgaacagtcaacctggcaaaataatatatactcacaaggcagatatgataacgcagcatcgatttctatctctccagtgtacggctggaacgaagatgatgacaactatatttacatggggaaatccagaggtgtcatgcatattgcgagctcagtgggcaggaatgcctccgggataagtatacagttgagcgatgcgccggaagatagatttgttaactttaacgatcctgaaggggcagaccgcatgctagtgacggcaactgataatataacacccggaatgaatagttttacaattccattatttgccagatatcttcagactcaacccatcattaagcctggggaggcaaatggaagagtaatatatacattgaattataaataa

SEQ ID NO: 203227 - DNA, 2526 bp, Klebsiella oxytoca
atgaaaggactaacgttccccggaactctgacatatttgtcattttcactcttatcactttgcttaaactcgggtcgcctgtatgggcaggatagtcgtcaactggagtttgatgaatctttcctgcagacaggtgaaaaagaatccattgatttggggcgtttctcgtatgggagcgcagctttccctggtcgatgggagacgagaatttacctgaataatgagttgatccagatccaagaggtctcatttgtcactggtgcagatagcagggttcggccatgcctgacggcagaccttatttcggctcttcctcttaaccagacgaaacttcccactaggctatttgaggacacatcagagagatgcatggaagtcccggcattcattcctgatgcacgcgtctattttgatagtagtgagcagagtctgcatatcgaagttcctcaagtctgggttaatcgattagcacgcggtacggttccaccttcgtcatgggacaatggtgtcccggcaatgttgatcggctacaacgtgaatggctatcagagcaacagtgcgggccatacctggaaaagtgtctatgccgggctaaatggcggactcaatatggggagttggtatctacgacataatggctcctggaggtgggacgaacaaaatggtgctcactaccagcgtattaatacttatctgcagcgggatattgcgcaaattaaaggacgattgcatgtaggtcagccaaacacgtctggcaggttgtttgacacgctttcgctgtctggtgtgacactagacagtgatgaacggatgctgccgcagtcaagacgtggctatgctcctgaaattcggggcattgcacgtaccagttcgcaggtaaccatacggcagaacggaaatttgctgtatgagaccacggtcagtcccggcgaatttgtgattgatgatttatatcccacaggctacggcggagatctcgatgtgactattcgggaagctgacggctctgagcaaaattttcaggttccttacagttctgtaatacagcaattacgggccggagtttctcgttacgaatttgccatgggtgaactgcgtagcgattacctgcgacgttcaccgcctctaacacaggcaagctggcagtacgggctgaacaatatactcagcttatatggtggtgcacagggaagcgagcactatatggcgggactggctggcggttctgttgcccttcctgtgggggcgattagtcttgatgtaacgcatgcacgtagtgaactggcccaggatgtaattcgcacaggggaaagctatcgtatcagctacagcaaaaatgttacggaaacacgcagtaatttctctctcgcagcttatcgcttttcgactcatggctatatggatttactgacagcgatgcaggcaagagagtatctcagtgatggcgaaagcgtggaacgtctacggaggacaaaaagtcgctatagtcttacagcgtcccagggattgccctcaggctgggggcagttttatctcagtacctctctgcagaactactggaatgccggaggaatggataagcaatatcaggtaggttacaacaatcgctggcaaaaattgatttggggtgttagcgcaaaccgaagctatagcgcaacaggcacctccagagacagtttcatgcttaacatgagtattcctctaggcagtgatttccgatcacccgttggacgtcttaattatgtcagcagcggcggtgggctgtatagctggcaggctggagtgagcggaacagcaggggaagaaagcgaatttggctatggagtcagcggtacaaccgccaataagggaagcggtagtagcggtgctgcaaatggttcctggcgaacctcattcacgtcattgtccgggagttacagttcaggtaggcattatcacagtgcctccgctggggccagtggaaccttgatcgcacatgaaggtggagtgacgctttccgcttatcagggagagacgtttgctctggtggaagcaaagggggctcacggggctaaagtcagtggctataacggtgtcgtggtagatcgtcagggttatgccgtggtaccacatcttaatccctatcaaataaataacgtagctattgatttgcagggaacagaaagtggtgtggagctggaaaatacgtctcagcaggtggccccccgggataaagctgtcgttaagatgcgctatcagacacgtggtggaagaccgctgctaataagcgtctcccatcgtggtgatcccctgccgtttggtactgagctgcgtgacgaaaagtctgttctggtcggttatgtgggccaggggggccagatctacgccagggtcgaaaatgcgagcgggcgactgcgggcattatggggcactaaagatgagcaacagtgctttctcaaatatacattgccaccggaagttataaataacaagagatctgaattatatgaattcagcgctgattgcctcagccatcaggaaggataa

SEQ ID NO: 203228 - DNA, 702 bp, Klebsiella oxytoca
atgaatttcagcaggataacggtatttaccggaatcgtaatggttatgttgacgtctccagcgctatccggtgtggtccttgatggtacgagagtaatttaccctgccgataagcgtgatatcacggtaaggctgactaacatgggggagcgtcctgtactggtccagagctggttggataagggtgatgaaagtgccacgccagataagattgttgttccttttatgcttgcacctccggtaaatcgtattgaaccaaaaagggcacagtctctacgtatcagtaccgttcgtggggcttctttgccccaggaccgtgagtctgtcttttggcttaacgtccttgaaatcccggcaaagcctgacactgcaaaagcaggtgataactatctgcaacttgcggtgcgtactcgcattaaattcttctggcgtccggtgtctttatcaggggcggcgtggcaggctcctgaagggatggtatggacggctgaaaacggaggcctgaaagtacaaaacccgtcgccgtaccacatctcgcttattgaagttgccttcaatggaaaaaaatatggcgcggacatgattccaccccacgaaagccagacagtctcaatcccctccattgcatctggtcattctgttacggcggtctggcttgatgactacggtgcacgtcgtgagaagcgttttactgttaattga

SEQ ID NO: 203229 - DNA, 579 bp, Klebsiella oxytoca
atgcagatgaaatatgtctcattatctgcctgtttcggtatggccctgttatccataccggcaatagcgtcagataccggaaccatcactttcactggttctattgttggtaccacatgtaatgtgaatattggtggttcaggagagaatgctgatgtttctctacgttccgggaatgccactgctctggttgctccagggtcaaccgatggtgatacccgtttttcactgcaactgagtggctgcgccggaggggcacccgaagctaccgcggcgaaggcctttttccagcccgggagtaccgttacggcggatgggcgtttgatgaacactgcggttacagatgcggcatcaaacgtcacactacagcttctggatgggcaggataacagtgtgatcaatattggtgactattcgcaaaccacacattctgcagggtacgtcaatatctctgatgcactttcaagtggtaacgatggaacggtagagctcccttattacgtacggtaccactcggagggtggcgtgacagccggagcggtcacatcgcaggtgacatacgccattacttaccagtaa

SEQ ID NO: 203230 - DNA, 294 bp, Klebsiella oxytoca
atgacaaaatcggtatcaacccaaaaacagccccgcaaacaacatacgcctgaatttcgtaacgaagccctgaagcttgctgaacgcattggcgttgctgcccgtgaactcagcctgtacgaatcccaactctatgcctggcgcagcaaacaacagcagcaactgacgtcgtcagagcgtgaaactgaactggctgctgaaaatgcccgtcttaagcgccaactggcggaacaggcagaggagctggctatcctccaaaaggccgcgacatacttcgcgaagcgcctgaaatga

SEQ ID NO: 203231 - DNA, 360 bp, Klebsiella oxytoca
gtgctggacaggatcgtggcaaaccgcggctacccgctgaaaatgcggatggacaacgggccagaactggtctcgctggcgctggcacaatgggccgaagaacacggcgtgatgctcgaatttatcaagccggggaagcctacacaaaatgcttttatcgaacggttcaaccggacataccggacagaaatcctggatttttacctgttcagaacactgaatgaagtacgggaaattacagagcgctggctgatggaatataacaacgagcggcctcatgaatccctgaacaacctgacgccggaagagtaccggctgatggctgaaaaaacggaactctcaaaaagtgcgtggaactaa

SEQ ID NO: 203232 - DNA, 345 bp, Klebsiella oxytoca
atgcagtatggcgatgagcactaccgtgatattcctgacattttgctggcgtatctggagcgggggcagccgcagtttgattcggtgatctgtggtaatgaccgcattgcgtttatggtctatcagacgctgttgacgcgagggatccgcatcccacaggatattgcggttcttgggtacgacaacctcgtagggatcggtaatttgtttttacctccgctatccacggtccagcttccgcactatgagattgggcgcttaagtacgctgcacattattaacggcgaaagccaccgtgagaaagttttggtcgatagtccccggctgctgcgagaatcattttga

SEQ ID NO: 203233 - DNA, 918 bp, Klebsiella oxytoca
atgaaaggaatttatcttgctgttgtatcgtgcgcgatgttttcatcgttatctttcgccaatctgggtacatcattaagcgaaaatgactatctcaaaaaacagtatctgaatggtaagagcgaattagttgaaggtgagaaaccgcagataaaggtagcaacttttaacattggtgctggtttagctaatcacaatatggatgttaaagatgttgccgaaggcatcaagaaattgaatgccgatctgattgggctgcaggaggttgataaactaactaatcgcagcggaaatgtcgatcaggcaaaggagttagcgaagataactaatatgcattacttcttctcaaaaacaattgatgttgatggaggggaatatggaacagctgttttatcaaaacatcctataaaacatgcccaggcgttcaagatgccatctggtgactatgaaccacgccaggttattgttgcagaggtaaatgtacctggttttaagatgcctgtacatttcctgaatatacacactgactggcatcatcaggatgcggtaagagtcagccagatggaatatcttaacgctttcactacagatgatgcagacgttaaggatatattccctaatctcttaactgggatcatgatagcggttggtgactttaacgatgtggataacagtaatagcattaacaagttaaggttattctgggatgaagtatctgttagtggaaaagatatgaggtcatggcctgcagctaatccttctttggcactggataaaatctttacgtcaagaggtcaggtgtggcaggttaaagatatgtttgtacctaaccaaccaagtgactggacaacttttaactggcctttagtcagcgaccatattccagttatggctacgctggaactacatgaatattaa

SEQ ID NO: 203234 - DNA, 609 bp, Klebsiella oxytoca
atgaaagtcacatggactgtcacgcctgtggggtatcagcacatggccaaacgctgcccctcctgcaatgtaaaacgcgacttcgccccttccggcgccatccgggtgaattcgcaaaagaagttgctggatgtctggagcatctatagatgcacgcactgcgattacacctggaatctctctctgttctcccgcctgccagtcagtaaaatagaccgtcagcttcactaccgtctgatgatcaatgatgcagcaacggttcaacattttgcctctgacatcgcaatactgaaacgaaacaacgcagagctatcagggcggcctgatttttgcgttcaggagcattggctgccggatattacggcccgtcagcaggtttacgttgtcatcaggatttctcactcttttcaggtcagcctgctgtcgattctgcaaaagcaattgatgcagagtacaggcgaaatccgtagaagggttgacgcgggacagataagcggcgttaccatgaaaatgcttaaatcgcgcaagctgaaggctgaggaatataaactcgtgttatctcttgaaacgttatattcgcggcgaacgatcgttctgatgaatcgttaa

SEQ ID NO: 203235 - DNA, 183 bp, Klebsiella oxytoca
atgaatactttacttgtaataaatcagcgggctcttcagtcatacccatcacccgtaattatctggcaaacgttactaactcgtttactggaacaacactacgggttggcgctgaacgacacaccgttcggtgatgaaagcatcattcaggagcacattgaggccgggattacacatcgttga

SEQ ID NO: 203236 - DNA, 339 bp, Klebsiella oxytoca
atgaaatataaaatggttacaggtttggcgctggcaatggtgctctttacatcaccaacagtgcatgctgcgcttaaccagcaggatcaactgtcagcgctggaaactgctgagaaggtctatgatgccatgctgggtagcggtgcagcagccgatgcccgctgggagacaccgaaacagttaaaagatatcagtgacccggttatacccggtaatcaactccatgtactcgaatataccgtgatggaccctgctaacggggcttatcagcgtattcatgttttagtcaatgtcgatggtggtgtagctggcgctgaaattatctatgctggccgctag

SEQ ID NO: 203237 - DNA, 546 bp, Klebsiella oxytoca
atgaataaatgcttttcaaaaaagaaaacactgattgcagtcgtaatcagtctcgctgctttcaattcctctgcagcctggacggtaaacggtacgttctgccagacgaacagtgaagacgggcgtgtgattgtccgggttaaaccctcgaccgtcggtttgattgaaatgaagccccaatgcaatgggcgcggtgcttttgggctgaccggcagcaattttggtgttaacgatacagtgtatccctccagcgtgatgtgcaatgcccagacgcagttctacacagtgcaaacgacgatggcgaccaaagacatccggtcgatcattaaatcattcagtaaatctgactctgtttctgtgaacacctttggcggtgctttttcagtaaatacggcggatttttctaaagtctgtgcttccattatcggacaacaggtcgcagaaaatgacccgcaggagacattaaagcgggatatgaaacggatgggatatgagcaggggcctgatggtcaatggcataaacgcagcctgacggcgacacagtag

SEQ ID NO: 203238 - DNA, 690 bp, Klebsiella oxytoca
atggaatcgccaacatcagactcgcgtcatgatcggatggctgtcagactttcagtcattatcagtcgtttgttgagtggtgaggcgctggtactgaaatctttgtcagaagagtttggtgtctctgagcgcactcttcgcagggatctacatcagcgcctgatacatcttgatatacgcaatgatgatggtgtttaccggctaagtgagagcaggctgcgagatcgttctcccggtgcgctttcatttatccgggcatcaggtatcgcccggatactccccatccaggataagcagttggtgaatatgctgattgacgagagcagggtatctccttgccttatctggcatgcccctttgaaacctcatgtcacgtttcccgagtttttcatccgtctggttcaggcaatttgtcaaagccagcaaatcacagtgcttgctgatggacatcggtatctctcactggagccttaccgactcatttattacggagaagagtggtatctggttgcatgccagtccagtggaatccgtgtgtttgcactgactactatcggtgcagtcacagtggcttcagaaaagttcattcaaagggatgatatcagcagcctgatctccggtgagggctttatcactgcgctaccgcatttcccgtttattaacgatgtcatcaatacctttcggcagtaa

SEQ ID NO: 203239 - DNA, 891 bp, Klebsiella oxytoca
atgtccaatatcctcaaacctcagcatgatccatgcaatattctgcgcaacagtcttggactgctgcctccgcaagcaactgaaagaatcctgttccaccttagtaaaaccatccactacgaacctgtgatcggcattatgggaaagaccggcgtaggcaagagttctctctgcaacgctctgtttcagcagcccgtttgcctgacacatgatttaaccgcctgtactcgtgaaccacagcgacttgaactgagcgtaggtgaacgcggtatgacgctggttgatttgccaggtgtaggtgagactccagaatatgatgaagaataccagtccctctatcgcaacctactgagcgaacttgatctcattatctgggtgctgcgtgccgacgatcgtgccagaaccacagatatcgatacatatcgtgcattgattgaatatggcgctgaaccatgtcgttttctgtttgttttgacgcaagccgatcgtgttcctccgctacctaccaccagcatgtcattgccttcaccagagcaggtgttatcactggcgatacttagctcgcagacggcagggcaattcccatcttcatttccgataatggctgtttcatcgcacaccggctacaacctgccagcacttgttgagctgatggtacatgccttgccgggacaggccagtagtgctgtttatcgtcagttaaagccagagcataagacagaagaagctgaaatcgctgtccgtcaggcttttggtgatatcgccgggacagcattcgatacggtatttaaccccgaggcgtattctcctggctgggccgttttactcaggcggcttcgtcggaaattagtccgcctcgctgagcggctatgggacaggatctttggttga

SEQ ID NO: 203240 - DNA, 681 bp, Klebsiella oxytoca
atggcgaagaatacaggaacatgtaaaaacaaaaactgtcacagccctatatcagagcatggagatgcaaacacaaagcgttactgcgaaaaacattatgaattatgcaaagaaaaaacaaagaagatattcgaatcacgcattagtaaaatagcagacaacttcatatcatctaaaaaacttacaaaagtgcagaggttaattgataataataaagtaagagaggagatagtcagaaaaaaagtaaaataccaatggatatcacagagcattagaagaaaaagtaatttcaacgatatactgaaatcaagggagtggaaaaatacgcagaaactgatgaaagggaaagtcattttgcgcagcaagaaagaattaaaaaaatacattcaaaatacgtgccagatatatttactgaaactattatacagcagaaagtatcttgataaggataatacacaccaaagatacattatatctccgaaaggcgaggcaaacccaattgtaacattaaatctcgaagttgcttactcattcaatccattttctaaggttagcacaagtagcaatgatataattttaattcctacgagaatcaggaaatccttcgccctaaaaaaacgttccttaaaaacaagcttacccacgctaaaaatcacagccataaaaacaacaattccataa

SEQ ID NO: 203241 - DNA, 477 bp, Klebsiella oxytoca
atgagagtcaagttaacgcctccatcttcaccatttatccgatacccaccatttctatactgtaatattgaagacttattacctctattccatctagcacaaatggaatatataagaatccataaaaaagaagaatcacatatctttataaaattaaaaaagatgcccactattaactggatttaccttgaggcatttgcactaataagttttcatgctttgatggctagaaatggaaaagatatactaaaaaaagcatcatcatggattaaaaatgagtcttcaaatgatatccaacaattttacataattaaaaagcaaattgaagaagattttaaaaacacattcaatgtagatatgtccgaacaacctgaattcattaagatttataattcatgtttcagtgaaaacgtggtcgagctccaccccacttcaaaaacaataatatcgataagaaaaaacatatttaaaaaataa

SEQ ID NO: 203242 - DNA, 234 bp, Klebsiella oxytoca; identical to SEQ ID NO: 84647

SEQ ID NO: 203243 - DNA, 591 bp, Klebsiella oxytoca
atgtacacatcagataaatacactcaaaactttactccaaacctgtttctaacagtgattctaaagaatcatatcaatgaaatgataaacaggtactcgtgcttgcgggcattacgtattgatttattttataagcgtaactccttccgttttcagcgttccgattatcgacaactggaatatgacgtacgggttctgatgcaggaaatgatggaacaaaaaggcgttgttgggtatttctgggtaattgaatggacaatagatcatggctggcatgcgcatgtagcgttctggttagatgaccacatcacacaaaccacctggcctacatgtgaaaaagcgtcagtcatctggaaatcgataaccgaacaggaaggtggctttcactggtgtaaattcaaagaaaactaccaagccgatatcaatatcccggtttgctataacgatccatatagtattgagaatatccatcaggtcctcggttatctggctaaagaagaacagaaagacggattttacatctatggctgtagtgaagttcctcctcgtcctacatccggacgtcctcgggcacatcagccaaatctgtag

SEQ ID NO: 203244 - DNA, 414 bp, Klebsiella oxytoca
atgacgctcttttttaccagtatcccttacgcagtcacccttacagatggtgaactggttgatgagaattactcaggccacgatccgctggtatgtgaattctgcggtgtcccgatggaacggatcattggccccgatgactctcaacattaccagcatgtcctgcacggtcagtcagcagcaataaaagccatgcactgtaagtaccgccattatcttacaggagggtcgcagccctaccaaacattgaagccacctggcgaatcactacagattccgcagtgggttgcgaaagcaataccttcccgaacgatgactcgtaaatggcgatgtgtattgtgcaatcaccgttattacggcaataaacagtgcccaaactgtggtgactggacatgcactctcgccacacattaa

SEQ ID NO: 203245 - DNA, 552 bp, Klebsiella oxytoca
atgttctggaatatagtgaagttgttcatcatcgtttgcctcatagggttaatcggtgtgggattctggtatgggagatttgttccatttgctcagcagtccccactttttgaggctctcagaacgactgcgtcaataatatttgcggttgtgggagcgtggatggcaatcatctaccctgaaaggttgcgcttcacatttaaaccagacagtagtgaatcaacatctatgcctgtcaatatggggaagctattgcatccagctgtaaattctacatttattttgtgcattgtactaatggtgggagttttggcaccattgattaagcaagtctcttttctgctcccccataaggaattactacgaggggtgtcatttagtttgctcattgcacttacaacttggcagatatggaccgttattttgacattggttcctgctgatatgattaagagtaaagtggatcatgaaaattcgaaagctgctggccgtaaaagttttttttctcaaactcaaagtgttagtgatagtaaaaagcaagatgtagattga

SEQ ID NO: 203246 - DNA, 1050 bp, Klebsiella oxytoca
atgagcgagtctgttaagtttagtttttatcaagttgatgaatgtggttattactcatggggaaacagttctccagtttttgggtctatacaggaactgctaacggaccttctccactggagtgcggacaagagcattgaaaataccaaattgtatgaaccacaagtaggtagtgactatctctcaacttatttgtttgatatcaagtgcatgggtgaagattggttggttactacttggaatgaagtaccatcaactgaagccggtatagcatctgttataagggattcaagtgttactgcacctgatgtgatcatgaaccgtatacaggataactccatcccaggttatgcgacatatttttggatattaccgaatgaaagcttgtttgctagtttgcggttcaaaaaacgtactcaaactgggcaacaaccatttagaaagtatatggagcaggcactttctttgatctcttcttacgtcagatatggtgaagatggagtcgatgactctagacaggtgattggttacgcaccggtaggagaggatttgattagcccaagtccttctcctcgtttcaaaacttctcttgcgcatgatgtcggtaataggcagttcatcagggaaaatgctgctcgagttagcaaaattattcgtaaagagacattacgattgaaccacgatgatgaacgccaatggtggcaatcagccttaagccgtttggggattagcagtggtagcgattatagaagaacagacgatgtgaatgtaaagtatgagttacgtcctgagttttttgatttgcaacaagttgatttgatgatggaagagtgggatgagtctgagcctacgcgttcagagtgggatgattatggctttacttttaaaggtgatgctaataaggtccactggctgagctatagtacactaacagcatctgctgaattgaatgttgtttgggataataacgaggttgttaatagtgaatcgttgttatcagttttaactgctggtaaagcagagcttctacgacaaatacgtgaggagtaa

SEQ ID NO: 203247 - DNA, 4638 bp, Klebsiella oxytoca
  misc_feature (287)..(296): n is a, c, g, or t
atgactaggcatgagatccaagatagatgcccagagttgttgataaccaactattccatgcttgaatatatgttgatgcgaccaattgagcgtaacatttttgaacagacaagagattggcttaaagctgacgatgagaatgaacttatcctcgtacttgatgaggcacatatgtatcgaggtgcagggggagccgaagtagcgcttctcattcgccgcctttgtgctcgtttgaatattcctcgagaacgaatgcgttgtattttaactagcgcaagccttggatnnnnnnnnnnccttggatctatcgaggaaggtgaacattttgcacaagatttaactgggttgtcaaaaacatcctcaagaaaatttcgaataattgaaggtacacgggaagtaagaacacccgctcgaatggtttcccaaaaagagcttaaagcgctggctgaatttaatcttaattcatttcagaatgtagctaataatattcagtctgctcttgacgaaatagatgttcttgctgaaaaaatcggttgggataaaccaataataaaagatcacaacacgctgcggaattggttgtttgaaaaacttaccggttttgaaccacttgaaactctaattgaaagcgtttctggaaaagcagtgagattggattttctaagtgaacaagttttccctaatttcccgcaagaaatggcaatacgtgctctagattcactgcttgcattgggctgctatgctcaacgaagctctgataatagagtgctgattcctactcgtatgcatcttttttttaggggattacctggtctttattcctgcattgatcccgaatgtaatcaacgactagcaaatcacagtaagcctacaatacttggacgcttgcatacgaaaccgttagatcattgtacatgttcatcaaaagggcggatctatgaattacttacccatcgtgattgtggtgcggcatttattcgtgggtatgtcgatgcggaaatgaattttgtatggcatcaacctaacggaccattatctgaggaaggaagtatagatttagtttctatagagattttagttgaggaaaatccacaccccaatagtgaatatcaagatcggtggctacatatcgaaacagggcgtctttttaaacaatgccctgataatagcttagggtatcgtaaggtatttataccagacagatttaagccgggcacagatataacattcgatgagtgtccggtttgtatgcgtaagacaagaggtgaacctgatgaaccttcaaaaattatggatcatgtgaccaaaggtgaggccccttttactacattagttcgaacgcagatgtcgcgtcagcctgatagccgtccaacggatattgcacacccaaatggtggaaaaaaagtactcattttttctgacggccgccaaaaagcagctagattagcgcgggatattcccagagacatagaacttgatttattcagacaatctattgcactcgcctgctctaagctgaaagatattactaaagagcctaggccaacacctattctttatctcgctttcctatcagttctatctgaacatgatttactcatttttgatggagaggattctcggaaggttgtaatggctcgtactgagtttgagcgagactatggtagtgatctagcagaggcctttgatgatgattttagaccacaggacccaccgtctcggtacaaaatggcgttgcttaaacttttatgcggcaactactattcactttcaggaactactgtagggttcgtcgaaccattaccagctaaaaaggaaagaatatggaaggaagtccaggggaaaaatattaagatcgaaaaaagtgatatgaatgccttggctattgcttggattgatacattactcactgaattttcttttgatgattctattgattcagctttacgctgcaaagcagctggtttctataagccaaattgggggagtaagggacaatttggaaagtccctgagaaaagctctaaagcatcatccggctatggatgaatccgcagtaaataaattggaagaaatcttccgtaatcaattagcatctgaaaaagatgggacgtggtatctttcaccaaattctcttcgtttacaaattgatctttcacatatatggatgcagtgtccagattgtacggcacttatgccattagttttgggcaaatccacttgtcttgcctgtggtagtaacaatgttaaatcagttgatccgttagaaagcaattacatcaaagctagaaaaggattttggcgttcaccagtagaggatgctttggtttcccattcaaggcttctaaaccttaatgttgaagagcatacagcacagctatcacatagagatcgagctagtgttcatgcaactactgaactctatgaactccgatttcaggatgttctaattaacaattctgataggcctatcgacgttcttagttgtacaactacgatggaggtaggtgttgatattggctctttggttgctgtagcactaaggaatgttccaccacaacgagaaaattatcagcaacgagcaggtcgtgctggtcgtcgaggtgcttctgtttctacggtcgtgacatattctcaaaatggtcctcatgacagttattattttcttaatcctgagtacatcgtcgcaggtgcacctagaacgcctgaagtgaaagttaataaccccaaaatagccagaaggcacgtacattcattcttgattcagacatttttccatgaaaaaatggaacagggtgttaatagccctagtgaaaaaacatctatattggaaaaagcgcttggcactactagcgattttttccatggagcaaaggatactggtctaaatttggattgtttcgatcgctgggtagaggatcggatactctccgagagtggtgatctgagagcaagtgttgagagatggcttccttcagttcttgagactaacggactttctctcggtgagtggttatctactgtctcaaaagagtttttaaaccaacttcatagcttagctgaaaacgtgccgctaccaattgttcttttagagcaagagagtgatgatgatattgaagataaatttgagcaaaaagagttgcttgaattcttattttatcatggtctattaccgagttatgcttttcctacgagcctctgcagtttcttggtagagaagatcgaaaaaagttccagaggaacttatgaggttcgtacggtgcaacaaccgcagcaatcaatctcacaagctcttagtgaatacgcaccaggaaggctaattgtcattgataggaagacatatcgctcaggtggagttttttccaattctccgagcggagaaattaatagagcgaaagtattattcgaaaaatctaaaaagtttgttcattgtgataaatgttcttttgttcgagatcctcataagtctcagaatgataaaaatgtttgcccaatttgcgaaggtattctcaaagaagagataatgattcagcccgaggtcttcggagctgaaaatgccagagaactgaatgaggatgatagagaacaagaaattacttatgcaacagtagcacagtatcctcagcccgttgatcctgaggattttgaattcagaaacggtggggcgcatatcctttttacccatgcaattaaccagaaattggtaacggtgaacagggggaaaaatgatggtcaatccagtggtttctccgtatgtactgagtgtggtgctgcttcagtgtttgattcctactccccagtaaaagggccgcataaaaggccttatagatataatgaaaccaaagagacaccgccacaatgttctggtgaatataaacgtgtttttcttgggcatgatttccgtactgatttgcttttactaaggttaactgttaattccccacttgtaactgacacttcaaatgtgattgtgcttagaatgtacgaggacgcattatactcaatcgccgaagcacttcgactcgcagctagccgccataaacagctagatctcgacccagccgagttcggctctggtttcaggattttacctgttgaggcagaagacgctcagacgttagatctttttctttatgatactttatctggcggtgctggttatgctgaggtcgctgcttctaacctggaagaaatacttatagcaactctcgatttactcgaaggttgtgagtgcgacacttcctgtacagagtgtttgaatcatttccataatcagcacatccagagtcgccttgatagaaaactaggtgcttccttgctccgttatgcaatatacggtgaagtgccgagttgttcctcaaatgatattcaggtggaaaaactgtcacagttaagggcgagcttagagctagatggttttcaatgctcagaggatagggccttggacgtgcctttgctcgtttccttaaatggccattctgtagctttgggaagctatcctggcctgattgaccgacctgagtttaagcatgatgtctgtaattgcaaaaaagtcgatgatcatttggcgttgaacgaatatcttctccgttcaaatcttcctcaagcacatctcaaagttagaaaattgttacgataa

SEQ ID NO: 203248 - DNA, 741 bp, Klebsiella oxytoca
  misc_feature (557)..(566): n is a, c, g, or t
atgattgataaaaataaagtatctgatcgttctggcatacatgagacagtgagaagtctaaccgataatttgcggcaatatatcgaagcgcaatatcatattcgtgatgaaggcctaatcgacgaacgtcgggctctacttcagaaagacgaaacaattgcacaagttccgtatattgaagcaacaccagtttatgaatctggaataacatatagtgaattacctattcctaaagttgcaagtgatattttgactcagttatcggaaatgggagttggtctttacccacgcccttatcaacatcaatctcaagcacttacttcatttcttggggatgaaaaatcagatttagtcatagccacgggtaccggctccggtaaaacggaaagtttcttgatgcctatcatcggtaatttggcgattgaggcaactgaaagacctaagtctgcatctatgccaggttgtagagctattttgctatatccgatgaatgcattagtaaatgatcagttagctcgtattaggcgtctttttggtgattcagaggcatctaaagnnnnnnnnnncctgtgcgctttggcggatatacgggaagaactccttacccagggcgtcgaagttctaaacgagacgaacagtacattaagccactattcgaagagttttataataagattgcaaacaatgctcctgtgcgagaggcgcttgaaaaaattggtcgttggccaagtaaagacttag

SEQ ID NO: 203249 - DNA, 1029 bp, Klebsiella oxytoca
atggaatggacggcagtatcacgagaagaatctcttaaaattatttcggctgcgataaaatgccgactctctaatgaaggattgagaatctcaataatctctgagtgtttgagaagtgtactgtaccaatattctgtttctgatattaaggatactagagaagctgtagcctctcttcgcctcactaatgcagtaaggcgaaagctagcgccattatggccagatgttttagattgtagcaatgtcatttatcctggggctttggctgtgcttgaaagtatggccgaattaggtgacatgattaggttagagggcggtaaatggttgactgcacctttacatgctgtccgtgttgataataagatggcaattttacttggtggagatccatcatatgctcttccattagatatggatgtaaaaactattggtagagtaagactagtcgaacaaagagtttgcaaaggaatagtggagctatgggatgcaaatgagtggataggagctccagttgaaggccatgaaatatggatgtcaaatctgttttcgcgtacatgctctcgattaacggatgttcctaataatatcggagatgtaactgtatacgtaaaaggccgttggcttaaattatcagaaataccttcttgtgaaaaaaatatattgctatgcaggctcgctattggtaccagtttctcatattttttgggggagttcgtggatggagaactatcgaggatgagttctttggagtcatctgatgatgctagaaggttacgcttctatcaggatataagggaagcttgttcattgaaaataaaaataaaaaaagataatggactaataagaatgaaactggttagaccattaccaagaagagagtcaaaggtgcttatgctcggctggcgtgagtcaggccataaatatgagccctcttggatagcacactatatatttcctgaggaagtattaccgatagtgcgttgtacttttgaaggactcggaattgttttagttaatgaatctaaatga

SEQ ID NO: 203250 - DNA, 249 bp, Klebsiella oxytoca
atgaatagcaaaaatgttgagctgaatgctgccaaagaaaaactggctaaactgattgatcatttgtacgttttagagcgtgaatacgacaaagcgcttgaacatgctgcaagctatcttggatatgatgagaagatagaaaaggtcagagacgaaagggctagcggtgtgtacgagaatatcaatgaagttaaaaatcagataatgaatcaaaccaaattaattgaagcgctggtagccgactattga

SEQ ID NO: 203251 - DNA, 768 bp, Klebsiella oxytoca
atgaataacgataccctgaacgccctcattctgcgccacggtgacaatctgctgcaccggtccggctggcccgactcagttgatatgacgcccgtcgcgccccataccgtacccggctggctggtcgcctgcggttctctcagcggcgaggaaatcctgacgctgacagagcaactttgccagccgctgacgtatggccgggcagcgctgctgacagccagcgcccggcgcctggtcgggacacccgcgcggctacatctgtatccggtccagcgtttcccgtacccggagcggctggctgactgtcaggtcatccggctaccttatgcgcaggagtggctgaccgcggcggaatgtgacgatctgctggccttcctgaaagacttcactgaacgggtgtgtgaaatcgttcggcaggacgcgcagcgcatcgcggcggcactggtgccatctgccgcgccgcggctgatggaaaaacgtttcggagactggcgactggttgcggacgaatacgggcatgacaactggcttgacagtgaggacggggaacggctggatcaggtgctggacgacatactggtccgggaggcgcggttttgtccggtcctgctcaccctggtgaatgagtcccgggaagaaatcgaagcggccggggtgatgaccgatcttctgcgtttcccgggggaaccggttcgtcgctggtttgaccgccgcgtgttgcgggatgtactgaacgaggtgcgcaacacagatccgatcggggattaa

SEQ ID NO: 203252 - DNA, 405 bp, Klebsiella oxytoca
atgatgtatggcacccgtaaggagctgaataaaaagctgaaatgtatgtttggtaacgatgaacactttgccctgctggtctggacgaagcaggacgtgatggcccaggtggaaaacatgacagagagcgaggccagtgccattttgcaggagatcggcagcgtgaccagtcataccgaagagggcatttcatttcgcacggtccaggagatgtatgtcggattacgggccgaaataccgactgtcatcgttcccgccgacctgctggcccgtctgactgacgtcgcggggatggcgctgaacacagaggaagcccgggcctggccgcttgtttaccagcattacccgtccgtggctgatgcccaggccgatatcacgtggctcaggcagctcctggccgcctga

SEQ ID NO: 203253 - DNA, 420 bp, Klebsiella oxytoca
atgtacggaacctgtgaaaccctctgccggttgttgagtgagcagtatcccgcagaaaccccgatgaacctggttatctggtccccggcggatatcgaagcgctggcagacggaatggaatgtgccgtttctgaacaggacataaaggacgttctggcgcgtctggacgccataccggaagaagaacggcttgagtcgggcgtgtctgccagtgcggtcatggatttgattgctcaggtgaaacaggccgttccggcggtgatggtgccggctgacctgcttgaaaccctgctgaccactgccgaacaggcgttatggcacagggaatggaccgcccgcgacggcaatcatccggtgccggaaagcgtgacccgccgcctggctgatacggcgaaagtgcgcgccttactgaaaaactga

SEQ ID NO: 203254 - DNA, 222 bp, Klebsiella oxytoca
atgaactatgccggacacgaaaaactccgcgcagacgtggcggagctggccaacagcatgagtgacctgcgggacgcgctgaacgacatggagaaccgctatcgctttgattctgatgtgctgaccgaacgcctggcccgtcagacacttttccgtacccgagtcctgtttatggcggcgtacaacgaaattcttgagctggatagctgctttaaggactaa

SEQ ID NO: 203255 - DNA, 348 bp, Klebsiella oxytoca
atggaattaaatctgaatacctggcttgcgggattaagtgtcgacgtcggtggcactgaaatgatggtgtattacctgatttctgtgactgacctggatcatgccgaagcgggcgttctggaaatggggcgcacctggtggccatcgctgaagcgcgaggatgaccggcatcggtgggagtatcccggcggtgtggtctggtttaacagcatcgttctgctcgacgatgtggagaacagtatcctgcgcggcctgaagttcctcgatgcgtggacagtgaccggcgctccagatacgccggtactgcgcgacgagtggggaaatgactggcgggatattacccgctga

SEQ ID NO: 203256 - DNA, 936 bp, Klebsiella oxytoca
atgccgaactggtgtgccaaccgactgatgttcaacggtattcaaagcagtgatgccctcaaaatgtggattgccggaggtgaaccgtctctgcatagccgcgccagaaaagaaggtatccagcttttccttgcaggctgcgcggggatactgcgccccctgacagaactgtgttacccaccatacccgcagctggttgctcacgggatggccgcagacaaccggccttcagtgcaggcgtacagcgactggctggtgatgtttatggccggagctgtgctggatatggaaacctgccagacgctgcatcagtgctggctggacagccatatcgggcatgcccgctgggccaccctcagtgaaccggaacagcaggtcatccggcagctgtaccagcaaaaatcatgcgactggggggacagtttccggcctgcgccggtggatgaatggtgggacagcctgtgcgacgtcggttctgccgtacttgctgctgatccaatggatttccgcgatgtgctgccgacgcgtctggatattgaggtgaacgccttcaacggtggcctgctgacgggtatcccgtcgtcatatgaccactacctgacccggtacgggtgtaagtggcctgtgggttatgagacaaatatctgttttgccggagagaacacgctgacggtggattttgataccccctggagtccggtcggcgaagacgttgtggctgaactcagtcagcggtatggcggtgaggtggagcactggtttgcggagcagggctgtaattactgcggttatgcccggtacgtcagcggcgaaacggacgtttacatcacggacgagctggagtggggcgagactgacccggacgatgaggacagtttcccggacgtaaccggcccggagtggattatcaacaacgtggcacattttggtggctga

SEQ ID NO: 203257 - DNA, 423 bp, Klebsiella oxytoca
atgttactttttgtcgccccaaaacaggagccggtgcagtccactgccccgctgttcaccgaacgctgcccggcgggttttccgtctccggccgccgattacacggaggaggaactggacctgaatgtctggtgtatccgacgtccggcctcgacgttcttcgtcagggctatcggggattcaatgaaagagatgggcctgcattccggcgatctgatgattgtcgacaaagccgaaactccgctacagggtgacattgtcatcgcggaaaccgatggtgaatttacggttaagcgcctgcagctaaagccccgtatcgccctgctgccaatgaaccctgcctaccccacgctttatccggaagaactgcagattttcggagtggtgacggcttttatacacaaaacccggagcacaaactga

SEQ ID NO: 203258 - DNA, 972 bp, Klebsiella oxytoca
atgaaacaggttatagcccgtggtcgggttctgggaaacagtaattcagagtttgccaggatgcttgaaggcgacggagaagttaaaacgtttacccttaaatcaggcatgcaggccaggtttgtcaaaacggttgtgttaagcggtgaagtcgaatcaaaaacgttcgtagatgcttcggttaacggacgtgatcaggcaatgcttacgcgtgagtccgtgagtgatatttccagaacgataaagctacagcagttcttcccggctataggacgggaggttaatgggcgaattgagattttagacgggacccgacgtcgtgcagcctgcatctttaacaacgttaaattcgaaattctggtaacaaaagatgatatatcactcgctgatgcacggcagctggcgaaagatatccagacagccagagaacatagtcttcgcgagttggggaaacgactcgaagtcacatacggaaccagtatgacgaaagaagatattgcgttgaaagaaaatctctccccggcgaaagtgacacgtgcgtttcaggccgctgctgtgccagacgaaatggtcgcagtatttccggtgataaatgatatttcgttgtcggattatcagtttttactgaaactggctgaagaagcaaacaataagcaaatatctgtaacagaactgatggaaaaagttcagcatcggttgaagaacactccggattatccggcaattgataaaagcaaaatcctgtcgattatcagggcagagagcaaattgctgtcaacccgccctgccagaacggttcaaaccgagaagctgaaggaattttcagatcgcaatcagtttgcaagaaagaaaacagattcgaagaagcgtcttgttgtttatgagttttcccgcatttccgctgaggtacaatcggagattgatgaggcaataaaacgtattcttgaaaagctacctgcctcaggtgagtaa

SEQ ID NO: 203259 - DNA, 1830 bp, Klebsiella oxytoca
atgaggatcgatgttcgcctgagacgtaacggcctttcccctcgtcagttatttttcattgaatgctggggaagccttgcccataaagaaagtacggatactgacagggttgggttcaataacatccttaatgcaattaatgaactcctttcactattcccgcaaggtaataaatttaaagggcaggataaacgcaaaagagcagcgcaggagctacttgaactgctgaaagaagacgtagttttatctgatggccgttttgaaagcatacccgatcagcttaaaaatatgctggatattaaaaacgcctggtcggataaagaacgtagcccggtggaaaaaaaccagggcttgatggaaagtttattcactcagttaaagctgaccctggaaaaacactatttacctgcaagtctggaacgcctggaagcagaactcggcagaggggatgtcccgtctgatagtgattatgcctgtataacgtcactctgtaataacatcatgagttttcttctgacgctgggaatgccgctgacggagtgctcattgctgtattcgcgtatcctcatgaattacaagcaaccttttgacgtccgctttaaatcctgggcagaaaaggtgaatgtcagagcgcaacgatacatcgtcagcattatcatggaaaatgaaaaactccatgacatgttacaacaggccgggaaacatatcttattcaacggctgcaggtattttcattttaccagtgacaaaggcgtgccctctgccagagtcgaaattgaggttcaggctgtctccgttcttgcggcgaaagttaaggccgattttgttctcaaggattctcttgatgttgtcgcatatatgctcggacgtggacaaatcaacatacacagcgcctttcaggtcagggatgaagctggaaatgaaacaaacataccgggattcagtaatgagatcctgacgaacagcgatcgactgacgatgagtgaatttggccattttatgtcggctataaccggtttgttcaccaaagcctcacctgaatctgcgagaaaagtcagttctgccttccattttttgcgtaatggtctgattaacaaaactacacaggaaaaccagtttacttcattctggtcagccctggaggcgctgacactggatgtttcctcccgccagcttgatcatgatgagcatgttgtttttaccaccccgccctgtatgggactcgattatgttgtgaaacagttgatttcattgagaggtattgccagacaattgaaactggagttgccccttctggatggacgccgtgtccgtcctggcgagtctgatttggatgatatctacacttacctgaaggacagcgaattcactcgtcagtttggaaatgcgttaagtaattatccctatgcgtcatatatgctgaggaagtttacggcgctttgtgtccagcctcgtgaacttgggaagaaaattatccgccacgcagaaaaagtggagcttcacatttatcgactttatatcttgcggaatgcgattgtccataatgcagagtcaaacccttacattcagtttttgaccgtcaatcttgaacactatcttcgtggcacgatcaatgccatgttttataccgcttcaatgcttcctgttattcgctcaccggaggaggctttccagcgatatcttcacatgtacgaaattttggtaaatgagctggagcccacatttggcattcctcccggagagcatcgcagcattgagtcattgataggacagaacaaaataacccctgctgattcaaaactaaaagcttggttaaagctacacaagtga

SEQ ID NO: 203260 - DNA, 690 bp, Klebsiella oxytoca
atgactgactggtttattgccaccgaaggtgtgaaggtcgtgaaggacagcgccagtctgtggccgcagatcatcacggcggtttcgagcattagcgctgcgctgggtggtgtcagcctgacgcatcactatacccgtaagcgagaggagagagccgctgcggcgaaactggaaagtgagcgcctgtatatcagtaccgggctcgtttttttgctggagaggtttgcgcagcgttgtgctccagcagcaactgcagctgtggagtacgatcaggatggcagaggagaaactgagttcttattaccggaaatcgattattcctcggtatctggtaactggcgctcgcttccttcaggtctgatgtaccggctcagcgaactatctgttcttagtcacgaagctgtcgtgtgtgtagataatgagtttgtcgaagatactccttatggtggagcgggtgaatatagtttgcataaaaacgcagctatgttgggagtaaaagcactgcggttatcacgagaactgagaatgttatgtggcctccctctgcacggcatttcctatacgctatcgccaacgaggttggtattgctgaaagtcagaggtaaaaaactccaaaaggagtacgaaatagtaaaaaagcataaaaaaaacgagcaagagattgatgatttcataaaggggacatcatga

SEQ ID NO: 203261 - DNA, 303 bp, Klebsiella oxytoca
atgcaggtatcgaaatacagaacagctgacgcgttaattcaggaactccatgaggaaggacacgatgtcatctatgagcgaaccactgaatatccggttctgaagggggtcgcccagatcccaccggcaaaacatttactcactcaggaaggatacgtcgtcgggatcttcgttgaacctatgggagtatggcgccggcgtgaaagcgatgactgcgttagtgatgaacctggtattgaagacaaccctttcaaggtgaagcacgatgttaatgcgccccggaaaataatacggcgcctgtag

SEQ ID NO: 203262 - DNA, 828 bp, Klebsiella oxytoca
atggatacgttcaagttaaaaccctggctaaatcgatggaacctcattcctgatggtactccatttataactcatacatcccagttatatccggtcaaaacagcagcacatggtgttaaggctatgttaaaagttacggatgatactgatgaacaagccggtaatgcactaatggcatggtgggaagggaatggtgcggcacaggtttttgcccatgataatgaagctattcttctctcaagagccacaggttccacgtctttatcagctatgtcccgtgaagatcaggacgaggaagcatgtcgtattttgtgtattactgcgaaccggcttcatacattccccaaaagaccattaccccagcttacgcctctacatgagtggttttatcctctcaagccagccgccatgaaatatggcggtatcctgacacgttgcgcagaaatttcggaagaattgctttcttctccacgagacgtggttgcattacatggtgacttacatcacggtaacgtgcttgattttgaaaaatctggctggttggccattgacccaaaaggactaataggtgaacgaggattcgactttgccaatatttttactaatccggatctgggtaatcccgagcctcgggtcgcgactataccggagatatttaaagagcggctaaatattgtttctgagacggcagaactagacagagatcgccttctcaaatggataattgcatggtgtgggctttctacaacatggtcccttgagagtaatgatgcaacatcaattgcagcaaatgttgctaagctggcgattaccgaattggataagtaa

SEQ ID NO: 203263 - DNA, 468 bp, Klebsiella oxytoca
atgaaaatcagaaggttcagtaatggggatgaaatatcgttattcagagtttttttctcatcagtacatacgatcgcatcacactactacacacgtgaacaaattgatgcttgggccccagcagatatcgacctggagcgatgggccaatcacattaaggaattacaaccttttgttgtagagctggatggtgaaatagctggatatgcagatgttcaaccaaatggatacattgatcatttctttgtatcaggaacctattcaagacagggggtagggacactactgatgaattgcattcatgaggaagccagacagcgtggaattagtgaacttacttcaaatgtaagtaaggctgcggaagtgttctttctacgacacggctttcatatagtggagcgaggctttcctatttgccgtggagtgacattacaaaatactttgatgaggaaatgtttggcgaaataa

SEQ ID NO: 203264 - DNA, 1437 bp, Klebsiella oxytoca
atggtccagagtaattcaccgctgactctaaatcttactgagttagcaaaagcaattgtgcgtaaagaataccgcgcttctaatgtccttgagcacgctattcagcgaattgagacttacgattcaaccctccacgcattttgcactactgattttgattccgccagaaagcaggctgaatcagtagatcggctaattagtgctggaaaatttgcaggccccctggctggtgttcccgtcgccgtaaaagatttgatttgcacggaggggttgcggactacttttggttcgcaattgtatgccgactttgtgccagaagaagacgacatagttgtaaaacgccttaaagcagcgggtgctgtcattctcggtaaaacaaatacctcggagtttgggtacggggcagttggccacaataatttattcccgacgacaagaaatccctggaataccgatctaacgcctggcggatccagtgcaggttctgccgttgctgtttcggcgcgaatggtacctcttgcattagggagcgatggcggtggctccatacgtatccccgcatcactcactggtgtctttggcatgaagccttcctggggccgggtgcctctctatccaagttgtcgggatgaaagatatccggggcaatccggatgggaatctttagagcacattggccctataacccggaatgcgtcagatgcggctcttgctctttcgacgttgagtgggccgtcacagtatgatcgtcattcaatcccgtctgaatcaaatgattggggattaaaaggattagatgacctaaaagattgccgaattgcttatacaaccgatcttggttttgcggttgtagagccggatattattgcagcagttgaggaggccgcctaccgactgagtagtgtatttggctgcgtgaagagggcatttccgctaataggaaataacgaaacgttattagatactattgttgcaatggaaacggatcgtcgcgggttgaaaacgatggctgcggctaagggcgtcgaatttgatggctggcttggtagtattctcgaacgctcctggacgggagaccagtttagtgacgctctttttgaaagaaaacgtgtcgttaatgctatggcaaaatttatgagtgattatgatttcctgatcacaccaacaacggctacagcggcatttcccataaattcatttggcccatcgcacattgctggacaaatattaccaccttcggcatgggttccgttttcagcactagccaacttcacaggcttacctgctgcttctgttcccattggttttacggaagatggacgtccaattggtttacagattatggggcgtcatttggatgatatgggcgtgcttgccctggctgcgattgtggaatcgttgtttccaaatgaacaatggcctggccctgccttatag

SEQ ID NO: 203265 - DNA, 591 bp, Klebsiella oxytoca
atgtttagcccaacagaattaatgaagcattatgtcattgatccgcaggatagctattttgttaatggagtaccgccgattgagaatgttgcggtcgttgcttatgatcccttgtggccgaatatatattcaacactggcatctaaaatcatgattgaattaggctcaaatctacttgaaattgatcatgtggggtctacggcagtacctggtctcgcggctaaatccattattgacattgatctgacggttgccgatgctgctgatgagaaaacttatgtatcagcgcttgaaaaccttggatataggctaattgttcgtgaaccccgcttccatggtcatcgtctattccatcatgataatccgagagttaacctacatgtattcacgcaggataccccggaaacagcccggcatttgcttttccgagattggcttagacagtccgagaaggactgcaaattgtatgctaatgccaaatttgaagcagttaaagattgcagttttgatattcaaaaatatcacgagaataaaagtaaagtggtgcatgatatctatcagagaatttttaatcacttaggctttatttga

SEQ ID NO: 203266 - DNA, 828 bp, Klebsiella oxytoca
atgaataaatacaaattccaaccctggttgaatcgctggaaactcatccctgacggctcgccattagtaacacatacatcacaactactcccggttaaaacatcaaccgatggcgtaaaagcgatgctgaaaattacagatgatcaggatgaacaaacaggtaatgcacttatgacatggtggggagggaacggagctgcgcaggttattgcctatgaaaatcaggcaattcttctggagcgcgccacaggtccaaaatctctgtccactatgtccagagaaggtcaggacatagaggcttgccgtattatatgctttacagcaaaccgattgcatacatttcaaaaacaaacaaaactgcaacttacgcctctccatgattggttttccgcattaaaaccagccgctcgaaaatatggcggtatacttacgtattgctatgaaatatcggaaaaattgctatgcacgcaacgtgatgtggtcacattacatggtgacttacatcatggtaatgttcttgattttggggcatcaggctggttagcgattgatccaaagggtctaaaaggtgagcggggatttgactatgccaatatttttacaaatccagaccttggtaatccggttcccgaaatagccgttgtgccagaaatatttaaacagagacttaaaattattacagaaactgcggatctggataaagagcgactccttatgtggatcagcgcatggtgtggactctccgcagcatggtcgttggaaagtaacgccactgtatctgtgacaacgaaaatagcagagatggcaatatcagaactgcataaatga

SEQ ID NO: 203267 - DNA, 471 bp, Klebsiella oxytoca
atggaaatcagaaggttcagtaatggggatgaaattgcgttattcagagtctttttatcgtcagtgcataccatcgcatcacgctactacacacatgaacaaataaaggcgtgggctccgccagatatcgacccggaacaatgggccagccacatgagggaactgcgcccctttgtcgttgaggtgaatggagaaatagcgggatacgccgatgttcagcccaatggatacatcgaccatttctatgtatcaggaacctgtcctgggcaaggtgtcgggacattactaatgaataacatccatgaggaagccagacaatcagggattagtgtacttacgtcaaatgtaagtaagtccgctgaacagttctttctgcgacacggttttcatttggtggaacgaggctttcctgtccgtcggggcgtgatattacaaaatgcactgatgcgaaaaaacctcgcgaaacaataa

SEQ ID NO: 203268 - DNA, 1056 bp, Klebsiella oxytoca
ttgttctttaactatccaccgatcggaggccttctggacaacgacaatctcgatataaaaaagctgtttgaagaggtggacaaatcctccggcgaggtcgtaaacctcacgcctaacgccagcaataccgtacaacctgtggcactgatgcgtcttggggtgtttgttcctactttgaagtcactgaagaacagtaaaaaaaatactttatcccgtactgatgcgacagaagaacttacacgtctgtctctcgcccgggcggaagggttcgataaggttgagataaccgggcccaggcttgatatggataacgactttaaaacctgggtaggggtcattcattcctttgctcgtcataaagttatcggcgataaggtggaacttccgtttgttgagttcgctaaactgtgtggcatcccctccagccagtcatcacgtaagctacgagaacgaatcagcccttcattgaagcgaatcgccggtacagttatttcgttttctcgtaccacagagcagcacactaaagagtacattactcatctggtccagtctgcttactatgataccgagaaagatattgtgcaactgcaggctgatcccaggttgttcgaactatatcagtttgatcggaaagtccttctgcagctcaaagctatcaatgctctcaagcgcagagagtcagcgcaggcgctctataccttcatcgagagtctcccgcgggatcctgcacccatctcgcttgcgcgtctccgtgccaggctgaaccttaaatctcctgtcttctcacagaaccagacggttaggcgtgccatggagcagctaaaggagatcggttatctggactacaccgagatccagcgagggcggacaaagcttttctgtattcactatcggcgtcctaagttaaaggcacctcatgacgagagtgctgaaaatatgcaattaccggattcaccggcaacggatgtcagtcctgaaatggctgaaaagcttaaggttctcgagaaactgggtatcactctggaagacctggagacactgttcaaatcccgctaa

SEQ ID NO: 203269 - DNA, 324 bp, Klebsiella oxytoca
atgccaaagcctgaagatttgccgtacaaaggcgatacgataatcggaaatgatgtctggataggttacaaagcgctgatcatgcctggcgtgaagatcggcaacggcgcgattatttcctcccaggctgttgttaccaccgacgtgcctgcttataccattgtcggtggaaacccagcaaaagtgattaaatcacgatttccagatgaaatagtattcgaactggaaaaattagcgtggtgggattggtctgtagaaaagataagtaaacacctctcggcaataatgtctaatgacattaatacgcttcttacaatcgagtaa

SEQ ID NO: 203270 - DNA, 501 bp, Klebsiella oxytoca
atgctaatcatcttcagtggtttgcctggaagcgggaaaagcactatcgctcaggctttgacaaagcagttaaaggctctttacttgcgaatcgacacgattgagcaggccatacttaaagccgaagaagatggccgtgaaatgggacctactggttattttgtcgcttactcactcgccagagaaaacctgctattaggagcaacagtaatcactgactcagtgaacccactggcgttaacccgtgatgcctatcgagaaatagctttatcggcaagaaccgattttttagaaattgagatcgtatgttccgatatgattgagcatcgtaaacgagtggaaacaagggtgtcacaagtcgaggggttaaccctgccagattggaaatatgttaccgatttgacttatgaaccatggaacagagaacacctcattttagactcgtacagtttatccagcgatgaatgtgtatcaaggatcatcaaactgctttcgcgatga

SEQ ID NO: 203271 - DNA, 546 bp, Klebsiella oxytoca
atgccaatctacggaaagaatcgtttctacattcatggaatagagaaaatacttaaacacctgagccttaagcggggggaaggggactgtttaaatacattttgtatctatgtcaccaccggcatggatatcctcgaaatttattcgatgtacttctcacataggccatctcactactcgatattcattaccgatgaacgccattttaatgtgttgaattgtctgttcccagggttgataaaactgagtctggaagaaaagctcggcgtggatgaattgcgccatgcaatgaccatcatgactttgctagcggagcaaaatcagagcacaagctatcatatgcatctgcctaaactgaccgccgccgaggagcatatcatgcaattgtctctacgcggacattcgttgaatgagatcggcaggatccgcggcgtcagcccgaccactatcagtgtacagcgaaatggattgatgaaacgcaccggtacgaagaacctacttgagctatgttcactgtacagagccattcaacctcttgaactgtag

SEQ ID NO: 203272 - DNA, 1359 bp, Klebsiella oxytoca
atgtattcaggggatcgagtttctatcagggaaaaggttggttacagcctgggtgatgctgccagtcatattgtgttcgattcatcagtagctattcttgcctatttctacactgatatttacggcctgcctccggcggttatggggacgatgttcctgctggttcgcctgctggatgcgattaccgacccgattatgggggcgattgcggatgctacttccactcgctgggggcgcttccgtccgtggttgctggcgatttgcgcgccgttcgcggtgagctgcgtgctggtttactcggttccatcattcggcgataccgggaaaattgtctacgcggtagcggcgtatatctttatgacgctgatgtacactgcaattaatatcccatactgctctctgggcgcggcgctgacttccgatccgcgtgaaagcctgtcgctgcagtcatggcgttttgctatcaccccaattggcggggtgttaggtacggctctgatcctgcctctggcggacttcctctatcccggagaccgtgcgaccggtattcaggtttctatggcgatctttggcgtcattggctgtctgatgtttgttgtctgtttcctcacaacgaaagagcgcgtacagccgattaaagaggaaaatctcaatatcgcgcgtgacgtgaaaattctgttcaaaaacgaccagtggctgattctctctgtttacaactttatgatgctggttgcggtggtactgcgcggtggtgccgtggtgtactacatcaatatcgtgctcaataaaggggccgatattattaccttgtttatgctgggcggtatgttcgcgtcgatggcgggttctgttctggcgaaaccttttggcacccgtttctgtaaagtgaaactttctttctggattaacttattaactgcggcattcggtgtcatctgcttcgttgtgccgccgcagatgtggattgcggtatttgttatccatattattatttcgattattcagggtggtaacggtgcactgcaatggtcaatgatcaccgatacgaataattatggcgaatggaaaacacagcgccgaattactggtatgaatgtcgcggccaatatatttgtcattaaactgggtgttgccgttggtggtgctattctgggttgggtgctggcatacttcaattacgagtctggtgtaacgacgcaatcgtcttcaggggctcagggcgtcatactgctgtttacgcttgtgcctgctgtgttctatgtgctgacggcattctcaattaagttctatggcttgaacgaaaccagaatgaatagcgtggtggatgaccttaaaaaaggcagattttctcacacttaa

SEQ ID NO: 203273 - DNA, 258 bp, Klebsiella oxytoca
atgcatcagcttctggtaggcaaactctacagcagcgctttcccgctggtagacgttacggtcattccggatgatgaaatcgccgggcatcgcagtatggctgccctgaccttactgcagaaacatattcaccagcgggacctgacagaactggttgatcggctggtacccatcttactgggcggatatctgtcttcatcacaggtcatatcgctggtgcactatgcactatatagtgcaggcaggcgaaacgtctga

SEQ ID NO: 203274 - DNA, 210 bp, Klebsiella oxytoca
atgaccatcgcacagcagcttgaacagaagggtattaagaagggcatccagcagggtgaacaacgtggtattgaaaaagggcgttcagaaggggagcggcaggctaccctgaaaatagcccgtaccatgctgcagaacggcattgaccgcaataccgtcatgataatgaccggtctgaccgaagacgacctggcgcagatccaccactaa

SEQ ID NO: 203275 - DNA, 1293 bp, Klebsiella oxytoca
atgatattagctacgtcggttacgccattaccacgtttgtcgcgactcgcatcacaactggaatattcggatattattcatctggcagtctctgcacaacatgctgcaaacaacgggaaagccatgtgcgacatgattatcggcgacttcgatacaacactctttcctttacccaccaccctcaacgaagctattaaacaggcatatgactcgcaccaacatgactatccaccactggaaggggtgttgccgctacgacaaaacctggcacaactgatgcgaaaccatttcaatttaaattacgatcccgaacgtgaaatcttgatttccggcggagcacgcccactactttatcttgcgctaatggcactggttgatcccaacgaaaaaatactttatcccaccccctcctggaataacaattattacgcgaccctctgcagagcaaatggtatttcaattgaaacctcacctgctaatcgatacctacccgttgcagctgatttcatcccgcacctgtctggtgctcgagtgatttgcctttgctcgccacagaacccggttggcgccatgttttcacagcagcaactcaccgagatctgtgatttagtgctggaagaaaatatgcgccgccaggaacaaggtgaaaaaccgttatatctgctctttgaccaggtttactggatgcttacttatcagcaaaatacgcattttcatcctgttgcgttgcgcccggaactcaagccgtgggtcattgtcgtggatggagcatccaaggcattttctgctaccggtttgcgtgtaggctggggaatgggacctgcagatattattcacaggatggccattatgcaggaacatataggtgcaatagcaccaaaagcagagcaattggcgatggcctcgatgctgggtaatgagaatcttctaaacactcatttatcaagctttaaggagcaaatctaccaatcgctgataatgttacattctggtatacaacaactcaaaagcgagggttatcctgttgagtcaatggagcccgtggcaggcatttacctctcactaaaaattgacttagcaggtaagattacaccagatgggaaagtgattgaaaatgaagagcaggccgcacgttacctgattgaacatgcagggttcgcagtcgtgccatttagttgttttggcatgcataatgcggcctggtggttccgtgctgcagtatgtgctgttcgactggaagatattgagctcgtattacctgctgtccggttggcgataggtgcgctgaaataa

SEQ ID NO: 203276 - DNA, 1188 bp, Klebsiella oxytoca
atgaaacgccctgacaattcgataccaatttatttagactataatgcaacgacaccttgtgatactgaggttgtcgaagcaatgctaccctacttttgtgagcattttggtaacgctgctagcatttcaagccgacacggctggaaagctcatattgccgtagataaagctcgagaacagctcgctacactgataaatgcccagtcaaaagagatattttttacctctggagcaacagaaagtaataacttagcattacgaggcatttggcaagcgtgccgacacaaaggtaatcatattatctcttccacgattgagcaccctgctacgctgaatacgctgaaagcacttgaggcagaaggtgcacaggttacattactaaaaccacgttctgacggtagtctggatatggctgaactggcacaaagtttcacagctgatactatcctggtctgtctgatgtacgccaataacgaattaggcgttattaacccagttgacgagattgcccatctaacaacacaacatcaagtcttgtttatgtctgatgcaacccaggctctggggaagatcggcattgatgtgcaacgctgcccagtagatattctgacctgttctgcccataaactttacggacccaaaggggttggtgcgttatacattcgtcaaaaacgtgggcaacgcgttgtcgaattggttccccaaatcacaggagggggtggagaagaaggcattcgtgctggtacgctgaatgttcctggtatcgttggttttggcaaagcagccgaattagctaaaaaatcgctggagagcgagcggcttcgtttgcagatgctgcgtgacaacttcgagactgaattggcccaattagctcaaattaaaatcaatggcattgagagcccacgtcttccacatgtgagcaatgtatcatttgtcggtgttgacggcactaaattgacacagttgctgaaaaagagcctgtcagtcagctctggatcggcctgctcttccagtagcctgcagccgagccatgtgcttacggctatcgggctaacagaggatctgatcgaagccacgctgcgttttagcttcggtagaccgactaccgctgacgacataactttagctttggctgaaatcagcgagggactccggaagctttctgttcctcaaactattaatacttaa

SEQ ID NO: 203277 - DNA, 837 bp, Klebsiella oxytoca
atgaatcccacagatataatcaagaattacgtattgaatatcattaacaatgatattcaacaatcctcaggaatcccggtattttatcttgagggtggtcattttgatccccgctatcccgttactgactttgctataaactccctgcattatgccttacgcattgccagccaaactatatctgaacacaaaaaacgagtccgactggcattaggtattttagtcgatgacctggggttgcaatgtggtgtagaggcatgtgaaatgtcaccattggtgacagacaccaaagtggaaaacgaaattccgccagaactggaacttattctggcgcaatactctattgtcaaacgtgatcgtttggtcatacaaggggagcgcacttgtaaaaatcgcggcattcagacactgcgaaaggtgatggcacaacatgctagttccccacgacctgaattaaaaactgaagaaatagagagtatccaaaaaattatttaccgcaatgaaaaatcgcaacgcattttgttagcggagtcaaaatcgaaaggtgtctgggccgcaaaatgccccatgattatggcgcagcactatattgatgtggtgaaaaccgtagaaaaattacacccacagactaatgcagtgcatatcatcgatttttctgagaccgatgattacaacaaagtaattaacggtgctgaatttgcaataaagcttctactgcaatcagaaacggttgcagggaaaaagatcgccatctcaaacatttttctctcgcctttcgacaataacgaattcgtcgccaacacagtatctaacgaaataaaccatttaattgcatag

SEQ ID NO: 203278 - DNA, 1062 bp, Klebsiella oxytoca
atggatggagaaagccgtcgcggtacgctgacgacactcaataatgataactcaaacgaaaactgggatttgaacggccgtattctgttgggtttcgacggaacacgcacaatggagaatgggtcatacgcaggtttctctatccagccgttagccgatatgaccggttccatgaacctcgatgatgcatacatccacttcggtcagagggatgactggaaaatcaaaattggtcgctttgaagcattcgatatgtttccgctgaatcaggataccttcgttgagcactccggaaataccgccaacgatctgtacaccgatggtcagggttatatctacatgatgaaagaaggccgtgggcgttccgattcaggcggtaacttcctgatgagcacacaggttgacgactggtacttcgagctgaactcgctgattgaagatgggactacgctgtttgctgatagtgatcatatccctggcgggcgcacttatcacggacgttacgtcgaaaaaaagaaaaatgttattataatgcgcccggttatttcctggtcgccaacgaactctctctctttctctgcagcaatcgaatcaaacgtagttaataacgcgtatggttataccaataaaaaaggcgaatttgtcgaccagtccgaacgtaccggttatggtataacaatgacgtggaatagccagaaaactgatcccgaaaacggtgtggtatttaacctgaatactgcctatttagatgccaataatgaagatgatttcactgcagcgacaaacattctgtggaaaaatttcgaacttggatatatttacgcgcataataaaattaacgattttgataaagtagtctgctacaacgattgtgttattcagggccaaggtacctacgatattcataccattcatgcgtcatatttgattccgaatgtcatgaatatgcagaacttcaatatttatctgggtacttactggtctaaaattaaaagcgaccagaaaatatcttctgaggacgatcgctacggtgcacgcattcgcttcaaatactactattga

SEQ ID NO: 203279 - DNA, 264 bp, Klebsiella oxytoca
atgaagaaagaaacattagctattgcgattggattattcttagtggccaatacctgtgttgctaaaacgacgaagatgacgttggaacagcgactggaacagctagagttacgtctggaagccgcggaaagtcgcgccatccaggcagagcgtaaagtgcaggatatgcaggccgctgaaatcaaagcgattaaggtcgtccctggccccccgaagaaaatgcatctacgcctaatctcctgttgtcagggtatggagatctga

SEQ ID NO: 203280 - DNA, 549 bp, Klebsiella oxytoca
  misc_feature (82)..(91): n is a, c, g, or t
  misc_feature (499)..(508): n is a, c, g, or t
atgaggttatcgtgccgtcttatacctttatcgcaacctcatttgctgtgttacaggctggcgcgatccctgttttttttgnnnnnnnnnnctgttttttgtgatgtaacagcagatcacacaattgatccgtcaaaaattgaggcgctaataacaaaacggaccaaagccattatcgttgtacatctctatggtgttgtctgcgatatggacccaatcatggcgattgcaaagaagtaccgcttacgcgtcattgaagattcggctcagtgccttggtggcagatacaaaggaaaaaaagttggcacgattggtgatgtgggtacatttagcttttgccagagtaagcatttcactacgggtggtgaaggtggaattgtcgtaacaaataatgaggaactttcttgggagtgtagagcttttagagatcatggatttgatgtgaagaagaaaatcgatttattaacgttggaagagcaaacgttccatgtccacaacnnnnnnnnnnaactacaggatgaccgaaatccagtcagctattggcattaa

SEQ ID NO: 203281 - DNA, 249 bp, Klebsiella oxytoca
atggatccttttgtgattgcacgggtatccctgacgccgcagaacctggaaaagttttggaaaaccgtaccgtgggtatcgctctgccactgcctgcaacgcggcaataacgggttcgtcacgcgtggtatccggacggtaatggtaaaccgttctgctcaggttcagactccggcaggcctgacggatactgagtccaaatgtcgttatcagatgagtgaccagctcacgcttaaaggctggttttaa

SEQ ID NO: 203282 - DNA, 210 bp, Klebsiella oxytoca
atgattatttacagcataactgtaattttctttgaactgctcagcaatggaatttatatcatcgtatattttaaattctacatcgacttttacccctgttttttcaacaggaaggtgtaccaaaaggatatccttatgttcacctttttgtatgatttcttttccggggcttatagctctaaaaaaattagtaatatcgatatcagatga

SEQ ID NO: 203283 - DNA, 150 bp, Klebsiella oxytoca
atgaaaaaacatgctaaccatttccctgtctgggaaatccttttgcagcatatacatatttttatcctggatattgccattgctattatttctgagtgtcacctgggagacataatcatctccatcatagcgatcgcgtaccttaactaa

SEQ ID NO: 203284 - DNA, 483 bp, Klebsiella oxytoca
atgtacgatgacctcgccgcccggttttcggcgccagaccatccacgtcaggccttcggtccccgcccggacctgctcccggtcaaccagggccgcgtgacggtagaacagcttgatacgggagcggaaggcaacctgcagcttgctcagagtctcgtcctgcttcgtggccggaacttccagcacgttgaaccagtagacagactcccgatcctggggcagcgccgggacgccggtgtagctgaggcggaccgtctgggcctcgccggcgttgatgcggttaatcggcggcaacagggtgaacggggtgcggatacggtccggcgtcgagttcgcgtcgccctcgtcggtccagctctgggttacacaaatactctagacagacttggcgcctcgcatcctaccttttctttttactccgttcttgtttgtcctggcatcaccccatttctcccaaatattcagaactggacgcacctttaa

SEQ ID NO: 203285 - DNA, 297 bp, Klebsiella oxytoca
gtgaaaaacgttaaactcacacctaaagccagtcaggatctggagaatatctggtattacggatacccccatttcggtgaggagcaggccgacagatatattaatcagatctccggcatttttttggttttgagtgatcataatataggtactccccggcctgaactgggggaatccatatttgcactacgcgttgaacggcatatgctttattttctgcagactgatactgaaattattattatccatatattaagtcagcatcaggatgccggccgtcatctcaactggcagtag

SEQ ID NO: 203286 - DNA, 426 bp, Klebsiella oxytoca
atggttgcgttcgaagagcatatagccgatctcaccggcagcattattgataccccggataattttgccatccatcagcagcgccgagcccaggccggtgccgataccaataagtgcggcgctatgaacgtggcgacatttcccctgccacatttcgccaatcagcgctgcccgaatatcattttccagtaccaccctgatgttcagacgcgcgttgagctcatcggcaagcggaatgttgtcccagtcagggagattgggggagccttcaagcaccgttccgctacggtaatcaacgatgcccggcgtggcgatgccgatgactttcagcttgtcgcgagaaataggctgccgttcgataaacgcctcgatactggcgctgaatcggtcgagaaactcccggcgagtcgtgacctcataggttga

SEQ ID NO: 203287 - DNA, 411 bp, Klebsiella oxytoca
atgaataaaatggacgcgttcgctgacgccgagttcttccgcgcgtcgctttgcctgcgcggtgaagagcgaactcatgtcgatgccagtccccgtaatgccatgatcccgggcccaggtgcagagcatctcgcccgagccgctgccgagatcaagaatgcgggtgtccggcttcatacgcagcacgcggcccagcgtggcgtacttctcttcggtgaacgggttatggatgcggtgttcactttcgctgatggtaaaaatacgtgggatatccattatttaattcctgttattgggttaagcaccaaaaagggcacaacaagattgttattcacgccagtgctccggtttcatcagggcctgcgcgcactggatgtggccggtcacgttcatgggctgagcggtgagtga

SEQ ID NO: 203288 - DNA, 579 bp, Klebsiella oxytoca
atgacaaacccgacactgtgtggtataccgtccagccagtcatcacggaagctacgtgagcgaatcagcccttcattgaagcgaatcgccggtacagttatttcgttttctcgtaccacagaacagcacactaaagagtacattactcatctggtccagtctgcctactatgataccgagaaagatattgtgcagctgcaggctgatcccaggttgttcaaactgtatcagtttgatcggaaagtccttctgcagctcaaagctatcaatgctctcaagcgaagagagtcagcgcaggcgctctataccttcatcgagagtctgccacgggatcctgcacccatctctcttgcgcgtctccgtgccaggctgaaccttaaatctcatgtcttctcacagaaccagacggtcaggcgtgccatggagcagctaaaggagatcggttatctggactacaccgaaatccagcgagggcgaacaaaacttttctgtattcactatcgacgtcctaagttaaaggcacctcatgatgagagcgctgagaaaacgcaattaccggatttaccggcaactaggtga

SEQ ID NO: 203289 - DNA, 921 bp, Klebsiella oxytoca
atgttttatctggggctggatattggcgggaccaaaatggccgccgtggtaattaatgccgaaggcaaagagtttggccgttatcgtacacagacggtgaaagaatcctatgccgcgtttattgacgggctgacgcagtttattagcgacattaaacaggcactggatgctccggtggcgattggcatggcgctaccgggcagcgtatcgcccattgatggcaaaattaaaaattccaatatcctggtgctgaacggccaggatctgcaatccgatctgcaagcccgcctgggctctgcggtgatcatcgccaatgacgccaactgttttgccttgtcggaagcctgtgacggagcggggcaggggcacgaagtggtgttcggtctgacgctcggcaccgggtgtggcggcggaattgcgctccagcagcgtgcgtttaccggcgcatggggcaatgccgcagagtgtggccatataacccttcccggttacaacctcctgcgcgacgggccggcggtgaaatgctactgcggcaagaccaactgtacggaatcttttgtctccggtactgggctggctgagcgctattacctgctttgcggcgagatgcgaagcgcaccggagatcctgcatctggcaaaagaggggcaggcgcacgcttgtgagcaggttgcgcgttttcgccatcaactggctcgcttgcttgcaacggtagtgaacattatcgacccgcacattattgtgattggcggcggtctgtcgaatgaacctatcctgctcgacggtattgaacgtgaaattgcgccgctggtattcaccgatcagttccttactcctgtggttaaagcggtacacggcgacagcagcgggatgcgcggtgcggcctggctggcggtgcgggcacatgtgcaaacagattaa

SEQ ID NO: 203290 - DNA, 339 bp, Klebsiella oxytoca
gtgaacctcagcaccgcgtatatggatgccaccgacgagaaagatttcagcgccggtatcaatggattgtggcatgacttcgagctgggttatatctacgcgaagaatgacgtgaaagcattcaatattaataatgttgatgtgaatagcgcgaatggttttattttaggtaaatatgacattaataccgttcacgcctcataccgtattcgcgatttgatggaaatgaataactttgatatttatctgggtgcctactggtcacgtatcagtacggatgaagagcatgatgataaagatcgttatggtgcacgcgtaagatttaaatatcacttctaa

SEQ ID NO: 203291 - DNA, 798 bp, Klebsiella oxytoca
gtgaaatatagaaattacctctgtgcgttattcgtattatcctctccggctatctctggcgtgacttttgataccccggaaggccgcctgaaactgtatggcgacgttgagtttaacgtggatggcgccagccgcaccggccagctcacttcgctgaaaaccagcactggcaaagactggaaagccggtgacgcggaacgttgggatgtgaatggtcgtatcctgattggcctggatggctaccgttcggtggccaataacaaatttgctggcttcacggtacagccgctggcggatctctccggctcgatgaaccttgacgatgcggccttcttcttcggccaggagaatgactggaaggtgaagattgggcgctacgaagcctttgacatgttcccgctgaaccaggatacctacattgagtattcgggcaacaccgccaacgatctatacgaagacggctatggctacatctatatgatgaaagaagggcgtggtcgtagttccggcggggccatccagttgagcaaaaccagcggaccgttctacttcgaggttaacaccactggtcgtgacggcaccaaactcttccaggacagcgactaccacggcaactcactggaaaacaaaaaaaacgtcatctatgtgcgcccggttattgctgtcaccatgggtgatgtgaccaccgctatcgccatggaaagcaacgtggtgaacaatgcatatggctatacgggcagcgacggtaaatttgtcgatcagtctaaacgtaatggctacggggcgacgctgacctag

SEQ ID NO: 203292 - DNA, 1911 bp, Klebsiella oxytoca
atgagactgtttaccaacaaacgcgtcagagatattttcgtgcggattgctgaaggaaacgtcacccaggcctctcttgccaaagagatgaatgtgtcgacgcgaacgatccgcagcgatttgaaagagcttggcgaccttatcgccacgcagggtaacagtctcatttacgaccggaagaaaggcttttcaatacaggtggataatccggcagggcttaacaccttgctggagcattcgcagcgcccatggaaagagacgcgctcaaccgcagaacgccgccgggcactgttaacggcgttgttatgccaggacgcggggatttcactggaggagcttgaggcgacgtggtttatcagtatctacagcctgcgcaatgatgttgccttgcttaagcgccattttgccctgtatgaccttacgattgcctcggaaagtgcagacaagttgaagctggtgggcagcgaaatcgcctttcgtcgttgcatctacgatcacctgttgcgctcgaaagaggccgaagaggattaccatgatatcttcggttcagcggcagtgttttccgatattaagcagtcgctgagtcactactttgttaaccacggctttgtggtgagcgacgtcaatctgcgttttttcacgctgatttgcggtatcacctgcgagcgtatccgccgcggcaactggctgctggattacgagttcgacggctgtgcggcgcagtggaaaacggtcgccagtaacattctgcatacgctgctggctgatgcggttgtcagcgtgccgcaaagcgaaatggattacatggcgatgaaccttaccgcgttttgtgccgcgccaacggagcatgtggacgaccaggggcagtgcgacgctgagcgcaccgtgatgaaccactttttaagctatgtcagcgcctcctggttttgcgatgtgagctacgacgagctgtcgcgcaaaaatctgctcagtcacatcaaggcgatgcgcatccgggtgaataacggcatcaccattattaacccgctgattgagcaaattaagcgtcattacccgctgatgtatgagatgacgctggcggcgtttagcgaactggagcactttttctccgccaagatcagcgacgatgagattggctatctggtgatgcacatcggtgcgatcctcgaagatactcatctcaaggatgaagggaaaaacatcagcgcgctggtggtcagcgatcaggggggcgcttctacccgtatcgtctgccagaagatcgtcagaatgtacccgaccatcgcgatttcgaaatgtatctccgttgagcaatataaagcgatgcaggaggtggaagagagcattgtcatcagtctggtggcgattgaagagaagaacaagggggtcattaccttgccgccgctgccggaacgctggcagttggaaaacatgaaatactttttagccgctgaaaattcgcctccggaggcgatggtcaactatttttctgcggaccacttttttgttttcgacagtaatgtgcacaccaaagaatcattgattaatttcctctctgcgcaattagctcagaaaggaagagtggatgagcattatttagcgtcggtactggagcgcgaagcccgtgcgtcaacattactggatgataaaattgcgattccgcatcctctcggtttggtggcattaagcacaatggtgacggtcgctattttcccggaaggtattgagtgggatccgggtaaaaatgtgaagttagtctttatgctcgcgatcagtgaagatgcatttgtcgacagtatgttgatctatgactatctgaccaatattctcgatgacgatgttattgataatttaagtcagtgtgccaattaccatgaatttatttcgctttcacaaaaatattttttataa

SEQ ID NO: 203293 - DNA, 2637 bp, Klebsiella oxytoca
atgaaatcgaagaccgtacatatttacagtcatactcactgggatcaggagtggtactttacatcatcacgctcacgtatttatctatttaaccatattaaaaaagtgatccgtattctggagaataatgatgattttccctgctacctcatggatgcgcaaagtgcgttaattgaaagctatctgcaatgggcgcccgaagaccgtgacgttttattcaaattaattgctgaaaaacgtctgctcaccgggccgtggtacacacaaaccgatcagctggtgatccaccaggagtcggtggtgcgtaacctctattacggcatgaaagtggcggcagatgccggcaatgcgatgctgctcggttatgtgcctgactgttttggtcagggcggcaacatgccacaactctaccgtcagttcggcattcaccacgcgctgttctggcgtgggattgccgacaacacgctgcatgagaccgagtttgtctggcagggcgacaatggcgatcgcgtcttcgccgtgcagatgccgtggggctatcactatggcggcctgcttgatgaaacgccggaaaccatgaaagccttcctcgacgggaaaatggcaccgattgaagcccgcagcagccggaagcatctgctctatccgcacggcttcgaccaggcaccggttcgcgaaaacttaccggctctggtggcgcaatttaacgaatgtgatgacacgcgccactaccagatcggcagcccgctggctttcgtggaagcactggaaaaagaggccgcgtccgatgtgcgtgtgttacagggcgaactgaccgaggcgaagcactcacgcgtgcacaaatcgatcttctcctgtcgtgccgatctcaagctgctgaataacgagattgaagcgctgctggtaaacactctcgagccggtactggcgatcagccgtagcctggggaatgactaccccgcacgggcgattgcggatatctggaagctgatgttctataacgcggcgcacgacagcattggcggctgtaacagcgatgacaccaaccaggatgtcttcttccgctataagcaggcgcgtgatctggcggtgaatttgcttgagttgcacacccggctgataagtattcgtatcccgagagagcacgattatactttcactgttttcaatccgttaacaaataccgccgctccgcaggtaaccttcgaagcgtggctaccgggtattccgtttaccctgcgcgacgctcagggtaaggcgttaccctatgttattgacgagcaaaaagagcttaccgactacgtgcttaatcaaacgatccgcctgaaccccggcaaagcttggcacaagccggaacaggtctggcgtacgacgctgaccgtggattgcagcaagctgcctgcgctcggctatacccgctggtatcttgatttttccgccgacggcgagagcaagccagaagttgatgacacgtcggttatcgagaacgccttttaccgtatcgaagtggaagagaacggcctgctggccatcacccacaaaaccactggcaaacgttacacccgtcagatgctgtttgtggaaaacggtgatgacggtgattcctataactattcgccgccgcgtgtcgacatgtttatcacctccgaaggctgcctgacgcaggcgcgtcgtcgtaaaaccgcgcttaatcagtcgctgcaactggattacgtgctggccgtgccgggcaatcttgatgagcgcgcccgtggcgtgacttctggcgagatggcgctgaacgtgaacgtcacgctgcaaaatgacgacatgatccgctttagcgtggatgtcgaaaacagcgtgctgagccaccgactctgcgtgcatttcgcgaccgacatcatggccaacatgtcctacgcggatcagctgtttggtgtggtgagccgtccggtgcagttgagtaatgcgctgcgcgtctgggaagctgaaaactggcatgaaaaaccgatttccatcgaaccgatgcagagctacgtcaacctgcatgacgataagcacggcttcacgctgcacaccaacggggtgcgcgagtatgaaatcatcggcgacaacttcgataccatcgccctgaccctgttccgtacctttggctttatggggaaagagaacctgctctatcgtccgggccgcccatcgggtgagtcggtagttgaaacgccggacgcacagcttctggggccgttgtccttcgccttcggctggcgtctgtacagcggggcgtttgataaggcgcagcatgcccgcgtgtcgaaagccttcctgacaaccttcccggtgtatcaggacagcgatttcctcaacggtcgcctgcgtttctgcctgagcgatgaagcgcgcacctggccgcagcagcacagcgtgctgacactgccgtccggggcgggtgatgcgttagccagcgtggtgaaatgtgcagagcaggggaacgggctgattgtgcgcctctacaacccgaaccttgaagcactggccacgatccctgcactggagaaggcgcgtttcgtgatgctcgacgaacacactgccatgcaggaaaggccgttcctcaagccaaatgatgttcagaccctgtacgtagaaagagaaaaatga

SEQ ID NO: 203294 - DNA, 1071 bp, Klebsiella oxytoca
atgacaggtatttcctttgctctgcctgtcattattgccggttccctgatggtcgcggtagccaagattatcggtctggcgatcggtgagtctaatctggacgccttcgcccacagcgatggcctgacaaactggctgtaccttacacaagatattggttttaaaatcatcggcttgatgaactatgttctcggtgcctatgtggcgtactcggtagcgggtaaaaaagggctggcggccggtttcaccgccgggcttattgcctcgctgaccggttcaggcttccttggagcggttatcggtggcctgctggcaggttattcctctgagtgggtctcacgcaaaatccagattaacggttcagcggcttcgtctgtgccgttaattatcctgccctttattactgtagggctgcaggttgtcatcatgctgctgttactcggcgacgtattgagctggcttaatacctcactgatggcttgggttcagcgtatgaccgaagacggcaccagcaccgtattactggcagcggtgcttggcggcatgatctgttttgatctcggtggcccggtgaataaagcagcatggggaacggcgaacgtcctgtttttaagcggcgtatatctgccagctattctggttaacgtggcgatcattattcctccactgggttatgccgctgcgcgctttttacgtccggataattttaaccagacgctgaaagaagcgggtaatggctcagtcataatggggattctcggcatctccgaaggggccattccgtttacgctgaaaaacccggcccgtttaattccgctgaatgtgctggcaggttcgctgggcgcggtcacggtggcgctgttaaaagcctatcccgttatgccgccgttaggtgggttatatggtggttttaccgtcggtaatccctgggcttatttcatcggtgctttagtgggcacagcggttattgccttcggtgccaatatgctggtgaatttcaatgacgacgaatctggcctgaaatccagcgataaagccccggcagaagagattgaaataaaatttgattga

SEQ ID NO: 203295 - DNA, 324 bp, Klebsiella oxytoca
atgaatatcgttggagtcacatcctgtattgccggattagcgcatacgccaatggcggccaagtctcttgaaaaagaaggtgcacgcctgggtcatcagataaaaattgaacagcagggtgccatgggcatcatgaataaaatttccccggaagagattgccgctgcagattttgtattaattgccgctgaccgttccattgaagaagaagaccgttttgccgggaagatcattatccgcgtcaaaattggtcaatgtgttagccatgcatctgatgtcattaccaaatgcgtagccgccgttgaggctcgccggaacaaataa

SEQ ID NO: 203296 - DNA, 462 bp, Klebsiella oxytoca
atgttgattgtacgagaaaatatttttttagaccaacaatttcaggataagaaggagatcttccgctttattgctttgcatgccgtagcgcaaggatgggcagacaatagcgatatcatcgaagtcgatttgtgggaacgtgaaaaccaatactccacggggtttgaaaatcaaattgcgataccgcatgccaaaacggctaacgtgaaagaggccggtgttatttttatacgtctggctcaacctatcgactgggaaagtctcgatgaccaaccggtacaaattattttcggcctgttggtgccagagtccggtgccaaagtgctgcatttgcaaattatcaatagcctcgccagtcaaattattgatgacgaattcagaaataaattattcgccgttaatgatgaagaagaattatttcagtacatgaaatcacgcatcgccattgaggaggaagtatga

SEQ ID NO: 203297 - DNA, 453 bp, Klebsiella oxytoca
atgtcattcgtaacaacaaaagatggtgtcagtatttattataaagactggggccctaaagatgctcaacccattgtctttcatcacggctggcctttaagtgcagatgattgggataaccagatgctctttttccttgaaaaaggctatcgcgttatagctattgatcgccgtggtcatggacgttctgagcaagtgagtgaagggcatgatatggatcattatgcatccgatgcttcggccgtggtggaaagcctggatttgcgtaatgctgtgcacgtcggtcactccaccggtggaggtcaggtcgcccgatatgttgcgaagtacggccaaccacaggggcgggtagccaaggctgtacttgtcagctccgtcccccctctgatgattaaaacagacaacaaccccgatggcaggcactcccatcgagatattcgacggcttccgtaa

SEQ ID NO: 203298 - DNA, 429 bp, Klebsiella oxytoca
atggcaggcactcccatcgagatattcgacggcttccgtaaagcgctggctgctaaccgctctcagttttacctcgacgtcgccagcggtcctttttacggatttaatcgagatggagcagccgtttcacagggcacgattcagaactggtggcgtcagggcatgactggtagcgccaaagctcactatgaaggtattaaagcgttttcagagactgatcagactgaggatttaaaagccattacggttcccgttctagtgatgcagggcgatgatgatcaagttgtcccttataaaaatgccgcacttctgcaagacaagttgattgtgaacagcgtactcaaaatttatcctggtttcccgcatgggatgcatacctcccatgctgataccataaatgtcgacattctggcgttcattcgttcataa

SEQ ID NO: 203299 - DNA, 1323 bp, Klebsiella oxytoca
atgaaaatttcaggattagccctgacgatgggttgtctgagtctgctctcctttcacaccatagctcaggaaagcgagcgtctgaacagcgtaaagcagttcgctgatacggtatttgataaagccggatataaatatggacatgacgttccgttgctggcagacggcgtagatccgcggaccggtaagcagatggagtggatcttcccagacggcaaaaaagcggtattgtccaacttctccgctcaacaaaatctgatgcgtgtactggttggtctgagcaatttaacaggtgatgcaaaatataaacagcgtgccgaaaaaaacgttcgctactactttgaccactatcaggataccagcggtctgctattttggggcggtcatcgttttgtcgatctgaatacgctcaaggttgaaggcccgagcgaaaaagagatggttcatgagctgaaaaacgcttacccctattatgatctgatgtttgccgtggataaacccgccaccacgcgttttatcaaatccttctggaatgcgcatgttaacaactggaaaacacttgaaaccagtcgccacggtgaatacggcaaagcgatgggaaaactatggcagaatgattttgagcaacagccgccatttttcgccaccaaaggactaagcttcctcaatgctggaaatgacttgatctactctgcctcactgctttatcagtacgaccatgatggtgcagcactaatatgggcgaaacgtcttgctgaacagtacgtgttaccccgagataaaaaaaccggcctcggggtttatcagttcacgcagccactcaaacgagctgataccaacgacgacacggacaccaattcgaaatacggcgaccgcgcccaacgtcagtttggccccgagctgggtgccgatgcgctagaaggcaatatgatgattaaaggccgcactagcacgctctattctgagaatgcgttgatgcaactagcgctggcaaaatctcttggcaaggatggcgatgatatcaaaaaatggactcttgatggtctgaaagccttcgccacttatgcctatgataagaataccaacaccttccgtccaatgttagctaacggtacagatctatcgggctacatcctcaagcgtgacggttattacggaaaaaaaggtaccacactgaagccatatccagcaggtaacgagttcttgctctcttatgccagagcctggacgctggagcaggatccggcgatttggcacgtggcattgcgcagggcctggggcttggagacatcggcgaaccgggtgggtggggcactcagctga

SEQ ID NO: 203300 - DNA, 702 bp, Klebsiella oxytoca
atgttgcgctcattgttattacttactgtacctttcatgagtattactgcccacgcgatgacttttgactatcgtcatgaaacgaacgataaaggcggtaataatcataaagaccgactactaatgtcgcaccgttttgccaatggttttggcttatcgctagagggaaaatggaaaggctcccagaataaagacaaagcctataacgaaaccgttagtaatggcactgaggtggtcgccagctatatctacaaaatcaataaaactttccagattgaaccaggattctcgttagataccaactcatcatcgaataactaccgtccttacctgcgtgggaaaacgaatctgagcaacgacgttagcattaactttcgttatcgtccgtacttcaagagaaattcaaataatattggtacaaaaaaaaatacttccgagaatggctataacctgacaagcgtactgtcatggaaaatctccaaagattatcaactggattacgaactggactataaaaaggcgaattcagctaacgtagtattagctgataacgagagctatgactggactcatgactttaaacttacatataaatttgataaaaattggtcaccttatatggcaattggtaatgtttccggcagtaaagtcaccaatgaacgacaaacccgttatcgcgttggtgtgaaatattcattctaa

SEQ ID NO: 203301 - DNA, 900 bp, Klebsiella oxytoca
atgattgatgcgcttattagaaacttacagagtgatattgcactacttcaactttatatcgcacaacgcaaaaaggctggttttcacgacatggaaagaatgattgagtcattgaccatctttatgtttcgcgcactacgaatgggagaaatgaaaaatatgaatcagattaaagtaaattttcccgctattgatctagctgacagccaaaatatgatagctgttcaggttaccacaaatgcaagcccagcaaaaataaaggaaaccatctcggcctttgaaaaaaagaatgaatttggagtgagtctaaaagataaattctctgttttatatatttttggtttttgtaacgcatcaaaataccaagctcccaaatattgtaaaatagttgaccctagcttttttataaatgaactatgtgataaagcagatgaagatatgattcaggatatgcttgatgctatccgacgccataaagattatacttcgctacacccttggagtgataaagattctcttgaaataatactcaacattattaatcgcaatgcaattaaacatcaaatgcgttatgaaggcagtatatctgacatgcttaccggcttaaaagaaattaatgaattaataacaaaaggaacaatccaacgtaagcaacgatcaaaatcgatttctgacttcaaagatcaaaacataattaattttttgagagatgtaatggatgatctgtctgtcattcaagcaatagtaaataaatcaaaagatgaacatcatgacattgtttacattagccacgaagatatgaccatcattgataaattaaaagctaaaatagcagatgactcatccaaaattgctagtctgaataatatcaaattaaaactaagtgttgtgaggttataa

SEQ ID NO: 203302 - DNA, 1323 bp, Klebsiella oxytoca
atggaaaaaaaatatcaggtatttttgagctccacctatacagatttggtggaagaaagggaaagcatcatcaaagccgtcctagaattgtatcatatcccgattggcatggaaatgttcagcgcagaagatgaagatcaatgggaaataataagaagaactatagaagtaagtgattattacatcttagtgttagggttaagatatggctcaaaaacgtccgacgggataagtttcacccataaagaatataattatgccttagagaaaaaaatccctattcttgcattcttaatgaaagacagtgtggctttatctggagataaacgagatgatgatctcactgacattaaaaaattccgcgacattgttctaaaaaattctaaaatgtcacagttttgggacacaaaagaccaattaataaaaaatgtttcagtttctttaatgaagcagattatgcaaaagccggggataggctggatacgcggagacaatactgttgttagtgagtctctatccaacgagttatcagttctaagcaaagagaatagagaattaagagaaaaaatcacgttacttgagtcaaagatagaaataaaaaaaccagatattaagttgtacattaatcatccatctgttgatgaaaaattcaattcatttgcaaaggttagtatgcctgaagcgttaaatataaattacatcgaaccacacctccttgaatttattacagagggtgatatcgagttgtataatagccgcatccctagtgaatctgagcttgaacagtttaacattgaaggcgaaaaatactacaaaatagaaagctattctaccgcgttaagaattgaaatttccaatgaaggaaccgctaaagcaaataatatatttatagatttaacctttcctccagaaatcctcatatataaaattgatgaaaagccggaagaacctaaatctccagtcccttccaatccgctaaccgacgcgcaagaatgttatcagaaaaaacaggacgatttgaattcctcggaattacgttctatttatgattcattatatttgaacggtttgatcgcaacgaataatttcaaagatgccaattttttcaaagttcccaaactggctaatgcttcattttatactttgctggatggcaacactataacaattaaaatagatagcttaattcatacaaggttaataacatttagtgatgagtacatgattgtgcctttgaatacgggaaagcacattgttaaagctgatattatctgtgaagaatatactcagcttgagaatgtgacgattgaactgcaagtctag

SEQ ID NO: 203303 - DNA, 480 bp, Klebsiella oxytoca
atgaccaatcagccccggccagaccctgaaccaacggcagatatcctcaatattaaaagcccgggtctggagcatctgggcatcctccggattcatagccacaggaagaaacttcattccagcttccagcaccatcattttcccggtattcatcgatccagcgaattgttcagtcaggctgtcccgcacctcgtttctttgctctttcttaaggacttgctccatagaaaggatgccgcttgggcgcataccgtttttaaataccttcgcgctggcttcatccgttgccattgccatccccagggtctggcgggcataactcactggcgagagacccatcacgccattcgtactgaatgcgcggatatgcatcatgttctgttctttaatattccgggttccgccgcctgctccatcccgataggtatagatgggctcaccctcgcgacttcgttccaccttcatacgctcaggccgtag

SEQ ID NO: 203304 - DNA, 186 bp, Klebsiella oxytoca
gtggacgtaatgattgacagtgctttcgaggggtatcttttcatcttaatggatatgtggccaattttgattgtagctttcgtcgggttggctctgtcattttatggcgtattaatgaaaaaaacggcaattttctgcgttgtgattgctatagcttttggagttgtggggggcagtggatattaa

SEQ ID NO: 203305 - DNA, 339 bp, Klebsiella oxytoca
atgcaagttgaagagacacattggctagataacggttatgtttttaacattccgccaaagaattatcgtcgtcgaatcgttgttccagttttaatggctatagcacccaatggtaaagcccattcaaagcataagctttactttaatgggacttgggtagcagaagcaaaggctgatggaacaacatctcttgaaggatggcaatcctctggggcaggctgtaattcatggaatacgtatattgaagcaaatcaatcggtttctatccaggctgtgcaggaaaaatcgggtgatggctatgcgcttccaagtattacagtaatgcttggtcgggaatga

SEQ ID NO: 203306 - DNA, 1773 bp, Klebsiella oxytoca
atgatgtcaaaactcaccgtcggtgaagactatctctcttccgatctctttgactcatggcgctataccggtttgtcgctggcaagcgatgaaagccagctgccacctaagcttcgaggctacgcgcctgaagtatccggtatcgctcgcaccaatgccaaagtgacggtcagccaacagggcagagtcatccatgaaacgacggttgccgctggcccgtttcgtattcaggaactaaacagcgcgctaaccggacgcctggatgtgcgggttgaagagcaggatggctccgtacagacatttgcggttgaaacggctcaggtcccttatctgacgcgtcccggccagctacgttataaaatgaccaccggtcgtccgcgcgattataaccacagcactcaaggaccctactttgccacaggcgaactctcatggggccttaccaacgcgtggtcgctgtacggcggcggcattatttctcaggactacaacagcctggcgcttggcgcgggtcgtgatatgaacgcctacgggacgctctctgctgacgttactcacgccagcgctcgtttcccggctgataaaagcaggcaaggacggtcctggcgcctgagctattccaaacggtttgatgaaatcaacagtgaagtcacgtttgccggttaccgtttttccgagcgcaactatctcaccatgggtgaatatctggatatgcgctatcgggatggctacgtcgggaacagcaaagagctttataccattcaggcgaccaaaaactttgccgacctgcgtttgtcaacgcacatcaactggtcgcatcagacttactggaaccgcccggcgaccgatcgctacagcgtatcgttgaataaatattttgacctcggcgactggcgacatctgtcgttgtccctcaacgccgctcgcagtgagttcaatggccgcaaggacgacagcgcctatatctcactgacgatgccgtttggttcgggaaccgtgggttataacggcagcataagccgcgaccgttatacacaaaatgccagctggagccaaaggctggataacaacgactattacagcataaacgccggcaacagcgtcgggggcggtgagggaacgcgtagccagatgagtggctactattctcatcccggcaatatagcggatgtcaccaccaactttaactgggcgcaaagccagtacacctcctttggtatttccgccagcggtgggatgaccgccaccgctgaaggcgtggccctacactccggtggggtgcagggggggacgcgtttgatggtcagtacggagggagtaagcggtgttccggtgggcttacagggctataccaatgcttttggcatcgcggttatccctggagtgccaaattattatcgaaccagggctgagattgacgttaatcgtctgccggatgatgtcgagtctggcggaacgccggttgtagagctcgccctgactgaaggcgctatcggtttccgtcgctttgatgtgctgaagggttctaaggtcgtggcaatccttagccaggaagatggacgccatccgcctttcggcgccacggtacacaatgcaaaagatcgcgaactgggtatggtcagcgacagtggactggcctggttgaccggtgtgaatccggatgaacgcttaaccgtgcactggagtggttccgctcagtgtgaagtcgtactgccacgggttatccctgcacagcaactattgctgccgtgcaagccggtcactcgcggctga

SEQ ID NO: 203307 - DNA, 303 bp, Klebsiella oxytoca
atgaagagaaaagcggcagacctacgcaaagctgcacgcgggcgcgaatgcacaattcgcatccctggcatctgcaaccacaatcctgatacatcatgtctggcgcattaccggctggcgggtacttgtggtaccggatgcaagcctgacgatgaacagggggctatttcctgtaatgcctgtcacgacgttatcgacgggagggttaaaacgacagagttcagttatgaagagcttcggcttatgcacgccgaggggatcctccgcactcagttaatctggagaaaggaggggctacgatga

SEQ ID NO: 203308 - DNA, 546 bp, Klebsiella oxytoca
atggaacagcttgaaactgacttcacagctcttttcactggtggagatatgcccgaaccgcatgcgcgtttggccatacttcgttttactactattttttctctttatgaggctaagctttgtaactgtgaagcgaaacagagtagttctaatgattatgcaaaagagtttctgcgctcagggtttagcgatgttgcgaaactatgcgatgtttttcaacattgcaaaaaacgctattttcccggcggtgaagaaagctcaaagtttaagagcctgtgtggtttcaggaatggtggaaaaaaatcagccacaccgacagaacttaggaatagcataacagagattttgcaacaccccgaacctaccatagaagataaattgactgtgtgtttgttcttttgttttcgactacggaacaatttattccatgggccaaaatggaattataatataaaccatcaaagtgaaaatcttaatttggccgctgatttgcttttatctatattgcttgagacaaaagaaaaatcatggagtttttataaataa

SEQ ID NO: 203309 - DNA, 651 bp, Klebsiella oxytoca; identical to SEQ ID NO: 177252

SEQ ID NO: 203310 - DNA, 216 bp, Klebsiella oxytoca
atgatcgcgatcttcggtttatacatgtcttcttcgcggatccccatgctgcgccattgcgcacgacgtactgcccagcgggtggatcccggcttgaaattgcttctgtacatcttgaattcctttatcgggttgtggttttacgatccgaaatatcctctgtttgggttggttgtccaaccaatttttaagggaaatgtaattaagatcacataa

SEQ ID NO: 203311 - DNA, 981 bp, Klebsiella oxytoca
atggcaattaagaagctcgatgatggtcgctatgaagtggacataagaccgcgcggtcgcgatggaaaacgcatccgccggaagtttgaaagaaaggctgaggccattgcttttgagcgatacacaatcgcgaatgctagtcagaaagaatggacaggccagcgagcagaccgtcgtactttaacggaattgctggacgtttggtggaagtatcacgggcaaaatcacgagcatggaacaaaagaatttaaccacctgctcaagacaatcagcggtataggtgatatgccagtgagccggatgagcaaaagggctctgatggattatcgttctacgcgcttgcgcgatggcatcagcgccgcgacgataaaccgtgacgtgtaccgattatcaggtatgttcaccaagttaattcagttggatgagttttccgggcagcacccaattcacggactgccgccgttggcggaggccaacccggaaatgacatttctggaaaaatcagaaatcgaaacactgttaaatgttttggttggggatgacttacttgtcgcgcttttatgcctgagcaccggcggaagatggacggaagttgccacgctgaaaccagcgcagatagcaagttgcagggttacttttttgaaaactaaaaatggcaaaaagcgaaccgtgccgatttctgaggagctggagaaaaaagttaaaaaggaggccagcgcgaaattgttcaaagtcgattatgagaagttttgcgggattttacgcagagtgaaacctgatataccacccaatcaggcaacccatatcctgcggcacacattcgcaagccatttcatgatgaacggaggcaacataattgcgctgcagcagattctcgggcatgcgagcattcagcagacgatggcctatgctcaccttgcgcctgactacctgcagaacgccgtcgcactgaatcctcttaacggtggagtgacgttataa

SEQ ID NO: 203312 - DNA, 294 bp, Klebsiella oxytoca
atggagttaggtcaaaaacttaaagctctgcgtaaagcagaagggctaacacagaagagtttctgtgaggcttgcggtcttgcattaggaaccgttaaaaactatgaaggcgggtataaatctccgggcatacaagtgcttatgcaggtaacaaacaccgccagatttcagaaatacacgctttggctaatgacagataaaactgccccgcaagctggtcagatagcaccagctttcgcgcacattgggcaagaaccaacagaaccagaccactccgagaaacagattggttaa

SEQ ID NO: 203313 - DNA, 273 bp, Klebsiella oxytoca; identical to SEQ ID NO: 92310

SEQ ID NO: 203314 - DNA, 177 bp, Klebsiella oxytoca; identical to SEQ ID NO: 92311

SEQ ID NO: 203315 - DNA, 501 bp, Klebsiella oxytoca
atgcctgtaatgacacttggtatcgtggagaaacagcctgcagctctgcgcggtctgattggtaaatatctggccgcgcctcgctggcaggatagttgcgatttttacaatcagatgatggaacgtgagcgcctgaccgtttgttttcatgctcagttaaagcaacgtcacgcgacgatgcgttttgaagaaatgaacgatgtagaccgtgagcgattagtttgcgctattgatgagctgcgtgctgcatttagcagacgtcgacaggttggcgcgagcgagtatgcgtatattagttttttaacggtcagccaacgccgcactttgtttatgcatgccggattaactgaaaaagaatttaatcagccttactggcgtattaatgaaggttcatgttattggcgtgatgctttatttcgtgcgttgcgggagctttttaatttatttgaatacgcaccaacaatattaacctcggtaaagcctgagcaatatctgcattaa

SEQ ID NO: 203316 - DNA, 225 bp, Klebsiella oxytoca
atgcatacagtaacagtaaagcagcgcagtaacttctcattaatgctgcaacaggctcgagccgaagcgcaggccgatgcggcgacgcgcttttcatctcatctggacggcttaatccgtcacatagatggcgctgagttgtcgcgcgttgagattgtcgagttgctcagtcaggaatccatcaagtttcataatatcggcctttctcgtgaggaggctctttaa

SEQ ID NO: 203317 - DNA, 297 bp, Klebsiella oxytoca
atgtctctgatgcaatccgtattacttaataactggctaaagattgcggttatgaaaaacggtgaattatcgcttgccgatattaaacgcgataaagaaaccggaataatgacggaatcaactatcgctatttattcgagtgaattaaatctcctgacggatgtggttaatttgcttgtgaaacgcgccgtttttcataagcgaatcaccactgttgatgaattatcgaaattaaccattgagctgaccggttactgcactggtgagcttaaaaaactgaacaaagagaggagctaa

SEQ ID NO: 203318 - DNA, 225 bp, Klebsiella oxytoca
atgccggattatatggatcacattcaggagcgacagacggaatcactaactcgccagattaacgccgctcgggtgaaaccgtgcggcgctgctgcattggtttgcgaagaatgtgacgcaccaatccctgctgaccgccgtgcggcatatccgtcggcgacacgctgtgtctactgtcagtcagagtttgaatcaaaagctaaacactttcgggggcaggcatga

SEQ ID NO: 203319 - DNA, 276 bp, Klebsiella oxytoca
atgagcattcgtattgagattggcgagcgctatgtcgtcacaagtgaccgttttcagttcattttgcaggagaaaaaaaccgccgaaacagggaagaatgccggtaaagagtggctggatgttgtcggctattaccccaaattaaaccagctcgtttccggtttgattcagcacgatattttgagcggtagtgttggctcttttgaagcgttgagcgctcaggttgagcgacttggtcagcagtgtttaaaggcatttgacacaaatggctattga

SEQ ID NO: 203320 - DNA, 2283 bp, Klebsiella oxytoca
atggctattgagacgcgggggcgcgttgccccctcaccacctccgccgttttcaaaaagcaccggtgataatttcgtcggtgcttatccgtggaataaatccagagaggccattggccgcgacagaccccttacacgtgccgaactccgtcaggtgcaaggtgttttaaatcggattgaccgcctgccgtttttcctgcaaacaatgtttacttcgcgttataacttcatccgccgcacaaagagccctttgggtgggctttatttcctcaaaaatacatttgagcgcaagctgctcccgcgtcttgagcgtgttaatgagttgtgcgggatgaacgaagccgcttcgattgggtttatatctgagcgtgaccagtttgcgcgcctgcctgacatgaatgacaaggaactcagaaaatttgcggccagaatagcctcacagctctggagcaaatacgaggagttaagcgacgcatgggcagaggcacacggcggaaaagatacgctattcacagatgaggcgcaggcgcatttatacggtcaggtggccggtattgctcgcgcttttaatcttaccccgatgtactggaaaaaataccgcaagggtcagatgacgatccgaatggcattttccgcaatttcccgacttattaaagacgagtggtgggtcaatcagctcaaagcacagcgtatgcgctggcgcgaggcgctgctcatcgctgccggtgaggtcaataaagaccgttcaccttatgcgagcaaaatggcgattcgtgatgttcacgcgcgccgcctggctaatctcgaatacctgaaatcttgcgaactggaaaacaaagtcaccggcgaacgtatcgaccttatcagcaaggtcatggggagtatttcaaaccctgaaattcgtcgcatggagcttatgaatactatcgcagggattgagcgttatgccgctgctgagggtgatgtcggtatgtttatcacgctgacagcaccatcgaagtaccacccgacgcgtcagatcggaaagggtaaagataaaaccgtacagcttaatcatggctggaatggtgcggcttatacccctaaagatgcgcagcgttacctttgccgtatctggagcctgatgcgtacagctttcaaagataacgatttgcaggtttacggaatgcgtgtcgtcgagccacaccatgacgggacgccgcactggcacatgatgctgttttgcaagcgtcgacagcgtaaagaaatcaccgaaattatgcgtcgttatgctctcaaagaggatggcgaggagcgcggtgctgctcgtaacagatttcaggctaaacacctgaataaaggcggtgcggcagggtacatcgcgaaatacatcgcaaaaaatatcgacggttatgcgctcgatggtgagctcgataacgataccggcaagccgctcaaagataccgccgccgctgttactgcatgggcgtcaacgtggcgaatacctcagtttaagccgattggactgccgacaatgggcgcttaccgtgagctgcgtaagctgcctcgcggggtaagtattgctgacgagtttgatgagcgtgtcgaagctgcgcgcgctgctgccgatggcggtgatttcgacctgtatatcactgcacaaggtggcgcaaatatcccgcgcgacgggcagacggtcagggtagcccgtagcgttagtgacgaggttaacgactacgaggaagaaatcgagagagtggtcggtatatacgcacctcacctcggcgcgcatcacgttcacattacccggtcatcggaatggcgcattgttccaaagattttggccgttgagcctttgaccttaaaaagcggcatcgccgcgcctcggagtcctgtcaataactgtggaaagctcaccgccggagacgatccagttatgacccatacgccgtctgagcatgtcgcagcggtgctaaatctcgttgagggtggggttatcgcatgggatgaccccgaagttatgacagtgctcaggggcgctttaaaacgcgatacgccgcagaagaatcgccagcaaagaagcggcgaaccattaaaaccgcatgacattgcgccatcgggcaggatgacaaaatccgaacgcgctcaaataccgcggatccgctttgaccttgcgcaacatggcatcaccccgaaacgctgggagcttgaggcattggcacgtggtgcgaccgtgatttacgacgggcaaaaattctcttatccggtcactgatgagtggccgggattctcaacaagcatgtaa

SEQ ID NO: 203321 - DNA, 372 bp, Klebsiella oxytoca
atggcaacgttgaaggaattaattgtgtgtgaaatcgtcgacttttatgcggggttgggtcagccgggcgaaccagaaacaccggaggaaatgcagcggcagttaatggtgcgcgtaatgccactcctgaccaatggctctacgcacgaaaagcagccgataattgaagatagcgctacggtggggtggggggagttagcacagcgcgggttagtatttcgtataaattacgaggtcttacaccctcaagggttggcgatgatgtatgaccctgcaaccggtatttccgatggggcgctgttagcttcagatggtatctggaattattcggacgaaattattaaatctgcaaaacaaaaagggtggttgtga

SEQ ID NO: 203322 - DNA, 420 bp, Klebsiella oxytoca
atggcaacgcttgatgatatcttttggaagttcggttacgcctcagaggctgcccaactgctggaagttgaactgattaatgtaattatcgattatgagataaaacaaggtggggacattcccaagttaaaagaaaaattcttacaaatggataaatttacattaagtaagctgagcagattagcacgtgaaaaaggattgatagatgatgaagcgcttcaacatatgacggatgctcttagagctcgaaactacttggcacataatttttatcgcgcacataatttcgccaaatacaccccagaaggacggcaagaaatgctcgatgatttaaaaaaaacacacaacattatttttgaggcatacaggaaagtaatgctaatcagtggcgacaaaattccgcctttaggagatgattaa

SEQ ID NO: 203323 - DNA, 795 bp, Klebsiella oxytoca
  misc_feature (726)..(735): n is a, c, g, or t
atgaatgatcagcgttttctggaggccagcgcccgcactcgcgccgaagggttggtggatgaaggcacatttaccgagctgattggcccagcggcgaaacagattagtccgcatctgccggtgctgggcgaagcagtagagtttgacgatggcgttgtcaccggaatcggcttgctcggtcagcatccggctatcgttatctctcaggaaggccgcttcatcggcggttccgtcggtgaagtgggcggcgcgaaaatggtcggtgcgctgatgctggccgatgagctggcggcgcaaacccgcgacccggcccatcgtcccatcgtgcttatctcgtttgaaaccggcggcgtacgcctgcatgaagctaatgccggtttgctcgcccatgccgaatgcatggatatgctgcaaaccctgcgcggccgtgtaccggtagtggcgctgatcggcagcaagatcggctgcttcggcggtatgggttttgtcgctgcggcgacagacctgatcgtcatgagcgaatcaggcagactcgggctgactggcccggaggttatagaacaggaaatgggccgcaacgagttcgacgcctctgatcgggcgctggtgttccgcaccaccggaggcaagcacaaatatatcgttggtgactgcaactacctgattgccgattcgctggaggctttccaccagcaggcttcgctgattgccgatctgagttggccnnnnnnnnnnagattgaagcaatgcgtcggatcggcagcgaggcgaaagtccgcacgcagatggcgctga

SEQ ID NO: 203324 - DNA, 1371 bp, Klebsiella oxytoca
atgaattatccggcagaacccttccgtattaaaagcgttgaaactgtatcgatgatttcacgtgatgagcgcattcagaaaatgcaggaggcgggttacaatactttcctgttaaattccaaagatatttacattgatctgctgacagatagcggcaccaacgcgatgagcgataagcagtgggccggaatgatgatcggtgacgaagcttatgctggcagcgaaaatttttatcatctggaaagaaccgttcaggaactatttggctttaagcatattgttcctactcaccagggacgtggtgcagaaaatctgttgtctcagctggctattaaaccggggcaatatgttgctggtaatatgtactttacaacgacgcgttatcatcaggaaaagaatggcgcgacctttgtggatatcgttcgtgatgaagcccacgatgcaggtttaaatatcgcttttaaaggtgatatcgaccttaaaaaattacaaaagttgatcgacgaaaagggcgctgaaaatattgcctatatttgtctggccgtcaccgtgaacctggctgggggacaacccgtttcgatggccaatatgcgtgcagtacgtgaactaactcacgcacacggcattaaggttttctatgatgcgacccgctgcgttgaaaacgcctacttcattaaagagcaggagaaagggttcgaaaacaagagtatcaaagatatcgttcatgagatgttcagctatgctgacggttgcaccatgagcggcaaaaaagattgcctggtcaacatcggcgggttcctgtgcatgaacgatgatgagatgttctctgcggcaaaagagttggtagtggtgtatgaagggatgccgtcttacggcggtctggctgggcgtgatatggaagctatggcgatcggcttgcgtgaagcgatgcagtttgagtacattgagcatcgcgtgaagcaggttcgctacctgggcgataaattgaaagcggctggcgtaccgattgtcgaaccgattggcggacatgctgtattcctggatgcccgacgtttctgcgaacatctgacgcaggaccagttcccggcgcagagtctcgcggcaagtatctacatggaaactggcgttcgtagcatggagcgcggcattatttcagcaggtcgaaacaaagagacgggcgatcaccaccgtccgaaactggaaacggtacgtctaacgatcccgcgccgtgtctatacttatgctcatatggatatagtggcggacggcattattaaactctaccagcataaagaagatattcgtgggcttaagtttatttatgaacctaagcagcttcgcttctttactgctcgttttgattatatctaa

SEQ ID NO: 203325 - DNA, 1266 bp, Klebsiella oxytoca
atggatattaatgccattgaacgacagagtagtactcccggtctaaccagcggtacgatgctcgttattgctaccgtggttggtggtgggatgttctctctacccattgccatggctggagtatggtttcccggtgcttctgttattcttcttgctgtggccattatgatgctattaaccgggttgatgctggttgaggtcaatcttcactacggcgcaggtactagtttcaatacttttacccaggatttgctgggtcgaaaatggaatttagttgtcggtatcgcttttggttttgttctgtatattttgacctatgcctatatttccggatcgtccgcagtgatggctcaaacggtgtttaaatatagcggttttcgtttgtctgccagtatttcagtgattattgtcagtatgctcgtcggagcgatcgcgtggtatagctcactgctagtcggtcggatcaccactattctgataattggtaagtttgttgccttttttgccacattttctgggttagttgggcacatagaagtggcgaaactggttgatagcgtggcgtttgcattacccaatgcgcagtatgcgccgtatatcctgatgacattgccattttgcataatatcatttggtttccacggcaatgtacccagcctggttaagctgtatggaacgggcgggattcattatattacacgttcaatcattatcggaacactgttcgccgtcctgctatatgtcttctggctggcggtgaccatgggcaatatcagtcgcgcggaatttccgccgatcattgctaaaggaggcaatattgatgtttttgtcgaggcgatcagcggcctgttttccagccgttatatggatcttatcctcacctttttcggtaacttcgccgtggccagctctctactggcagcaacgcttggcctgtttgattatattgccgatttgttccacttcccggatgacggcattgggcgcctgaaaaccgcgctagtgacttactttccaccggccgctgtctgtgcctttttcccgaatggctttgtccatgcgattggctacgctggactggcgtttactatctggagtgtgattctgccgccgttcctggtgaaggccgcgcgtcgacgtttcgccactgccagatatactgcgccatgcagtaatgtcgtactcaatctgattatcgtctgtggtggaattgtctacctgacggtggtgctggatatttttggtttactgccaacgtttcgctag

SEQ ID NO: 203326 - DNA, 927 bp, Klebsiella oxytoca
atgagcactcctgtttctatcaaacatttagagttcttcatcaagattgtggaatgcggtggattatccgaggctgccgctcagcttaacgtttcaccctctgcggtgagtaaaagcctggcggcgatggaagatacgcttggtactaccttaattaaacgcactacccgaagtattacattaaccgatgcagggcaatatttatttaaccgtgcaacgaaattacttaacgaatttgatgaaacgttaaatacaacttccggttattatcacaacccgcaaggcgaattacgtataacttgttcaattgcctttggatattctcgtctggtcaacctggtggataaatatcgtaccctgtatccagacgtgaatctctacatcgacctcaacgataacttcatcaatctgaacgaaacggattttgatctcgccctgcgtatctctaccgcaccaccacaaaactacgccatgcgtaaactggtgccgattcgttgggcctactgcgcatcccccggatatctggcgaaaaaagggatgccgctgcgtcgttccgatctcgtggatcatgattgcctggtctatcccgggctcacaccggtgataaaagttgcggatgaacaggagcggctgcatcaactgaagctgcatatgccgattcaggctaacagcagtctggtattgctcaaatcggtactggaagatcagggggtggcttacctgccaacttacctgattggtgatcatattcggaaggaggagatcacgccattgatgctcgatggaaccatcacctgcgaaacacataccctctacgctctctatttcccaagcaagtacagcaacccgaaagtacgctcatttattgattttctggttaaggagctaggaacgcttccagcctgggataactggatacccgactaa

SEQ ID NO: 203327 - DNA, 1233 bp, Klebsiella oxytoca
atgtggtcacgactcgaaccctaccgatcttctattattttattactcgctctggttgtcggcggcttgttaggtatttatgcaccgacgtttgccagtaaacttcaaccaataggtcagattttcctgaacctgttatttatgattatcgttcctctggtgggaatcagcgttatgtcgtctattgccagtatgactgacctgaaacggctggggcgcattatggcgattatctttatcgtctctatcgcgatggccttcattcctgccgccgggattgcgatgctcgccctgtggtacaaccccgcgcagggggtgacaatcgatctttcgcaatccgtacaggcgggtagcggcaagatggattttgtcagtatgatcaccaccagcgactttatcggtttgttttctaaatcaaatattctggtgctgatcgtcatggcgattattgccgggatcgcgattgggcagtcggaacaggcgggtaaacgtatcgcttcgctgctggaagacgcgaatacggtgattatgaagatcgtcgcaattatcatgaaagtggcccccattggcctcggctgctactttgcagccacgatggccagccaggactccggcttactgctgacctttgccagggcgattggcctgtttatggttgcgaccctcgtttactacatcttcggctctattctctactcttacattggcggtggaatatccgcggtgaaagcgttctggcgaaatgcaattgaaccttcggtaaccgcgctgggaacctgctcctcgctgggtacgctaccggtgaccctgcgagcaggcaaggcgatgggaattaacccggaaatcgtcgatgtttcaatacctctgctggttaacctgaataaaggcggtgtggcgatgattgccgcactgaagattgtctttatctattcagtgctgggtatggagttcactactgagacgttcttcttgacaatgctgatagccgtgctttcggcgattatcgtcggtggtgtgcccggtggcgcattcctcggtgaaatctttattgtcacgacgttgggtctgcctatggaggctatcccgatgctggtagtactgggcacgattacggatgcgcccgccacgcttatcaacgttattcatgatttgaatgcaacacagattgtggaacgcttcgccggaaaaaagcagctgaacgctgacatgaacacaacggtcaccgtggtgtag

SEQ ID NO: 203328 - DNA, 1191 bp, Klebsiella oxytoca
atgaaagattcaattaagcttgagacacagttaatcattgccggacgcgacaagcgatatacccagggagcggttaacccggtgatccagcgtgcttcttcactggtttttgataccgtgaaggataaaaaattcgccacggccaatcgcgctaacggcgagctgttctacggtcgccgtggcacctggacccacttctccttccagaaagcgatgagcgagctggaaggtggggttggatgcgcgctctatccgtgtggcgctgcggcggtgacgaatgcgattctggcctttgtacaggggggcgatcatatactgatgaccggtgcggcctatgaacccacgcaggacttctgtaataaggttctgagcaagttcgatgtgacaacaacttactatgatccgctgattggcgcaggcatcgcctcgctgatccgtcgcgagaccaaagtggtcttccttgaatcccccagctctatcacgatggaagttcaggatgtaccgggcatggtaaaagcgatccgtgcggtgaaccctgaaattgtcattatgatcgacaatacctgggcggccggtgtgctgtttaaggcactcgactatggggtggatatttcgattcaggcggggactaagtacaccattggccattccgacggtatgctgggtacggcagtctctaacgcccgctgctgggatcgcctgcgggaaaactcttatctgatggggcaaacgctggacgctgatacggcctataacggtagccgcggcctgcgcacactgtcggtgcgtctgaaacagcatcaggaaagcagtattcaggtggctcgttggctgtcagctcggccagaagtggagcgggtaaaccatccggccctgccggagtgcccgggtcacgaatatttccagcgagacttttcaggtagctccggtttattctcgttcgtcctgaaaaaacggctgagcgatgaacagatggccagtttcctcgataatttctcactgttccatatggcctattcgtgggggggattcgagtcgttgattctggcaaatcagccggaggagctgaacagtatccgtcctgccggggatgttgatttcagtggcacgctggtcaggctgcatattggtctggaggatgtggacgatttgatagaagatctggaggcgggatttgctcgtattgagtaa

SEQ ID NO: 203329 - DNA, 288 bp, Klebsiella oxytoca
gtggctgatgcaaagtcacacggcagcaaatattccgcgctgacgttcctggcgaatcatcaggttgaggtacgactgaatgaccgctatgccattatgcataacaaagtcatgattgccgacaaccgtcatgtcaaaaccggcagctttaattactctgcagcagcaaataaaagcaatgccgaaaatgtgctagttattcgcgaccagccagtgctggccagagcgtatcagaaagagttcgatcgactgtggactgaaggtacgcctctgataccctccctctga

SEQ ID NO: 203330 - DNA, 288 bp, Klebsiella oxytoca
atgtgcacgccggcgttcgtcatcagtgaactgcggcataatgagaggcccgccggtaagttcggcggtctgctgtgccttgatttgtcctttattcttttcccgggtcatgtcgtcatcaccggcgatgatgtgcgtgctgtccgggtatttctccttcagcttgccggcgaccgtgaccatatttccggcatccacggtcattaccaccggcagaccactggccagatgcagggtggccgcagtggcgtatccctctgcgtacataaagggctggccattgcgtaa

SEQ ID NO: 203331 - DNA, 345 bp, Klebsiella oxytoca
atgactgccgtgatcgtaaaaagccggacggtcatccacgctgtaaagcaccgttccgtcctgctgctgtgcgtgggtcattcgcatcagcagtgcatcagggttgagctgttctgccagcggtctgtctgtctggcctgtcaccggtttagtctcgggtgcattatgatgctgtcccgggtggcgttcaggcgtcagcaggatcccgtccgtctctgctgcctgttccgtccggttctgcgcaacgggagtcggttcagactggaaaagggcctccggcggacgggtatcttttgcctccggcatgacaggccgcgtctctccctgcagatacatctgcattaa

SEQ ID NO: 203332 - DNA, 339 bp, Klebsiella oxytoca
atggccggttttgagtgcgcgcagcagtgcctcgcgggagaaatagaacgtcgcgccaatctggcgggatttgagaatatcgcgaatacggtgcgccagccctgcgcggtaccactgcagctgatactcgaaagactggtcgaagaatatttcttccagctttgcgatagcctcgtcgctgaaaaagttctttttcggtttcttacgctcgcctttgttgcggttggcaacgttggggttaaggtcgacctcgttgccggtctggctgtagcggttaacgcgcgccagtcgctcaatctgccgcccgagcaggtcaatctctttgaagtcgccgcctga

SEQ ID NO: 203333 - DNA, 156 bp, Klebsiella oxytoca
atggctctgcgccgtgttggaattggtaccgagaaaaatcagttttgcgccgttgttgccgatgacaatcgggtcgccggtcaggtcgacgtcgaccagtcgcgcaaactggatgatgtactctcggaacacgtaagcctgcgttttactggctga

SEQ ID NO: 203334 - DNA, 228 bp, Klebsiella oxytoca
atgcaggctcaggcgatgcgtgtttatcagattgcgttcagcggacgcgatgcacagggcgttttaccgatgtttacccgtatccgcgccatgaccggaaagcgggctgtcagggcatttatcgaacgttatcaacccgtcagcggctggtttttaggcgaccccgaagatattacggacaaattacagaaggaggcggtatacacgggcagcaacccgcagacatga

SEQ ID NO: 203335 - DNA, 1383 bp, Klebsiella oxytoca
atgacacagactaccgcactggctctgaccaccgccatgaccccgtcgcccgcgtccgaaaacagccccgcgcagtcgtaccgggcgacttattccccggacgacaacaaattacgcctgtatgccgcgctgcgtctcgatgatgaaacgtatcagaagatccacgctgtgggttttcgctgggcgccgaaacaaaaactgtttgttgcgcccgcctggacgcccgcccgtgaggatgtgcttctgtgccttgccggagatattgaagacgatgacaacactctgtttgaccgccaggaacaacgcgccgaccgtttcagcggctacagtgaaaaacgcgccggggagtcagcgcagacgctcgcgcaggtggacgcgctggcttcggttatcccgttcggacagccgatcctggttggccatcacagcgaacgccgcgcgcgacgggatgcgcagcgtattgaaaacggcatgaaacgcgccgtgatgctctttgaacgtgcggaatactgggaggatcgggcgcatgcatccctgcgtctggcgaagtacaaggagcgtccggatgtgcgttaccgccgtatcagaaagattgaggcggacaagcgcaaggcggagcggaatattgcacaggcgcagaaatatctgacgatgtggcgggcgcagacgctggatctgaaaatggcgcagcttatcagcaattacgatcatatttacacctgtttcacgctggataaatacccgcgaccgccggagaaaagccagtacgaaggccagatgtccctgcattcggcgcttgaaaacgagattatcacctttgaacaggcccgcgatattgccgccccttatcatgaacgcacgatccgccatcagcagcgctggctgaatcactaccagaaccgcctggcctatgagcgggccatgctggacgaaagcggcggcgtggtcacccgtacccgggagtttgagccaggtgggcaggtccagagccggggcgaatggctgaccatcatccgcatcaataaaagcggcggtgcggtcagttcggttgtcaccccgtattacagctttatgcgctgcaacgggaccatgacactgacccccgaccgtatcacggactataaagccccctctgcggaagaagcccgcgccgcaaaacaggcagcgaaacgcccgccgatcgtcaactatccgggggagggtttccgcgaaatgacaaaagccgaatggtcgaaaaccccggctgattataagtcggtccggggcgtcgctgaaaatgatgagcatggcgcgtaccgcttccgccgtatcatgaccagcggctacacacttgataacgtctacatcaccgacatgaaaaccgtcgaaatcccgcaaaaataa

SEQ ID NO: 203336 - DNA, 564 bp, Klebsiella oxytoca
atgcatagtgaactcagggaccgcattcaggcgatgcgggccagacttgacggacgtacacccgtggccgaaatccgggccagctcacagcttttcgtcactcccgatccagtctgtcaccagatggttgatcttgcggagattaccgattctgatcgtattctggagccagaggtcggaacgggggccattttacgtgccatccgggaggtggccccgctggcacggtgtgacgctgtggagcttaacgccgcgttagccgcacatctgcgggcggcgtttccgggcgttaacgtccggtgcggggattttctggaatatcagccggaaagcctctggagcaaaattctgatgaatccgccgtttcagcatgcgcaggatatccaccatatacaacacgccttaacgctgctcgaatcaggtggaatactgacggcagtttgtctgaacggaccgcggcaacagaagatcctgaaacccctgactgatgtctgggaaccgctgccgcgtggcacattcacgtacaccgatgtttcagccgtcctgatcagaattcggaactga

SEQ ID NO: 203337 - DNA, 309 bp, Klebsiella oxytoca
atgaatctggcttttttcctggtgtccttcctttgctcctggtcccgggtgctgtgtttttcgcgggtcagcctgcgtcaggggacggaaaagtcaacaggccgcgtgaacgctggccgcattaatttttttcgcctcaaagggacgtctaaaaaaatgaacgcgtcccctgtggactttaccgccgcgcctgccgctgacgtcttcccacgaaaagcccctcaccccggagaaaaccggcagagggaaatacaccagaaagaagccagaggcttcagggagcaacatgatggcaacacgcggcgttaa

SEQ ID NO: 203338 - DNA, 531 bp, Klebsiella oxytoca
atggcaacacgcggcgttaacaaagtgatcctggtaggaaatctggggcaggaccccgaagtgcgttacatgcccaacgggggcgcggtggcaaatcttaccctggccacgtcagaaagctggcgtgacaaacaggacggggagatccgtgaacacaccgaatggcaccgtgttgtcgtgtttggcaagctcgctgaaattgccagtgaatacctgcgtaaaggtgctcaggtctacattgagggccagttacgtacccgtaaatggacggatcaatccggtcaggacaaatacaccaccgaagtggttgtcgggcagaacggcaccatgcagatgctcggtcgtcgtgacagccagccgcagcagggcgatcagccgcaacctcagaacccacctccggcagcaaagggagagggcaaagcggcaaaaggggcggggaggtctgccaaaggacaaaacaccgcagcaccgcaacagccgccagcgcagcccgatccggcgtatggcttcgacgatggcattcccttctag

SEQ ID NO: 203339 - DNA, 243 bp, Klebsiella oxytoca
atgacggacaacaccatgcccccactgaaatccctgcctgacgggactttcacccgcgaacaggccgaagcggtggcggcacagtatcagaatgtggccatcgaggacgatcaggggacgcactttcgcctggttgtgcgcaaggatggcgaaatggtctggcgggtctggaatttcgaaccgggcggcgagtactggatgaaccgaaatatccggagctacggcatccgtaaacagcagtaa

SEQ ID NO: 203340 - DNA, 2025 bp, Klebsiella oxytoca
atgtcagtcagcgagtctaaagcaaaaaaggcaaaaaaagccagccccaaagcagcagcgcataaagttaatgcacagtcagacgttctggttgccgcactggacagcgcccccatccgttacactgcctggtcccgcctgtttatcggggaactgaactgccgcattgtgccgcacactccggaagaaatcaggggatatgccgacagtatccacgcagtcgggcagatccataacatcgtggtggtggaatgtgatgatggtcggctggaagtggtttgtggcgggggacggacaaaagcgatcggtctgctggttgaagaagggaaggtaaacccggatcacgaatggatttcttataaagccgtaccgcgtgaacttgcacgtgctgtctcccttaccgaaaacggcagacaccgtgccatgcaccccgccgagcagatcgccggattccgtgccctggctgaagaagggaaaacgtcagcacaaatcggggacctgctgggctacggcgtgaaacacgtccagcgaatgctgaagctggcagggctggctccggttattcttcaggcgctggcagaggacaagatcaccaccgaacactgtcaggcactggcactggaagataatcctgaccgtcaggtgcaggtgtacgagtcggcgtgtcgggagggctggaacaataaaccggaagtgcgcgtgatccgtaatttgatcaccgacagtcaggtttctaccctcaacaacagcaaatatgcgtttgtcggtgaaaaacccttctccggcgatgaaatccgctcagacctgttcagcgatgaacagggcggttttgtggacaaactggcgctggatacggccctgcttgaaaaactccaggtggttgcggagtgcctgaaagaggcagagggctggacatgggcgaagggacgccttgatgcggtcagttatcacggcgaggactgcgcggtgtaccgcattcaggatgagcctgacgcggtttacacggagcaggaacagcagcgcatggatgaattgcaggatcagtatgacgagaaccagatcgccagcgatgaaacagacgcgatggcgtcagagatggaggccatcgaatgcgccgcacagctccgggcatggacgccggaaatgcgcgcacagtccggcgtggtggtgtcatggcgtcacggtgaaatctgtgtccagcgcggggtgatcctgcgtgagcagtctgaaacggaagacgaacctgcccaggtaaaaacatatgaacgccagccagagcctgtggacgatatcagtgttcccctgctgaccagaatgtgtgccgagcggacgctggcagtccaggcggcactgatgcagcagccggaaaaatccgtggccatgctggcatggactctctgcctgaacgtgttcgccagcggcgcgtataaccgacccgcgcaaatttccctggactgtaaacattactccctgacgaataccgccccgtccggtcaggagggcatggcatttctgaccctgatgcaggaagggagacgccttgaaacgctgctgccggaaggatggaaacagaatttcaccacattcttcaccctcagcaccgtcgatcttctggcactgctcagtttctgcacggcatgcagtctcgatggtatgcagacgcgcggcaccggaggcactacccgcagcccgctcgataagctggaaacctcgcttgctttccatctgcgcgactggtggcaaccgacgaaggccgatttcttcactggcctcagaaagccacaaatcatcgccgcactgaacgaggccgggctgactggtgcggcgcgggatgcggagaagatgaagaaaggcgatgcggctgaactggcagaggacaaaatgcgggacacccgctgggtgcctgtctggatgcgcgcccctgatgcagaaaaatccccgtctgatgcggaaaacggcagtgctgatgcacccgatgcgacttttgatgcagacaaccaccacaccctgtccgatgcagcctga

SEQ ID NO: 203341 - DNA, 432 bp, Klebsiella oxytoca
atgcgtaacattattacccctgctgtactgaacaccatgatcccccaggaatttgaagactggcgcgacagcggcgaagacctgcgccgcgaactgacccacgccgtgatgcgtgacctgacgtgtcccgcaggctgggacctgaacggcgagtacagcagtgagtttggtggttttttcccggtgcagatccgtttcacgccctcccacggtaatttcagcctggcggtatgcagccccggcgatatcagcccgtcctggatggtggtctttattccggtcagcggtcgcccgttctctgttatccgcacgctgccagcgtggtcaccggaggttatcacgcatacactcagccgggtggctcacctcgatgacgacggttacagtcagggcagcatcatcagcgttctggcgatggagggcgcagcatga

SEQ ID NO: 203342 - DNA, 729 bp, Klebsiella oxytoca
atgatccacgcctcacacgccctggttaccctgaaacccgcccgtcaggcggcattacaggctattgtgacggtggaagaatcccgccgccgtggagcacgtctgcccgccctgccacatgcgcgtacgtttttgcgcatactgaccggcagcagccggattaacacgacagtggcgcagcgtattcccggtctgaactgggagccgaagaatcgcctttgcagtctcaaacaagtggaggaagcgctggatcgtctcatctccagccacggggagtcttgcccgctgccactttccactgatgtacaggctgaactgttcccggaggtgatgcacacccgcacggagcgtcggatgcaacgcgagaaaatcaccgttacccgcaaaatgcgccgggaagaccgggtgcttgagcatacctggctgttgcgccagaacctgctggggcaggccatgacggagcttaactttcagtcgccggaaaccattaacacctggtatacgcgctgggctgacgagtttgacgcgcgggagctggcacaggggttctggcagtggcggacgcggtttgcctcgctgaagccgctggactggctgcgcgacagcgatgagccgctgtacaacgtgatgtatgaaatccggttcatcgtccgggataccccggcacatttacatgaggccgaacgctggcaggtacccaacaagctgacggaccggagccggggatga

SEQ ID NO: 203343 - DNA, 189 bp, Klebsiella oxytoca
atgaacggaaaaatgtatcaatccctgcgtaaaaagtcaatgagtaagggaggggggatagcgtgtatcatcatgttgatacacgcgttatccatttcctcagtgcggatggatttagacgtacatatgggggatgtgaattggaaacactcgattgtgcttaaaactactgggggcaagggagagtaa

SEQ ID NO: 203344 - DNA, 603 bp, Klebsiella oxytoca
atgcataaaattgttacattagagagtgttgctgagatcaaattagggatgccctttaaatcagcgatacaagatgctggcgagcaaggttcctgctaccttatccagacgaaagatattgggcttgatggtatcctggatcttggaactttaacttctgtccttccagatggaaatccagagaaacactatctcttccccaacgatattttattacgtctgcgaggacctgttttttcagctggaattatcgaagagggtacggataaaccaattattacgtctaatcaattagccgtgattagatgtaatgaaaagctaatattaccgcattatttacattggtatataaattctgcttctggtagtaaatatattcgtagtatgagtgaaggaaccagtattagtaagattaattcaaaagcaatttctaaaatgaatgttaaacttccaacattggaagagcaagataagattggcttgataaatagaaattggattaaacaaaaaatcacctataatgcgttaatacaaaatggtgatttactttttgatagtatatgtgaaagcattattaataggagggctttggaaaatgagtga

SEQ ID NO: 203345 - DNA, 1482 bp, Klebsiella oxytoca
atgagtgaaatgatggcactccaaaaatcactttggcttgcttgcgagctatttagaggaaaaattgactcatctgcatataaagatcatatatttccattgttgttactgaaatatatttctgacatgaagaatgactttgtggagggtttagttaatgaaaactattctgagctgttagtcattgtttctcgagtaccagaggatgcaaacttttataaaatatatcatgaagctaaaaatcgtggtggctatattggagagagaattgatgactcgctgagattaattgatcaagctattgactcggtctgccagagtagagggggatatttattcgagtctatacaattcgcttcagttaattttggtacaagatcagaaagagatcggatgctttatgatttactcactatttttgcacgccctgaaatggattttagatatagtcaagatggtgctaataagataaaatttgcttgtagttatctttttgaaaaattttcgtctgattctaacgggcgaaattcagagctttatactccagaaggtgtttcatggttaattgcagaattgctgcagcctaaaccgggggataaagtttgtgatcccatttgcggttcaggttctcttttaattaccttaggagaaaaaataaaaaacgcctatggaagcaatgattatcttttatttggccaagaggttaataggtcaggctgggccttggctaagataaatatgcttctgcataacgagatgaatagcagggtagagtggggggatgttatttctaacccacaacttctggattctgataatagattgatgaagtttgatgtagttgcctctaacccaccgttaaatattggcggttggaatcatgacgatctactatctgatgtttatgggcgttttaatttaggtctccctcctcatactaagggtgattatgcctttattttgcacatggtttcaacgcttaagaacgcaacggggagaatggccatacttgtatctcatggagtgctgttccgtggaggtcaggaagagaatataaggaaaaatttagttgatgagggattattggatgcagtaataggtctaccagatagacttcttcctgggacagggataccaagtgtcattttgatgtttaggaaagataaaaatagctccgatgttttgtttattgatgcatctgatttggctaaacctataaaagggcgtaatttacttacaagaaaagttattgataaaatttcgaaatgttatttcgaaagaacgatcgttgacggtttttcgcatgtggcttatccagatgaaattcgtcaaaacgattataaccttaacatatctcgatatgttaaaaagtatgaagaacttgttcctgtagatcttaagagcttacgccaacagcgtgaagaactactatcaacattgcatgaattagaaagagaaatgaaaggttttattgataattga

SEQ ID NO: 203346 - DNA, 1557 bp, Klebsiella oxytoca
atgacaagcacccaacaacgcgccgcactgcaacgccagatctggcagattgccaacgatgtacgcggtgcagtggatggctgggattttaagcaatacgttttaggcgctctgttttaccgcttcatcagcgaaaattttgctaattacattgaaggcggtgatgacagcgtcaagtatgcaacactcccccggagcgttattaccccggagatcaaagacgacgccattaaaaccaaaggctatttcatttacccagatgatttgtttgttaacatcgccgcaggtgctagtgctaacgaaaaattaaacaccgatttggctgacatcttctcggctattgaaatgtcagccagcggatacccttcagagaacgatatcaagggtttgtttgctgattttgacactaccagcaaccggctcggcaatacggtaaaagacaaaaatacacgtctggcggcagtgctcaaaggggtggcagaattagattttggcgattttgaaggtagtcacatcgaccttttcggtgatgcctacgagtttcttatctccaactacgccgccaacgctggcaaatccggcggtgagttttttacgccacaacacgtgtccaaacttattgcgcaactggccatgcacaagcaaaccagcgtcaacaagatttatgacccggcgtgtggttctggctcactgctgctgcaagccaaaaaacactttgacgcccacattattgaagatggtttttgggggcaggaactcaaccacaccacctacaacttggcgcggatgaacatgttcttgcacaacatcaactacgacaagttcaatatccagctcggtgatacgctacgtaatccgcattttggcgatgacaaaccttttgatgccatcgtctccaacccaccttactcggtgaaatggataggctcagacgatcccacgctgatcaacgatgaccgttttgccccggcaggtgtgttagcgcccaaatccaaagctgacttcgcttttgtgctgcatgcgctcagttatctttccagcaaaggccgtgcagccattgtttgcttccccggcattttttaccggggtggcgccgagcagaaaattcgccaatatctggtggataacaactacgtcgaaaccgtgattgcactcgcgcctaacctgttttttggcaccaccatcgccgtcaatattctagtgctgtccaaacacaaaaccgacatgaccacacagtttatcgatgccagcgggttgtttaagaaggaagccaataacaacacgctcactgagaagcatattgagcaaatcatgcaggtgtttgatagcaaagcaggtgttgatcattttgccaaatcggtgagctttgaagatattaaggccaatgattacaatctgtcggtgagtagctatatcgaaaccaaggacaaccgggaagtagtcgatatcaccacacttaatgctgagctgaaaatcactgtcgccaaaatagaccagctgcggacggagattgatgcaattgtgtcgaaaattgaaagcaaggagagtgcgacatga

SEQ ID NO: 203347 - DNA, 327 bp, Klebsiella oxytoca
atgagttgtaaagacaccgtaccgagtgtatatctcaccgtagtgaatagcactgataccatcttcgacatagtcagctttcgtaaaacgctttcctcgaataaattcgccaatctctcccaaagctttccactctacttccccttcctcaaaacccaacaattggtcgcgatagtagttgtattgctttttacgggctgtaagctcggctgtaagctcagctataagggcggtaaaggtgtccagaatgcggacgatttcggcttgaatttcaagcgatctttttttattttcagggcaagggataggaattggaaagttttctaa

SEQ ID NO: 203348 - DNA, 225 bp, Klebsiella oxytoca
atgaaacaaaagccggtaaaaaatgcgctgataatgtttggatcagcgtatctcgttaacgcagaggagatatcaccgatattgggaaagttctactgtttccactgcacgagtccgatgatttacgtctgtgccgatgaatcgcagaaagaacatttcttacatgatttgacggcattaacttataaggctgctgatatctgcccttatctgatctctgactag

SEQ ID NO: 203349 - DNA, 3099 bp, Klebsiella oxytoca
atgtacgactacaaggctgttgccgaatcaaatagctttatcgttctcgataaatacgccaaagaatggcagcttaatgaaagctaccagagcgaaggtgacctggaacgggagttcattcaggatttgcacaatcagggctacgagtatgagcccggtttaaatacgcctgagaagctgctggccaacgtgcgcgagcatttgcagaccctgaacaacatgcagtttgctgacggtgagtggatgcggtttgtggagacctggctggacaagccaagcgatggcatcgtcgataaaactcgcaaaattcacaacgactatatccatgattttgtgtttgacgatggtcatatccagaacatctacctggtagacaaaaaaaacattgcccgcaataaggttcaggtcatcaagcagtttgagcaacagggtagtcatgccaatcgttatgatgtcactattctggtgaatggcttgccgctggtgcaggtggaactgaaaaagcgcggcgtggcgatccgcgaagcctttaatcaggtgcatcgctacagtaaagagagttttaacagcgagcattctttgttcaagtatttgcagctgtttgtgatttccaacggcaccgatagccgttattttgccaataccacccagcgcaacaaaaacagcttcgacttcaccatgaactgggcgaaagctgataatagcttgctgaaagacctcaaggactttactgcaacctttttccagaaggacaccctgctcaatgtgctgctgcattattcggtgtttgatgtgagcgatgcactactagtgatgcgcccttatcagattgccgctactgagcgtatcttgtggaagatcaacagcgcctatcaggccaaaaactggagcaatacggaaagcggcggttatatctggcacaccacaggttctggtaaaaccttgaccagcttcaaggcagcgcgcttagccactgagcttgagtttatcgataaagttttcttcgtggtggatcgtaaagatctggattaccagacaatgaaggagtaccagcgtttttcgccggatagtgtgaacggctctgacagcaccgcaggactcaagcgtaacctggataaagatgacaataaaatcatcgtcaccactattcagaagctcaataatctgatgaagagcgaaaacgacctgcccatttacaacaaacaggtggtgtttatctttgatgaatgccaccgtagccagtttggtgaagctcagaagaacttaaagaaaaagtttaagaagttctatcagtttggctttaccggcacaccgatttttccgcaaaatgctctgggggccgacaccacggccagcgtattcggccgggagctgcactcttatgtgatcaccgatgcgattcgagatgaaaaggtgctcaagttcaaagtggactacaacgatgtgcggccgcatttcaaagccattgaaagcgagcaggacgagaaaaagctcagcgcggcggaaaacaggcaagccttattgcatcccatccgtataaaagagatttcgcagtacatcctgaataactttcggcaaaaaacgcatcgcctgtatgcaggagctaaaggctttaatgcgatgtttgccgtgagcagcgtggatgctgccaagctgtattacgaatcgttcaaagacttgcaaaaagacagcgataagccactaaaaatcgccaccattttctcttttgtggccaatgaggaacaggatgctgtaggcgatattctggatgaaagttttgacgtatcggcaatgaacagcagcgccaaagagtttttaagtgcagccatagctgactacaacgcactgttcaaaaccaacttcagcgtggaaagcaatggttttcaaaactattaccgagatctggccaagcaagttaaggctaaggagatcgacttactgattgtggtcggcatgttcctgaccgggtttgatgcgccgacgctgaacactttgtttgtggataaaaacctgcgctaccacggtttgatgcaagcctattcacgcaccaaccgtatttttgacgcaaccaaaaccttcggcaatatcgttaccttccgtgacctggagcaggcgacaattgacgccatcactttatttggcgataaaaacaccaagaacgtggtgctcgagaaaagctacaaggagtatatggaaggctttaccgacgtagtaaccggtgaggcaaggcgtggctttgtggatgtggtgacggagctagagcaacgctttccagatccctctgccattgagaaagagtccgacaaaaaagcctttgcgaaactctttggtgagtatttacgcgttgagaacgtgctgcaaaactacgatgagtttgccagcctgaaggccttgcagaacattaacatcaatgaccctgaggcggttgaggagttcaagaccctgcattatttaagcgatgaggatctggcaacgctgcaaacaattaaaatgccgtctgaacggaaaattcaggactaccgttcaacttataacgatgttcgcgactggctgcgtcgggaaaaatcttccgctgaaaaagaacaatcaactattgattgggatgacgttgtctttgaggtagatctactgaagtcgcaagaaattaatcttgattatattctcgagctgatttttgaacacaatcgtaagaataaaagtaaagcaggcttaattgatgaagttcgtcgattaatacgtgccagtcttgggagtcgggccaaagaaagcctagtcgttgattttattaatcaaaccgacctggacaaaattagtgacaaggccagtattatagatgccttctttgcttttgcacaagtagagcaactacgcgaagcacaagagttaattggatctgagaatctgaatgaagaggcagctaaacgttatattaccacttctcttaaacgagagtttgccagcgacaatggtacggagctcaatgctgttttgcccaaaatgagcccactaaatccccaatacctcacaaaaaagcaaagtgttttccaaaaaattgcagcgtttgttgaaaaatttaagggagtgggtgggaaaatatag

SEQ ID NO: 203350 - DNA, 1191 bp, Klebsiella oxytoca
atgagaaagacgctagcagaaatcgcccagcagcttaaagacgccaataaaaaagtacagttgatctatgcctttaatggcacggggaaaacgcgcctgtcgcgcgaatttaagcagcttgttgccctccggaatgaaggggatgaagtcgatcaatctgagctgtcacgcaacaaattcctgtattacaatgcttttactgaagatttattctattgggacaacgacctggagcaggatgccgagcctaggctaaggatccagcccaattcgtttaccgactgggtgctgaaagatcaagggcaagatcgaaacatcattaccaattttcagcgctacgctaatgagaagctaacaccaaaattcaatgaagaatataaagtcaaaggcaaggacgacaaagagatcactgtaagggctttctcagaagtgactttttctcttgaacgcggtgacgataaacattccggaaatttgaaaatctccaagggtgaggaaagcaatttcatctggagtattttctatacgctgatcgaactggtgattgacattctcaatgttgctgagcccgccgagcgtgaaaccaacgcgtttgaccaattagaatatatctttattgacgacccggtaagttcgctggatgagaaccatttgattgaactggccgtcgatttggcccaactgatcaagtcaaacaattctgatgttaaattcatcatcaccactcacaatccgcttttttataacgttctgcataatgagctcaacagtgatgacggtggttataagaaaaaatggcttgataagtatcggatgaccaggcttgacgacggcacatttcagttagaccagcaacccaatgactcaccgttctcatatcatctttatttgaaatcagaactcgaaaaagccatcgagagtggtcaactgagcaagtatcactttaattttttaagaaacattctggaaaaaacctccacgtttcttggctataagaaatggggcgatctgttgccaaaaactgatgacggaaaaaccaatccgtatgaggcccggattattaatatttccagccactcgaaacatgcgggcgaagaaatagccgatctcactgaagacgacaagcgtgttttgcggtatctggttaatgaaatcaatacgatgtatcgctttcagcaggctgaaaactaa

SEQ ID NO: 203351 - DNA, 1209 bp, Klebsiella oxytoca
atgaaatcttatcagaattgggtgaagaggatgagcagtaataatcagagaaccttcaaagacttagtaagcatatacaaagctgcttcctttgtaggcaacacatctgaagcctctattatgctcgacaaggaagagctgcgtgagattctgcatgatatcgcgcagcatcctgatgactttggggtaacgattgagtctggcaatttagagctcggagagatcctaaccttacatgtagccccaccaaaacttcgtatggggcaacttcacttttcatttaacgaataccttaaaaattctaaaaacaggataaaagaggcaaataatttttttattgtcgaccttaatttttacaataaagaacgtgaggcattgccaatcatatccagataccgcaatgtgttacgattaattactttattcaaagaatgttctgcatatctcgacgagactaatgctgagcttgttttcgtcgacactaatgttcttaaaataccggtaaactattctgctgaagaccttgtcgattctaatgacagtctcattcaaagcttgatcgcaaatttcgctgaagatactcacaaagaacaaaaattaaccatacttgctagcagcataaaatccctatgcgaatcaaaaagtaaagaatcttctttctcgtctatgttaagagatttgaaactactatctgaaagttttcaaaaaggatataaagtatttgtatctggattctcatacgaaaaaatactcgatcaacttcgtgtagccaaaatagaagaaatgggaaaaatacataaagttttcagtgacatacagaatcaaattcttggtatacctgtcgcaacaatcatagttgcgacacaaatgaaacaagctaatggctgggatagccaagctttaataaatactgcagtcgtgctgggtgccttattctttacaattatgattcttttcgtccttttcaaccaatggcaaacgctctcagcaataagtgacgagttaaagcataagaaagaacaagccgagagcaattacaaagcaatctacgatgatatcagtactacatttgatagtttaacgactaggttacgcgttcagaaaatagtttttatcaccctaggtttaattgtggcgtgcgggttatatttaacctttaaattttatttttttcttactccatatgccactcagcatctattccattga

SEQ ID NO: 203352 - DNA, 348 bp, Klebsiella oxytoca
atgcgtgatatgtatgaagtattagaccgctggggtgcatgggctgctgctgatagtagtggcgttgactggcaacccattgctgctgggtttaaaggtttacttcctcatggaaagaaaacgcgcctgcaatgcgatgatgatgaagggattatgattgacggctgtgtagcgcgattgcggaaatataatccggaagaatatgagcttgttatagctcacttcgttataggtatctcgctgcgtactattgctaaaaaaaggaaatgttcagatggaacgattaggaaagagatgcaaacagcgttaggttttattgatgcagttatttgtatggtgaatgaatag

SEQ ID NO: 203353 - DNA, 234 bp, Klebsiella oxytoca
atggagcgacaaattttagtttttcgcggcgaattcgattcctacgttacgtgtcaaccatatgttggaagaatccctcctgagatacggtccatagttttagagaatgaaaaatattctttaacggtgtatccgtacgaaggagaaagctttctggttgcccaccagagagagataaaacatgaatcacttgaggaagcgatcaagatttataaaccgaagccattaaattga

SEQ ID NO: 203354 - DNA, 246 bp, Klebsiella oxytoca
atgtcaggatataacattgcagctaaactaaaagacgagcaggacaaggttaacgttgaccttgccgggtccggcgtcgcctacaaagagcgccttaacatgcctgtcgttgccgaagtagtcgccagagaacaaccggagccttcgcgaatacttcatggagcgcgtgcgctactaccgcgagcagagcatccagttgctccgagcatcagatccacgctacatcgaaatggtatagctaaataa

SEQ ID NO: 203355 - DNA, 210 bp, Klebsiella oxytoca
atgctccagcctcaccagatcaccggtacgatatgcgtggcaactttgtgtggcaaagccctcagcagagataaaacgtcgagcgctttcttcacttttattgtgatagccgggagagagaaaatcgctaacgatgagcagttcaccggcgacaccggcgggaaccagctgcaaatgctcatccaccaccaacagagtaaatccgggtag

SEQ ID NO: 203356 - DNA, 330 bp, Klebsiella oxytoca
gtggcttttcgtacccgaataaaactgttttatcgcccggcgggcctcactgacagagcaaaagtcaccgaagcggctgaaaaaattaagtggaccgtatccgggggaaaactgattgcctctaattcctcaccctattttatttcgctggtgtccgtttcgctgaaaaacgccggcaaaaatggctcggttgaaggcgaaatggttcctccaatgggcagctatacctttaatttgccgaaatccgtaaacgccggtgcaggttcattactgatttatgaatatgtgaatgactggggcgcactcagaaaagtcgaatacaccttataa

SEQ ID NO: 203357 - DNA, 447 bp, Klebsiella oxytoca; identical to SEQ ID NO: 201940

SEQ ID NO: 203358 - DNA, 417 bp, Klebsiella oxytoca
atgcttaacctcaaatcgacaattgcagtcgtcaccattcttttgtgtaccacagcccaagctcaaacgaataacgtaaaaaccttgcaaaagcagttaaggctatggcaaccaattgaaattaatgaaagtaataatatcgtcactgtcgttttggacacaaaccaagttacatctgaaatttatgatgcggtcattagttcaggtgtttgtatggatgtttggacaaaagacgtacccaattcctacatgaaaacgactaaagaattgcaaatactgaataaacataaggcgtttggttatgtgctcgaaaatcctctcgcaacctgtaacgagatgggtaaagagccggacgacaaagctaaagtggtgatgctctcaaaaacgcatatgtttggaatgccaaagttaaaataa

SEQ ID NO: 203359 - DNA, 219 bp, Klebsiella oxytoca
atgtttcattgtccgttatgccaacatgccgctcatgcacgcactagtcgttacatgaccgatacgacaaaagagcgttatcatcagtgtcagaacgtgaattgtagtgcgacgtttatcacttatgagtcggtacaacgttacattgttaagccgggtgaggttaatgccgtcaggcctcatccgttgccatcaggccaacaaaccatgtggatgtaa

SEQ ID NO: 203360 - DNA, 408 bp, Klebsiella oxytoca
gtgacgattaccgtgttatcccgcgagggcgacggtaccgccagcgctgaactgctggcgattgttgataaggcgctgaacgctgaggatgttcgcccggtggccgaccgggtgaccgtccagtcagccgagattgtgccgtaccagattgacgcgacgctctacgtttaccccggtcccgaatctgagcccatcaggcaggcatcagagcagaagctgcagagctacatcagcgcgcagcaccgtctcgggcgcgatatccggctgtcagccatttatgccgcgctgcatgtcgaaggggtgcagcgtgtcgaactggcatcaccgcaggccgatatcgtgctgagtaagtcgcaggcgtcgaactgtaccgagcaccggataactatcgggggctcagatgagtga

SEQ ID NO: 203361 - DNA, 192 bp, Klebsiella oxytoca
atgaacagagcctctcccgttgatttaaggaaatgccttgaagctgcacatggcctcgctcatatcggcatccggtttgtgccgatcccggtagcgacagaggaagagttccaggcactgtctgccgagctttcacgaaagcttgagcagatggcggttgaagcggaaaaacgcgaaggcggtgcagcatga

SEQ ID NO: 203362 - DNA, 672 bp, Klebsiella oxytoca
atgaaagaacgcggaatgatttttaacggggagatggtgcgggccatcctcgacggccggaagacacagactcggcggattatggcaccacaaccagcggacgacattgagcgtggaatattccctaaccaagaagcaattggctggaaatcctctctgaggcacaagcatggtagcaccaccgctcatttttgcccttacggcaagccaggcgatcgcatctgggtgcgtgaaacatggagtagtgactttgcaaattactatcctaactaccgcgtttggtatgcagctgacaataaccgtcgattagatatcgaggtggtggatggtgtcagaggcatctacagccctgaaagcgatgtgcatgtgcctttccgctggcgaccatctatccacatgccgcgttgggccagccgcattctgctggaaatcaccgacgtgcgggttgagcggcttaattcaatacacgatgtcgatgctatgcgagaaggaatccagaacctgacgacatgttcacactctgatttcggcattcctggcgtagtaaatgcgcaacatcctgtacgagcgtttcaactgctatgggaatcaatctacggcgctgacaactggaaggctaacccctgggtttgggttatcgagttcaagcgcgttgaaggcggtgcagcatga

SEQ ID NO: 203363 - DNA, 222 bp, Klebsiella oxytoca
atgacgccagaagaacaggaaaacatcctccgcgcccaggctcgtcgctgcgcagaagagctaaccaaagcgatgagcgtaaagcctaaaccgaagtggaacgctgtatgcccccctatccttcgcaagcactacgagaaggtaaagccgatgggtgtcagcctggtgaaatttgtcagtgttattggccgcatgaatgggcggtatggagtggaatcatga

SEQ ID NO: 203364 - DNA, 1473 bp, Klebsiella oxytoca
atgagcatacctcaagttgtcagtttctctggcggcagaacctcggcctatctcgtccatttaatggagcaaaggagactgtctggcgaagaggttcactatgtctacatggacacaggggcagagcacagagggacctacgagttcatcaagaagctggcccgcgaatggtcgattaacctgatctgcctccgtgtaaaggttaaccctgaactgggcaaggcaaacagttactcggtagtaccgcttgatgatatcggtcccgatcttcagccatggaaagatgtctgcgaaaagtacggcaccccatacgtccacggcgcgttctgcacccggaccatgaaaatggaagttttcgagagatattgccgtgacacattcggccagtatcacacttggatcggtattcgtgctgacgagcagcgcaggctaaagcctcgagaaggcgttagctatctggcagatattagcgatttcgaaaagcaggacattctcgactggtggaaggatcagccgtttgacctcggaattccagaacacctgggtaactgcgttttctgtatcaaaaaagggataaacaaggttgccctcgccgcccgcgacgagcctgagctcgccgcccgcgacgagcctgagctcgccgctgagttctggaatcttattaccgctccttcagtaagggttgtggaacgccgccagcaggaaaacaaaatcatgtatcgcggcaacaattctctggagagcgtaatcgcaatgttctctgacagttcgcgcgaagatattgcagcaacaataaaaggtggcggtggatatgaccctaactcttgcactgaaagctgcgaagccctgacgtgtgaagtggatgataacccagagccagaggttgaagagatcgaggaagaagaaagccaggtttcgatccgcactggatatggaggaagccataccccggcagaacagcgcgacctctggcgcactccaccagccctatttgcttcccttgatgctgagttctgcttccaacttgatgcggcagcagctccgcataacgcgctgtgccggaagttcatcaccgccgagcagaatacgctggaaacgccctgggctaattacctgagcattccgggctacgtctggctgaacccgccatacagcgacatcacgccgttcgttcagaaagcagctgatgaatctaaaaaccagatcggcacggtgatgctggttccggctgatacgtccgttggctggttccgtgaagctatcgagactgccagcgaggtacgtttcatcgttggcggtcgcctggcctttatcaatccggtatccgggaagcctgtcagcggcaataacaaaggctcgatgctgattatctggcatccctaccctcgtacgcactgccatttctcgacggtagagcgtgatgcgctgatgaatttcggtgcccgtttgatagccaagcgggatgcagcatga

SEQ ID NO: 203365 - DNA, 153 bp, Klebsiella oxytoca
atgactcacgctcacaacgacatcagggttggctctctgttccttcccttcattggtaacggctggctaatgccatggggtgaagtggtcagcaatccattaaaggcgcagcggctcgctgaggaatatcgggaaagtcaggaggcggcatga

SEQ ID NO: 203366 - DNA, 354 bp, Klebsiella oxytoca
atgattcagacgcgcggacgcccggtgaccggcagcgaaatcgctgagaagttcggcgtaacgctcatcgagtttaaccgtgtagccaacggcattactcgcggctccggacagatagcgcagatagttgagtcagaaaaatggatcaacgaggacggcatctgcgaccggactttcgacctggtaactaaaccaaaggtcgtaacgccgcaaggtaaatcgcgcctgttcacccggcgcgccatagagcagtcgcaggaaggcaggcggcaggagtgcattgaacgtgccgcccgccgtcgccgcctgattgctcatggcctctacatcgacgaaatggagtccatcctatga

SEQ ID NO: 203367 - DNA, 936 bp, Klebsiella oxytoca; identical to SEQ ID NO: 203256

SEQ ID NO: 203368 - DNA, 348 bp, Klebsiella oxytoca; identical to SEQ ID NO: 203255

SEQ ID NO: 203369 - DNA, 681 bp, Klebsiella oxytoca
atgtcccgttttatcctgggtaactgcgtagatattatgtctggctttccggaacgcgccgttgatttcattttgactgatcccccgtatctggtcgggttccgtgaccgttcaggacgcagtattgccggtgacaaaaccgacgaatggctgcaacccgcctgtaatgagatgtaccgcgtcctgaaaaaagacgcgctgatggtcagcttttacagctggaaccgcgtcgatcgcttcatggccgcatggaaaagtgccggattcagcgtggtcgggcatctggtgttcaccaagacgtactcgtctaaatcggcctatgtgggctatcgccatgaatgcgcttatatcctggcgaaaggccgtccggcgctgccgccggacccgttaccggacgtgctgggctggaaatacagcggcaaccgccaccacccgaccgaaaaacctgtgaccagcctgcaaccgttgatagagagcttcacacacccgaacgccattgttctcgatccgtttgccggttccggctccacctgtgtggccgccatccaggcagggcgccgttatatcgggattgagctgatggagcagtaccacaaagccgggattgagcgtctgacagctgtgcagcgcgccatgcagcgcccggccgccaacgacgtcttttatccggaggccgcgtaa

SEQ ID NO: 203370 - DNA, 222 bp, Klebsiella oxytoca; identical to SEQ ID NO: 203254

SEQ ID NO: 203371 - DNA, 420 bp, Klebsiella oxytoca; identical to SEQ ID NO: 203253

SEQ ID NO: 203372 - DNA, 405 bp, Klebsiella oxytoca; identical to SEQ ID NO: 203252

SEQ ID NO: 203373 - DNA, 768 bp, Klebsiella oxytoca; identical to SEQ ID NO: 203251

SEQ ID NO: 203374 - DNA, 468 bp, Klebsiella oxytoca
atgctgaagataaacacactccgcgccgccatagagaaagcaaatacctggtgccgggcgaacccggaagcctggacggtgtttgttgaagagggtggcattgaaactaccggtgaaacgccgtcgttcatgtatcgctattctctggtgctgttcgtcatgaactacgcagggagcattgacgacttcactctgccgctgatggcctggctctggtttaatcagcccgatctgctgctgaaccccgataaaaaccagcagattaaattcaccacactgattaacaacgatgacaccgccgatctgatgtttgagttgccggtgcgtcagcgggtactggtacaactggatgaaaacggtgtgccgtatgccgagcatttgccagagccgcgcccgcgcgtgctggcaccccacgccgcaggctgggggctggtatttgaaggcatgcttcaggaggccggaacgtga

SEQ ID NO: 203375 - DNA, 1008 bp, Klebsiella oxytoca
atgatagcgttcatactaacgcagagttctttaaataaaaataacctcaacgttgtttttatcagagataatcttgaattttatgaagttacaaaattaaccacgcatgagctcaaggctataattgaatatctgcagggggatgatttctccgttctcattaatatcgttttgggtagggaggatatagataagaataaaacgcagattatatcaaaattagaatccataatgtcgtcaatgaatgcatcaatattaaatgaagtgatcatgtcggaattagaacctgagttggttgataagtacattcaagaaatccgtctttcagttgaaaaattaataggattggttgtttctttggatgatattgaaattactaaaaatttaccttatctcgaaactagcttattggttgataagcgagaagttatccctccagtggatagttgctcttatatgatgaattcacataaccatagtaattggctggcttattattgggtgagaaaaaatattaacgctattcaagataatgatcgattaatagtggatattgattccttgcaagacttaaggacagataaagttataacgatagaatataaggtggaaagtaggttgaatgtttataaatatacgaagggattgaaaatggatgataaggaaggtcatttgaatttaaatggatcaggtatgtattatatcgatttgttggataattttgaacttaaaagagagtctgatattttatcagtagacattgaaaaaatagatgaggataacttggaaaaagcaagttctctctttaacttcgaaggtgcaaatccttttctatacgcaatgatgaacgtacattttaaaattttggcaaaccctaaaaaaatatttaagttatattatctttctgaggataaatgcagggtcttaaatgaaaaacaggaaagagaaatggaacagttgttaatggctagtcgcgtaggcagcatcgataacagcagcatgtcttaa

SEQ ID NO: 203376 - DNA, 315 bp, Klebsiella oxytoca
atggtcgttgtagttattgatttgttggatatcgatcgccatatcaccggcggactcaagcgttgcgctgtggttattaaagactcccgcccggccgctgagcgaaccgtcttcggcaagttggccgccaatggtaagcgtaccgtcgctgtagatcagcgcgtgatcctggttattgagcgtgccgacgcccattgccagcaatgctcgtgcagcaatcgtcgccgccacgccgttctccgcggcgttagtcagcgttgccacctgcagcgcgacggcgtcgccgtacaggcgcccgctaccgatattggttaa

SEQ ID NO: 203377 - DNA, 183 bp, Klebsiella oxytoca
atggttctcgccagagctgatttcaccttcctgacggttatccagcttcgccacatagagattgagcacctggccaacgctgataacaccctgattaatcagtcccaaaccggagagattccactgcaggttgccgttggcgatgatcctcccggcgtgatgaaacgcctgacgcaacgttag

SEQ ID NO: 203378 - DNA, 198 bp, Klebsiella oxytoca
atgaccatcgcacaacagcttgaacagaaaggtatcgagaagggcatccaactgggcaggcaggaaggccgttcagaaggtgaacgtgaggcaacgcttaaaattgcccgtaccatgctgcagaacggcatcgatcgcagtaccgtcatgaaaatgaccggtctgaccgaagacgacctggcacagatcaggcactaa

SEQ ID NO: 203379 - DNA, 504 bp, Klebsiella oxytoca
atgcagactgatagaagactaagtcctttgatactgacagggcttgaattcactgaaaaaaaattaaaagagaatccatcaggaggtaaatctttcatttatttacctgccatcagacttcagactgaatgttattgtcacttaacgcggttatttaacgttataggtgtttcttcacaagcagaaaacatgtttttaaaaaaacacctgaatctgagcgaccccattaacaccatcattaaaaaactattatattttagagaaacacatccatatcatgatagtaagtgcgagttttgttggtttatttcaaagataaaacccgaggagcgtcaattattttatacattaagcatatcgaacaattaccgtatcgcggccggacaacttggtatcagtgaaaaatttattcgaagaaaggtatattcattcacatccaggatgaatatatctaatcgtcgtctttttcattggtggatttcttgtttaagaagggatacttaa

SEQ ID NO: 203380 - DNA, 543 bp, Klebsiella oxytoca
atgagcgggaccgttatcggtcacagtggtggtctgacattgagcccgtaccagggggatacttttgccttggtggaagcgaaaggagctgaaggggctggtgttaatggctacagcgcgatacagattgacaaccgtggctatgcggcagtgccatacatgagcccgtaccagttgaacgatattcgtctcgatccgaaaggaacggcctccggggtggaactggagaatacctcgcagaaagtggctccacatgaaggtgctgtggtgaaaatcagctaccagacgaggcggggttatccggtgctgatcaagataatggatgcaacctctccgcttatctttggtacggaggtctatgacgctgcaggtcaggctgtaggttacgtgggtcaggggagacaaatttatgcacgtgtagatcagataagcggcgtgctgaacgtcagtgttggcagcagactgtgccagttaccttatgctctggcgcatgctgactccgggaaacttgagagcgtcagtctccgttgcgaatatttataa

SEQ ID NO: 203381 - DNA, 150 bp, Klebsiella oxytoca
atgaaaactggatactgtccaaaatgtgggaattcgtgtgaagttaccttcacaccctatgtaatgaaggatggtaaaatcatccgccctaaaaaggcgaaggtttttgtaatccctcattgcaaatgcactgaaaaaaaggctgcatga

SEQ ID NO: 203382 - DNA, 483 bp, Klebsiella oxytoca
atgcatttgatgcgcggaacacgtgttcgtcctctgagtgatgtggagattaaagcaattgcagttaatgcttgcttcgcgttgggatttactagcaagtacaaataccggcgtaaaccgcgcagattcgatgtggcgctggaaacattgtctcaatggaatattgttctcgatcctttggaagatgatgaatggttcgaagaaacactagggctaaccattggacattgcgagcctgacaaattgactatcagagtgccaaatcatatttatgaaatggcctgcggcggagagcgctctgcgctatttgtcatattccatgaactcggccatttgcttctacagcataagccagcgctacatttcgctaatgctatgccggaacagaatgaagattctgagtggcaagctgacctttttgcagagactatgttagataagctcggataccaaactgcacagctttgctttgaattttattga

SEQ ID NO: 203383 - DNA, 354 bp, Klebsiella oxytoca
atggctcttactgatttcggaaaggccgtaaggaaagctcggatcgatactggttatactttgctcacgatggcaaaagctttgggaacaactcctgcttttcttagcggacttgaaactggaactaaaaaaataccagagaaatgggttacggcaataaatgagctgtttgctgagcaagggtattacatcgataatcttgatgtattggcttctattgcgaatgaatcggtacctattgaaggtttgccgaagcagcagcaaatgcttgtagctggttttgccaaatcggaatttacacatgaagaattaaaaaaatttgcagaattacttgcagaaataaataaaaaataa

SEQ ID NO: 203384 - DNA, 1305 bp, Klebsiella oxytoca
atgacagcagagattgcagtatataatagatctggtatagcgttggcagcagactcggcagtgaccactactaatggtttttcacaaaaaatatataataatgctgaaaaactttttgaactttcaaagcaccaccctgtggcactaatgatttacaacaacgcaggaatttgtaatgctccttgggagttattaattaaagcttatagaaaacaacttggcaatcaatcctttacaacaataagtgattatgcgaatgatttctttgagtttgttcaagcaaataacaaaatagttacttcggatatgcagtccaagtatttttttagtttatttacagatgtacttttaccgagcattctacaagaggttcaaaatcttgatgttgcacaatttataatggcaaatagttccgctccatcaattgaacaatatcatagctttattgagtcaagatgtaggatgaaattcgatagtatagattcaaacccatttttcttaaattttggacacgtcgatttcgagcagatttatactgattttctcccattagcagatcaattatgtgcgatgcgaatccagcaaaatgttgataatgccaacatcccatacccaccttctctcaaagatgcattagccaaactttgtgctgcttatgtatgcaaagaaaatgatttacagacttattccggtatcgtttttgctggttatggcgatgatgagtattatcccgctattgaatcacatcatgtgtatggagtttacaatgggaaacttttaaagccagctaaaaaagataaagataatagtgggatgtcgattggcatctatccttttgcgcaggaagatgaagttcatacatttatgcagggatgtagccttggtatacttaactgtgtagaagaatccgtatcaaattcattacaaaaaataaaaacagaagttgtactggcaattaccgaacagcatccggagataaacagcgttgacatagaaagcgctattgatgcaactatcgaagcgtctgagaaagaaaccattcaagctctagaaaaccatatgacgttaaatcacgttcaaaaggttttgtctgtgctcggttcgctagcaaaagttgatttaggatacatggctgaatcgttagtaaatctaactgcttttaagcgcaaagtctcaaatgatagcgacagtgttggcggccccatagacgttgctgtattatctaagggagatggctttgtgtggatgaagcgcaagcattattttgacaaagaattgaattatcagttttttaagcgcaattaa

SEQ ID NO: 203385 - DNA, 624 bp, Klebsiella oxytoca
atggcaatggggacaaataaatttggcgccagaattaaggaagcgaagagcaccattggaccgtcagcgccgccgatagtcgcaatagaagccgcttcgttggcggggagaccgaatacttcaatccccagcagcagcgcggcaaaggtgcccgcttcggcgaatagcgcaacaatgatgctggcccaggggcggagcagaataaagctgatgtcgctcatcgctccgatgccgaagaaaacgatgcaggcaatcagaccgttactgaaagtcaagttatacactggctgcagaaagttaatctgcatgatattgaccagttcggtaggatcgctgatcatcgggtccagaattaacgtcccggtttgcccgccggcgagaaaaagcactccagcgttgacggcaatcatgcctaaacccatcggcaccataatcagcggttcgagtttgcggcgaaaacccatccacgccagaataaagcccagaatgattaataatattcgtgcaatagctattttgggatcttcaataaaaaaggtgccaatgcccgaaaagagcttaacaaagatatccataacatatattcctgatgacgcaaaaaaagagcgtgttagtcgtcggtga

SEQ ID NO: 203386 - DNA, 618 bp, Klebsiella oxytoca
atgataaaaagaaagaggggtatattggaagtcataccaatgactatattttatatgtgcagaatgtttggctctccacttattatattatgcggtttaatagggttatgtgctgctgaaacgataccgggtctagtcttaattcttttaggtctatcaccacatatccttgcatatgcattagcaaggtccagtagaaagaaaatccgtaaaatcctcagcgccattaaaagctctgagtctttcctgcctgagccaaagtacgagttctgggagccccactctgaagcttacctcggcatcgatgctaagcgcggaacctttgtgtatgtacgtttgattcgtcgcgggcaggttgatcttattgggtttgatatgcacaactgggtcggcatcgagctcgatggacggctcctgaacatcaaaacgaagaccattgaagcacccgtgctgtcgatgggaacccgcgctggcgatggtgacaggatactgtcgctcataaacaccatgtccaacagacaataccgctacgattgctattacttcccgggatatgttgctcacaatgcgaaacgcatcgcagaagagcacaaagtctttatccctgtgtataattag

SEQ ID NO: 203387 - DNA, 453 bp, Klebsiella oxytoca
gtggccgatgaaaaatgcgacatcgccgcctgcgtaggcgcgacctggattggcggcggcgtagccgggacgatcgaactgctgagtaaaagtctcaagcccggaggcatactgttgattggcgaaccgtactggcgccgggttccggcaacggaagaggtcgcgcaagcctgtggcgcctcttcgctcgccgattttctgacgcttgccgatctggtttcctctttcgatgcgtctggctatgacctcgtcgaaatggtgctggcggaccaggagggctgggaccgctacgaagcggcaaaatggctcaccatgcgccgttggttagaggacaaccccggcgatgaatttgcgccagaagttcgggcggagctgacgattgcgccaaagcgccatgcgacttacacgcgtgaatactttggctggggggtatttgcgctgatcaagcggtag

SEQ ID NO: 203388 - DNA, 585 bp, Klebsiella oxytoca
atgggacgaaaaaaagagatcagtactgacagtattttggatgcggctgagcaggtaattgggcagatgggtgtagcaaagctgacgattgatgcggtcgctgcacaggcaagaatcagcaaagccagtgttttgtatgttcacaaaactaagcagggattgcttgaagctttagtcagtcgcgctatggagcgtgacgatttattgcatcacgaaatggagcttacgttgggtactcaacacagtgttgctttgaaaggccgcattgaagtagctaaaacgccgccgcccgaagagtttcggcccattgcactcagcctgagttctgccctcattcttcatgaagatctccgtaaaaccatgcagcaacatcagtctgaagtgattgaacggattaaaaccacatctttaaaccctcgtggtgcaatgctggcatatctagccctagaagggtttaaattcctcgaccatctcgattttcacaaatggacgaatgacgaacgtgcgcaaatacttgctgaacttaattggctggcagaccaggacgtacccgcaatgaagatgaaaggagcttctgatgtctaa

SEQ ID NO: 203389 - DNA, 1005 bp, Klebsiella oxytoca
atgtctaaaagccagaatgaacttcaggaattaatgcgtcatcgtcgcgttttcataaccggtggtagcggctttgtcgggcgaaacctcattcgttattaccgtagtactggagctgaggtgcgggttctgacccgaagtgacgccgcggaccagagagtagcagaagtcggggggaaacctgtccgtgaagatatgtttgctgcagacctgtatctttctatgttgggttgcgatctgctgatacatgctgctgctgatacagcgcatgcttatcattctgtggaacagtggaatgtcaatgtgaatggtactcatcaggtgtttgctgccgcgcaaagagctggattgaaaaaggcagtctatatcagtaccgagtcagtattgctcaccggtgatcctcttatcatggctgatgagacattacctgtacctgacaggtctgttggtgcatattcgcgttcgaaagctgctgctgaacatggtgcactcacctataaaaacgaggttatgagcgtaattgttgtacggccaagatttgtctggggttacggtgacaccactgccttaccgcagcttactgaggcagttaataagggcaaatttgcatggattagcaatggaaactatttaacctcaacaacgcatattgaaaatctatgccagggaataagtcgtgccgcagagtatggtcgaaatggtgagatctattttattactgacggtacacctcatgttttcagggagtttgtcagcgccttactggcaactcaaggacttagtgctccgtcgaaaagcgtcccccgcagacttatccgtctgtttgcgcagttaggtgacggattgaatcgattaacagctggacgaatacaaagcccattgaatatgcaggtcttcgccacatcggcagtggaagtgtcattggatatcaccaaagccaaaaatgaacttggctataaacctctggtgtccttaaatcgaggtctggaattgatgagaaaatga

SEQ ID NO: 203390 - DNA, 642 bp, Klebsiella oxytoca
atgttcatcagagcttatttacgcgcatcgacagaagatcagttcgccgatcgggcaaaagagatgctggagcagttcgttcaggagcgggggcataaaatagccagttattacagggaaaatatcagcgggacaaaacttgatcgccctgagctggggcgcttactgatggacagtcaccacaatgatattttgctggtcgagcagatagaccgcctgacccgtctgagcaacagcgactggatgacgctgaaaaagcagatcgagcagcacgagctgcggattgtcagtctggatgtgcccacctcatggcaggcgctgtcagataaagacccttcgcaggctgacccgatcacccgcgccgtgataaccgccatcaataacatgcttatcgatctgatggccgcgatgtctcataaggactggctgagccgccgccagcgccagaagcagggaattgaacgggcccattcgctgggtaaataccggggaaaacaggccgatcaggaacggcatcagaaagtcctgtactaccggcagatcaagaaactgagcatccgtgaaacggcagatgcaacgggctacagcgcttcacaggtttgccggatacaagcgctttatagagataatgaatcttcctga

SEQ ID NO: 203391 - DNA, 255 bp, Klebsiella oxytoca
atgacagccgcgctagccgcagcatcatcttgcatagcagcaacattattttgtgttgtgctgaggctgttatcgagcttcgtgaggctgctgccctggctggtcagcgttttggcatgctccgtcacagtgttctgtaacgtctgcagcccactcgcatccgctttctggctgatggtgctgtttatcgtcttcaacccgttttccagcgtcgtggtgcggttcccgatactggacagggtatcgacctgctga

SEQ ID NO: 203392 - DNA, 654 bp, Klebsiella oxytoca
atgcggtccggacaacaggcgatcaatctgttcaaaacagtgctggcgtgcatacgtcgtcagactttccgtatcagcaaaatgctccagacgcgccgccccttccggcagcggtttcatccgtttcttcgcccggacaatatgaccctgctcgtcaaccttccagctgccgttgtcatgccggaagccgtgtttcagctccagctgacgacagcagcgctgcagccgctccttgctgaaggacagcgtcgccgctttgaacgtgcgcggacacacacggtttgtcgcaatatgcacatggacgttgtccgtgtcacggtgaatggcggccacatactgatgcccttccagacccagggctttctgtgtgtcagccacgcaggaaaatatgatatccgggtcaggattttcatcttcctgccaggacagaatgtaatgaaaaaccggctcctcacagcgccggttagccatcgccgtcgccgccatttccaccggcgcggtttccaggctgaagcagttatgctggatcaccacaccgttcaccgcgatacgaaaatcgccattctccagcaccacttctgtcccctctccctcgccggcgttctgcgaacggtcaatgtattcaaccagtcgttcaaagcacgcttcgcgtga

SEQ ID NO: 203393 - DNA, 123 bp, Klebsiella oxytoca
atgcgcgtcggcgtggtgacgtggcaggactatctcgcggccctgaaaaatgaagcgatttccggcaacgcgattggccatcggcagcatcggaaacatgccgccagcgggattttcatatag

SEQ ID NO: 203394 - DNA, 213 bp, Klebsiella oxytoca
atgcgaagggcgtatttatgtaagaaaccggtgaacggaggcgtgaaaggtcaggcagtaaattatgattcaggtatgcagcagaaattcgattcccaattgtgccaggaagagcagaacagaaagaagaatgagccacctttacggccggaatcgggtggcagggatatgaatgctgtgcaggatggcatggcgttttttacgtcgctttaa

SEQ ID NO: 203395 - DNA, 2145 bp, Klebsiella oxytoca
  misc_feature (2013)..(2022): n is a, c, g, or t
atgataactaacatttcctctcttgaattaggccagtatctaacactagtacgtgaacgtgccggaattaagcaagctgaactagcccgtagggtaacctggagcgcagcagtactatctcgtatagagagtggagaccgttcggtagagtcgggggagctgtcaatgctgttggaagcgattgatactccagaggctctgcgtcttcgtacaattcttgaacgtaactggcagataattgagcgtccaagccttgaccaccccgatcaggatcttttgtggtctgcagaagaagttgccaagcagcttatggagttagctcaaaaacccgacaccaaaaatgccttcgaacgccgtctatctacttacgtaggtgaattgaaggcttcggcaaacttattactcaaacgtgagcatcaagtagcatttattggcagtattggtataggtaaatccactgcaatctgcagacttactggtcttgaggtctccaacacggatgctcacccttcggctcctgtacttgaggctggtgctgggggtattacagtttgtgaagtacaccttcgtcaggggcctagttatggacttcttattgaaccatgtctggatgacgttattcgtgctcatgtaaccgattttgcagaatatattcgaggtataggcatccagggggggagcggagatgaatcgcagggaatttcaaaagaaattgagagagcgattcgcaatcttgccagattgcgaatcagcaaaagcaaaggagtggacggaaaaacagtccgtcatgatgaagctaaagagcttgctagcaaattcagcagtacccgcgaagttgttgtcgagattctgtctagaatggagcttcctcgacgtgaccgccgtgatgtttggtatgatgccaacacgggaaaacagcctcttaattggctaaaagacacgtttgaggaagtcaacaatggtcgtcatcctgaatttacacttcctgcacgcattgaagtaatagtaccagatcacctgcttccgatagataatctgtcagtacgttttatagataccaaagggattgatcgtacatcagctcgagcagacctcgaatgccttcttgatgatcctcatacgctagctatcctttgttctggttttaacaatgctccagctgcagaagctagactacttctcgagcgagctaaagatgcaggtgtccgcggtcttatccaaaaggcagcattactagtactccctcgctcaggcgaagctcttgaagtaaaagatgagatgggaatgagagtcgagaatgcggaagaaggttatgaactgaagcatgaacaaatatccatgagtctagcacctcttggattatctgaattagccgtcggcttttttgactctcgccaggatgaccctaaattgttccaggcgtttctatcagaacggctgaataatgtacgtcagtctttcgcccatcagttgagtgaaatcatcactaatgccaacgctcttctgcaaaactatgaactggctcaaactcaagaagtcattcgtcaagcggcacaacaactgcgaacttggatcaaccgacatcgttcgcttgaacatttaaatatgcatgttcaggacagccttattgagcagttgggttacgcctacgcagcaactgttagagcctctgtaaatcgggaaggggactggtacaactttaattttggtcatcaccttggttatggcgcaagaaaaatagcggttcaatcactcagttctgcagtcttggggtttgctgagatttgccagaacatggcagaaacacctgaacttgaagaagcaaacgaattaattggacaatcccagcgtttacttcagacagcttatgacgagctactgtctaaaattcaacttatgggtcaaacatctttccgcgatgaattaaaacaggatagaaatttctggaatagttgccagagagaatgggggcaaggtagtggctacaaaggcaggattgctgcccatagtcgnnnnnnnnnnagtcgagactggtttaacaacccggagaaaaaacggcttgaagatgaactgtggtcaatgattcaacgtgaatgggatttggcgctaacccgggttgaatcgttactgattcccgacgaataa

SEQ ID NO: 203396 - DNA, 174 bp, Klebsiella oxytoca
atgggtattcataacccgttctacccggagtggtactgtctcgtcgccaatagaattcatattcgagccagatcactgaaaaaagcactgtggtttgtgaaactgttggttactctgcattacagagataaaggctttctggatggttacctggcctttacgaaacaaatgtag

SEQ ID NO: 203397 - DNA, 672 bp, Klebsiella oxytoca
atgcagtggggaggggagggaagacccgagtcgtttagtaatttttgggacggcctgacgggtaaagataataccgaagcaaacgatcctaatgagccaggcaaccagcttgctggttttgactttaagttgaaactggaacctacgctgggcctgccgatcagcttatacggtcaaatgattggcgaagatgagtccggctttttaccttcagcaaatatgttccttggcggagtcgaaggccaccacggttggggcaaagatgctgttaactggtatctggaggctcacgatacccgatcgaatatgagccgcaccaattatacgtatacacaccatatctataaagatggctactaccagcaaggctactcactcggtgatgctatgggaggcgatggccaactctttgcgggtaaagttgaattggtgacagaggataatcagcgctggagcgcacgtttagcgtatgcgaaggttaacccagaaaatcagtcaatcaacaaggcgtttcctcactcagatacattaaaaggtgtgcaactgggctggagtggcgatgtgtacaaatcggtacgactgaacacttctctctggtataccgatgctaaccataatgatagcgatgatgtaggcgcaagcgctgggattgaaattccctttaatttatag

SEQ ID NO: 203398 - DNA, 1068 bp, Klebsiella oxytoca
atgccgggacaggggttaaatagtctgcgtaagaacgtagttgaattaccggatagcgactacgatttggataaactggtgaatgtctatcctatgacgccggggttaatagaacaattacgtcctgaaaatattgttgctcgaccaaatcccaagctcgatagtctattacaaaattacgaataccggatcggtgttggtgatatattaatggtgactgtatgggaccatcctgagttgacgactcctgcaggccagtatcgaagcgccagcgatactggcaactgggtgaactctgatgggacaatgttctatccttatattggcaaagtgaaagttgctggtaaaactttgagccaggttcgacaagaaattgcaagccgattaactacttatatagaaagtccgcaggtagatgtcagtattgcagcctttaggtcacaaaagacctatgtcactggagaggtaatgaaatctgggcagcaacctatcactaatattccacttacggtgatggatgcaatcaatgctgccggaggattagcaccagatgctgattggcgaaatgtgatacttacgcataatggcaaagacacaaaagtatcactttacgctttaatgcagaaaggcgatctgactcaaaaccatctgctctatcccggagatattctttttgttccacgcaacgatgaccttaaagtctttgttatgggagaagtgggcaagcagagtactatgaaaatggatcgtagcggtatgacgttggcagaagctttaggtaatgctgaaggcttatctcaatcattaagtgatgctacaggggtttttgtcattcggcagttaaaaggcgataaaaaaggaaaaattgctgatatctatcaacttaacgcacaagatgcttctgcaatggtgcttggaaccgaattccagctacaaccctatgatattgtttacgtgactgccgctccgttggttcgctggaatcgtgttatttcacagctggtaccgacaatcacaggtgtgcatgatatgactgaaaccgttagatatattagaacttggccataa

SEQ ID NO: 203399 - DNA, 930 bp, Klebsiella oxytoca
  misc_feature (788)..(797): n is a, c, g, or t
atgtacggttcggttaaggtctggcaggaaataattacattacctacgtggacaacgggggcggaggatccgaaccccatgtttctggaaaaacgcgtttatcaaggttcttcaggtaacgtctatccctacggcgtgattgacaccctgaccggcgaacgtgagatgcgcgattatcaggcagtatggatggagaatgatttcattcgaattatgctgttaccggaactcggcggccgtatacatcgggcgtatgacaaggttaaacagcgcgatttcgtgtattacaatgaagttgtgaagcccgccctggtggggctgctggggccatggatctccggcggtatcgagttcaactggccgcagcatcatcgcccgacgacctttatgccggtcgacttttcgatccagtgcggggaaaacggcgtgcagaccgtatggatgggggaagcggagcccatgcgcggtttgcaggtcatgaccgggtttactctctatcctgaccgcgcgctgattgaaattaccggtaaggtctttaatggtaacgccacgccgcgccatttcctgtggtgggccaacccggcggtaaaaggcggcgatgctcaccagagcgttttcccgcccgacgtcaccgccgtgttcgatcacggcaagcgcgatgtttccgctttccctattgccaccggtacctactacaaagtcgactattctgcgggcgtcgatatctcccgttataaaaacgttcctgtgcccacctcgtatatggcggagaaatcggattacgattnnnnnnnnnngattttgtcggcgcttatcaccatgacgagcgcggtgggctactgcatgttgccgatcatcacatctctccgggcaaaaaacagtggagctggggctatggcgactttggccaggcatgggaccgcaatctga

SEQ ID NO: 203400 - DNA, 345 bp, Klebsiella oxytoca; identical to SEQ ID NO: 203331

SEQ ID NO: 203401 - DNA, 288 bp, Klebsiella oxytoca; identical to SEQ ID NO: 203330

SEQ ID NO: 203402 - DNA, 780 bp, Klebsiella oxytoca
atgtatattaaccaatacctgaaaacctgcagttacaaaaactttaattaccaaagggcccttttgtttgttttttcattagcatttgtttttacaacagcctatgctttttatcaaatattaaatggaatggaaagggttgaatttagtactaacagagcaactattgctgcatatatttactccactctttggttgcatttgtttttttattccattttcgaagggtttcttttaattttttttgttatttttagttgtttatttttattggcttgttatatctcgtatggtggttttattaagcctaagatagaacaaactaaaaaagaacttcaactctacaatcaaggtattgattcatcctcattaggttcgagattttctttatgggttgtaggaggagaaattttcttaagtcatccatatggtaatactttagaaaaccgaagaaaacaagcagaggaaaaaattctcgatgcccctgaaaatcagacagcgctgatatatattgatactcacctgcataatgagttactcgaatcggcttctctacaaggagttgtagggttactatctgttcttgcattttatttaagtatgctaattagagctataagacgaagactcactcctcttcttattgtttcgctttgcatgattgtttatggtactacagacgttctcttaataagcccggagtcgatcatgtttttcatattgacgttggcatttttctcaagatttccggtttctatgaggccccaggttactgaataa

SEQ ID NO: 203403 - DNA, 1110 bp, Klebsiella oxytoca
ttgagaattaaatttaaatttgacgatttagcaataagactttatctatttgctcttgtgataattacacttgttccttttggacgtggcagcatctcaggtttagagccagcagtgccttttttaattttatcatttgttatttttgccatgagcaaaaaacatattgacagaaagaaatggctcgtgctttttatgttttttttgtgggctatgtggattattgcagggattgcttttagttacgtaacatatgataaacttgcagatcatgagtcctcatttttgaggtatgtaaggctgctggaaatgtattttccagcgcttcttgtatttgtttttatcaatgacttaactatcctcgtcgctacgcaaagatttagttatcctgggatgggttatatatatagggctggtggtgttgcgaacgattcaagtgcgtatggcagtcttgcattaattcttggtgtggcttctctgattggattgaggcataccagcaaaagcaaaaccttatatcttttaattgttctaggattggtgctaaacgtttatatatctctaacgcgaactcttgtcttcgcgctagctgtttatatattctttgatttaattaggttaagaagcttaagtgtatttaaatttttgttctttgcagtcgtcgtctctggagttattatttatggcattagcaatgaatacataattgctttgatggataggattactggggctggacaaattgatattacctctggccgtcttgctacttgggccatagttccggatatattgggtgaaaatccaatatttggggttggataccgaatggcaacagacaagtatggtattgttcctgataatgtttttttatcatctttacttgaaaccggtgttataggtctggcgttgtatataggcctgcttatgtctatttgttattgtatttataagaaaaatgcagaaagtcttcctttactgattgctttcatagcctccgggatgtttgttgatatatcaacgttttggataagcatcccggtgctactcttctttgtcgcggttaacagtcagcgcgatgatcagacaaaaagggtaagcatcgcgtag

SEQ ID NO: 203404 - DNA, 1977 bp, Klebsiella oxytoca
atgaaattaacaccgattatgaaaagtctggctctggcaggaattatctcgactctccctgcgatcagctgggccgaaacgtcgcctaaagaagccgctgcggcgaccaaacaggcaaacgacgcgctgtataaacagctccccttctccgacaacaccgactttaccaacgcgcataaaggttttattgccgcgctccctacggaggtgattaaaggtgaacagggcaacgttatctggaacccgcagcagtacgactttattaaagagggtgaaaaggcgccggatacggtcaaccccagcctctggcggcaatcccagctcatcaatatcagcggcctgtttgaagtgaccgaaggcgtgtatcagatccgtaacctcgatctctccaatatgaccatcatcgaaggtaaagaaggcgtcacggttgtggatccgctggtatcggcagagaccgccagggtaggaatggagctgtattacaaaaatcgcggcaataagcccgttgttgcggtgatctacacccacagccatgttgaccattacggcggcgtgcgcggcgtggtcgatgaagctgatgtcaaatccggcaaagtcaaaatctacgcgccttccggttttatggaagccgccgttgctgaaaatattatggccggtaacgtgatgagccgtcgcgccagctatatgtacggcaacctgctcaaaccggatgccaccggccaggttggcgcaggtctcggcaccacgacttctgccggcaccgtcacgctgattgctcccacccatatcatcgagaaagatggccagaaagagactatcgacggactgacctacgattttatgctggcaccgggctcggaagcaccgtcagaaatgctgtggtatatcgaagagaagaagctgattgaatccgccgaagatgtcacccataccctgcataacacctactcgctgcgtggggcgaaaattcgtgaaccgctaccgtggtcgaaatatatcaacgctgccattgtgcgctggggcgacaaggctgaaatcattatggcccagcaccactggccgacctggggtaacgagaacgtggttaacctgctgaagagccagcgcgacctgtatcggtacattaatgaccagactctgcgcatggccaacgagggcctgacccgcgatgagatcgccgctaaatttaagctgccggacagcctggctaatacctgggccaaccgcggctactacggttccgtcagccatgacgtgaaggctacctacgtcctctatctcggctggttcgacggcaatccggctacgctggacgagctgccgccggaagaagcggcgaagaaattcgtggattatatgggcggcgccgacgctatcctcaagaaagccaaagatgattacaaccagggcaactaccgctgggtagcgcaggtagtcagcaaaattgtcttcgccgatcccggcaatctggaagcgcgtaatctggaagccgatgctctggagcagctgggctatcaggcggaatcaggaccgtggcgtaatttctacctgaccggcgcgcaggagctgcgtaacggcgtagtgaaaggcccgacgccgaacaccgccagcccggataccgtgcgggccatgaccccggaaatgttttttgattaccttgcggtccatatcaacggtgaaaaagccggaaccgccaaagcagtgttcaatatcgaccttggtaacgatggcggtaaatataagctggagctggaaaacggggtgcttaatcacaccgccgatgccgaagcgaaagatgccgacgccactatcgccctggatcgcgccacgctgaacaaaatcatcctgaaagaggaaacgctaaaacaggcggaggataagggtgaagtcaaagtgaccggcgacggcgcgaaactggatgagatgctgggctatatggataaatttgagttctggttcaatatcgtgacgccgtaa

SEQ ID NO: 203405 - DNA, 261 bp, Klebsiella oxytoca
  misc_feature (240)..(249): n is a, c, g, or t
ttgaacaactggtctctagagcatacaaaagaaatcaaagcttggcttaacatagataactatcgcaagtttgaagatctctcattaatacacttctatcacgagttatgggcccggaatctgttctttaaggagtatcgggaagagtttgagagcagaactcttatgagttacttctcaaagattttcaccggcaacccttttttgattccagaagggcaacttggatacatgactccnnnnnnnnnntcgccttgctga

SEQ ID NO: 203406 - DNA, 531 bp, Klebsiella oxytoca
atgcaacgcggaggttttgtttggcatgaaggtgacaattattctataaacgcagagcttcgagaggaatcactttcagacattatgcccgatcagtttacacgaacagtcatgttcgagattgatttggcaagtggcacagacgaagagattgcagagtcgcttaaagctgcattaccgcaatggcgtaaagttaagggtattgatgaaaacccattggaatctgttcgttttggatacggaactatcaagaaactcatcagctatcgtgtaatacctatgctggatatcctggtgtgggcagccgttaaaaaaatccgtgtctctgacgacaggttatccagactactgtatacagacgatgacgaagaaagcgaaatgaggcagtccagccaaatcaaagataccgacaggcctttggctcttaaatcctgcacaactgactttatccgacaattccattacttcatgaacaaaaatagccatttgaagcaaatgaaagtctctgatgtaatgaaactatcggattag

SEQ ID NO: 203407 - DNA, 300 bp, Klebsiella oxytoca; identical to SEQ ID NO: 18908

SEQ ID NO: 203408 - DNA, 327 bp, Klebsiella oxytoca
atgaagtggcgctattcgctgcgctggaagctgccgcacagaccgtgtccgggtccgtatgaactggtatcggaagtggtggaggccgggcagcccgctcctgaatcggtgatggcccgctgggtgcccggtgccgggtatgcagtgtgcgtggatttcctggatgagaggcagatcaggcgctggagcgatgaacggaaagcggctgcccgcagacgaaatctggcgagccgcgctaaccggattgcgccactgtttgctgatgaacttatcgagcgggaactggaaacccgaccggagtattttcgcggaaaatcagcccgataa

SEQ ID NO: 203409 - DNA, 570 bp, Klebsiella oxytoca
gtgctgagcgtcaatgcatggctgttgctggcgatctcaccgccgtggttatccaatcccgcgcaaaaatcaaggcgtagatcgtcctcgcccgtctgctggattacgccctgctggttatccagcgccattgctttcagctcaagctggctggccgtcaacaggccactgtggtttttgagtttgccgctggcggccaactggagtttttcgctggccgccaccaccgcatctcgggttgtgatatcgccggacgcggcgctgaccacaatccgcgcccccgaggttcgactgttatcaagatccactgccctgccctgcgccgtcagcgtcccagccgccatattgcggccattcaacgccagcgaagtctggctattcagcgtcagcgcgccgctgctggcggaagaaccatcgctatttaatccggctgcgagcgtgctattttgcgcgctacgcaaagtgctggcggcaatccgcgtatcaccttgcgcggcgataatgccgtcattggttagcgtcgcgctggccgtcaccaggctatcttttccggcgtacaactggccctga

SEQ ID NO: 203410 - DNA, 204 bp, Klebsiella oxytoca
atggcgcgcagtgagctgaacgtcgccctgcgccgcgctgatttttccgccatggttgatcagattgtcggcgtcaagcttgatattgccatttgcggcaagaacgccttcgcggttatccagccctccttcagagctcatggccaggtcgccctgcgccgcaatcaattgcccatgctggttccgaaggcttgctacttgtag

SEQ ID NO: 203411 - DNA, 1491 bp, Klebsiella oxytoca
atgccaggcctgggtggtgatttaatggctctaccacaaggggggactgtaaacacctcaatactgtatattactccagagcaaaatggagcaaagggagatattgttcatgatgatacagatggtctgcaggatgcgatagacaaagcggcagcgaccagtcttatgtccggtggcgtttatactcccgtgctcgtgcaactcaacaaaccataccggataacccgaaccatcaccatcgatacctctcgcgtcaggcttaatgctatatcaggttgcggggtctatgttgatcccgatggagtatacactgacaacaaagtatttttcattacgggcaacgggccgaatgccgctgtggcggccagtaaggtgggggcgttgtttgatggcgttttgttcctcactactggtgaaaagaaacttgatctctttcacgcagtgcgtgacagcacagcgagtaatgataacggggcgtgtctccataacgtaaataacatagccgcacgtgggttcagaacgattttcacacacggcgcagggggctggggctggaatttcaccgggtgcctgttcagcggaaatactaacctgatggatatcatcactgcgggcgacacatacgagaggcacacatttgtcggctgtctgtggggtaacggtggttacgcattcaaaatgaataaccccgacgggaaaatttactggattggcggctcagttgattattgtgatggtctggcgcaaatcacatccgggcatatggaagttaacggacataacgaatggactggcagaacgaagcccctggtagaaatcaccggctcgaatgcatcagtgaccgcctccgggacaatttttgtgcggggtaatactgatactcaatactatatatttcagcaatatcagaaacggcaggtgacactgaaagacacggtttttattactgacggtttgaatgccagtaaaggcctgatatccaaccttgaggttgttaaaagcaatctgacattccctaacgatgcagccaaaagcattgcctatcattcttctgatgaaagcctgctgaccagcaataatgccgttgttgatttctcgttatcagctactgcgaaccatacggtatcagtgacagatagtaaactgacagtgacggctgttaccggcggcaccacttcgcatctttatatcgatatacccgttatgggtaatacaaaggttggcttcaaattagttgcatcaaatacctcttcactgggtgcaatatccctgaacaaatcgctgcttactttgagcaaaaggtcaatatccgacctctcgacgtcaggtacggcatcctggccagccagtgccgccagtatagcgggtggatcggtgacgctctttgatatccccagacaggccgcttttctcaggctcgattttaacgtggcaaacctgaccacgggtacgagcttcattattgaatcgctgaaaatgttcacatattaa

SEQ ID NO: 203412 - DNA, 186 bp, Klebsiella oxytoca
atggggttatcagaaggcagtaccgtgacttgctataacaataccgacatgaaagatattctgacgacaggaaaggagtaccaggttgagaaaatactggatgctgatttgattacgctggtcggcgtgtcagatccggtatttatctggcgatttgcagccccagacatatcggaacgactttaa

SEQ ID NO: 203413 - DNA, 654 bp, Klebsiella oxytoca
atgcctgccatcgaaacgtttattactttccttttcgcgctgacgcttctggagatttctccggggccagacatgatgctgactatcgccagaggagtcgggcagggaagacgtatcgcgctgcttacggttgtgggcaatgtatttgtagcaggatttgtgcaagtttcttttcttgttctggggctggtaaccgttgtacatgcctggccggttgcgctggatctgctaaggtgggttggtgcggcttatctgatgtggctgggcataaaaatgattgcgacttcaggtactgatacgcggctgcgaaaaacggcaaaaatttctgacaggaatgccgtaaaggaaggcgctctgaacagcctgactaatccaaaatccctgctgttcatgtttgcttttcttcctcagtttgtcgatcccaccgcgggtcctgtctggctgcaattgcttgttctgggcagtatccaaaagctggcaggaattgtttccctgggctcagtcgcgatggcatcgggaacatttggaaactggctgggtaaacacccaggctttatcaaatggcaggaacgatttacaggagttgtcatgataggcctcggtatccgcatgttgtttagtgggtctggcgtagtatcgaaatctgccagttaa

SEQ ID NO: 203414 - DNA, 429 bp, Klebsiella oxytoca
atgcagttagctacacgtcagcacaccctgaacgtcgaagaatccgaccgcctttctttcctgccgtacatgttcggcaacgattttatgctggctgaattacaggtgtatgccctggcaaaacagtggatgcccgaatacagcggcggtttctggcatttcatccgtctgccggacggtggcgggtatatgatgcccgactgcgatcaggtacacatgattaacggtgaaaactggtttgatagtaccgtcagcgccgatgccgccggaattattctgacttcacttgccattaaccgccgttgctggacgcatcacgactgcggcaatgccgcgctcacacgtttgttcatgctgcgcgatacccagctctggaatcacattacgtttcaccctgaatgcaacgccatttatgccgcactcgactga

SEQ ID NO: 203415 - DNA, 255 bp, Klebsiella oxytoca
atgtccggatttaatctcgccgcaacatcgaaagaagagcaggataaggtggccattgacctggttgcttcaggtgtggcgtataaagaaaggctggctatgccggtggtcgctgaactggtggccagagaacagcctgaacatttgagagagtatttctggtcgcggctggagcattttcgtcaggccagtgcacagctccctgacaaaaatgctccggaatatgccagaaaagacgatgaggttaaaaaataa

SEQ ID NO: 203416 - DNA, 219 bp, Klebsiella oxytoca
atgctggctatttccggtcaggctgcgggggctggcgtacgtattgaagatggttctggtcaacctgtgaaattattggtacctaccagcggccgcggcctgggcattggcaacaataccctaagctttagcgcttaccttgaaaaaatctctactgttaccaacgtcactccgggtgattttgaagcggtaaccaactttaccctggcttatgaataa

SEQ ID NO: 203417 - DNA, 345 bp, Klebsiella oxytoca
atgattaaaatcctgatggctctgatactggtggtgaacgtggtctgcgttccgggctcccgggctgaaacctgccgggctgccacagcggcaacagccggccgggatgccggatacgaacaggcccgcaaagcggccgacgcctgggctgaccgggagggccaggcctctgatattctccaggactgtctctccggtatccgcgacatcaccgtcactctgccgtcattcccgagcctctccgacctgctcagtcaggccattaacaaggtctgccgggcggcagtggacaaagtcaatgacacgctcccttcaaacattgatccctggaaggatctgaactaa

SEQ ID NO: 203418 - DNA, 777 bp, Klebsiella oxytoca
atggttaacctgaactataaggggaaagagcagatcctcattcacgtgaaagaacaggacgccagtggtcaggaggtgatacgtgagaagcaggttcaccgtaacaactgggaaatgaaaccgacacgaaaacgaagcgtcaaaccgtcttcagccccggaagccggggagaaactgtcagcatatgatatggctgtgtatcgggatatccagtcccgggcagagatgcctttcagcccgcctattcctgagagtaaagaccttatgtggcatcgtccggacggaagaggcagttctgtcgacggcataccagataataatccggctccgggacaaaacgaacacgccggcacgccggtacttcgggcttcaaaaaaggacggttctcccttactcactctctgtgccggtgcaggaacctacctgcagggggtggcgatgtaccgggataaaccggtgaatgtgctggcctgcatgatggggaaaacaggaggtcacgcgctggtcatcaatgccatcacgccagagggactgcggtatatcggttcagccgatccggtgaatgtgattgaaggaaaaccagtgaataaccccgaattaatgagcctcaagttagggaaagaggatgttgttccggcccgacttgaagatccggggaagcttcctccagctatgtttaacatgctcggttttgataaggaatggaaaaaaccagaagagacgcccccaaaggcggcggcccggaatgtcccacaaagttcaatgcggccggcataa

SEQ ID NO: 203419 - DNA, 615 bp, Klebsiella oxytoca; identical to SEQ ID NO: 172813

SEQ ID NO: 203420 - DNA, 276 bp, Klebsiella oxytoca
gtgccgacggtactgttcaggctggtcaggctgctggctgttgattcgattttattttcagccttcgtgacccgcgtcgtcagcgaactgaccgcgctggcatccgctttattcgccagactgttatgcaggctggtgagctgctgcccctgcgaggtaatgttcccctcggcgctggtcacgcgcgtcgtcagcgaactgatggctgcagcgttgacagtattggccacttcatcgctgacatcgatacagaatgcatcatccagatacagataa

SEQ ID NO: 203421 - DNA, 420 bp, Klebsiella oxytoca
atgatgtatttgccggacttcgggttctgcgccgccagcgtgctccagccggaattactccagccttcaaaaccgcgttcgaacgagttgttcgccagcatgttgccgggcattgattttgtcgcgtccgcatcctgctgggtagccacaatgctgttattcagtgaagtgacgctgctgctctggctctccagcttcccttctgcgctcgttacccggttagtcagtgcggtcaacgctgtcgcatccgcctttttattgacgttgccattggtggtggccaggtcattcgtcagctttgtgatgctgctgccctgcgaggtgattttcccctctgccgtcgtcacacgcgtggtcaggctactgatggccccggcgttggcagtaatattcactccatccgtgacatccacaaaatag

SEQ ID NO: 203422 - DNA, 624 bp, Klebsiella oxytoca
atggatcattacgcttctgatgtcacggcagtagtggaaagcctggacttacacaatgctgtgcacgtgggacattccacagggggcggtcaggttgcgcggtatgttgcgaaatacgggcaaccccagggcagggtcgcaaaggctgtacttatcagctctgttccacccctgatgattaaaacagataataatccgggcggcacgcctgttgaagtttttgatggcttccgcaaggcactggctgctaaccgttcccagttttatctcgacgtcgccagtggacctttttacggatttaatcgcgaaggtgctgaggtgtctcagggcacgattcagaactggtggcgtcagggaatgacaggtagtgcaaaagcccattatgagggtattaaggcgttttcagagaccgatcagacagaggatttgaaagctatcacagtccccgttctggttatgcaaggtgacgacgatcaggttgttccctataaaaacgctgcaattctgcaagataagctgctttcagatagtgtgctgaaaatttatccaggtttaccacacgggatgcatacctcccatgcagatatcattaatgcggacattctgacttttatccgtgcataa

SEQ ID NO: 203423 - DNA, 342 bp, Klebsiella oxytoca
atgaaacacgataataatatgctgaccagttttattcatcacgttgacgatgttttgtttggcagttacctcgaatttaaaggttcaccctgtgcaatacagctactggtaaagcgagaagatcacaatacggtctatattgattatgtgaattctggcagaagtatgtatctgaaagatcactccgttgggagtctctgcatgttcgtcaatgttaaccgcgcttatgaatacgctgattcgcgggggaaaacgcttcgtttcagcttcgggaatccgactcaggactacaaaacccgctggtgtcacctgcaaccgctgacccgcattctcaccctctga

SEQ ID NO: 203424 - DNA, 273 bp, Klebsiella oxytoca
atgaaaaaggtattagctgcattagcgttatccgcgtttgcatttagcgcctcagcctctcagttgattacgaaacaagaagttgaccattttaaactgacccatgtaggcagtatctctgtaggaccttccggcggtcaattctcttctccctctgacttgcacgatcagctttcaaaattagctgatgaaaaaggtggcaagttctatgtgattaccgcggctcgtgagcatggtccaaactttgaagcaactgctgaagtttataaataa

SEQ ID NO: 203425 - DNA, 507 bp, Klebsiella oxytoca
atgcgcgccgaaatagtcacgctgcgcctgaatcaggttagcaggcagaacagcggaacgatagctatcgtagtaggcaatagccgcagagaaggttggaaccggaataccattctgcactgcatatgcaaccacatcgcgcaacgcttgctgataatcatcggcgatctgcttgaagtaaggcgccagcagcaggttggcaatgcccgcattctgctcataggcatcagtgatcttttgcaggaactgagcacggatgatgcagcctgcacggaagattttagcaatttcgccgtagttcagatcccagtggtattcatcagacgcagcacggagctgggagaaaccttgagcgtaagagacgattttgcccagatagagagcgcgacgtactttctcaatgaactctgctttatcaccagcagtcttcgcgtgcggcccggtaagaactttagaagcagcaacacgctggtctttcagggaggagatatagcgagcaaagactga

SEQ ID NO: 203426 - DNA, 429 bp, Klebsiella oxytoca
atgcagttagctacgcgtcagcatacccttaacgtagaagaatctgaccgcctgtctttcctgccatacatgttcggcaccgattttatgctggctgaattacaggtgtatgctctggcgaaaaaatggatgcccgaatacagcggcggtttctggcatttcatccgtctgccggacggcggcgggtatatgatgcccgacagcgatcaggtacacatgatcaacggtgaaaactggtttgatcgtaccgtcagcgccgatgcagccggaattattctcacttcacttgccattaaccgccgttgctggacgcatcatgactgcggtaatgccgcactcactcgcctctacatgctgcgtgatacccagctctggaatcacattgtgtttcatcctgaatgcaacgccatttacgccgcacttgactga

SEQ ID NO: 203427 - DNA, 444 bp, Klebsiella oxytoca
atgtactgctctttaaaacaggcgatgtcagaactgttgtcgctggatatggatgaaggggaacctgtttttgttttcacgctgacccgtggcgaagtgcggcacattgctcaggactggaatctgtcagatgacgatctggaaaccgtcatgctgcggctcggtactgcctttgaatatggcgcggaggtgaaagtcgttcatgacattgttgaagagttaatggatgaactgcgcgccgcgcggaatgtgaccgtccccgccgttgccctggaaaaagtcatggcgcttgccggaagcgaaatgaaacatctgtatgccgtagcggaaaaaggaggccgcctgtcagttcgcgcgaaaaaacctgcaggctggcgcctgcggagggaaaggacacgcgccgcgcttcgcgccgcacccatccttttccccatctgtctctga

SEQ ID NO: 203428 - DNA, 507 bp, Klebsiella oxytoca
gtggcggcaatcagccagttacgaggctggcattaccgtagtaagcggaaacagagccgcgcggatggtatcgtctattgtggtccggcggatgatttgccgccactctatcccgaaggttatgacacccgggttcgcagggacggtgttatctgttatgccagaggagagaagcctgccgtgctggattacggtgacaggatcgaggtcgtaaatacaagacatgccgaagatgtgtatgtggctgtggccagtacagcatggcgaagcagggagaaagttgagttctcagtcggaaagggattttctgatgaagcggcccgtcaggcggcaaggcataattactggttcccggatgaccctgtgaaggtaacggataccatacaggtcaataaagtgcgccgggaagaggtttatatcagcaaatccggcagtacacctgtccctgattcttctgacaggactgaacagcgtcataccagcagcacgaaggttcgccctcattaa

SEQ ID NO: 203429 - DNA, 357 bp, Klebsiella oxytoca
atggccggcctcaagatggcgctgcatcgctgccaccgcatagcggataagccgaaaggccatatgcttatccggcgacgactggtgctcaatgagcacatgaacgtaaccatcaccggcggtcattttcaggctgtagagcacgtcgctgaaatactgccgcagatcatcttcaacgaacgagcccgattccagcttcagcgtgctgagatcgcagatcgcaagcagctctgccggcagatgtatgttcatgaaatcgcgtgcgatatccggctgtgtaagaaactgccggaacgtcgcatcatgaggtgtcgggttgttgcttttcttcttcatcagcctggctctgaaaaatga

SEQ ID NO: 203430 - DNA, 333 bp, Klebsiella oxytoca; identical to SEQ ID NO: 172800

SEQ ID NO: 203431 - DNA, 327 bp, Klebsiella oxytoca
atgaaatggcgctattcgctgcgctggaagctgtcacacagaccgtgtccggggccgcatgaactggtatcggaagtggtggaggccgggcagcccgctcctgaatcagtgatggcccactgggtggcaggtgccgggtatgcggtgtgtgtggattttctgggggaggggcagatcagacgctggagcgatgaacggaaagcggcagcccgaagacgaaatctggaacgccgcgtaaatcggatcgcgccgttgtttgccgatgaacttatcgagcgggaactggaaacccgaccggagtattatcgcggaaaatcagcacgataa

SEQ ID NO: 203432 - DNA, 639 bp, Klebsiella oxytoca
atgattttaaactggataattgatatctttcaattattgaccacggtaattcatctacctgttcacaagttatattttcatgctgtagtaaaatcattagaaacagaaacaattaatactttcgttctttggttctcaaaatttaaagaaatattttttgctaagacggattattacctgtggggagatagtgacaacaccttacttgagaaaatgctaactgcaattaattcctcacagcaattcacagtaaaggaaaaagcgtctctattatatagctatcatgaaagctatgatgaatctttcctgaatgagttaacaatgcctcatgaaatcttaatcgatttaattgctttgtctacggatgatagctttacaatagaccagattgtcagactattaaaattaggttttagaggaagaagtgagattgcacatttgactaacgagcttaccgaaagagagttttcaaaaatattcaatcaaaaaagtgcaacattgaatccaagtaaaaacttaaactcagaaagattcctttctgcactacagcaagcaggcttgatcaagagatggtcccagcgtgaagatgggaaatattacgttgactgtcgttatgaagaggacgaaagttacctctaa

SEQ ID NO: 203433 - DNA, 930 bp, Klebsiella oxytoca
atgacaacgcaatcttctcccaccccgcatgatgctatcttcaaacagctactggcgcataccgacacagccagagactttatcgatatccatcttccggcagatctgcgcgcgcagtgcgatctcaatacgctacagctggaatcaggtaattttattgaggaagacctgcgcgcctactattccgacgtgctgtactctttgaaaatcaataataagaccggctatatccacgtacttattgagcatcaaagctcgccggacaaacagatggcgtttcgcctgatgcgctatgccgtcgccgcaatgcagcgccatctggaagcgggaaatacgcatcttccactggtggttcccattcttttttatcagggcaaaacctcgccctatcccttcacgatgaactggtacagcctgttcgactcgccggagtgggcaaaaataatctataaccgcccttttccgctggtcgatatcacggtgatccctgacgacgcgattatgcagcaccggcgcattgcgatactggagctcctgcagaaacatattcggcaacgggatctcatgcttctgctggagcaattgggggccctgctgaacacgggatatactaccgccgaacagctaaaagtgttatttagctacatggggcagcgcggttataccgcaaaccctaaggcttttttcaatggactggtaagtcatataccgcaggaggagtcaatggaaacgctgaacgaatggctggaaaaaaacggcaaagagctttttattgaatggggcattgaaaaaggtgaagcaaaggcccgactaaaaattgctaaccggatgctggaaaacggaatggaacagtcgctggtcatccagctcaccgaattaacggaaagcgaaatcaaacagctgcaggacgccgctataaatccggcctga

SEQ ID NO: 203434 - DNA, 621 bp, Klebsiella oxytoca
atggttaatccgggcgagatgcacgatggtattccactggatggcccgcgcagctggcagatggtctatctcgatcctgagcgtgtcgttgacgagttgcagggagagatgaaggctgaagagatcctcctgcgcccggtagtcgaagacccgatgctgcgcgggcaaatgcagcggctgtttcgcgagatcgttgccagcgcgccggatgacgccgccgtgcaagaagcgctgctgctctgcctgatgcaggtttgccaatttcatctctgcgccaggcggccgggcaaaatcggctcccccgccatcgtgctggccagacaatatctcgatgatgcccccgaagagaaaatctctcttgaggcgcttgccaggctttgcggtctcagccgctttcagctgatccgcggcttcgcgcgcgcgaccggcatcacgccacacgcctatctgatacagtcccgcgttcgtctggcgcgtcgtctgctgatggagggtcactccctcgccgatacagccttcatggccggttttgccgaccaaagccacctgacccgcgcatttcaaaaacagtttgccgtcacgccgggcagctaccaggctatcgttcaggcgagccgctag

SEQ ID NO: 203435 - DNA, 192 bp, Klebsiella oxytoca
atggatctgtttgtcggtcctgttctcagttactggttgtctctgcttcaccccgctggcgagagtgaaatagtattcgaatttgaattacatcatattgtttgggtttttatttctctgtgcgtgatggtagtagcaaaaatactggaaaaagcaattcttctttacgaagaaaataaacttttcctgtaa

SEQ ID NO: 203436 - DNA, 174 bp, Klebsiella oxytoca
atgctgcatacaatagaattcgtttcgaaaataaccatcaatgaattagcagcacagtttcgttatgcatcttgttattcccatgtcatttcctttaaattcatacattataatttcaatttaaaaagtaacactgacaataactctaaaaatacagcacttctgtgcgattaa

SEQ ID NO: 203437 - DNA, 387 bp, Klebsiella oxytoca
atgatggtaaccgctgttttcactgctgtaggcattgaggctgtagcccagcagcgcggccggaataccactgtcccagagtgcggctggtacggtatctctggcactgcgatcctcccatatctggggaacccggatattcagcgtctgtgcgttactatcggttgccaccgtggcatcgggaatgagtgttgccaggctaacgcaggtttcggcatcaacagcatatgcattggccgatattttttcatgtcgcagcggaagctgcctgagcaaatccgtcgacagacaggggacggtacgctggccttccgtgacataaaggacatcctggttcacaacctgctgttcgttaaaaaacactctgacccggtgaacaccgggtga

SEQ ID NO: 203438 - DNA, 366 bp, Klebsiella oxytoca; identical to SEQ ID NO: 172405

SEQ ID NO: 203439 - DNA, 450 bp, Klebsiella oxytoca
gtgggtgaaattcgcgatctggcgacgctcagcgccgccgtggcctgcgcccagtccggccacctttgtctgtccaccatgcacacgcacagcgtaggcgaaaccatcccgcgggcgttactgctgttcccgtctgaagtccgtgaggctgccgcccgggacctcctcggcgtgatgcagtacatcgttatacagcagctgctgcgtaccacagagggcaagcgttgtgcagtcagggagttcgtcgtgtttgaccgggcgctgcgatacgcactggctgacagagactatcgccagtgggggcattatctcgatgaccggctggctcaggaacgttgcaacctcgcctggaatgcttttcggttatttcaacaggggattatcgagcgcgaagaaatactgactctcgtctctccccgtgagctccgacagatggaggcttcagcatga

SEQ ID NO: 203440 - DNA, 252 bp, Klebsiella oxytoca
atgttcgctcacaacttagagaaaaactttctcgtaatgacgaaggccgtctctttgttcatctctttatttggtcgcaccctgattcagatcattgcgatggagtatctgatcacttccatttgggaaaacctgaaaattggagtgaaaggagtgataaaattttcatcaatgagatctggtcaagcccaattgtatttagacgacatcatgcacagaatcatcctttatgtgatgacgcaaaagctttga

SEQ ID NO: 203441 - DNA, 600 bp, Klebsiella oxytoca
atgtttcagcaatatcagaaacgacaggtgacactgaaagacacggtttttattactgacggtgtgaatgtaagtaagggtttgatatctaatcttgaggtggtgaaaagcaatctgacattccctaacgatgcagccaaaagcattgcctatcattcatctgatgaaagcctgctgaccagcaataataccgttgttgatttctcgttatcagataatgcgaaccatacggtatcagtgacagatggtaaactgacagtgacggctgttaccggcggcaccacttcacatctgtatatcgatatacccgttatgggtaatacaaaggttggtttcaaattagctgcgtcaaatacatcctcactgggtgctatatccctgaacaaatcgctgcttactttgagtaaacggcagatatccgacatctcgacatcagggacggcatcatggccagccagcgctgccagtatagcgggcgggtcggtgacgctctttgatatccccaggcaggcagcttttctcaggctcgattttaacgtggcaaatctgaccacgggtacgagcttcattattgaatcgctgaaaatgttcacatattaa

SEQ ID NO: 203442 - DNA, 270 bp, Klebsiella oxytoca
atgaacgttgcggccaatatctttgtgattaagctcggtgtagcggttggtggggcgattcttggatgggtgctggcttactatcattacgctgctaacaccacggtgcaaccagcctcagcggtacatggcgtaatgctattgttcacgctggtaccttcaattttctatgttcttaccgcagtctctattaaattctatggcttaactgaaaacagaatgaatggcattgttgatgatttaaaaaaaggaacttttgccgagtcctga

SEQ ID NO: 203443 - DNA, 303 bp, Klebsiella oxytoca
atgctcaaacagaccattttttccttctgcaaacggagcccaggcttccggctgaatgccacggctttgcatccatggcacggtatgcagctgctggttgaaggggttaacctcaacctggtttaccgccggggaaacgttgttgaaggcgataagatcggccagtcggtcaggatggaagttgctgacgccaatggcgcgaattttgcctgcctgctgcaattcttccatagcacgccatgccccatggacatcgccataaggctggtgaatcagatacaggtccacgtaatcaagttgtag

SEQ ID NO: 203444 - DNA, 210 bp, Klebsiella oxytoca
atgtctacacaagatatgaagattttaaggttacctgaagtagtcgagaaagccgggatcaaaagatccaccatatacgactggctgaatccaaaatcaccgcgatatgatccaacttttccaatccagcgtcggctgggcactaaatcagtgggctggctggagtcagaactggacgactggctaaataatcgcccgatatcaatctga

SEQ ID NO: 203445 - DNA, 288 bp, Klebsiella oxytoca
atgcgttgtttgcaatatttggcgaaattcactgatttcccatgccccaaccatgccccattacgcgaattcttccaggatcaggatgccatccgcgccatcgccgccggtataagccgtgctggtaaacccgaggtcatacgcgccaccaccaccggagccgggagctgcgccagcaataacggcccgatcgtcatgtgggcgactgataaggaaatcgccaaagaatttgtcgagaccactcttaaagacgcctgggagacggctgacgactggtttgtgcgttga

SEQ ID NO: 203446 - DNA, 3237 bp, Klebsiella oxytoca
atggcagaagtaccgttaccaactccaaccgacaacccggtgccaagtactgatattcgggacgcagtttatgctggcgccatgctggataaggttgtcaccagtaccgacttgacatacaccgatcgcctcggcggtgagcactacaccgtagatggaatgaaggctgaaggggacaaggttgtcgaagaaacgcggcagaacctgatccctctcagccggcagtatatgaccttggcagatgctcaggcagatattgctaatatccctgaaggtagcaccacttattatcgcagtccggacgacagcgccctcgcgatcgaggtcatgaacgttgacggcacgctgcagcctaccggacgaaaaatgccatccgcaatgccaatgggttaccagtctgctacagctgtgagtagcggtgcggctaataccattgctatcactatccccggattattagtggatggcagtttgatttatttcgtatcgccaatattaaacacaggcccaacaacagcagttattactgacgctaacggtaattcgtatacccgtacaatttacacaggctcgaactcgtcgctcgcggggggcgaacttttactcaatcagcccgtgctgatggaatacaggacaggcaccgcaaataactttatgttggtggcatctgggccggtggcgtcagtgctgaatgcgcgcctgctgagcgtcgagctgaactctgttgcgattgtttcggcagtggcaatgtcggcagacgcgtatacagggactaccgccaacaccacatcacaggttctggtcaccgggcgcgtatttgtattcacccccagcgggaccaacaccacgagaacgcctacgctgtcgctgaatgggtggacggctcgcacgattaagcaggcgaatggcactgctcttgctgcgggggaccttgtgtcgggctatccgtatctggttgtgtataatgcgaccgctaatgattttcggttgttgacatacccggccgaccgcactcgtttgcttggcgcgtattcaaaagctgtcgtaacgagtgactcgagcagtcctaatgctatttccctgactatccccggccagctgggtgacggtacccaactgacatttgagccagtggttgctaacaccgccgcaacgacgctggtcattacggatatgtacggtaacacgcagacgcgtaatctgttaaaaggccctaacacgccgctgacgggcggagagttagaagcaaataagcctgcgactatccagtggcgtagctccgtctcaaatttcaaattaatcaccgcaggtgatccgcgtacagacatcattacgctcaaaactgatgtcgccgcagtggaaaactcacttaccacatacaagaccactaatgattccctgaccggcaccctgaaagatcaggtgcctatcccggtgacagttgccagtgttgccgacgacatttacacggcaacggcaaccattaccagtaatgagcgacagagtgggcgactgttcctgtttacgccgccgtccgcaaatacaacacgcagccccaagctgaaactcaatgcgttgggtgcctataccattgcccgaattgacggtgggcagcttgctgtcggagatctggtagcaaaccgggcgcatctgatgcactggcatgcagtttctggtcagtttcgggtaatgacgtatgccgatgagcgaacaaaaatttacggaacggttcttcgcgcaaccatgaccagcgacgccagtacgccgaacgatttgtctgtcacggttaatggtatcatctacgatggcacgttgatgatattggaaccaccagcaacgaacactggcgcggtaaccatcaccaccgttaaccgttacggcgacgcgattgtgaacagtatatttaagggcgcaaactcgctgctgacaggtggggagataaagtccgcagaaccagttttgctgatgtaccggagcggatctccgagcaacttcaaaatcatttcgtccggcgatttgtccactcccgtggcagaactacagtcggaggtagaggccctaaaagcctccattaccgacccggtggattcggaggtgtcagtcgacccgtactctgcgctggctgcaaaactggtcggcgtgacaggtagtaccgcgattttcggtgatattagctggaataacggagttaaaacggtcgttaaaaaacagataatttgtacgtcagttggttcatctgtgggtactggtgctggatctggtaatggcgcagtatatgcaccgaatgccctttttgttgcggcgttaaaggccgagttggatatgtacggcagcttcgacatcatcgatgataaccagtgcattccatcccaggcgattcagcagttctccgcgcaactggataactccccgtataccacgtcagattttgtcctgattgtcggcgggatgaacgacggtccggtaggcaacttcaatacagggctaacatttcctgggcagaagacacgattggaatcgttgattgataaatgcctcgctcgcggggcaatcccaatcgtgtgcacaacacctcaccacgatgtcacgtcggaatcgacatacgcaaccgtgccgtctggagttcaactctcgtaccctgtcagaacgtatcaggtgtcgtacaattataggtttgatgccgatgcccggacaatagctaccggcgcgtttgccaacccaggatacggtgggaatatcctgaaggctggctcgacaataaacgttggtggtggcgttaacgcaggaaactacaccgtagagtcaatctctgaggaccgggtaacaatcaccgttgttgaagcaatcccgcagacctcgacctataccactactatcaagcactcaaacctgaatgcaatagctgaggaggttttggttccccctccatcactgtcacgtgtgactcaggactggacggggggcgggatactgacgactggcgacgtgcgtttcggtatcgtcaacaatatgatgaggtcggttgcacgccagaaaggggcgttcctggccgactgcgaatattcctggttcaaatacgggattgaggttggcgggtattcgtcggtgtatgaccctgggaactataaccaccccaacggaaacggctataccgtctcctacggctatacgctcaaagtggcggcgcgagaaatagcacgtctcatttttggtgaaaaatattacgcgaaggcgtaa

SEQ ID NO: 203447 - DNA, 342 bp, Klebsiella oxytoca
atgacagaagaagagtggctcgaaggtcttcgtgggctgcctgatgacgtgattttaaagatccactttgaccttcaagagaaaattaagaagcactataaattgcgcgattctggcaagaacctcgagaaggcaattcattactgccaacagcaaatagcccttgccccattagctatgtctgccatgaagaaaaatcctggcatgtacgataatgggcaattctttgcccctggacatcatggttacagacaatacgcgacgatcctcaagaagcagaaggacgcagccggcctggatgctctccttaaaaagaaaaaggcggaaggatgggcagactaa

SEQ ID NO: 203448 - DNA, 276 bp, Klebsiella oxytoca
atggtcagtttgcgtcatatgtgttcgcgctttatctcggcttgctgggcaattatcaccaccatttcgtttgcagacatctcggtgagtcgagcggttagcaagttgcgccgggtggtggagcgggtcatttccgcagtctctgtgaaggcctcgcctgaaaaggctgattggcgaatcgtagagcgaatgtgcagtgaaagcgtgcgcgagcaagttaatattttcggccgccgtcctcgcaacaccggcgctttgtgcagtccgttgctatag

SEQ ID NO: 203449 - DNA, 186 bp, Klebsiella oxytoca
atgggctttaacgtgtcgtgcagcacgtttctacccaagagccctgaccagattgcaggcataaaaaagccccggcgtgatgccgaggctaattttacaaactggtatgtgactatcatcttcatgccgccacttaaagttaaggcagcatatcaaagtagactcaaatatgacgcatttaattga

SEQ ID NO: 203450 - DNA, 429 bp, Klebsiella oxytoca
atgaccaacaaatttaacatcgacaacagagagctgcttcagagaatcagttgcggcgaggctgttgtgggaattgatttcggtaatctaatcgtcagggaactggctgcattcaggctgtccgcaatggacagcgagccggtgattattgttggcgatgatggaggggatgcgctttcttatcgccgccttatccagtcctttgagcctggcactaagctctatcgccacgcgcagccagcgccggtagtgccggatgatgtgctggaagcattgcagaaggttgctcgtatacgcctcgacctggatgaattcgacggcgatcgccgtggcatcgctgattgcctgtgtgatgccgaagaagcgttaatcgaggttgtaaaccgccgcgccgccatgcttgcagccgcttcgcaggaggtgaaatga

SEQ ID NO: 203451 - DNA, 516 bp, Klebsiella oxytoca
atggcactgacacacgatgaactttgccagatagcctgccgctttctgcaaaacaacggtttcaaggtggcctttcatgaccggttccgagcatggacgccatacggtgagcaggctgatgcaataggctttcgcaatggggccagttgtttgattgaggctaaatgctctcgttctgacttgttggccgaccgcaagaagcctttccgtgttgaacccgagaatggcatgggagactggcgtttcatgattagtgagccgggtatcgtaaatattgaggatttgcagcctggctggggattgcttcacgtggtcaaaggtcgggttaagaaggttcacggctggcctggaaactgggagtgggttaaccgggacagcaagccatttcaggctaacaaacaggcggaatgcgattacatgtttagcgcgctccgtcgcatggacttacgcggccacctcaaagaagtatacgacggcgtgatagttaaccgggcagcagaaggagccaaccaatga

SEQ ID NO: 203452 - DNA, 855 bp, Klebsiella oxytoca
atgacgctggatgaaaaaatcaatcaacttgagaaacgcattgctgagctgagccagccgccagttcagcatgaagatatcgagctaactatcagcaccgagaactgcgaaacgcatggcccctttgaatgcaggaccaggcatttcttaaactctgtcgtgaaaattcccccgcgcccaagctgctgccctgaatgcctcaaagaggagttaggccgcttgcaggcggaaagaattagcatcaacgaagcagcccgcaaaagaaacatcgagcgcctgctggacggactgaacatcccggcgcgcttcgaaaactgcacgctgcagaactatgagccagtgaacgacgacgcaaaacgcgcacttaaggtgtgccaggcatatgcaagccgttggccagagcgtttgcagaagggtggcggtcttgtgatgtgcggcaaaccaggtaccggaaagaatcacctggcactggctatcgcacggcatgcgatcacagaacaccagagttctgcagtgtttaccacggcgctgaaaattgcacgtgagtacaagtcaacctggtcgaaaggttcaagccgcactgaggatgaggtgatccgttacttcacgaaacctgatctgctgattatcgacgaggtcggcgtgcagttcggaagcgacgccgagaagttgatcatgttcgaaatcatcaacacccgatatgagcggatgaagccaaccatcctgatcagcaaccagaccagggaggagttgtctgcattcatcggcgaacgcgttcttgatcgcatgagcgacggcggcggatgcacgctctcattcacctgggattcttaccgctccaagggggcagcatga

SEQ ID NO: 203453 - DNA, 264 bp, Klebsiella oxytoca
atgtcaggaaaagaatacacaattcagcctaagtttatgtctgcgacatccatactcattccgccagataacacacaagctatgattaccttttatagtcatgagtttacacatgcaccggctaatacaaacgcagaagggcagatgcagataaaagtagacttggttcctcaggaatcaattattatgaccccaagtcaggccatccttctggctgagtcattaataaccgcactaaaagctaatggcttatggaaagaataa

SEQ ID NO: 203454 - DNA, 600 bp, Klebsiella oxytoca
atggaaagaataactccaacttcatccccatttacaaaaagtatctctagtgcggtgattacggcaactattgttggcgcgggtgttacagcttatgatggaggcacattaagttcgtgggggagtcaaagcattcgattgccgcatgactcattttctggatttgatactaaaatacacttatcagatgcgccaccagatcatctatcagcggacgttaaagtgagtaattttaccaaagatgagttgaatgcaaagctagcacaaaacaaagccgaagttgattcggttgcagctggcatgaaaactgaaatggcaaacttcagaacagcttacgttgagagtttttctgaaatatcaaaaactttaagccgtattgaagctaaggcagatgcaactgaaaaacgactgactcaagctcagtggattgtgtccctggtgatcagtatttgcgccgtaaccttatctgctgtcatatttttctcgaacaaaagtgctcaacgtaacgattcgaatcacaatatggctagccaacccaccgcaactcttgaacagagtcaccaaggcagtaatgccccccttcccaccaagtctaattga

SEQ ID NO: 203455 - DNA, 972 bp, Klebsiella oxytoca
atgagcgaaataatggatttaaccgtcatcgaaataaaaccagaacaggcgcctgccctgtaccgggctggcggtcttgacgcttacctggagcagattcgccaggccgtgaacgaggttccggatctgaccaccaagaaaggtcgtgaccgtgtcgcttctctggcggcgcaggtatcacgcagcaagacggcaatcgagaagccggggcgcgagtacctgaaacgtcttaaagaggctgtgcgccctgctgaggcggaaattaagcggttcgttgacgcatgtgacgagctgcgcgatgcaacacgtcgcccactgactgaatgggaagccgagcaggaacgcattaaggccgaagaagccatgaacgcccttcacgtcgaagcgctggccatgaatgaagagttcgatcggcggctggctgctcggattgagtctgaccatgaaatggccctgttgatgaatgacgctttcgaccgtgagcaggcagatagagcagctgaggctgagcgccagcgcattgcctatgaagaagaaattaagcgactggcagcggcggctgcagcccgcgaagttgagcagcgcgcacagcgtgaacgtgaagaagcggcgcatcgtgaagctgtgttgaaagcacaagctgagcaggcagagcgagatcgcattgcagccgagcagaaagcagaggctgacaaaaaggccgcagttgaagccgagcggcgcaaagcacaggaagaagccgatcgcatccgccgcgatgcagagcaacgcgaacaggcccgcctggctgatgagaaacgtaaagccgatgagcaggcgcgccgcgaagccgacgttaagcaccgtaaggccgtaggcgtagaggttgttaaagctctgatggccaataccagccttacccgggatcaggctatcgaggtactcaccgcggttaaatacggccgcattccccataccggtatcagttactga

SEQ ID NO: 203456 - DNA, 135 bp, Klebsiella oxytoca
atgtgggtaatgatgaaacttaaacgcactggagaagtggtttatttccaggattacgacagcagggaaacggctgaaatggcggttaaggttttgaactccgtcgccagcggctgggaattctatatcagataa

SEQ ID NO: 203457 - DNA, 285 bp, Klebsiella oxytoca
ttggcggtatttccgccgtactggagattatcaaacgcgcgcgagcatgaaaacgtcagcctgctgccgcactgtttttactacggccctggcctgctcgccagcgctcacctgctcagcgtgatgccagagcccgttccgctggaagtgccgtggctgatgttcgaacaaacgctgcatccgtttatgcgcttccagccggtgatgaatctgccgaacgcgccgggtctcggttttaatccggatttcgatgtgctggaacggcatctggttgcacagggataa

SEQ ID NO: 203458 - DNA, 237 bp, Klebsiella oxytoca
atgagcactatcgaagaacgcgttaagaaaattatcggcgaacagctgggcgttaagcaggaagaagttaccaacaatgcttccttcgttgaagacatgggcgctgattctcttgacaccgttgagctggtaatggctctggaagaagagtttgatactgagattccggacgaagaagctgagaaaatcactactgttcaggctgccattgattacatcaacggccaccaggcgtaa

SEQ ID NO: 203459 - DNA, 357 bp, Klebsiella oxytoca
atggatgaacagaaccacggcttcccgctcagcggcgatgcgctggcccaggcggcgattcaagcagccaaccgctgccatatgccgtacagccattcgccctccggcgtcgcgctggagctgaaagacgggactattttcaccggtagctatgcagaaaacgccgcctataacccgacgctgccgccgctgcagggcgcgctgaatctgctgagcctcaatggttacgattacccggatatccagcgcgctgttcttgccgagaaggccgacgcggcgctcatccagtgggacgcaaccgccgcgacgctgaaggcgctgggctgtcataacatcgatcgcgtcctgttaggttag

SEQ ID NO: 203460 - DNA, 234 bp, Klebsiella oxytoca
atgaccagacggttcacgctgtacgcttacgataaaaacgccctgtttacgcaactcattgcttgtgcggtgctggccgtgggccgggaatgcaacagcataatcaacaacagcctgctcagtggcttcatcggtacggttcttaaggttaggagcgcgacggctgcgatttatcagtgcatccacgccacctttatcggccagttcgcggtaacgataaaacgtatcacgtga

SEQ ID NO: 203461 - DNA, 285 bp, Klebsiella oxytoca
atgactaacaaagagaagcggaaactataccgggagtgggctgatgatatcgacggcggaacacctttcccggaagcctgcagggatatgacgtgcggagcgacgacgcggaaagggacaccctgcaaaatgacagccctgtatgcttctggccgctgtaagttacatggaggcatgagcaccggcgcaaagacgccagagggtaaggcgcggcagttagatggattccgccgctggctggagaaaaagcagcagaccaccagccagagtgatagtacgcagtaa

SEQ ID NO: 203462 - DNA, 486 bp, Klebsiella oxytoca
atgataccagcggcgctgataattcgatatcaggcgagtgcgtgcgggctggctgaatgttgcggatatgcgttaagcagatcagcgccacaaagagcctgttttgctgttaacctgcctgttaacctctcttttgttaaccggcgccggcaatcactccaatatagtcgattcggtggataccattctggatacctcgcgtttggataccatctcgcgaagctaaagagccagctttacattcgggataatcccgtatgtacgggcccagaaaatttaatacgctcgatcgctactatagtatgcaacgctagccacgacgcacgtttgccaagccgcgcaatccaaatccgtatcaaacagtataaatttaacaagcatcttttttggatgcccctggtaagtatttcaactccagactatcgccagctcggttccttctgcgtcggtagctctcaaatttccaaagcattccaaagtttatga

SEQ ID NO: 203463 - DNA, 375 bp, Klebsiella oxytoca
atgagaatgaccagccgtaaaaaagagatactcagctactttgagccggacaatctagactggataacgggagagatcgggcctccgccgttcgacgtgtccggggtagcctacctgcttcacggtatggagtcgctcggcaagcgctatcaactcgaatcaacccgtcgcactctcgaaaacatggtagctggtggcctgctggaaagggtgacggtgtacgagcaacggcaaaacaccacgcagagtagcgccaactctccaggcgtctggtgtaacgtgaagcgctacggcctgccgggggcatgccaggtaatgcatgataccagcggcgctgataattcgatatcaggcgagtgcgtgcgggctggctga

SEQ ID NO: 203464 - DNA, 180 bp, Klebsiella oxytoca
atgattgagttaacgctgaaggagtacaacgccatccacacagactatcggggcgtatggtcaacggagcgaaccgactggcccgattgggataaagtcagaaatcagtatatgggcaagcgaacgctcatgcgggccggtggtttactgattgaagatcttcactttcgtattgtttag

SEQ ID NO: 203465 - DNA, 219 bp, Klebsiella oxytoca
atgtacaagcatttaaatatcagcattacgctatcggacaatagcatgacccttcgcaacgatgaggcgctaggcaatttgattcgctcggcagaagttattaccaaggtgtcagatatgttggctaaaggccactgctccggtgcctttgcggtgcctgtggggactgagagttttgaactagcctggaactgctctgtttctgagtcgattgtatag

SEQ ID NO: 203466 - DNA, 225 bp, Klebsiella oxytoca
atgagcgtccaaatgcctgatttattgaattactggactgtcgacgctgtcgctgaatgcatcgacggcgtgggtgaggaactgtaccgcaagctgtggtcgttcatcactccagaaacggacggtgagaacgcgccactggcgaaagtagcctgggagacgtttacggacgaagagaaggctgaactggctgcggctgttgctaaagagttcccggaggaatga

SEQ ID NO: 203467 - DNA, 363 bp, Klebsiella oxytoca
atgacaacacgatttcactacttcactactcgcaacgccgctaaaacttcattcactgcgatcatcactgaaccagtagaagggcagaatgagttttacatcgcgccagatctgtcaaacgtgctggcgatggttaacacgtatggcgatggttactttggcactgttcacgtacacaacgcggagaagctttccctggtggacttcaacaccagttatgaatatttagccaaagacgctgtgagaatgtcgaaggagtacgacaatggcgcctctggtgacttcgctcataagatggcggacaacgcccgcctggtagaagaggaagacgtaacgttctacatggaattagatccagcctga

SEQ ID NO: 203468 - DNA, 303 bp, Klebsiella oxytoca
atgacttataaagccatcacagcatatcttattctttcaagcgccatgttcacttcatcatcattcgcaagtgaggggcctagaatggcgagagtcctcacgaatgtatccgccaccatttgcacagatccagagaggagaagtgagtgctattcgattatatcggccgtcgcagagatgtcgagaatggttggagagaccgcagccaactgcggggatgacgtgagtagtgatatctgcatctacagcaagacggatactttaatcatacaaaactggtatgatgcctacgggaaaaaataa

SEQ ID NO: 203469 - DNA, 537 bp, Klebsiella oxytoca
atgaatactcgtaccgattttacttacggcataaatgccgagtccgagagaaacctagcatccacgctggagtatttcaaagacgcccagaggcgaaaattaggtgtaagagttgtcaccgctaacgagatgacttttcaaatgattgtctctggcttcgacttaaaatcgtaccgtgtctatttaagcccggtgtcagatgaccataaggctaatcgcgtcatcatccctgtcgactacataatcacagcagagagaatcgcagtctcagatgtcgacacagcctataagggtcagttgacgataagacgaggtgatttggaggatgcgggctacaagcgatcgggtcgcgacttctttcaggtcatacggtacgcccaccagcagggaaagtccataagggtctatctctcagacaaccgagtcatcgaaggcgtgtctacaggcatgaatgaacaatcagtaggtgtaaggttgccagagggaaatctcatccagattttctatgattgggttgaccgaattacccccatttaa

SEQ ID NO: 203470 - DNA, 351 bp, Klebsiella oxytoca
atgaaagagtatatggatagtaaattgcctgaaaccattacaaaacaacaaggtgagacgcccaagaccgagaagacggttagctgtcatctcaaactcacaccagaagctgacagacgactgctgaagcttcaatatctgctgcgggcagaaaacctaaagctatcaaaaaccggtattataaatcaccttcttgaaaaccttaacgttgaatatttaagcaaagacctgtctgacatttttggtgacaaggtcagaaacgatatcgttcaggtttttcttaattcagaaatgaatgatgatgatctaaaaatcttaaagcagatggaaagaaacaacaaaaagaaataa

SEQ ID NO: 203471 - DNA, 1491 bp, Klebsiella oxytoca
atgtctatgtacgaagtcggcactgttactggtgctgcaaatcaggcgaaagtgaccggcgccacaacaaaatggtctaatactgcgctgggtattcagcagggttctattctggtcgtttatcgtagcggcaatgcagatctatatgcaattaagtcagtggatagcgacacccagataacgctaagcagaaatatctcggcggctttctctggcgcatcttatggcatcatcacgtcagagacagccagtacgtcagctttcgctaaccaactcgcaagtgcattctctctttggcgtagtgtagtcgaagggtggtctgccgccctgacatcgactggtaacattacgatgacagacccgatcactggaacatcagtcaccgttcctgcgattaagggaatggcgaagcttgccggcggtaataatttcagcggcacgcaaagcctggatagtgacgactccggttttattctcggaaaaaatggcgacataggtcttatcaagaaaagcggaacctatgggaaggttatggtgggaaagtcgtctcgattctcagtcgttcgaagcgataaagaccggatatcggcaactgatgagcagactgaaatttttggcgttgaagctaacggtgacgtcaaagtcgcgagttcactttatgctaaaggtgttctacaaagtgattatcaggttaaagcgcaaagtatcgagctttcattttccacgccttacatcgattttcaccacggaaatagtaccgctgactacacacatcgcatcatcaccgaagacggggcgttagctgtctaccctgggcttagggttcgaggcggtttcggagtttacggtggtgtagctacgcagtacggcgatatgtatgggcaaggcttcatttcgaggcttgctaatgaccctacaaacgtacccatcggatctattatcgcctcgcctcgcgtaacgacgcgatttagcaatagaggggctgatggcaatgtagatggtgggcagtccgcaatgtggtttgaagagcatgtgggtacgacgcatagacttgtgcttatgtgcgctggatttagtgccaacgtacaatactggcaattcgatgccggcgggaatatcaacagcagtacaaggggtggcgtgtcattcttagggacgtccgactcgcgatttaagcacgatatcaagccgaccgatggacagcaatctattgatagaatccgggcgcttgaattggtcacttttgtttataacgatgatgagcaggagcgagttagacgagggataatcgcgcagcaggcccagaaagtcgatcctcaatatgttaagcagataaaaacgtcttacctgaaggatggggtgcaagtagacgatgaccgtctacaaatcgacaacaatgtggtcatgatggatacattggccgctgtcaaagttttgataaatcgagtagacgagctagaaaaaactatattggaaatgaaaggtaagtaa

SEQ ID NO: 203472 - DNA, 324 bp, Klebsiella oxytoca
atgagctttaaacgaatgacacccgaagagatgcatgaataccttttacagcaaggttttttgagagtgcggcagctggccgacgatagctggattggcgtgctgaaactggcattcacgacgtcagtctgtatggatattgacgaggtctccccattccggtatcgctggtgttttgctgatccgagtgaggcgcatcactttttcgagacagctgttgattatgatgaagtgccaactaagcgcgattcattgaaaggacaccggtatcgtggcgaaccactgctgcgtgaaaaggatgagtttggattcaataaatggtag

SEQ ID NO: 203473 - DNA, 294 bp, Klebsiella oxytoca
atgccgttacgtcgcaataaacagaagcgtgcactggtgcagaatggtgagaaacacctgctgcaaagccttgctgcggctactgcagcgacccgcaacgaacaagttctggtcttaacgccagaaggtgttaaatattgcaacatcattagagaaggtggcaatgtttcaactacctcatccatggaagctttacacaatagctttgcccaaagacagaagaaatcctctgctaccatgttgcgtcgaaaactgagccaggtatctctcaaacgagaattccaggaaatataa

SEQ ID NO: 203474 - DNA, 585 bp, Klebsiella oxytoca
atgggccttgtgtcacccattgaagaagatgtttatcttgaggaatcgggattccgacggaaaaagtttgtctatgacaagcgcgttcatcatagttatatctttgttgccggcggtgaggtttacaccgtagttttcgggagcattaaagatgagaagacgtttcagaaaattggctacagcttagagcctggcatggctttccctcacaatgggatgtcagaggtttacttcgatatttggattgatcgtgagtctttcggagatttccggcacgtaaaattcaaagggttggcgggtggtgttgtattggaacaagtagctttagcaatgcttcaacattatcaaacctttgatattggagggtttgttttccaagctgcttccggtggcgtagccgatattgataggaaaacttccctcgaagagacatacgattatattcttgggttaaaacacgaacaacgttataataagaaaacaggattacctaaaggtaaacccaggaagctccttccagacttcctgaaagtttacaaagatgactcaaccgggagggcttgttatgccgttacgtcgcaataa

SEQ ID NO: 203475 - DNA, 156 bp, Klebsiella oxytoca
atgtgtccatctttcgcgcccagttcgcaaatgatgtcggctccgatctggtcactcaaagatattgctgatagttttgtcgccgtcgacatccagttcaaaattgcattcatgttaataccattaaatagtttattgcttattagtatgtcttaa

SEQ ID NO: 203476 - DNA, 828 bp, Klebsiella oxytoca
atgaaaaagggaattatcgcactggctatcgtagcctcaatgaccatgctgaccggctgtgagtacgttaagcctggtgaagtgggtatcaaggtcaacaaattaggtgacgacaaaggtgttggtgaagttgttggcgttggccgtcaatggattggctggaataccactctgtacaccttccctaccttcaagcagatgaagtcgtatgaagacgccttcaacttccaaatgagcgatggtacagcgatcggctaccacattggtgtaacttacaaagtagacccgaccaaagtcaccaccatcttccagacctaccgtaaaggcgtcgacgatatcaccgaaaccgatctgaagcagaagatcgcagacgtactgattaaacaggccagtcgcatgaccactgaccgctttatcgacggcggcaaaactgaacttttggataattcactgaaagctattcagaccgaaatggggccggttggaattcaggttctcagtctgtcttggatgggtaaaccggagtacccgccgagcgttatcgagtccattaacgccaaagtaacggcgaaccagaccacgctgcaacgtgagcagcaggttaagcaaaaagaagctgaagcaaacatggttcgcgctcaggcagcgggtgaagctgacgccaaggaaactctggctaaggctgatgctgaatctatccgcatccgcggcgaggctctccgccagaacccggaagttatgcagctggaggccatcaataagtggaatggcaccctaccgcagtatatgaccgcagggaccagtaccccattcgttaccgtcaagtaa

SEQ ID NO: 203477 - DNA, 708 bp, Klebsiella oxytoca
atgaataaatcgtggatcgacaaaaacctgattgccgtaccgattgaggaagtatctacacccaaaactggccgcgtggctcgcgtgggtgcgttcagaaaaggacataccattacagcggagcatcgggcattaatggaagcaggcaaagccgaaagaaaagccagacggctctcgcacagcgcggcaaagcgtataacgttcaggaaaaacgcccgccttatcgatctgaacaaaacacccggcacgccttacttcttcacgctgaagcctttgtgcgacattgaaccggaatatttcaacgaggcaatgacagggttaataaagcgtctaagaaccgccagcgcagaatatatctacgcgctggaatgggcagagcacgagaggatgccgcatattcaccttgtcgccaatatccccggaaatacgcccgcagaggtggaggcatttgcagagggggttatccgttattggctaaagaaaacgccgaagaaccccaacgccagaatcaagcatgacgccagacccgtctacgatgcccacgggctatttaactacatgtcgaaacagacgccggacgagttcaacgccagagcaatagcaacgggcaaggattggtcagtaattagcgtcacaggttgttcaagaggttgggtggagtccaagtttgataccgcagaggtgagcagagatttttatggtctgtaa

SEQ ID NO: 203478 - DNA, 198 bp, Klebsiella oxytoca
atgatcactatcgaatgcaccggcacacgcccaggcatcaactggtttactccggggaaaacatactccggttactcagacgctgatgggcaggctatacacacgaaagacgacttcggtcgcgatacgttcgtcttttttgctgcgtcccttcatggcacattcacagaggtaaaaaacagtgacattacagagtaa

SEQ ID NO: 203479 - DNA, 273 bp, Klebsiella oxytoca
atgaaggctttattacaagtttgcgcatcacttaatacgtcatattcaccttattctattttagacgtgcctgaaggaacgagcgatgatgacctgcaggtaatcgctaatcagatcctgccatcgctttatggtagcgaagataccgttacggttgacgaggatggtgtttgctggagtaacggcgaatgctggtatatcgaggacttacgctttattagcgacgaagatgcggcacatttgacccgcatccttggtctttcctcgttctaa

SEQ ID NO: 203480 - DNA, 153 bp, Klebsiella oxytoca
atgccgttcctgtatttagctacatcagtttttttgctctttgatagcgtattcgttggcagttttagaaaagcattagcgccggttaatggtcggattgtagatgttttggtgggcgtgtttctggctatcactcttgggaagctcttctaa

SEQ ID NO: 203481 - DNA, 339 bp, Klebsiella oxytoca
atgaaaacgatttttgcagctaccctggctatcctgattgcactaccgaatgcaggcaactcagccgtgatgaaatgccagatgaacattatgcgcatagaaaatggcgaaatgtcaggcacgccacatcgtgttgctgaagctatcctgacggcagatgctcaccagttctacgctgttgtaggtgagagaataatcagctcacctatactatcggagaacaaaggcaatttggccgcttaccattctggcgccgcttactttatgcgtaaagacacctttggtgttatttacgatgacttcggatatgtgtttgatgaatgtgaaaaggttgcgtaa

SEQ ID NO: 203482 - DNA, 699 bp, Klebsiella oxytoca
atgtcgtttaatccgactggcaatcagtttggtcagatcgttacctgcgttgctgcagcgcgggtaatggctatgcgctttggcggtattgtagattttggctctttcacaagccattacaaagacgagctgacacgccagcgcattattgaggcaagcgaagccttgtttgatgctcagtggataggtgattcagcgcttgtctacatggggaatgtatttggtgccgatcatatgggtggcggcataatcgtttcgagcaaggaagatactgatattgtttttaaccaggtgaagtctgcccatttgtctgaccgtatccagcatatgagcgcgaggatggctgttcgtcgcgttcagaatgacatggctcgatttgggcaacgacataaatcaaaggcattttcgaaggtggaaatgccggtaacgctgattggcgatggtgttcttcacttcggcatacgcttcgatgacaaagttgaaacaggtttcatcgtgtcgactgccgtcccagatgacgcaaaagagagccttcagtacgccagtgaaactatgaaaaaactggccgtttgcatcgctgaaatgtggcccgatgtcattgccggtttctcagagattcaggcatcgggatgcgaacttgatgaatttagcgaggtgatagagcttcgcaaagctaaccccatttggggaacgtggtaa

SEQ ID NO: 203483 - DNA, 504 bp, Klebsiella oxytoca
atgattaattacctctccgatcttcttcgaaataagcggtttgagcgaaatgtcatctcaaatctaaacttcctcgaaagtcgtatccaaaacctcaatgagcgaatccgagtgcttgaaagcaccgtagtgtcacaagccaacacgatcacctctctcacgaagagcagtgattcgacgccgcgccccgacccgttccctgataaaaactttgcccatggaaaattaccaaagaaaaagactacagccgctggcgcttctggttatcgggctgactctgtcacctctcggcatcgcgccagttacgcagatgatgcagccggcgctcagcaattcacggaaaacagaagccaagtccacgaggacagcgcatctgtctccagacatcacggctcatcccaccaccaccaccaccacgactccagttcctgctacagcagccacggggacgttggagggtatgactctggatgctccgattcgtcgtccgggtcttttgactga

SEQ ID NO: 203484 - DNA, 435 bp, Klebsiella oxytoca
atgtgcattcgctgtgaagtacgtaaagctaaaaaagaacaagtcctgagccgtgccaacgaaattgctgagctggccgtcttatcaactggagaaatcaacaccatccatgatgcgctgcgggtgactactcatcttgaagagttgggccgtgacggactgcttgagccggctaacttgttcctgctgatcgcccactttgccaaccacaccaaagcgctggaggcggacaacaagcgacttcatgagactctgaattatatgacgatgagcgaaaaagctgcgccgacggaaggtaataaaatgtcgaatgaagaggcgttgcgtatcgtcgaaaccatcgtaaacacctttgagcttgcccagacgcgagcaatggacggcgctaatgcccagatccgcgaactgaagaatcgctttggcattaataagtaa

SEQ ID NO: 203485 - DNA, 195 bp, Klebsiella oxytoca
atgagctgggtttattgttcaaattgtggggaaggcattgacgcgcccacgccattggaggtgctggagaatagttaccagtgccctcattgtgggcatcttgaagacccacagatgacgatcgtcgatgtggtgatcggcttgctggggcgtattgagattttggaagccaaggttgaaggtggttcgaaatga

SEQ ID NO: 203486 - DNA, 1233 bp, Klebsiella oxytoca
atgacaactgattttggcaaatacaccattgagattgaagccgatgcggccaaactgcttgcgggtcaggcgagcgcagattcagctttaaagcaaattgaaaactcagtcaaaaaaacagctaactctgctgacaagctagataaaagcctggataacttgggcggaggtttttcgcgccttgctgtggccgtgaaaggatacatatcaattcaggcgttgatgaagctccaacagctgtctgaggaattcacgctacttcaggcgcgagtaacgcgtttatcttcaagttcagaggaaggtgcgcggagctttcagcagcttgtgggtattgcttcggcaaccggtgccagccttggggataccgtcaacctctggcagcaactgaccgctacactaaaaactgtaggcgccactaacagtgatgttaaccggctagtgatgaccctgcagaagatcggcactatcggtggctcatcggctcaggaaatggctaacgctctcaggcaatttatgcagtcggttgcgtccggcagaattcaggcggaagagtttaactcagtgctggaacagatgccggaactggcgaggcagatcgccgatggtatggggattccgtttaacgagctccgtcagttgatgttggcaggcaagttagatattggcgaggtgctagcggcaatcgaaaagaggtccgacgaaatcaatcagcagtttgaaactatgccgcgtactgtatcgcaggcaacaaatgctttgatcactcagttcggggtagctatctccaaaattgatgatgctattgggacgtcgcgctatttggcaaaacttctcgaccaaactgctctttcaatctccgtagccaccggaaatgtagatcctattgttgcgatagatgcgcagttggattcgctgaataaaaaattagctgtaactgaagcggcttacaataccgtttccaaagcttctatctacactgacgcaggcactaaaacacaaatagatgctatcaaaggtcaaatagcggcgctagaacgagcaaaatccctttattccgatgttggcaaggcggcatcgggttctgtagacggatctaagccagcctatatcaccaatctcgaaaagaaaactgcagagaacaacgccaattcgatcattaaatctggtcaaacagtagttgataagctcacccagcagcgtgaacagctaaggaaggtgcgaacaagttcctga

SEQ ID NO: 203487 - DNA, 321 bp, Klebsiella oxytoca
atgtctgtatggcacatcattgttttgatattcgctattatcatttatgttcttcccggcgttatagctagttcaatggagcataaaaattccacggcaatttgggtgctaaacattgtcctgggctggagcttcttgggttggatagccgcgcttgtctggtctttcacaaaccctggagtggtaaagctcgaaccgcaggtgtttggtgtggagtctgccggctctggttcagtaggcgatactaaaaaatgcccgtattgcgccgaaacaataaaaaaagaagcaatattgtgccgattttgtggcaaagatttataa

SEQ ID NO: 203488 - DNA, 627 bp, Klebsiella oxytoca
atgagcaatatttacccactcccgaaaaagccgggcaatacccatccattccgtgcagatcctacgcctgaaggcgtgagaataaccagctctggtggcgatggtcgtgaaacagttcaacttattggctacgaggacgcggtgaaccgtcttgacgctggcgattatgacgactccagcgcgggttttgacattcaccttgccgtagcagaaggcggaaactgcggatatttcgactatacagcgcagcacaacgtcactatgtggcgctggctgattgccgcggcgttcatcaccgagatgaagctgaaaaacggcacaaccgttattaccgagcctgacggcacatcctcgcaggtggcaatttattccaatggcaaagtgtcaattccggtttacctcttttctgagcgcctggcaatggcgaacaacattgagggggcacttatcgaacgttacggccctgaacagggtgctgaaaaagccattgtgttttatcagtccatgctggatgtggacgtcggggaactcacgcccaccgggcgcgagatactggcagggctacatgattgttttattgatgatatagaacaaaacggccttcccgaagcgccggtggcgcactaa

SEQ ID NO: 203489 - DNA, 288 bp, Klebsiella oxytoca
atggcttttgcgaaaaaaatcaacattacgattgtcaagaatacgcctgccggtgtatttatcggggaagaagtgcaggaaataaccgcatcatttaaagtgaaggttgttaatatctctgaggaatctgcttttgcagacttatatgttaattatggtgacggggactggaagtttcaccagtcttacaatttcagtcccgattattcctcaggcattgatgcgcttatgcaggcggaaaacgctgtacggctccttgatgaatatgctgacgctataagtgagtaa

SEQ ID NO: 203490 - DNA, 2115 bp, Klebsiella oxytoca
atgacagttaaatattttgccatccttacgagtcagggggcagccagactggcaaatgcggcggcgcttggcgttaagctcaatattacccaaatggctatcggtgacgggggtggtgagctttatacgccggaggactcgcaaacaaaattaaaaaatcagctgcgcattgcgcctctgaatatgctgagtattgaccccaaaaatgccagtcagattatcgcagagcaaataatacctgaaaatgaaggtgggtactggattcgtgaaattggcctttatgatgatgacgggattctgattgcggttgcaaattgccctgagacgtataaaccaaaattacaggaagggagtgggcgcacgcagactattcgcatgattttgattgtgtcgagtacagcgtcaataacgttaaaaatagacccgtcagtcgtgctggcgacgcgtcagtatgttgatgaaacctttattgaaattaaaagctatgcagatgagctaatcagtaagcacgtcgcggaacataacccgcactcgcaatatccggtgattgaaaacgccctgaaagaaatggctgatgaggggcttgttgatgaggttctggaaaatctcagattaagtgatgtcgtaacattgcgcgaagaactggcctctgatggtggaagtatactggttaacaccgaaacggggcgggatataggtacctctgttcgtgccgcatccggtgcatcacatgctttatttcctaatctgatggctaaactgaatgcgtataaacatggtgcaagtgacagccagtcaatgtacaggttatacgggtttgggtcatccgttggggacggtgcgacgatagggggtaaagaatctcctgaaacacctgttgccaagtttttcgaatttatgaatgacgcaatcaactttggcgggatctaccctgtaagttttttaaataaatccgtcagcggtagcgcgattaataattttaatcaggaacagtggcccgctgttatctctgagggggtttaccctgatattgcgctttttgtatacggcatgaatgattttccgaccgcacaatataacgccgggcgtaccttcagcgaggttaacggattcgtcaatagcatgagaaatgctatacgcagcgttcgtgctgcggggggtgacgttgtcctgacaacaaccccgcaccccaatttgtcaatttatagctggagcatgcctgacggtattgctcaggtctggccctcatatgttcccgcaccggtttctgacaatgacattattccttctgccgcacattcgaacgtcacgtttgaatggaacggggtaaatattcaggctggcgtccgttttctgcgtggtaatgatgctatcagaaggttagccgtagaaatggggtgtgtgctgattgatgtcgaaaaatactggtttgatgctgtcgcaaaatacggggagtcggcgttattcgatgcaggtcagacggtacaccctaatttattagggcatcaacagtcataccaactggcgtttaaagagttttttgcaaatgtggctcacaatggatggactgcgccggactcatcgcataatgatgtttttgatgttggtggggtgagtcaatatccaaaccctaaagagggggatatagatttacaggcgggagggtatcgaaagtatgcgcatgtattgcgtgataagttttcgagaatacttgaacgtactgaccagtcaggtaataaagtgaaaacatcttataccagtcaataccccacctcatcggtgccgggatacaaacaggactggtctgaatatcacacccgcacaaaggggctgttttcagcaggtgaatcatttgctatcgcgattacaaacagggaaaccaaaaagttattaattgactgctggtcatcagcgcaaaacggatgggctcaatgctatgaattgttcgtttcaaacagggagggcgttattgaatatacggttatcggggagcatgataacacccccggaaagcaaaggctgtttgcattaagctcgggagagggggtgcttatggttaatgtcaagctaagtaattcgtcattaaaatacaaaatctgtggctttggattgtaa

SEQ ID NO: 203491 - DNA, 609 bp, Klebsiella oxytoca
atgagtgaccggctgttacccgttggctcgtcgccgctggaagttgccgccgctgccgcactttctgagattcagcgcgtgccggtaccgctgcgcaccctgtggaactggcgcacctgcccggtaaagctgctgccgtatctggcgtgggcgctgtcggtcgataaatgggacgagaaatggccggaagcaataaagcgcagcgcctgtgcttcttcgtttttcgtccatcagcacaaagggactatcagcgcattacgtcgggtacttgagccgctcggttttctgattgaagtacatgagtggtggcaacttaatgaagaaccgggaacatttcgtttggttgtggatgtgcttaacaacagtgtaacggatgaaatctatcaggaaatagaacgcctgattgaagatgcgaagccagcaagccgccacctgacaggactgtcattaagcctgagctcagggggcgaaatttttaccggtgccggatgttatctcggggatgcactgacgatatacccgtatacacctgatgaaattaatattggtggagactcttttatggtttctgcaattcatttaattgataacttgagagtgaacccatga

SEQ ID NO: 203492 - DNA, 636 bp, Klebsiella oxytoca
atgaatacgttatccacgatacaggagctcgcgcgcgcgattcgcaacctcatccgctcaggtgtggtgactgaggtcgataccgtgcaggggctgtgccgcgtacaaagcggcgggatccagactacatggctgaactggctgaccacccgcgccggtcgttcgcggacgtggtgggctccctcggtcggtgagcaggttctgctgctggcaatcggtggcgagcttgataccgctttcgtgctgccgggtattttctccgacgataaccccgccccgtcagcctcggcggatgcgtggcatgtggttttccctgatggtgcggtcattgagtacgagcccgagaccggcgcgctgacggtcagcggcatcaaaacggccgacgtgacggcatcggagtccatcaccgcaaccgtgccgctggtactggtgaaagcctcgaccagtatcaccctcgacaccccggaggtgatttgcaccaacaagctgacgacggcgacgcttgaggtgcagaaaggcgggaagatgagcggcaatatcgaacataccggcgggtctctgtcgtctaatggcaaggttctccacacccataaacaccccggcgacagcggcgggacaacgggtgcgccgatatga

SEQ ID NO: 203493 - DNA, 183 bp, Klebsiella oxytoca
atggttggcgaacatttcagccgaacgcagcaaaagtgggcttgtgtgcaatttattgccgaggtatctctgattgcaaactgcaagccatcagacttaaagctcgcgctcactctcattgcagacctagcaaacagcgaaaataacgaaaccgaagatgatattttttataaggctgattag

SEQ ID NO: 203494 - DNA, 282 bp, Klebsiella oxytoca
atgagcattcgtatcgaaataggtgataaatgggttattaccagcgaccagtttcaattcatcctgagtgaaaagaaagtcgttaagtccggtaaaaaagttggtgaggaatggctcgacactatcggatattatccgaagattaaccagcttatttccggcctgatacaccatcatattcatgggtcggacattaccgccattgacgctatggcggcagaaattgagcgggtagggcaactatgcattgtagccattgaaggggctagtgctgatgcatag

SEQ ID NO: 203495 - DNA, 405 bp, Klebsiella oxytoca
atgactatgaaccgcataaccgatgaaagtttaaaccagcttatcgcgattgaaagtctggctaatgataatgctcacgaagagcgacgtattgtcgaccagatatatcacgcaggtatagtggccgcgctggaagaacttagggagcgcagagaggcatctgttaaagctggctcagttattaataataaaatgtttgcatcagcaaaaggccccaaaattccaccaatggtaaataaggcctttacggtagccgttgatttggctatttctgaatttatcccaatcgaaatgaccggaaagattgctttaactcaacacggcattaagccagccaattataagcaatgggtcaaaggctggaatgcttgtcgcgccgctattgaaaaaggcggtaaagcatga

SEQ ID NO: 203496 - DNA, 249 bp, Klebsiella oxytoca
atggccgacgcaatggatttagcacaacagcgtgagcaggaagaccgcgagcgcatatcaacaccgcacgcagccgcatcgctgcgccctctcgtttcctctgcgaagaatgcgacgcaccaatcccggaagctcgccgtattgcgataccgggcgtgcagtgctgcgtcacttgccaagaaatttcagagcttaaaggtaaacactataacggaggtgctttatgagcattatcaatacgacaattag

SEQ ID NO: 203497 - DNA, 372 bp, Klebsiella oxytoca
atgtcagatgcaaaatcaatctcgacgcatgattcgcaaaactcacaaaatcaaactgtgctgttagatccaacgcagtttgatgccatcgttaccgccatgctgccagccctgcagacaatgattcgcgccgctatgtcagacacgatgacagtgaaagacttcgccgccactcgcggtgttagcgagcgtctggtctggcaatggctcgatgatggcatccttctcaaagctccgaccaaagacttttccaacaaagaggaagctgctaaacgaagccgaaccctcgtaaatgtaaaagcatggcgcgataagctgactcaacaagcgattgattgtcgctacatcgaccagcgcaccgctcttaactga

SEQ ID NO: 203498 - DNA, 843 bp, Klebsiella oxytoca
atggctaaatttggagacggggcagcacctgcaatcgaaagaatcctttctgcttatgggcttagctcgcaaaaagaactaggcgaaaagcttgggatttatgccaataacatcagcagttggcttgctcgggatagtgttccgggcaatgttttcgttgaatgtgccttagagactggcgctgatatcggatggctggttactggtgaacttgcaaaatcaaactccgagcgagtgggaaacgtgcttaaaggcaaggagctttatgaagaggtaatggcttctggaggtaaacctgttctaaggcgcatccttgatgcttatgggttttctatgcaaaaagaacttggtgatttgctcggcatttcatcaggaactataagcacgtgggtaagacgcgattttttccccggtgatgttgtagtgacatgtgctctagataccgatgtatcactggaatggttagctactggcaaggggcaaatgcgagtcgctagggaaagtgtcatttccggtctttctattaaaaaatctcgccttgaatctggtgagcttaaagatgctggaacttggcatcctgacccttccatgattccccctaattctgaaaagttaatttttgttgagggtgtcggtgcctcttggctggtcgactgttctgctacgaatataagtaatggccgctggttaattgatatcgacggtgctcttgatatttttgatgtaattcgcttgccgggtggaaaggtcagattgtcaaataagcctgctgagtttgaatgcaatattactgacattacgcctgctgggtctgtagtcttcacactggaaaaacacttttaa

SEQ ID NO: 203499 - DNA, 339 bp, Klebsiella oxytoca
atgaaacgtaaactttttttaactctacttttaacactttcatttggtgtagctgctgctgagaagagtaaagagatagacggcgctgcatatggtgacaagtggcctctaacctttgaaaaggcaaaggtatcatgtgttaaccgtgcttatgcttttgtgtatgacattaaaactgatgatagatatccactgaatggcatggcggtagatgctgttaaatcaggaaagctggagggttctaacttagatgacgtatggaaggatgaccctgagtatgacggcgttaaaatttcaatttcaccggtgattgatgccgctacagccctttgtaattaa

SEQ ID NO: 203500 - DNA, 1542 bp, Klebsiella oxytoca; identical to SEQ ID NO: 30088

SEQ ID NO: 203501 - DNA, 1767 bp, Klebsiella oxytoca
atgcttgatataaccacgattacccgccagaacgtcactagcgttgtgggctactactctgatgcaaaggatgattactacagtaaggattcatcattcacgtcctggcagggaaccggagctgaagccctcggcttatccggggacgttgaatcagcccggtttaaagagctgcttgtcggtgagatagataccttcacgcatatgcagcgacacgtgggtgatgccaaaaaagagcgtctgggctacgacctgacgttttcagcgcctaaaggggtatccatgcaggcgctgatacacggcgataaaaccattatcgaggctcatgaaaaagctgttgccgctgctgtgcgtgaagctgaaaaactcgcgcaggcccggacgactcgccaggggaaatcagtaacccagaataccaataaccttgtcgtcgctactttccgccacgaaacgtccagggcgctagatcctgatttgcacacacacgcttttgtcatgaacatgacccagcgcgaggacggccagtggcgcgcgctcaaaaatgatgagctgatgcgtaataaaatgcacctgggcgatgtttacaaacaggagctggcgttggagttgaccaaagccggttatgagctgcgttacaacagcaaaaataacacgttcgatatggcccatttttcagatgaacagattcgcgctttttcccgccggtcggagcaaattgaaaagggactcgctgcaatggggctgacgcgggaaaccgccgatgctcagacgaaaagccgcgtctcgatggctacgcgtgaaaagaaaacagagcattcccgtgaagaaattcaccaggaatgggccagccgcgccaaaacgctcggcattgattttgataaccgtgaatggcagggacacggtaaacctctggaggctgatatagcgcgcaacatggccccggattttaccagcccggaggttaaagctgaccgggctatccagtttgcagttaagtcgctgtcagagcgcgatgccagctttgaacgccagaagctgattcaaatcgctaataagcaggtgctgggccatgccacaatagccgatgttgaaaaagcgtacctgaaggcggtacagaagggcgccatcatcgagggcgaagcccggtatcaatcaactctgaaggtcggtgcttcagttatggccgaaactctgacgcgcaaagagtggatcgactcgctgacgaatagcgggatgcgtgcggataaagcccgttttgcggtagatgatggtattaaaaacggcaggcttaaaaagaccagccaccgcgtcactaccgtggagggtattcgccttgagcgttccattctgactatcgaatcacgcggccgggggcagatgccgcgacagctgaccgcagagattgcaggccagctgcttgccgggaaaaccctcaagaaggagcagatgcgcgcggttacagaaattgtgacgagcaaagatcggtttgtggccgcacatggttacgccggtaccggtaaaagctatatgacgatggccgctaaagagctgctggagtcacaagggctgaaggtcacggcgctggccccctatgggacacagaaaaaagcgcttgaagatgatggattaccggcccgcaccgttgccgctttcctcaaagcgaaggataaaaagctggatgaaaaatcagtcgtattcattgatgaagccggggttatacccgcccgacagatgaaacagctgatggaggtgatcgagagggtatag

SEQ ID NO: 203502 - DNA, 420 bp, Klebsiella oxytoca; identical to SEQ ID NO: 22854

SEQ ID NO: 203503 - DNA, 369 bp, Klebsiella oxytoca; identical to SEQ ID NO: 97156

SEQ ID NO: 203504 - DNA, 345 bp, Klebsiella oxytoca; identical to SEQ ID NO: 97155

SEQ ID NO: 203505 - DNA, 321 bp, Klebsiella oxytoca; identical to SEQ ID NO: 97154

SEQ ID NO: 203506 - DNA, 180 bp, Klebsiella oxytoca; identical to SEQ ID NO: 97153

SEQ ID NO: 203507 - DNA, 546 bp, Klebsiella oxytoca; identical to SEQ ID NO: 97148

SEQ ID NO: 203508 - DNA, 156 bp, Klebsiella oxytoca; identical to SEQ ID NO: 97147

SEQ ID NO: 203509 - DNA, 240 bp, Klebsiella oxytoca; identical to SEQ ID NO: 16823

SEQ ID NO: 203510 - DNA, 336 bp, Klebsiella oxytoca; identical to SEQ ID NO: 133262

SEQ ID NO: 203511 - DNA, 426 bp, Klebsiella oxytoca; identical to SEQ ID NO: 16821

SEQ ID NO: 203512 - DNA, 441 bp, Klebsiella oxytoca; identical to SEQ ID NO: 97223

SEQ ID NO: 203513 - DNA, 1266 bp, Klebsiella oxytoca
atgtttgcgctgattgatgtcaatggcatgtacgccagctgtgagcaggcatttaggccagatctggcaaaccgagcagtggccgttttatccaacaatgacggcaacattgtggcccgtaattacctggcgaagaaagcgggcctgaaaatgggcgatccgtacttcaaagtcagacccataatcgagcgtcataacatcgctatttttagctctaattacactctctatgcctccatgtcggcccggttcgcggccgtagttgagtcccttgcaagccacgtcgaacagtattcaatcgacgagctttttgttgactgcaaagggataacggccgccatgagccttgacgctttcgggcgccaactgcgcgaggaagtcaggcgacacacaacgctggtatgcggggtcggtattgcccgtactaagacgctggcgaagctgtgtaaccacgctgcaaaaacatggcccgctactggcggggtggttgctctggacgatggcgccagactgaagaaattaatgagcatcctgccggttgcggaagtctggggcgtcggccatcgtacagagaaagcactcgccacaatggggatcaaaacggtgctggatttagccagggcagatacgcgcctaatccgtaagacgtttggtgttgtgcttgaaagaacggtacgggagctacgcggcgaggcttgcttcagcctggaagaaaaccctccggcgaagcagcagattgttgtatcgcgctcattcggccaacgcgtagtagccctggcggatatgcagcaggcgatcaccggatttgcagcgcgcgcagctgaaaaactgcgtaatgagcggcaatactgccgcgtcataagcgtctttatccgcaccagtccttattcagtgcgtgatacacagtatgccaatcaggcaaccgaaaaactgacggtggcaacccaggacagccgcacgataattcaggcggcacaagccgcgctggcgcggatctggcgggaagatattgcgtatgcaaaagcagggatcatgctggccgatttcagcggaaaggaggcccagctggatttattcgactctgctacgccttcagttggcagcgaggcgttaatggctgttctcgatggcataaaccggcgtggcaagagccagctgttttttgcaggccagggcatcgataactcctttgccatgcgccgtcagatgttgtcacctgattacacgacagactggcgctcgataccaacagcaaccatcaaataa

SEQ ID NO: 203514 - DNA, 720 bp, Klebsiella oxytoca; identical to SEQ ID NO: 97227

SEQ ID NO: 203515 - DNA, 237 bp, Klebsiella oxytoca
atgttggtgatcggtatggggaatagcgacacccacaggttcaacagccagacctgttggaaaacttttttcccgctcaataacgtgatcggcaaaatcagacacgaccataccatcgttaatgagtggactggcgagagtcctgataatgtcctgttggctgacctcctttggaaggtgtcgcacgtaatgacgccgaaaattaatatcctgcataattccctctttactagttag

SEQ ID NO: 203516 - DNA, 834 bp, Klebsiella oxytoca
atgaaaaatagaagtgtcattaatgctctatggatgatgtcagaaaaactggtaacactattcggtcttttctttgtaacttcttttgttgcgaaatatattggtccttatagattcggacagcttgcccttgcaattgctattttccaagttgtccaagttatggcacaaatgggttgtgataatattatattcaaacgtgtgtcacagaaagtaacttcgggcataaaattaatatattcaacattcctggtacgagggtctatatatcttgtactgtctacatttgttttattatatttcattcctaaatccgattttgtaaatcttgtttttcttatatctgtatgtctggcttgtctttttacatctctcgatgtttttgtaatttacaacgatgcaacattaaattcaaaatttaacacaatcgccaatgttgtggggcttataattggtctagcattgcgatatcttattgcttactttgaattatctatgttttatctgtctataccaatcgttttgactacactcattccctttttaataaggatgtattactctccatcaataccatttataaaaagtcagaataaaattcgctataataaatatttaatcataactggcattccactagttatctctactgtgtctatgactatttactcaagaattaatcaatttaccttgtcctattttaaaggagattatgatcttgggatctattcagtagctttaacacttggcacagcttgggtgtttataggaaatgcgctagctatttcttttttatcgaagatttatgctgaaaagatgatgatgttgctctaa

SEQ ID NO: 203517 - DNA, 879 bp, Klebsiella oxytoca
gtgattaagtttttttttggtaaggcttacaggttgcttttggagaatttgtctacaaccaatagagttaaactaagatattttagagtgtataaaaagcttccaaatataaaaaaacctaaaacctttaatgaaaaggttattagtagaatactaggagaacaaaaggatatatactccacattggctgataaatatcttgtgcggcgtttcgtatccgagcgggttggagaggagtatcttattcctctccatttggctactagcaaccctagtgacttattaaaaatagatgattggtctggattggttatcaaaccaaatcatgcggcaggcatgatttatatatccgatgacaatccctctaaagaggagaaggacaatgttgttaccactgcgaaaacctggttgaaaactgacttttcctctttttgcgatgaaatgcattactccaagataaagccaatgcttttagtggagaggaaaataacaaaacgtggtgaaatccctcgtgattacaagtttcattgtttcaaacaaaaaaatggtgatattaattttgtgttgcagttagtggacggtcgctttggacaggagtcacgaagctattttttaaattcttttgaaaatatggtttggagtcatggcgctggcaatcatttattaagtaataatgaggttgctgttttaaatgaagtgattttattaaataaaagacttatccttaatgattttaattacgttcgtattgattggtatattttaggtgaccgaatatattttggtgagattacatttactccaggggctggaattggaaatgaatttggacctgtcttggaaaaacaaatggctgagtggtgggaggatgaatattaa

SEQ ID NO: 203518 - DNA, 1245 bp, Klebsiella oxytoca
atgtattctaatgccttttggatgatggctgaaaaattagtcagcatcatcggtcttgtgtttataaactcctatatggcaaaatatataggacctactgattttggtaaaattacttttgctacgacaatatttacgtttgtacagaccatggcttggtttggtgggcaaaacatactttttaaaaggatgagtgagaaaagaaaatcaggtattgctcttgcattacatactcaaaagcagcgcagggttatttttgcactctcttcattgattgccttgttctatttgtttttttttacagataccctgacatttgtttttggggtggctaactgcattgccacttattatatagtgatggatgttttcgctgtatataataatacgcagttaatatctagaattaatgcattaacaaatggcgcagggttgtgtattgcttttatagtccgctttttaatttcatacttggagttgccagtatatacatttagcattcctattatattaatccctgcaataccttatgttattagatatatatactttcacaataccattgaagacactgcggtattaaaatcgaaaacgaagaaatataataagtatttgatttcagcgggagggtcgttgttactatccaccctgtccattgtgatttacacacaggtatcaaatatttttttggctaaaataacctcatattctgatttgggtgtttataatgtggcgctgacgcttggcagtgcgtattcatttatttcagttgcgttaattactagttttttttctaaaatctatcaagagaaagattttgaaaaaatgtctaggcttctaactttaataaatagaattgtgatcgtgataacaatttttatattatttggtttttattttcttgggccatacattatcagcatgctctatggttcggcctataaactggctgttgagttggtgccaatcattattctagcgacaatgttttcatccttgggaactatttgttatagatttataataaaatactctggctacaaatacctttcatataaaatgacgttaactagcttgctcagcatcccattctcatatgttatgattaaccgttatgatgttttcggtgctgcgtattgttttcttgtagtcgaagttctgtcatgcacattattaaattatttctttaggaatggaatgattctaaggattcatttaaatgttattgggttggtgaggcgttga

SEQ ID NO: 203519 - DNA, 165 bp, Klebsiella oxytoca
gtgtcagtgaaaatacgaaatcaacaagttggtatcattaccagcgtcggcatggttccagcgatcagatgtcaccgacagaatatgaaaaccagtattatcaacggctcggaagtgtctagattatccgtggcgattcaaaagctgatttttgtcgtggtctaa

SEQ ID NO: 203520 - DNA, 153 bp, Klebsiella oxytoca
atgccgttaaatttttccccgtgcgtgctgatcccctgctataaccacggcgcgatgatgtcgcgcgtgctggcgcgtcttcagccgtttggcctgcactgcatcgtagttgatgatggcagcgatttccgtacgcaacaggaactcgaatga

SEQ ID NO: 203521 - DNA, 855 bp, Klebsiella oxytoca; identical to SEQ ID NO: 180797

SEQ ID NO: 203522 - DNA, 699 bp, Klebsiella oxytoca
atgagcgggcagatgaacgtggatgttctggtcgtcggctccggcgcggcggggctctctgccgccgtcaccgccgcgctcggcggcgccagcgtactggttgcggagaaagagtcggtcattggcggcaccagcgcctggtccggcggctggctgtggatcccgcgtaacccgctggctcgtgaagaagggattgaagaagagcccggcgcgccgctcgcttatttacgccatgaaatggacggtgagcctgccgatgcgcgtctgcttgccttcttacagtacggaccggagatgatcgactttttccgccgccgcaccgccgtgcagtttctttccggcagcaaaatgcccgattttcacgcttcaccgggcgctgcgctgggcggccgctcggtcacggcgcagccttttgacggacggctgctgggcgactggctgcatcgcctgcggcctccgctggagaccatcagccttgcgggtatgggcattgccggcggcacggacatggcgcacttttcaacgcgacccgctcaccgggctcggcgctgtatgcgacccgccgcctgctgcgtcacggctggcagcggctgcgcgccggtcgcggacagcatctggttaacggcaacgcgctggtcgcccgcctgctgcgttcggcgctggatgcgggggttaattttcagcttaacgcgccggtag

SEQ ID NO: 203523 - DNA, 315 bp, Klebsiella oxytoca
atgacggtggaggaggtgattgaaatgcaggggctgagcctcgacccctcttcgcatcgcgtcatgaccggcgaaaatccgctggatatggggcctacggagtttaaattactccacttcttcatgacgcacccggagcgagtctatagccgcgaacagctgctgaatcacgtctggggaaccaacgtttatgtcgaagacagaacggtagacgtgcatattcgccgtctgcgcaaagcgctggaacatagcggccatgaccggatggtacaaacggttcgcggtacgggatatcgtttctccgcccgtttctga

SEQ ID NO: 203524 - DNA, 321 bp, Klebsiella oxytoca
atggcgagaagaattctggtcgttgaagatgaagctccaatccgcgaaatggtttgctttgttctggagcaaaacggctttcagcccgtcgaggcggaagattttgacagcgcggtcaatcagctcaatgaaccctggcctgatttgatcctccttgactggatgctgccgggcgggtcgggtctgcagtttattaaacagctcaagcgtgaagcgatgacccgtgatattccggtggtgatgctgaccgcccgcggcgaagaggaagatcgcgtccgcggcctggagaccggcgccgatgacggtggaggaggtgattga

SEQ ID NO: 203525 - DNA, 441 bp, Klebsiella oxytoca
atgacggcgcacacgcatagcatcgggcaggaagtctcttcggttctcgcccagtcctggcatcgttgcagcaagtttatgcagcgggaaacctggcaggcgccgcatcaggcgcaagggctgacctttgagtcgatttgtcgtcgcaagacggcgctgctgacgattgcgcaggccgcgctggaagatgcctgggagtttatggacggtcgtccgtgcgcactgctgattctggatgaatcagcctgtattctcagccgttgcggcgatccgcagacgatagaacagctggcggagcttggatttcgcgacggcagctattgcgcggaaagcattatcggcagttgtgcgctgtcgctggcgacgatgccggggcagccgacaaaaacctctggcgctcagcactttaaacaggcgttgcatccgtggtcgttctgctag

SEQ ID NO: 203526 - DNA, 135 bp, Klebsiella oxytoca
atgttagtgcgcacaacaaagattatgttaaatgctattaaagaagccgagtctgccgcaatgcgcccccatacccttaccttaccccgcgctaagccgggatattcaaatcatttccagtcgctaaaacactaa

SEQ ID NO: 203527 - DNA, 240 bp, Klebsiella oxytoca
atgagaggaatcaaacgattaaggcgtgaagcgaaagtgacgcagggcgagctagctgtgctcattcacagcacccagggagccgttagccactatgaaacagggcgacgcatcccggatatctctgtcgctcgccgtctggttaaggctttccagggtttggggttagaaacaaacttagatgaaattttttcggaagagcattctgcaaaccatgcaacaaaacaggttattgcttga

SEQ ID NO: 203528 - DNA, 705 bp, Klebsiella oxytoca
atggaacttgatgaaaaaatacgaattgtaataatcatgagcatgaaacagagatggcaggacctggcaaaagccagaatgaaagaagttggaatgacccaggaacagctggcggaagcgctcggcgttacacagggcgggcttggccattggttaaatgggcgtcgtgaagctactttagaggtgatagcgaagatatttaatatcctgaaaatgccaggtttcgtagtgaacgccgacggaacggtcagtgacacaaaaacagaccataacgtcgtatttcgcggaaaaaatgaaccgcaaggaaaatatcccgtaatcagctgggttagcgctggagagtggatggaagctatcgagccctatcataggcgcgctatagaccgctggtatgaaacgactgttgattgttctgaggattccttctggttggacgtgaggggcgactcgatgacctctccggtaggccttagtattcctgaagggatggtgatactcatcgatccgcaggtcgaagcgattaacggcaagctagttgtagctaaactcgaaggtgacaacgaggcgacgtttaaaaaattagttatcgatgctggccatcgctttctaaagcctttaaatcctcagtacccgattatcccaatcaacgggaactgcagaataattggcgttgtagtagacgcaaaaataaccaacctcccgtaa

SEQ ID NO: 203529 - DNA, 729 bp, Klebsiella oxytoca
atgaataagcctgttatgaataacctgcccgatatgagcagcgacaaaactatcaactcccaagagttgctggtgatggtcaatgacgcccgtcgccagtacggtgagggctcaatccgcaacaacgtcttcattgaacgcattaaggatgaactcgaaggcgagacctacaaaatttttgtaggtcagaaaaatggcgctgatattgaaatcattgacatgctctttaagcaagctctccgcgtagcggctcgcgagtcgaaagctgtgcgtcgtacgcttgtcgatcagcttgaggatatggccggtaataagcagtccatgaccgaaatcgaaatgatcgccgctatggccgccgacgctgttcgtcagcagaaacgcattgcgcatgttgaggagagggtcgaagaagttgttgagaccatggagaacattaagcgcggctccgtccctgctgggtgggctggatattcggtgctgaaaatcaaatccggcatgacgccacctaaatgcaaaaccctcgtaaaggcgtacggaattccaaccgatacgatcaccatgctaacacctgatggacagcctcgccccatggctatcgtgctggatgctgattttatgcgggcatttcgccagatgatgtccgaggcagagccccgcggtacccgttggtatcacccgaaaatgggcctgtttcaggctattgggtgggagggtaaccatgaccaatag

SEQ ID NO: 203530 - DNA, 303 bp, Klebsiella oxytoca
atgagtgaattaactttcgtcattgagtttgacgcagggaaagagccgccagtacatgcccatatggaagcttttggtggaaaggttgttgcagtagcgtttcgcaatgctttagaggaaaacgataacgatgataccgccgccaaaatgctgggcatcactctgcccgataccagttcaaaagcgttctggagcggtacaggcaagagcgaagttttccatccggagacgtacaaacgctgggttaaagaggcggtcgagcgcggttgcgccatcgcccgtatcgatgtggaggtcaagtaa

SEQ ID NO: 203531 - DNA, 333 bp, Klebsiella oxytoca
atggtcgaatccaacatgtttgaattggcaaagctgatcaaggatgccaacggcgactccttagcaatggtagatgcgatctgggaggcgggttatcgccaaccggaacgcagcgcagaacaggctgcacaaattaccattgatacttttttctactgcgaaagattcagcatgccttcggatttttggccgcgcaactatgacagcgtgcttcagaatgaattgatgaaggcggtgatcggagaagatggtgagttagatgaagcagatgccagcaccattgccagaagcattattaatgctggattcagcaaggagacgggtaatgtttaa

SEQ ID NO: 203532 - DNA, 408 bp, Klebsiella oxytoca
atgtttaatctggcatacgctgacatcatcatggagctgagaacgagcggtgaatgccgtagcgcggaatggtttagccatcacatccactcctaccgcagcctcagcatgcaggacaagaaaaatctcaaagtatttctgtcgggcgatccgcagatcattgtgctggaggcagctagtaaagagaaataccggcgggtcaggctatacaggcatcgcaagcatggtaagccagacgccattaaagggtacatatatcccctggtggcgccagcaaataagcgatgtccaggatgcgggaaaaataaagaaaaaatggatttttacgcaaacgccagaagtcgtgaccttctttcaacttactgcaagtcttgccatgggagtcgataccttgaacagagaatttga

SEQ ID NO: 203533 - DNA, 1974 bp, Klebsiella oxytoca
atgacgaatatctcttctttagccagcctgatctggtccgttgctgacctgctgcgtggcgatttcaaacagtcccagtatggtcgcatcatcctgccatttaccgtactgcgtcgtcttgagtgcgtactcgctcctactaaggatcaggtactggctacggtcgaaaatacaaaggcattgccggatcttgcccgtgataaattactgctcaatgcctcaggtcaggcgttctataacacctcgccgctggagttaggcaagctgggtgaaaaccatgtgggggataaccttgatgcctacgtgcgggccttctcgaaagatgcccgtgaggtcttcgagcatttcagcttcgaggccagcattaccctgcttgaagatgcggacctgctttataaagtctcccgttcctttgccaccgttgacctgtcacctgaggaggtcgataactaccacatgggcctggtcttcgaggagttaatccgtcggtttgcggaaagctctaacgagaccgcaggggagcactttaccccacgtgatatcgtgcgtctgacgacttctctggtgttctctggcgatgatgatgctctggctaaacccggtgttgttcgctccatctatgacccgacggcgggtacaggtggtttcctgtcctgcgggatggaatacctgcatgaactgaacccggctgctcgcctggcgaccttcggtcaggagctgaacccggagtcctacgctatctgtaaagccgatatgctgataaaggggcaggacatcagcaacatcaagctcggtaacaccctctcggatgaccagttacgcttcaaccgtttcgattactgcctctctaacccaccatttggtgtggactggaagaaggtggagaaacaggtacgtgatgaagccgaccagcagggatttaatggtcgctttggtcctggtctcccccgtgtatctgatggctcgctgttattcctgatgcacctcatatcgaagatgcggcagcctggaactgacagtactggctcccgtattggcattatcctgaacggttctccgttgtttaccggtggtgcaggaagtggtgaaagtgaaattcgtcgttatattctggaaaatgacctgcttgatgctcttgtcgcactgccaaccgatatgttttacaacacgggcattgcgacttatatctgggtactgacgaaccacaaacccgcagagcgtaaaggcaaagtactgctaattaacgccagtgacatgcactccccgatgcgtaagtctttgggcagtaaacgtaagtttctgagcgatgaagtactgaaagagattgtcagtctgtacagccgttacgaagaaagcccgatagcaaaaatcttcccgagtacagcctttggttatcgccgtattacagtagaacgtccactgaaactggcgttctatccgcatgacactgaacgactggcgaacctgcaagaagacaaagcctgggcgaaactggatggctctttacaggaagctatcctggcagctctggcgagctttactgatgaaaaattgctgtcgcgtgataagttcaaaaagcaattcaccagagccttaggcgatgtgaagttacctgctccggtattcaaggtactggtgaatcatctggctgaacaggatgatgctgctgaagtgtgcaagactaaaggtgaagcagaaccgaacccggatttacgcgataacgagaatgtgccgttaggcgaagatatccacgagtacttcaagcgtgaagtattgccacatgtaccggatgcgtggattgataccagcaaaaccgacccgctggatggtcaggtagggattgtgggttatgaaatcccgtttaaccgtcacttctaccagtaccagcccccacgtgatttagcggcgattgatgctgacctcgatgctgttgcccgtgagattatgcaactgctggcggaggtgcattcgtga

SEQ ID NO: 203534 - DNA, 1389 bp, Klebsiella oxytoca
gtgagtactatggaacaagtggaagtggggaaataccagccgtatcctgagtataaggattctggggttgagtggcttggtgacatcccgagcaattggtctgtttattctttaaaaagaagtgttacggggtgtacaaatggtatatggggagatgagccaaatggtgagaatgatctcattgttctccgtgtagccgacttcgatcggaataaattacgaatcagcgatgacaagttaacctataggtcaatttcagagaaagagagccgttctcgtctacttgcaaagggcgacttactcattgagaaatctggtgggggtgacaaaactcttgttggttgtgttgttctctttgataaaaatttcgcagcagtcacctcaaatttcgtcgcaaaaatgagtgctcatgatggatactatagcggatttctgaactatgcattcagtcatttgtataatggtcggataaactacccctcaataaaacaaacaactggcattcaaaatttagactcagaatcttatttgatggagcggttttgtttcccaagttatacggaacaacgcaccatagccgccttcctcgactatgaaaccgctcgtatcgacaagctgattgcccagcagcagcgactgattgaactactcaaagagaagcggcaggcggtgatttcccacgctgtcaccaaaggtctgaaccctgatgcaccgatgaaagattccggcgtagagtggctgggtgaggtgcctgagcattgggtggtcaagaaacttaaacacacttcaaagattatcgactgtaagaaccgaacaccagaatatttcgatgatggggcgtattttgtagtgcggacaactaatgtgaaaaaccaagttttgagttttgatggggctctatacactaacgaggttaatttcaaaatttggacagaacgtggtgttccccccgttggctctatacttttcacgcgagaggccccggctggagaggtatgtatagtccctaataatgtaaaactatgcatggggcaacgcatgatgaatttcattccttttgaatcgcaatattcaacatttttgtttgattacttaacatcagattgccttggccgatacatatctagtgaagcagcaggcagcacggtaactcatctgagagtggaacaggtgtataatattccagtggttgttcccccatggaatgaacagattgagattgatgttttattgactgatattaagcagcgttattctctcttaatagataaagcctcagaaacgattagtcttattcaagaacgccgtactgccctgatttccgcagctgtaacaggaaagattgatctacgaggctggactgcaccgactcaggaggcagcagcatga

SEQ ID NO: 203535 - DNA, 3135 bp, Klebsiella oxytoca
atggataacaaagcccgcgaacgagcctttcaggatcatatcatcgctgaacttgccagtactggatggttagttggtgattctgctcactatgataaagaaagagccctttacccggaagacctgattggttttatccaggagagtcagcccgagggatggaaaaaatactgtaaaacctacggtgaaaatcctgaacgccacctgtccgatgccgcagtacgccagcttacccgctccgaaggcggcacactgtggctgctgcgtaaccaaatcgaggaccgtgggcatcgcctgaaagtagcgagctttaaaccagacaatgacctaaatccagagctactgacgcgttatcagaccaaccgcctgcgagtggtgcctgagctagtatacagccctcatggttatgacgggcgtatcgatctcacgctgttccttaacggtatcccggttgcaacactggagctgaagtcctgctttaagcagtctctggaaaatgccaagaaacagtaccggttcgatcgccagcttaagacactgggtaaaatcgaacccctgctcagtttccgccggggagctctggttcatttcgcagtgaatcagttcgaagtggcaatgaccactaaactcgcaggtgaatcaaccttcttcctccccttcaataaaggaacctcagaaggtggggcaggtaatgatcagccggaagtgggttatggcagtgagtacctgtggaaagagatcctgcaaccggataacttcctgcgagtcctggcccgttatctgcaccttgaagtcaaaatcgaagaagacccactcggtaagcagaaaaagaaagagacgatgatattccctcgctaccatcagtgggcagtggtgcagaaacttctcagtactgtccagatggaaggtccggggcagaagtaccttatccagcattcagctggttcaggtaaatccaactccattgcctggctgacccatcagctcgcctcgcttagtaagggcggggataaactgtttgattcggttattgtggttacggaccgtacagtactggatagtcagctccaggaaacaatcgggcagttcgaccatgcatccggtgtagtaagccgtattaaccgtgatgaaggggatgggagtaagtcatcacaactgactgaagctctgtcaaaaggcacccccataatcatcgtcaccatccagaccttccctcatgtactgaaagccattcaggaatccaccacactcaaaagctcacgctttgcggttgtcgctgatgaagcccattccagtcaaagtggcagtactgccagacagctgcgtgaagtactgatggctgagcaggtggaagaggaaatgtcagcagaggacatgatgaacctgacgttggcggctcgtggtggcagtacaaacatcagttattttgcctttactgcaacccccaaggctaagacgctggaactctttggtcgtcctgataagctggatatgccactgagtcaggagaacaagccgaaacctttccatgtgtattccatgcggcaggctatcgaagaaggctttattctcgatgtactgaaaaactacaccaactattcgctggcctataagctcgccatgcagtcagaaacggacagtgaagtagactccaaaaaagctcgcacccgtttgtctaagtgggtacgcctgcatccgcacaatattgggcaaaaagtcgcgatcatcgttgagcatttccgttctaatgtgatgagtctactggccggtcaggccaaagcgatggttgtcaccagcagccgccttgaggccgttcgttacaaactggccttcgacaagtacgtcaaagaacaaggttacggggccatacaggctatggtggccttctccggtgagattgaagaggaggggcagacctttaacgagcgaaacatgaaccctgatctcaatggtcgggacatgcggaaagcattcgatacccaggactatcaggtcatgctggtggcgaacaagtttcagacgggatttgaccagccgaaactctgtgccatgtatgtcgataagaagctgactggcgttgactgtattcagacgctttcccgactgaaccgcacttctccgggtaaggacagtacttttgtcctggattttgtgaatgaccctcaggatgtactggaagagtttcagaagtactacgagacggcgaaacttgaaaccgtgtcagaccccaatctggtatatgacctgttccataaactcaaagggacgggcatttttacctggagtgaggtcgagtcattcactgatgcctacttcgatcccaagcgtggcggggaatctttacctgggtacattaaacccgccgtggatcggttcagtaaacgctacaagctcgccagtgaagcgatacgcgaatcccgccggatgctcaaagatattgagctggaaggtggttcaaagacagataaggtgaatgctgaacgacgcgtaaccgaagccgcagaagccagagcggaactcgatttgttcaagaaggacctgaacagctacatccgcttctacgagtttgtgtctcagatcacgtcatttgatgaccaggacctggaacgcctctgtgtcttcgcccgccacctgctaccgatgcttcgtcaggaagtactggaagaagacgaaatagacctttcagcggtgatcctgagtcattacagcctcagggctaaacgcacccaggacctgaaactgaaagaagatgctcagggttatggtctggaaggtgtatcggcagtgggtagtgctaaagcccgtgaggaaaagaaagacttcctctcgcatattctggaacagcttaacgatttgttcggtacagaagtgaccgatggtgacaaactcgactggttgcagggtatggcgagtaaaattgctgagaaccagccgttaatggagcaggtacgcaacaattcccgtgatgccattatgttaggtgatttcccgaaagcggtcgatgctgctgtgattgagcggatggatacgcagaacggcatgtcgctggattacctttcccgaccggacgcggctaaccgtatccagagcctgttgctggacatactgctcaagggactgggtgaacatttatag

SEQ ID NO: 203536 - DNA, 540 bp, Klebsiella oxytoca
atggcaatcatcgggtatgcccgtgtctcaacaacaggacagtcgctggagcagcaactgacggcactgacagagtgcgaaaaagtttttcaggaaaaaatcagcggcagcaaaacggacaggccacagctacaggcaatgcttgagttcgcccgctccggggacgtgctaaaagtgaccaagctggatcgacttgcccggaatacccggcacttgctggaaatcacagatctgcttcattcaaaaggggtaacgttacagatacagaaccttggcatcgacacggccaccccgactggcaagctgatgctgaccatgataggggccatcgccacgttcgagcgggagatcatgcttgagcgtcaggccgagggaattgccctggcgaaggctaaaggtgtctacaaaggccgcaagccaaccgccatggaaaaacgagacgaggtgctgtaccttctctcgcaaggcattgccaaagcgactgtcgcgaagcggctagggattagcgtgtcgagtgtgcatcggattgcagccagttga

SEQ ID NO: 203537 - DNA, 198 bp, Klebsiella oxytoca; identical to SEQ ID NO: 162130

SEQ ID NO: 203538 - DNA, 432 bp, Klebsiella oxytoca
atgcacgacatcatcaatgaagcccgcgagctgctgacggcacggctctaccgcaatgaatcactggggtccccgagtgaaactgagagctacctcgccctccagcttggcgaccgtgagcacgaggtctttgccgtcatcttcctcgactcgcagaaccgcgttattcagtaccgggagatgtttcacggcacgatatcgtccaccagcgtctacccccgcgagatagcccgcttagcgcttcgtctgaacgccgctgcggtcatctgctcccataaccatccctcgggccaccctgagccgtcagcggctgacagggccattaccggacgtataaaggacgcgatggaactaattgatgtccgtgtgctggatcacattgtcgtcggtggtgggcggaccgtatcgttcgctgagaggggctggctatga

SEQ ID NO: 203539 - DNA, 2448 bp, Klebsiella oxytoca; identical to SEQ ID NO: 162129

SEQ ID NO: 203540 - DNA, 258 bp, Klebsiella oxytoca
atgaattacctaagattgattatcgatcacgagaaacgtgccactggctataactgtgcgattgatactgagctggatgaactcccggcagccatcaccgaagccgtctacaagcatgtgaaggactaccggggcggcctcacctatgaccgggcagatttcatcatgcgtgacctcctgtggctcctgagcggctatgacgtcaaggctatcgttaccaatcatactcagcgtgaaacacaggtttatccattctga

SEQ ID NO: 203541 - DNA, 1656 bp, Klebsiella oxytoca
atgggcattatgatacagccaacaaagaaccgtttcggcgtttacctcatccgtaaggccgtccccaaacacctgcaaggcatcctcaataaacgtgagatcaagtttacccttgataccaaagacgtgagggaggccagagaacgagcacccgcaaaaatcattcagatcgacatgatgctcaggctggcagaaaagcagcttgaagcagaagaatccttaactgatgccgatatcgagatgatcgctggtgtatgggcttcacgtaccatgcagaatgacgagctaatccgggagcgatacctcgttgaggatgagttcaaaggcaaaacagtgcaggctcactcccctgaaaacgacatcattcacgactggctggaagatcgcgaacgcaagccccgctacaagtcagaaacatggcaggcagaacgtgacgaatccatctgcaaactgatggccgcagagctggatgaagctctggaatacacgcctgtcgttctcaccccggtctggcgaatccgtctggcatggcgactggctgaacgacgcagtgacctgacgaatgcttaccttctgaatcttcgtccccggctctacgccagaaacaaaggtctggatgccctccccgcagaaagacccgaaactctcaccttcgcagatctgttcgaacgctataaagaacacgttcagcgtcatgaaccactgcgggctgagagccggattatcgcctatacaacatcggctaaccgtttcatagagtttatcggtaagaagcccgcagaggagatcaccgttactgacctcgccgacttccgtaacctgctcgaaaagcttccttcccgtctttctaaggcggtacggttactgccgctgcacaagcaggtggacgctgaaggtgaaaaaatcagccctgtccgcgtcgaaaatattcttaaagagctgtcgtcagtctttcgcgtcgcagtagaagacggcaagcttaccgagaatccactgagcaagctgaagaaacgtaaggtcgtcgctggcccgacagtcatcagatctttcagtcgcgatgaaatcagccgtatcttctccctgcccgtcttccacggtgaagaaacaccgcacggggctatggcatactggataccgataattctctactactgcggtgcccgcgttgaagaaatcgcccagctccgtaagggtgacatcgtggaagtggacggtacaccctgcttcaggctggcaatgggtgaaggccagtcgatcaagatgggtaacacacgccagttcccgatacatagccacctgattgagctgggcttccttgatttcgtgcagtccagcaccaatcagctctttgccgataagtccgaagtgaaccggaaatattcatacaactacggtcgctggtgggggaactacattcgggaacacggcctgacgcggcagggcatcaagccgacccacagcttccgccatacgctcgttacgctatgccgggatctgaacattcgcgaggaaatccaggacagcattctcggacataacgaaaattcatctgacagagcgaaggccagtcacggttatggtgaaacaagcgtacaggcccagcgtagcgtcatcgagcaaattccaaggctgaatcttcagcggagccacacttaa

SEQ ID NO: 203542 - DNA, 741 bp, Klebsiella oxytoca
atgattgaattattaacttgtggcttgttctccttctctaaagagccacgtagagaaaaccaagatactattcttccgccactgtacatcaatgatggatttttgattgcagtcgccgatggcgttgggtcgtatgatggtgcacaaaacgcatctcaatcagctatcagagaactacctgaacttgtaagaaaaggaagtctgcaagacatgacgaaccttttcctttcgcttaaagaaggggtttcttcattgtcagacaaaaacatcaagttttctcacgcagccaccacgttaactttctgttttgtagatgatgaaggcctccatattggacacgttggtgattgtcgtttgtatgtgaaaacggattctaaactcaagcaaatcaccaaagaccacacacagcaccagaagttactcgatgataaaatatacagtaagagcgaactgaaacagttgccgggcaaaaataccctcactacggcaattgcgaatgcgatcccactcgatttccaacaaacctttatccctcatgatgagctgcttaatgaccgtgacgaagcatttgtatacttgatgtcagatggtacacatgcattctgggaaaaaaggccccgcttctcaccaaacacattagaaaacccttcaagttttgcttccagtctctataaacgtatcgagcgagcgggccctatagatgaccattcgttgatcgcagttagatacaaggttctttaa

SEQ ID NO: 203543 - DNA, 756 bp, Klebsiella oxytoca
atggatgatgcacatggtaactatgttatcaagccgataagacgcattggtaaaggcggcttcggctacgttgaagaagttcagttacaaaactaccaaggtcatatctgcgggacctatgctagaaaagtcttcgctccacaagatccagcctacagagatgagttcatccgtagattcgaacgggaggtcacgtaccaagctgactgcaaacatactaatattgtgccgatctaccttcattacctgacaggtgatgaaccttggtttgtgatggacttagccgaaggcgatttggttacggctttgcagtcaggcgaaatggcaataagagataaactcagcgcaattcgcatgacgttggaaggtgttgcgtaccttcacgatcacagctattggcatcgtgatttaaaaccccaaaatgttttgaagttttctgacggaacttaccgaatttctgatttcggtttagtcaagaatgcggatcaaaaagccgagtcggaggtgatcacaaaagttgctgcaattatgggcaccgagcgttatatggctccagaggtttttgctgggatttattcagaaaaaacagatatctttgccttaggtgttctcatcgaggacatggacttgggggcgatacctggtgtcgatgacttggttacaaaaagtactgccaggaagccaccgaaaagacatagctctgtgcatgagatgctcgcagacttgaaaaaaatagttatagggaatgggttatga

SEQ ID NO: 203544 - DNA, 810 bp, Klebsiella oxytoca
atgagcacaatttatatcccaaaactgggcgacattgttattccggggagccatcccaaaaaagggcacttcatggtgcccgatttacctgttactaccggtctgaaagggatgcatattcagggtggtaatgctgcactgagcatcaggaatcttgcggacagtaccaccccgctgactatggtaggaacgccgacaatctccccgacctttggcgccgtttgtaatttcagcaactgctttgatacgggaagggtatccagtcggaaccagacacatatcgtgatctgtaagccggtaaagccaactgcagctactgagcagcgacaggctttcatgatgggtaactacaattactcagggtcaccgattgtttatcgtggtgatggcctcgcgtttatgtatacgaccactgcacctaacacgatctatggcgctttcgttgaggataataatgccacgccgaccaatcttattaacaacttcacgaccaactatgacgtaaccaaatgggcagcctttgtgtcactgatcgacggcgataacaacattgcacgaatcggtggccggcagggaggggcgcttgcatggcagggatcgcgaacgctgactaacaggacggcatacacaggcagaaccatcaggattgggtcgcatcatgccagtgctgcatatccggccggagcggatatcaccatgggtatggaactgatttttgaagcagcgctaacacaggccgaagtggcttctgttatcgacagtatcagtgcgtatctgaatgcggcatggggcattaacgatttgggttaa

SEQ ID NO: 203545 - DNA, 1050 bp, Klebsiella oxytoca
atgccgctgcataccgacagtcgcacgctgtggcgctggaaagcgaagaaagcgcagctcaaggcagggatggcaacgcagcctaatttccttctaacaggggatagctggacgcagaataacgaactggccacagctatcgccgggctgctgcacaatgattacggtgacgcgggtcttggctggagaacggttaactacggggccgcgcgcgacggttcgggaatatttcgctctgccggctgggatttatatgatgcttcgccgaccagcggagctccgctttatgggtgcggcattgacggtcagtcaattaacacgacgactaatactgcttatttcaacgtaaccaacgtccgttgtactgattgccgtatttattaccaggatctggatggaacattccagtacggctatgacgtaggcggagtaacgcagtggacaacagttgtctgcggaaataccggcacgactaaatcagtattgctgacagggatgactgatgaggtcaggacgatttataccaagactgatggtaacaccgggcgggtggccatacatggattctatttctggcgatctggtgtcgctggttgcgtgatgagcaaagcagggaacgcggggattcttgccaatcagttcctgctgttctcagacaaaatcgcggagtacctgagcacaatgcagccagacgtcatttgcatcgtcatcggtaacaacgactatcgcatttcgacaggaacccagacatttcgcacagcgctgcaaacctatatggctgcctgtcgtgctgtgttgcctgatgtgggcttcatcctcatggctccccccagaacaaacggcacagcggtaacaccgctcgttaatttccgtgacgtaatgtacgacctctctcagacgctgaactgtgaatttttcagcatttatgacctgttcgatacctggacggaaatgaacggacttggctgcttcattgataatcttcaccccagcaccgtcggtggaaacatgatcgcttcatcccttaataacgcactgatcaaaggctaa

SEQ ID NO: 203546 - DNA, 267 bp, Klebsiella oxytoca
atggtcaggcaaaagtgtagcggtattaggcgcagctatttaggaaaagagaatattatccggttgacggaagggacacatgaaaaggtaatgatgatcgatggccgttacattgttatcgggagttggaactggctatctcatggttatcaccatagctgcgagcgcagtgaacagttcactaatgcgattcgtcatgagatcagtgcagaactggatgatgcgtcgctggtgaaggagcttagggagcggctgaggctggagtaa

SEQ ID NO: 203547 - DNA, 138 bp, Klebsiella oxytoca
atgtgggtaatgatgaaacttagacgcaccgggcaagagatgtacttccagtattacgacagcaaggaagcggctgaaatagcgatgaatgttatgaactccgtcgccagcagctgggaattctatatcaataaatag

SEQ ID NO: 203548 - DNA, 1203 bp, Klebsiella oxytoca
atgtttcatctcgataccttatcgacgctcgttgccgcaacactcgtgttgctactgggtagaaaactcgttcaaaccgtccctttcctgaagaaatacaccattcctgaacccgttgcgggcggcctgctggtcgcgctggcgctgctggtattaaagaaaagcatggatatcgaaatcgatttcgatatgagcctcaaagatccgctgatgctggctttctttgccactatcggcctgaacgccaacctcgccagcctgcgctccggcggcaaagtgctggggacgttcctgattgtggtggtggggctgctgctgctgcaaaacgcgctcggaatcggcatggcgaagctgcttggcctcgacccgctgatggggctgctggccggttcgattaccctttccggcggccacggtaccggcgcggcgtggagtaaattgtttgttgaacgctatggctttgccaacgctaccgaagtggccatggcttgcgcaaccttcggcctcgtcctgggcggcctgatcggcggaccggtggcgcgctatctggttaagcactcttcctccccggacggtacgccggacgatcagctcgcgccgaccgcgtttgaaaagccggatatggggcgcatgatcacgtcgctggtgctgattgagagcatcgcgctgatcgccatctgtttaacggtagggaagatcgttgcgcaactgctggcgggaaccgtatttgaactgcccaccttcgtttgcgtgctgtttatcggcgtgatcctgagcaatagcctgtcggcgctgggcctgtaccgcgtgttcgaccgcgcggtgtcggtgctgggtaacgtcagcctgtcgctattcctggcgatggccctgatgagcctgaagctgtgggagctggcgtcgctggcgctgccgatgattattattctggcggttcaggcagtggctatggcgctgtatgcggtgtttgtgacctaccggatgatgggaaaaaactacgatgccgcggtgctggcagccggccactgcggtttcggcctcggcgcgacgccgacggcgattgccaacatgcaggcgattaccgaccgtttcggtccgtcgcacatggcgtttctggtggtgccgatggtgggcgcgttctttatcgatatcgttaacgcgctggtgattaagctctatctgctgctgccggtatttggctga

SEQ ID NO: 203549 - DNA, 1392 bp, Klebsiella oxytoca; identical to SEQ ID NO: 189483

SEQ ID NO: 203550 - DNA, 1716 bp, Klebsiella oxytoca
atgaaatttctcagaaagctgattctctggctgctgattgccctgctggtggtgattattgccgcttacttcctgctgcaaacccagtggggcgggcgccaggccagcgcctggctaagcgacggtaccggctggaaggtctctttcaacaagatggaccataatttctcctcgccactgcacctgcagctgcaaaacgtcaccctcggacgcgacggcaaacccgccacgctggtggcgcaaacggtggatatcgggtttagcagccgccagtttagcgacccgctgcatgctgacgaaatcgtcctcagcgacggcacgctgaacttctccccttcttccgcggcgctgccattcgccgccgaccgtctccagttgcgcaatatggcgttcaacagcccggagagcgactgggatctgagcgcgcagcgcgtcaccggcggcgtcagcccgtgggcgccggaagcgggcaacgtgctcggcaagaaaacgcagattcagatgagcgccgggtcgatgacgctcaacggtattgaagccagcaacgtgctgattcaggggaatattgataacggcgaagtgtccctctcgaccattggcgcggacgtcgcccgcggtacgctcaccggcacggcgaaacgcagcgccgacggcggctggcaggtcgataatttgcggctcaacgagattcgcctgcaaagcgataaatcactcgccgactttttcgcgccgctgaccaccctgccgtcactacagattggccgccttgatgtgaccgacgccagcctgcaggggcctgactgggcgatcgccggcctcgatcttaacctgcgcaacctcaccctgagccgcggcgactggcaaagccaggagggtacgctgtcgatgaacgctaacgaatttatttacggctcgctgcacttcctcgacccgatccttaacgccggattctcgccgcagggcatcgcgctgcgccagttcacctcacgctgggagggcggcatggtgcgcacgtccggcaactggctgcgcgccggccatgcgctggtgctggatgacgcggcgttcgccgggctggaatatacgctgccaaccaactggaagcagctgtggatggcgccgctgcccgactggctgcaaagcctgacgctgagaaagttcagcgccagccgcaacctgattatcgatattgaaccggcgttcccgtggcaaatcaccgcgctcgacggctacggcggcgagctgcagctggtgaaaaaccgcagctggggcgtgtggagcggtagcgcgacgctgaacgccgccgccgcgacctttaatcgtattgatgtccgccgcccgtcgctgaagctgagcgccaatgcctccacggtgaacgttaacgagctcagcgcctttaccgagcgagggatcctgcaagccaccgcggcggtgtcgcagctcccgcagcgcctggtcaacctgagcctgaacggtcgcggcgtgccgctgaatattttgcaggcctggggatggcccgcgctgccggtttccggcgacggtaaccttcagctgacggcgaccggcagcgtgctggcggatgcgccgctgaagccgaccgtcaacggccagctgagcgcgataaatatggagaaacagcaggtggcgcaggtgatgcgcaacggggaggtcaccagcacccagcccccttcagcgccggcgacaacgactccctga

SEQ ID NO: 203551 - DNA, 1560 bp, Klebsiella oxytoca; identical to SEQ ID NO: 189485

SEQ ID NO: 203552 - DNA, 1380 bp, Klebsiella oxytoca; identical to SEQ ID NO: 189486

SEQ ID NO: 203553 - DNA, 732 bp, Klebsiella oxytoca; identical to SEQ ID NO: 189487

SEQ ID NO: 203554 - DNA, 675 bp, Klebsiella oxytoca; identical to SEQ ID NO: 189488

SEQ ID NO: 203555 - DNA, 933 bp, Klebsiella oxytoca; identical to SEQ ID NO: 189489

SEQ ID NO: 203556 - DNA, 861 bp, Klebsiella oxytoca; identical to SEQ ID NO: 189490

SEQ ID NO: 203557 - DNA, 852 bp, Klebsiella oxytoca; identical to SEQ ID NO: 189491

SEQ ID NO: 203558 - DNA, 1092 bp, Klebsiella oxytoca; identical to SEQ ID NO: 189492

SEQ ID NO: 203559 - DNA, 315 bp, Klebsiella oxytoca; identical to SEQ ID NO: 189493

SEQ ID NO: 203560 - DNA, 471 bp, Klebsiella oxytoca; identical to SEQ ID NO: 189494

SEQ ID NO: 203561 - DNA, 1572 bp, Klebsiella oxytoca
atgcaaatgattacctcacgacagaacagattattgaaatttctcctgccccgcagagaatacgttacgctgatgaaaattgctgaatatttaaatgtttcagaaaaaacggttcagcgtgatttacgctttttagaacagtggttatctgagtggaaaatgactatcgacaaacgctcaggcgccggcgtgatgctgatcgctgataatgtcacggatctgctgcaattagaccaattactcggtaacgagggggaggacagcgatgtcatgatgaataactcccggcgtgtgaaaattgcttcgcagctcttaagtgagactccgcgggagacatcaattaataagctctctgagcgttattttatcagtagtgcatctatcgttaatgatctgaaaattattgagtcatggattgctccgctcggcttaacgctgattcgtagccagagcgggacgcatattgaaggcagcgaaaacagcgtccgccaggcgatggcgtcgttaattaatggggtgattaatcataatgagcccggctgtattatccattcccggctggactcaggaagctataaagcgctggtgcattattttggtgaggatgacgttttatttgtacagtcattattacaggaaatggagcgcaagctgtgctggtcattaggcgaaccgtattatgtgaatatttttacccatatcctcattatgatgtatcgcattacccgtgggaatgccttaccgcggcgtgaacaggggcagcagatttttgatgagacgatatttagcgttgcccagaatatgctgcgaaaaattgaacaccgtattgaccattcgctgccggaagatgaagtctggtttatttatcagtacatcatctcctctggcgttgtggtggaagagcgagatgatgtcagcatggtgcgctatatgcattctagcgatgaggcccgacaaattaccgatcgtctgattagcgctttttccaccatgattgatctcgatttaaccgccgatcgcgcgttatacgatggcctgctcattcatatcaagccgctcattaaccgccttaactttcggatttatattcgtaaccctctgcttgaggatatcaagggcgagctgacggacgtgtggccgctcacccagcgggcggtcaatcaggtttttagccgctggggcgagcgtgcggtttccgacgacgagattggctatctcaccgttcatttccaggcggcgatggaaagacaggtcgccagtaagcgagttctgctggtttgttctaccggaatcggcacatctcacctgttgaaaagtagagtgttaagagcgtttcctgactggaccatcgtcggcgtggtttcggcaagcagcctgcatacccttcagccgcaggacaagattgaactggttatttcgacgatcaatctgccggaaatagctctgccggtagtctatgttagcgcattttttaatgatgccgatatccggcgggttacggaaaaaatcgttaccgacaaattacatcgtgcggcaatatctgctgtagataatgaagttttatatccatga

SEQ ID NO: 203562 - DNA, 2319 bp, Klebsiella oxytoca; identical to SEQ ID NO: 189496

SEQ ID NO: 203563 - DNA, 1395 bp, Klebsiella oxytoca; identical to SEQ ID NO: 189497

SEQ ID NO: 203564 - DNA, 1167 bp, Klebsiella oxytoca; identical to SEQ ID NO: 180823

SEQ ID NO: 203565 - DNA, 483 bp, Klebsiella oxytoca; identical to SEQ ID NO: 180824

SEQ ID NO: 203566 - DNA, 927 bp, Klebsiella oxytoca; identical to SEQ ID NO: 180825

SEQ ID NO: 203567 - DNA, 981 bp, Klebsiella oxytoca; identical to SEQ ID NO: 180826

SEQ ID NO: 203568 - DNA, 567 bp, Klebsiella oxytoca
atgaccgccattacgctacagcaggcctttgaggcctgtcagaataacaaaaccgcctggctgaaccgtaaagccgaactggcggccgcagagcaggaataccgcgagcagatgctggccggggatgaacgtatcccggcaattatgcaggaactgcgcgacattatcgaggtcaaaaaatgggagataaatcaggccgccggacgctatatccgctcccatgaagcggtgcagcgcatcagtatccgcaacaggctgaatgacttcatgcaggcgcatggtgctgaactggcggccacgcttgccccggagctgatgggactcagccagcagcccgcactcctgaccggccatgcgctcgaccgttcggcgcattacctgagggaagcgctgtccgtatggctgagtaccggtgaagaaattcattattccgcagaagacagcgatattttaacggccattggattcaggcctgacgcggcttcgcgggtggataatcaggaaaaatacacccccgcacagagcctgatttatgcccgccggcgcacggaactggccagtaagtag

SEQ ID NO: 203569 - DNA, 246 bp, Klebsiella oxytoca
atgatgcactgtccgttctgcaaaaagtcggcgcatgcccgtacttcccgctatctgtcggagaacgttaaacagcgctatcaccagtgcaccaatattgagtgctcggcgacgttccgcaccactgaagccatcgacgaggttatccggcccccggcggagaaaacgccgcctgtcgcggagccggtcacacctccggcaccccgcaaagtgcagggctgctacagctcgccataccgccattaa

SEQ ID NO: 203570 - DNA, 738 bp, Klebsiella oxytoca
atgaccgacaccacctttatccctgattacctgaaaccggcgctggagcgactggccgcagccagagcggcccatcttgaacaggcccgccggatggaggacaccctgacggccattacccgtgcggaggagcagaaagcggagctggagcaggacaacggcagcgacacccgtacatggcgcgctgctttccgtgccgggggtgccatgctgaccgatgagctgagaagcggccatatcgaacgcgtggcccgccgggagctggcgcaggaatgtggcaacctgaccgacgtgctggcctttgaacgtgaccagctgaaagccacctgcaacagcaccgcacgggcattccgccaggcgcatcatgctgtgttgagtaaatatgctgaggaagagcttaaccgcgcgctgaatgacaccctcgggccactggtccgggcgatggtgctgaaagcagaggtgatggaaaatccgctggccaacaccaccggccatcagggctacatcgagccggagaaggaggtcatgcagcaggtggtcaccttcctgaccgggaaagtgagcgccttctctgtcacgccagcggatgagccggtgctctccctgaccggcttcccggccgtcaccctcccgcatatggaccacgacgccgccagcacgcccggcgagcgtaaggtctggcaggagaaaatccgtcagcgcgaggctgacctgaaagcgcgggggctgctgccatga

SEQ ID NO: 203571 - DNA, 267 bp, Klebsiella oxytoca
atgcacaccgctttttcttccccatcttcagcccctgccgcgcccctgatgccggtttctgataccgttccggagcgctttatccgcctgcccgaagtgatgcatctgtgcgggctgtcacgctccacgatttacgacctcatcagccgggaggctttcccgaaacaaatctcgctcggcggaaaaaacgtggcgtgggcgcagtcggaaatcaccgggtggatggccgaccgtatcgccgaacgcaaccggggctatgacgcatga

SEQ ID NO: 203572 - DNA, 195 bp, Klebsiella oxytoca
atggctacgaccctcaccccgtcacacccgcagtttgtctttgtgtttgccgccgttcgtcgcgcagaccgtcagcctcgtatctgtatgctccgcgccatcgccggggatgaacacgccgcacgcctttccctcgttcgcgattacgtcctctcgtttgccggtcgtctgccggtggcggaggtgcacgcatga

SEQ ID NO: 203573 - DNA, 228 bp, Klebsiella oxytoca
atgaaacagcccgccatcaccgtgaaggaccttgaatgcctggagcacctgcgtaacgtcggccagttcgtcggcgagctgatgcaggtgcaggactgtacttccctgcgtcgtgacccgactcagcagttacagcttacctccgtgatttacctgatgaccgcccagctcgacggcgtggtcgagcgctgcaaccaccgctggttcaccggggagggcaacgtatga

SEQ ID NO: 203574 - DNA, 321 bp, Klebsiella oxytoca
atgaaaacgcctctgccgcctgtattgcgtgccgccctgtatcgccgcgctgtcgcctgtgcctggctgaccctgtgcgaacgtcagcaccgctatcctcacctcaccctcgacgcgctggaaagcgccatcgccgccgagctggagggcttctatctgcgtcagcacggcgaggaaaaaggccgtctgattgcctgtgcgctgctggaagatttgatgcaggccgggccgctgaaagccgccccatcgctgtccttcctcgggctcgccgtgatggatgagctctgtgcccgccatatcacatcgcctgtactgcactga

SEQ ID NO: 203575 - DNA, 729 bp, Klebsiella oxytoca
atgaaaattaataatctcagtatgattgtttctatgataacaggaataatcactactattataacaatatatagcattaacaaaccggcatcacaccttacagcatacgttactgataatatattttataccccaccccaatataatgaaattatgagccttactcttgatgaagcggattataataatatttatgatcgcattgatagtgttgcacaaaatgccagatttgaagaaaaatcaaaatttgttaaggaaattattaattctattttaactccatttaaacctccatttcaaaatggtttagaggaatataaaaaattgatttttatcaatgtacataactcaggggatgcgtcagcaaaagatttatatattgactatcctgagaaggttttagttatggttatagacgacaaaaaagaaaaaattaaaaaaccagatgcgcttactcgcttgtcaataccatcaataagacaaggtggaaattataaggtttgggcttgggctaaaaataataaatttaaaaaaagcgatattagaattggaaatgaaaaccaaattgccaagattaaatacggtgaactacattttggaacttcatcaaatatagcttctttttatgaaaatcatgaaacaataataaaaacaatttttacgatagtaatgtccttgggaagtctgacaatttgcttcctgctattccacttaagaaaaaaatattga

SEQ ID NO: 203576 - DNA, 192 bp, Klebsiella oxytoca
atgtcaatcatagcgcgcgaaaaaaaaccaaagggcggcggccagtctccgcagttcaaaatgcgcattgatccggcattaaaggagcagctggatgctgttgcagcggaagagggggtgagtctcgccagttggttgaaggagctggcgagggaggctttgcggacgaggggtattgaacctaagggataa

SEQ ID NO: 203577 - DNA, 288 bp, Klebsiella oxytoca
atggctgattcgcattctaccccagactttgccgtttccggaaccgagcgtcacctgattgtgggatatcgcccgcaaggtcgggacaccagtacaccaagtcttaccctttccggcaagtggttacgcgcagcggggttcgataccggaaagcgcttcacggttaaggtaatggatggctgtattgttctgctgccgcagagcgataaggaagaaatgcttaaagcggagctactgcaaattcagcaatcctttaaaagcgtcaacaatacgcttcatctcgtctga

SEQ ID NO: 203578 - DNA, 594 bp, Klebsiella oxytoca; identical to SEQ ID NO: 180828

SEQ ID NO: 203579 - DNA, 606 bp, Klebsiella oxytoca
atgaatacgctatttctgattggccccggcggggtgggaaaaagcacggttggagcgctgctggcgcaggcgatgagctaccggcttatcgatctcgatagcgaattttgcgagcagattttaaatattcgccaatatattcagcgcaatggatacgagcgctatgtgcgtgagaacgccgcactatgctctcgcctgctggcggagaatccgcatgaaaaacgagtggtggtgctctcctcgggatttcttgccaccgatgtctgcccggagattgtcgtcgggaatcgacagcttgtgcggcagtccgggtactccatcctgctactgccttcagaggatattgatatctctacgcgcatagtggtcgcgcgccagctgacacgcggctttggtctggtcagagaaaaagaagagatgaagttccgccagcgcttcagggaatattgtgcattagacgattgccgggtggtttcgtctgaggagccagagagggtggcggagctggtgcaggagaaggtggctgcggaacagcggaaacaaaaaagcctggcggcgatgcgtgaactgagcgagctgtcacagaagctgggattgtctaactaa

SEQ ID NO: 203580 - DNA, 468 bp, Klebsiella oxytoca
atgacacccgaactcgaacacagcttctctatcaccattcaggtcgacaaaccggtcatcgtctcccgcagcccgcagagcgggaaacgtcagctgatcccaatcctcagcggaaccgtacgcggtgagcttaacggccacgtcttacccggcggcgtcgacagccagatcgtcgaacctgacggcacctgccgcctctccgcccgctatgcattacacgtggaagaaggcaccgtatacatcgaaaacaacggcattcgccgcctacccgaagagtataaagaacggctgttcggcgacgatatgcgcttttttaccgatattccgccggaagctatctattttcgtaccgtaccgacttttgaagtggatgcgccggcgctgcgctggctgaccacctcgctgtttatctgttccggcggccgcacgcaggacggcgtgatgctcgatttttatcgcgtccgctga

SEQ ID NO: 203581 - DNA, 1008 bp, Klebsiella oxytoca
atgaaagcgatcgccattacccgcgcggcggcagaaggcagcaatattccttttttaaccgacatcgagctgccgcagccggttgccgaggggcatgacctgctggttgaagtgaaggctatttccgtcaacccggtggataccaaagtccgcgccgggtttaacgccgataccccgcgcgtgctgggctgggacgcggtgggcgtggtgaaagccgtcggcagcgcggtgacgctgttcgccgcgggagatgaagtgtggtacgccggcgcgctgggccgtccgggcagcaacagcgagtttcagttagtggatgagcgcatcgtcgcccgcaaaccgcgttcgctggataatgccgccgccgccgcgctgccgctcaccgccattaccgcctgggagctgctgttccaccgtcttggcgtagaggaaggcggcaacgcgggcgacacgctgctgatcgtcggcgcggcgggcggcgtcggttcgatactgacccagctcgccagcaagctgaccggtatgacggtcattggcaccgcctcgcgcccggaaagccagaaatgggtacgggaagcgggcgcgcatcatgttatcgatcacagcaaaccgctcgccgaagagctggcgcggattggcgtcaaagcggtgacccacgtcgccagcctgaccaataccgaccagcactatccgcagctgatcgccgctctcgcaccgcagggcaagctggcgctcatcgacgatccgcaaaccctcgacgtggtgccgctgaaggcgaaaagcatctccctgcactgggaatttatgtttacccgctcgatgttcgcaacgccggacatgatcgcccagcatcagctgctgacccgcgtggcggcgctgattgacgacaacaccattaagaccaccctcggcgagcactacggcgccatcaccgccgccaacctgcaaaaagcgcacgcgcagctggaaaccgggcgttcggtgggcaaaatcgtgctggagggcttttaa

SEQ ID NO: 203582 - DNA, 303 bp, Klebsiella oxytoca
atgagcggcgaggcgatttcacttctcgcggtgctgacggcaaaaccgggccacagcgacgcgctgcgtcaggccctgcaggcgctgctgctgccgacgcgtcaggagccaggcaacctcgattacgccctgtttcagctgcgcgatgcgccggatacgttctatatgcgcgaatcctggcgcaatcaggaagcgctggacgcgcatatcgccctgccgcacttccaggattttattgcgcagatggatagcctgcttgccgggccgctgcggctggattatctgacacccgtcgcgccctga

SEQ ID NO: 203583 - DNA, 1050 bp, Klebsiella oxytoca
atgcagatcaacgctattggaacgaactcggccagccagccgttggggtctatggccatcacccgccgcgaaccggggccggacgatgtgcagatcgccattgattattgcggcgtctgccactcggatgtacaccaggcccgctccgagtgggcagggacgctctatccctgcgtgccgggccatgaaatcgtcggccgggtgaccgccgtaggcagccgggtctccggccacgccgttggcgatctggtgggcgtcggctatatggtcgacagctgtaaagagtgcgaggagtgccgggacgggctggaaaactattgcgatcgtatggtgctcacctataacggcccgacgcaggacgcgcccggccacacgctcggcggttactcccagcagatcgttgtgcatcagcgctacgtgctgcgcgtccgccatcccaaagagcagctggccgccgtcgcgccgctgctgtgcgcgggcatcacaacttactcgccgctacgccactggaacgtcgggccgggcaaaaaagtcggcatcgtgggcattggcgggctggggcatatgggcatcaagttggcccacgccatgggcgcccacgtggtggcctttaccacctcggaatccaagcgtgacgcggcgcgggagctgggtgcggacgaagtggtggtctcgcgcaacgaaaacgaaatggccgcccacctgaagagcttcgacttcatactcaacaccgtggcggcaccgcataacctcgatgccttcaccaccctgctcaaacgcgacggcaccatgacgctggtgggcgcgcccgccacgccgcatccctcgccggaagtgtttaatctgatcttccgccgccggtcaattgccgggtcgatgatcggcggcatcccggaaacccaggagatgctcgatttctgcgccgagcacggtatcgtcgccgatatagagctgatacgcggcgaccagattaacgaggcctgggagcggatgattaaaggcgacgtgaaataccgcttcgtcatcgacagcgccacgctcggcggctaa

SEQ ID NO: 203584 - DNA, 954 bp, Klebsiella oxytoca
atgaaactcacggaagtggcgattgtggcggtggacgggtttagcccgtttcactactcggtgccctgtatgctgtttggcgatacggtctcggaaaccaaacgctttaacctgcatatttgcgccgaacggccggggctgctcagcgcccgcgacggcttcgcgctgaacgccagcggcgatttttccctcctggcgcaggcggatatcgtggtggtgccttactggggggcggtgaatcagcgcccatcgcagccgctgcttgacggcctggttcgcgcgcgcaataacggcgcgcagatcgtcggcctgtgcctcggggcgtttgtactcggctacgccgggctgctggacgacaggcgcgcggcgacccactgggagtttgagcaggattttcagcgccagtttccgcaggtgcggctggatatcaacgcgctgtacgttgacgatgaggggattatcacctcggcgggcaccgcggcggcgctcgactgctgcctgtatctcattcgccagcgttttggcagccttgtcgccaatcagatcgcccggcggatgatcgtcccgccgcaccgtgagggcggccaggcgcagtttatcgcccagccggtacccaaaaacacccgcgacgcgcggataaacggcctgcttgagtatctccagcagcacatccgcgaaccgcataatctcgactcgctggcgcaggtcgcggcgatgagccgccggaccctgacccgccatttcgccaaagcgaccggcatgggcatcgccgactggctggccgccgagcgcctgcggcgcagccagatcctgctggaggccggggatttaccggtcgggcaggtggcggaggaagtgggctatcgctccgccgtaacctggcgccagcagtttaaagcgcgctttggcgtcagcccggcggagtggcggcgcacttttcgtcgcggggcttag

SEQ ID NO: 203585 - DNA, 780 bp, Klebsiella oxytoca
atgaaaatcacccatgtgcgtaatgctacccagcttattgaatatgcgggtaaaaagtttctcattgacccgatgctttcagccaagggcgcctgggcgggctttgccggtaccgcgcgcagcgagttgcgtaacccgctggtggaactgcctttttccatcgaaacgatcgttgacgtggatgccgttatcgtcactcacactcatcaggatcactgggacgaggcggcgatcgccgcgatccccaaaaccctgccggtttatgtccagcatgacgccgacgctcagctgctgcgcggccagggctttcgcgatattcgtctgctctctgaggacagcgcgtttgctgacgttgcgctggtgaaaaccacctcgggccagcacggcagcgaccgcacctatgcggtgccggcaatggccgagcgcctgggcgaagcctgcggcgtggtgctgcgccatccgcaggagaaaaccctgtggctggtgggggacactatctggcgcaatgaagtggaagccgacatgctcaggctgcgccctgacgtggtggtgctgaatgcggggtatgcgcacgtcatcggttttgggccgatcatcatgggcaaagaggatgtgctgaaggcgcacttcgtcctgccggaagccaaaatcgtcgccagccatatggaagcggtgaaccactgtctgctgagccgcgatgagctgcgccagtacgtggctgacaatcagattgccgaagcggtcagcatcccgcaggatggggaaagcatggtcttttag

SEQ ID NO: 203586 - DNA, 555 bp, Klebsiella oxytoca
atgaaaaagaaactcacctccgccgatatgcacgatgtcgaggttctggcagacaccccatggttcagcatgcgcaaggtcggaattgatatggcccccggcgatcggcgggattttttctccattcactatcctcgcccggcggtgggaattgtggcgatgcaggatgacaaagtgctgctgattcgccactaccgttacctgatcgatcgggtggtgtgggcgattccttccggcggcgtcgatgaaggcgaagacccgcgcgaggcggccctgcgcgagctgcgggaagagaccggctggcaggcgcagcgcgccgacgaaattatccgctataacccctcctacggcagcagcgaccagctgtttattacctggctggcccacgatttgacctgggtgggaatggatgaagatcaggacgaagtgatggaaacggactggtttaccctcgaagagataggccagctgatcgcccgcggcgagatgccggacgggctatcgctggtgccgctgctgcatctgatggcgcagcggcgcaccggtttagcgtag

SEQ ID NO: 203587 - DNA, 861 bp, Klebsiella oxytoca
atgacccggcaacgccaggctgatttgctgctcatagccgcgacggttatcgccgcctgcggatggattttttcccgggaagcgattgccggcatgccggttttcgctttcctcggcctgcgctttttcttcgccgcgctgctgctgctgcctttctgccgcggccttcgcgtcgagaggcagcagtggccgcgcatgattatcagcggcctgtggtttgcgctaaacctgtgcctgtggatctactcggtatcaacgaccccatcgctgggcgaaggggcgtttatcatgagcctgtcgatgctgttcgtgccgcttaccgcatgggtgatgatgaaggcgcggccggcgcgggcctactgggagtgcctgccgattgcggttgtcggtctcggcttactcagcctgcatatgccgattgcgtttcaccccagccagggctggttcctgttgaccgcgctggtgcaatcgatctggttttgctacaccagcaaaagcgcccgcgaggtgccgctgatcccgctgaccaccgtgcagctcggcattaccggcattgtcggactggggatctccgccgccgttgaaagctggactcagccgtttaccctgccgaccttcggctggctgctcgccagcatcgttatcgccaccagcctgcgcttcggcctgcaaatgaaggggcagaagtacgcggcggtcgccagcgcggcgattattatggtgctggaaccgctgctgacggtgattgccgccgcgctgtggtacggcgaacagctaccgctgcagaaaattatcggcggcctgctgatcctcgtcgctcagctgtggttccgctggcggatgctgaagccgctacgctaa

SEQ ID NO: 203588 - DNA, 819 bp, Klebsiella oxytoca
gtgataacaatgaaattgcgtttacggacagccgccgccgtgatgctggcgggcctgctgctggcgggctgcgaccagaagggcagcgatgcgaaacacattaaagtcggcgtcattaacggcgcggaacaggatgtggcggaagtggcgaagaaagtggctaaagagaaatatggcctcgacgtggagctggtgggctttagcggctcgctgctgccgaatgagtccaccaacgccggcgatctggacgccaacgtctttcagcatcgcccgttcctcgaacaggataataaagcccacaactatcgcctggtggcggtgggcaacaccttcgtcttcccgatggcgggctactcgcgcaaaataaaatccgtcgccgagctgaaagacggcgcgaccatcgccattccgaacgacccgaccaacctgggccgcgcgctgcttctgctccagcaggaaaagctgattaccctcaaagcggggaccggcctgctgccgacggcggttgatatcattgacaacccgcatcacctgaaaattatggagctggaaggagcacagctgccgcgcgtcatcgacgacccgaaggtcgacgtggcgatcatcagcactacctacctgcagcagaccggcctctccccggtacgcgacggcatctttattgaagataaaaactcgccctatgtgaacatcatcgtgacccgcgaagacaacaaagacgcggaaaacgtcaaagcgtttatccactcctaccagtcgcctgaggtggcgaaggcggcggagacgatcttcaacggcggcgcggtgcccggctggtaa

SEQ ID NO: 203589 - DNA, 471 bp, Klebsiella oxytoca
atgaccgaacaacgtccgcctctgccgccgttcacccgcgagagcgccgcgcaaaaagtccgtgccgctgaagatggctggaacagccgcgatgccgctaaggtcgcgctggcctataccgtcgagagcgaatggcgtaaccgcagcgaatttgttcacggcagaacgcagattatcgacttcctgcagcgcaaatggcgtaaagagcaggagtaccggttgattaaggaactgtgggcgtggagcgataaccgtattgcggtacgctttgcctatgagtggcacgacgacagcggcaactggtttcgttcatacggcaacgagaactgggaattcgacgagcacggactgatgcagacgcgctacgcctgcatcaacgatctgcccattacggagagcgagcgtctgtttcactggccccagggccgtcgcccggacgatcacccggggctgagtgagctggggctgtaa

SEQ ID NO: 203590 - DNA, 621 bp, Klebsiella oxytoca
atgccagcagaatttcttgatatcgccatgacgccggacgtgatggatgtccagcatgaaatgggcagcgatgagctgtggcagtcgccgcatcgccagcgccggggtgagcgcttcggcgccagcgaggaggcgatgattgccacccgcgacagcttctatctggccaccctttcgcaaaccggctggccctatattcagcatcgcggcggcccggtgggctttctgcatctgctggatgaaaccacccttgggatggcggatttttccggtaatcgccagtacatcaccaccggcaacctgcgcggcagcgatcgggcctgtctgtttttgatggattacccgcgccgtgccaggctgaaaatctacgccaccgtagaggttgtagcggtggatgccgacccgcagctgctggcgcaggtcgcgccggagaactatcgggcccggattgagcgcatctaccgtttccacttacaggcttttgactggaactgcccgcagcatattaccccccgctacaccgcccggcaggtggcggagtatagccagacgctgcaacagcgtattgacgaactggagcgggaaaatcagcgcctgcagcagcttatatacccaaaataa

SEQ ID NO: 203591 - DNA, 915 bp, Klebsiella oxytoca
atggaccgactcagcgcgatggcgctgctggtgaaagtggccgaactcggcagcatgtcggctgcggcgcgggcgctgaatatgcccctgaccaccgttagccgccagattggcgaactggaaaataccctcggcgtgcgcctgatgatccgcaccacccgcaagctgacgctgaccgatgccggcgtcgattatgtcgccgccgcgcggcgcattctcgaagaggtggagaacgcagagcgccaggcggcgggcgaatatcaggagccaaaaggcgaactggttctctcggcgccgaccatgtttggccgtcagcatgttttgccggtggtgacggattttctcgcccgctacccgcagattcgcgtccgtttactgcttagcgaccgcaacgccgatctggtgggcgatcatattgatttagcggtgcgtatcggtacgctgccggacagcgggatggtggccacccggctgggcgagatgcgcattgtgacctgcgcgcacccggctttgctggaaaaacacggcatacccgaacgcccgcgcgagctggccgcgctaccgatcattcgtattgaatcgccaatgccttatcgcggctggcgctttaatgccgaagaggcggaggaccggctggtggcgctgcagccggtgctgtcgctgaccacgccggagagcgccgccgacgccgcccgcctgggggccggcgtggcgcgcctgctgcattaccaggcgatcgacggcctggcccgctgcgagctgaagctgctcctgcaggcgatggaaccagagcctgcaccggtgcacctgctgtacacctcgcgggatctggctccgcttaagctgcgtaaatttatcgatttcgccgcgccggctctccgtcgggcgctgcggcgtattgccgccgccgtctag

SEQ ID NO: 203592 - DNA, 1497 bp, Klebsiella oxytoca
atgacatctgaaatcgccagccaaccggcggtgccctcgatccgcctgctcttcagcgccctgctgctggtgatgctgctctcggcgctggatcagactatcgtttccaccgcgctgccgaccatcgtcggcgagctcggcgggctggataagctctcctgggtggtcaccgcctacatcctgagttccaccatcgcggtgccgctgtacggcaaattcggcgatctgttcgggcgcaaaatcgttctgcaggtggcgattgtgctgtttcttgccggttccgccctctgcgggctggcgcaaaatatgacccagctggtgctgatgcgcggtctgcaggggctgggtggcggcggcctgatggtgatcagcatggcggcggtggctgacgtcatcccgccggcgaatcgcggccgctatcagggcctgttcggcggcgtctttggcctggcgacggtaatcgggccgttaatcggcggcttcctggtgcagcacgcctcctggcgctggattttttacatcaacctaccgctggggctgtttgcgctgctggtgatcggcgcggtttttcacagcagcaacaagcgcagccagcaccagatcgactggctgggggcgatttacctcagcatgacgctgctgtgcatcatcctgtttacctccgagggcggcagcgtccgcgcatggagcgacccgcagctctggtgcatcctggcgtttggcctggtcgggatcgtcggctttattcatgaagagcggctggccagcgagccgattattccgctctccttattccgcaaccgcagctttttgctgtgcagcctgattggctttgttatcggcatggcgctgttcggctcggtgaccttcctgccgctctatttgcaggtggtcaaagaggcgacgccgaccgaggcgggcctgcagctgatcccgctgatgggcggcctgctgctaacctcgatcgtcagcgggcgcattatcagccgcaccggcaagtatcgcgtatttccgattatcggcaccctgctgggggtcgtcggcatggtgctgctgacgcgcatcaccatccactccgcgatgtggcagctgtacctgtttaccggcgtgctgggggcgggcctggggctggtgatgcaggtgctggtgctggcggtacagaacgcgatgcccgcgcagatgtacggcgtggcgacctccggggtcacgctgtttcgatcgattggcggttccatcggcgtggcgctgtttggggcggtgtttactcacgtgctgcaaagcaatctccagcgcctgctgccggaaggcgcgcagctgccgagggcgctaaacccggcggcggtgcagaacctgccggcggagatccgcctcgattatctggacgccttcgggtccgctatccatgcggcgtttctgatggcggcctgcattatggcggtggcgtttgccctctcctggctactgaaagaggcgccgctgaaaaccggcacacgctag

SEQ ID NO: 203593 - DNA, 648 bp, Klebsiella oxytoca
atgtcagcacaaaaagacaacgaagccccgcgtcgtcccggtcgcccgcgcgggcagaaatccggctccgccaaccgcgaacagctgatggatattgctctggcgctgtttgcgcgccacgggatcgcccgcatttcgctgaacgccatcgccaaagaggcgggggtaacgcccgcgatgctgcactactacttcagctcgcgcgaggcgctggtggaaaagctggtcgaagagcgctttatgccgctacgcagcgagatcggacaaatttttgtcgcgcacggcgacgatccggtcaccgcttttacgctgcttattgaaaccctggcggccatggcggagaaaaacgcgtggttcgcgccgctgtggatgcaggagatcatcggcgagatgccggtgctgcgccagcatatgcacgcgcgttttggcgatgagaagtaccacaagatgctggagacggtgcgccgctggcagcgggagggtaagcttaatccggcgctctccccggagctgctgtttaccaccctgataagcctggtgctggtgccgttttcccgcacccacaccgatccgcggttgcaatcggtagaccggaagatgattgtcagccacgccctggccctgacaggccgggggatcggcggctaa

SEQ ID NO: 203594 - DNA, 417 bp, Klebsiella oxytoca
atgacattaataataacagagaacattaatcccgccgatcaagaagagctgctggcggggctacgggaatacaatctgcgctttctggacccggctcagttcggcgagctgggcgtttattcacgcgatgacgctggcgcgatgcgtggcggattgatcggtaaacgcaagggcagctggctgtgtattgaatatctgtgggtcagcgaagcctcgcgcggcagcggccttggcagcgagctgatgcatgaagcggaaaaccaggcgcgggcgcgcggctgcagccacgtgctggtggatacgttcagctttcaggcgctgccgttttatcagaagctgggctatcagctgcagatgtcgctgccgggttttccgcacgtgggcatgcagcgccactatttatcgaaagcattgtaa

SEQ ID NO: 203595 - DNA, 1125 bp, Klebsiella oxytoca
atgaaatatactttagcccccatcgcagcagcattatttctccttagcgggtgcgataatgcgcaaaacgcttccccgcagcagatgacgcaggaagtgggtgtcgttaccctgcacggccagcctgtcccggtggtgagcagcctgaccggacgcaccaccgcctcgcttagcgccgaagtgcgcccgcaggtcggcgggatcgtgcaaaaacgcctgtttaccgagggcgatatggtcaaagccggacaggcgctgtaccaaatcgacccatcaagctatcgcgcgacgtttaacgaagccgccgcatcgctgaaacaggcccaggcgctggtcatcgccgattgccaaaaagcccagcgctacgcggtgctggtcaaagataacggcgtctcccgtcaggacgccgatgacgcgatagcgacctgtaaccaggataaggccagcgtcgagtcgaaaaaagcggcgctggaaagcgcgcgcatcaacctgaactggaccaccgtgaccgcaccgattgccgggcgcatcgggatctcttccgtcacgccgggcgcgctggtgtccgccgatcaggataccgcactggcgacgatccgcggcctggatacgatgtacgtcgatctcacccgatccagcgtcgatctgctgcgcctgcgtaagcaaagcctggcgagcaacagcgatacccttaacgtcaccctgactcttgaagatggcagcacctacagcgaaaaaggtcgcctggcgctgaccgaagtggcggtggatgaatcgaccggctcggtcacgctgcgcgcggtctttcccaatccgcagcacgtgctgctgccggggatgttcgttcgcgcccgtatagacgaaggcatcatgaacgatgcgatcctcgccccgcagcagggcatcacccgcgatgccaaaggcgatgccaccgcgctggtggttgacgctaataacaaggttgaacagcgcagcgtggaaaccggcgaaacctacggcgacaaatggcttatcgtcaacggcctgaagagcggcgacaggttgattgtcgaaggaaccggcaaagtggcgccgggccagcaggtcaaagccgccgaagtcaaaaatgacggaggcaacgcctga

SEQ ID NO: 203596 - DNA, 3108 bp, Klebsiella oxytoca
atgttctcccgtttcttcgtgcgacgcccggtcttcgcctgggttatcgccattctgattatgctcgccgggattctggctatccgcaccctgccggtcgcccagtatcctgacgtcgccccgccggcgataaaaatctccgccacctacaccggggcctctgcggaaaccctggaaaacagcgtcacccaggttattgagcagcagctcaccggactggacaacctgctctactttacatccaccagcagctccgacggctcggtcagcattaccgtcacctttgagcagggtaccgatccggataccgcccaggttcaggtacagaacaaagtgcagcaggcggaatctcgtctgccgagcgaagttcagcagtccggcgtaacggtggagaaatcgcagagcagcttcctgctgatcctcgcggtgtatgacaaaaacaacaaagccaccagctccgacatctccgactggctggtcagcaacatgcaggatccgatggcgcgtattgaaggcgtcggcagcctgcaggtgttcggcgccgaatacgccatgcgcatctggatggacccgaccaaactggcctcctattcgctgatgccatccgatgtgcaatcggccattgaggcgcagaacgtgcaggtgtccgccggtaaaatcggcgcgctacccgcctccaacgcgcagcagctgaccgccaccgtgcgtgcccagtcgcggctgcaaaccgtcgcccagttcaaagagattatcgtcaagagcaagagcgacggttcggtggtgcgcctgagcgacgtcgcccgcgttgagatgggcagcgaagattacaccgcctccgccaatctcaacggccatccggctgccgggatcgcggtgatgatggcgccgggcgctaacgccctgaataccgcgacgctggtgaaaaacaagattgccgagttccagcgtcagatgccgcagggttacgatatcgcctatccgaaagacagcaccgaattcatcaaaatctcggtggaggatgtgattcagacgctgttcgaggcgattatcctcgtagtctgcgtgatgtatctgttcctgcaaaacttccgcgccacgctgatcccggcggtggcggttccggtcgtgctgctgggcaccttcggcgtgctggcgctgttcggctactccatcaacaccctgacgctgtttgcgatggtgctggcgataggcctgctggtggatgacgccatcgtggtggtggaaaacgtcgagcgtatcatgcgcgacgaggggctgcccgcccgcgaagccaccgaaaaatcgatgggcgaaatctccggcgcgctgatcgccattgccctggtgctctcggcagtgttcctgccgatggccttcttcggcggctcaaccggggtgatttatcgccagttctcggtgaccattatctcggcgatgatgctctccgtggtggtcgccttaaccttaaccccggcgctgtgcggcgcgctgctgagccattctaaaccgcataccaaaggcttcttcggcgcctttaaccgcctgtggggacgcaccgagcagggctatcagcatcgtgttgttggcggcctgcgccgctcggcgatgatgatgggcgcttttgtcctgatttgcggcggcatggcgctggcgatgtggaaactgccgggcagcttcctgccgacggaggatcagggcgaaatcatggtccagtacacgctgcccgccggggcgacggcggtacgtaccgccgaggttcgccgccaggtcaccgactggttcctgacgaaagagaaagccaataccgacgtgatctttaccgtcgacggctttagctttagcggcagcggacaaaacgccgggatggccttcgtatcgctgaaaaactggtccgaacgtaaaggcgaagaaaataccgctcaggccatcgccctgcgcgccaccaaagagctcggcggcattcgcgacgccaccctgttcgccatgaccccgccgtcggtagatggcctggggcagagcaacggcttcaccttcgaactgttggccagcggcggtaccgatcgcgatagcctgatgaaaatgcgcagccagctgctggccgcggcgaatcaaagtaccgagctgcaatcggtgcgcgccaacgatctgccgcaaatgccgcagctgcaggtggatatcgataataacaaagccgtgtcgctcgggctgtcgttaagcgatgtcaccgataccctttccagcgcctggggggggacctacgttaacgactttatcgatcgcggtcgcgtgaagaaggtctatatccagggcgaaagcgacgcccgcgccgtgccgtccgacctcggtaaatggtttgtacgcggcagcgacgacagcatgacgccgttctccgccttcgccaccacccgctggcaatacggtccggaaagcctggtgcgctacaacggttccgccgcctttgaaatccagggtgagaacgccagcggcttcagctccggcgcggcaatggacaagatggaggccttagccaataacctgcccgccggtaccacctgggcgtggagcggcatgtcgctgcaggaaaaactcgccagcggccaggcgatgagcctctacgctatctcgattctggtggtcttcctgtgcctcgcggcgctgtatgagagctggtcggtaccgttctcggtgatcatggtgatcccgcttgggctgctcggcgcggcgctggcggcgtggatgcgcggtctgagcaatgacgtttacttccaggtggcgctattaaccaccatcggcctgtcgtcgaagaacgccattctgatcgtcgaattcgctgaatcggcggtggaagagggctactccctgtcgcgtgccgccatgcgcgccgcgcagacccgtctacgccctattgtgatgacctcgctggcgtttatagccggggtgctgccgctggcgatcgccaccggagccggggccaacagccgcgtggcgatcggtaccgggattatcggcggcaccctgacggcgacgctgctggcggtgttcttcgtgccgctgttctttgtgctggtgaaacgtttcttcacccgccatcgttcttctcaggagtaa

SEQ ID NO: 203597 - DNA, 1365 bp, Klebsiella oxytoca
atgtttcgttttaccttagtttttgttgcgctcctgacggcgggctgcgtctctctcgacccgcactatgaacgtccggccgcgcctgtcccggcgaccctgccgggtagccacggcgaggcaaccgcggtagtcagcgactggcagcaggtagtgaatgacgctcgcctcaaaaaagtggtgaacatcgccttgaccagcaaccgcgacgtgcagaaagcgctggccgatatcgaagccgcgcgcgcccagtttggcgaaacccgcgcctcgctgtttccgaccctcgacgccgagctgagccatacccgcagtaaaacggtggccagcggcctcacctcgtcagcggaagccgacggcgcggtttccagcttcgagctggatctgtttggcaagaaccaaagcctgacgcgcgcagcgcgggaaacctggcttgccagcgaattcaccgcccagaatacgcgtctgacgatgatcgccgatctgaccaccgcgtggataacgctcgccgcggacaacagcaatctggcgctggcgcaggacaccatggccagcgcggagaactcgcgccgcatcgtcacccgccagatggaagtcggcaccgcctcggcaggcgacctgagcgatgccgaaagcatttatcagcaggcgcgcgccagcgtcgccagctaccgcacgctggtggcgcaggataaaaacgcgctcaacctgctggccggagaaaccgtgccggatagcctgctgcccggcacgctggaaagccttggcgatcggagtatcaccctggtgccggcgggcgtctcttcatcggtactactgcgccgcccggatatccaggaagcggagcataatctgaagagcgctaacgccgatatcggcgcggcgcgggccaatttcttcccgtccatctcgctgaccgccagcgccggggtcggcagcgactcgctctcgtcgctgttcagccacggcatgcaggtatggtcattcgcgccgtccatcagcctgccgctgtttaccggcggcagcaacctggcgcagctgcgctatgctgaagcggagaaaaaggggctgatcgccacctatgagaagacgattcagagcgcctttaaggatgtcgccgacgcgctggcgcgccgggaaacgctcagcgaacagctggacgcgcagaataaatacgtcgcggcggagcagaaatcgttgaatatcgcgatgaagagctatcaggccggggtcggagattatctgtcggtgctgaccgcccagcgaacgctgtggtcggcgcaggccacgcttatctccctccagcaaacggatctggaaaaccgcattaccctctggcagtcgctgggaggcggcgccagctaa

SEQ ID NO: 203598 - DNA, 1167 bp, Klebsiella oxytoca
atgtcccgaatttccctctcctgggtcgtggttctcggtttgctcagcgccattgggccgctgtgtaccgacttctatctgcccgcgctgccggaaatcacccagcagctcagcgccaccggcacgcagacccagctttcgctgaccgcggcgctgattggcctcggccttggacagctgttttttggcccgctgagcgaccgcattggccgtaaaaagccgctggcgctctccctgctgctgtttatcttctcctcggcgatgtgcgcgataacctacgatatccatatgctgatcgcctggcgctttctgcagggcttcgccggcgcgggcggctcggtgctgtcgcgctccatcgcccgcgacaggtatcagggtacgctgctgacccagtttttcgccctgctgatgaccgttaacggcattgcgccggtgctttcaccggtactcggcggctggatcatcaccgccttcgactggcgtatcctgttctgggcgatggcggcgatcggcgttgtcttgctgctgctcagcctgacggtgctgcacgaaacgctgccggccaaaagcaccgcctcggctacgcggcagcaggctgatgcgccggtgctgaaaaaccgccgctttatgcgctactgcctgattcaggcctttatgatggccgggctgttttcatatatcggctcgtcttcgttcgttatccagagcgaatatgccatgagcgcgatgcagttcagcctgctgttcggccttaacggtatcgggctgattatcgcggcgctgatcttttcccgcctggcgcgccgcttcagcgccgaagccctgctgcgcggcggccagctgctggcggtggcgtttgccgctatcaccctgctcttcgcctggctaccgcagccgacgctggcgctggtcggcctgttctttaccgtttccatgatgagcggtatcagtaccgttgccggctcggaagcgatgaacgccattcacgcccgccagtccggcaccgcttccgccctgatgggcacgctgatgtttgtgttcggcggtattgccgcgccgctggccggtctcggcggcgaaacgatgctcaaaatgagcttcgcgatgaccctttgctatctggccgcgctgctgattggcctgaaaaagccgcgccccatcgcataa

SEQ ID NO: 203599 - DNA, 903 bp, Klebsiella oxytoca
atgagtatcgacctgagcaaactgctgaccgagcgccgcaacgccaatagcgccaacattgatatcctcaccaccgaagagatgctgacggtgattaaccaggaagaccagcaggtggctcacgccatcaccccctatctgccgcaaattgcccaggtggtggataaggtcgcggcggcgctgcaggcgggtggtcgactgatttacattggcgcgggcacttccgggcgtctggggatccttgatgccagcgagtgtccgccgaccttcggcacccgcccggagcaggtggtgggcattatcgcgggcggccataaagccatactgagcgccgtagagaacgtcgaagacaacaaagcgcaaggggcgatggacctgcagaacctgaactttagcagccgcgacgtgctggtcggcctggccgccagcggacgcacgccgtacgtcatcggcgcgatggagtatgcccacagccagaacgcttttgtcgccatcgtcagctgtaacccgcacggcgaaatggcccagctggcggacgtcgccattacgccggtcgtgggtccggaagtggtgaccggctcaacgcgcctgaaggcgggcaccgcgcagaagctggtgctgaatatgatttctaccggggcgatgatccgcatcggcaaggtctacagcaacctgatggtggacgtggaagcgaccaacgccaagcttatcgagcgccaggtgtccatcgtcatggaagcgaccgaatgcgatcgcgcaaccgcccagagcgcgctggaagcctgcgatcgccactgcaaaacggcgattgtgatggtgctggctgatttaagcgccgcggatgcccaggcgctgctggcaaaaaataacggctatatccgcaaggcgctgagccactcctga

SEQ ID NO: 203600 - DNA, 1434 bp, Klebsiella oxytoca
atggcaaaaataaataaagagatgatagcgcggatcctgcagcacgttggcggagccgggaacgtcgcgcaggcgggcaactgtatgacccggctgcgcctgaccctgcgcgatgaatcacgggccgatagcgccgccatccgccagattgatggcgtaatgggggtgatcgttagcgatgaacagttccaggtcgtccttgggcccggcaaggcgcaaagcgcggcggaaatgatgaatgcgttactggaagaagccccggcggatgcgccatcgctggccgatgtcgccgccgaaaagaaacaggcgctgaagagcaagcaaaccagcggtattcaaaaattcctcgcgaaattcgccaccatcttcacaccgctcattcccggctttatcgccgtcggcctgctgttggggttcgcgaccctggcggagcagatatttgtcctcgaaaacgcgcatccgaacgcgacattgatggcgctgatcggctacatgaaggtgttcagcaaagggatgtttaccttcctgagcatcctgatcggctataacgcccagaaagccttcggcggctccggggtcaacggggccatcatcgctgcgctgtttgttctcggctataacccggaagccaccagcggcttctattccgggatttccaccttcttcggccacggtatcgacccgcgcggcaatattatcggcgtgcttatcgccgcgattatcggcgcgtgggtggaacgacaggtacgccgcatcatgcctgccaacctcgatatgatcctcacctcggcggtgacgctgctgatcatgggcgcgatcacctttaccgtcattatgcctatcggcggctggctgttcaccgggatgtcatggctgtttctgcaccttaacggtaacccgttcggctctgcggtactggccggcctgttcctgctggcggtgatgttcggcgtccatcagggcttcgtgccggtctatttcgcgctggtggatgcacaggggtttaactcgctgtttccgattctggccatggccggtgccggacaggttggtgcggcgctggcgctgttctggcgggcgaagcacggttctctgctgcgcacgcagattaaaggggcgattattcccggctttctcggcatcggcgaaccgctgatttacggcgtgacgctaccgcgcatgaagccctttatcaccgcctgcctcggcggcgcctgcggcggttttttcctcgggctcatcgcctggctggggctaccggtcggcctgaatacggtatttggcccgtcggggctggtggcgctgccgctgatgacctccggcagcggcatctacgccggaatggcggtgtatgccgccgggctggcggtctcttacctgtgcggcttcgccctgacctggctgttcggcagtaaaaacgttgatttgagctaa

SEQ ID NO: 203601 - DNA, 237 bp, Klebsiella oxytoca
atgccagccgcaaaacgcaataagcagaacgtcagcgtgacactggacccaggcctggtcaaacaggctcgtgaggtcggcatcaatctgtctctaacgttgactaacgctctaaaaagcgaaatccacagcctcgaaatagcccgctggcaaaaagaaaatgcccaggcaatcgactacctcaataatttaactgaggaaaatggacttctctctgatgaatacaggacgttctaa

SEQ ID NO: 203602 - DNA, 309 bp, Klebsiella oxytoca
atgcagtattacgtttataagaatacaggtcgaattgctgcgtatccttacctccttgatgtacagagtgacattatcggcaagcgcaatactcgggtcgtgattccactgtttccactgaaaaactataaaggtccacgcgccgatcgtttaacaccgcttgtcaccgtagaaggggaagaatacgtcgtgatgactcacgaactcgccagtatcccacatcgtgttctgggtgaagaagtttgtaatctgaatcaccagcgcgaagtcgttaaagcttcaatggattttcttttcgacgggatctaa

SEQ ID NO: 203603 - DNA, 903 bp, Klebsiella oxytoca
atgggctccagcaaaaaagggatgctgaacgtactgatcgccgccgtgctgtggggcagttcgggcgtctgcgcgcaatatattatgcagcaaagccagatgtcatcgccgtttctgaccatgacgcgcctgctgttcgccggcctgatccttctgatgctctcgttcttccacggcgataagattttccgcgtcctgcaaaaccgcaaagacgccgccagcctgctgatcttttcgctgttcggcgcgctcaccgtgcagtacacctttctgatgactatcgagcaatccaacgccgccaccgcgacggtgctgcagtttctgtcgccgacgattatcgtcgcctggtttgccatcgcccgcaaaacgcgccccagcccgctggtgctcgcggccatcgccacctcgctggcgggcactttcctgctggtgacccacggcaacccgacgacgctgtcgatttcccccacggcgctgttctgggggattgcttcggcgtttgccgccgctttttatacgacttatccttcgacgctgattgcccgctacggcacgctgccgattgtcggctggagcatgctgctcggcggcgccatgctgctgccgttctacgccggacagggcaaccattttgtggtgaccggcggcctgctgctggcctttttctacctggtggtaatcggcacctcgctgaccttcagcctctatctgaacggcgcgcagaagattggcggcgcgaaggcggggatcctcagctgcgcggagccgctgagtagcgccctgctctccctgctgctgctcggcatcacttttactctcccggactggctgggcacgctgctgattctctcatcggtggtgctgatcgccatggattcgcggcggcgggttaaaacggcctga

SEQ ID NO: 203604 - DNA, 258 bp, Klebsiella oxytoca
atgaagattgtagagaggctaccgctggaagagataccacaggagttacaacctgagtatttactgggatatctgttggaattatacctggagttttatgaaggatttcaggaaggtaaacgagaagaggcgttgcgtattgctcgttcatgtctggaacagggatttgagcgcgagctggtgcaggtggtttgtgagctgtcggatgacgacctgaagatgctgcaaacgccggtcgcagcctctcctggccgataa

SEQ ID NO: 203605 - DNA, 966 bp, Klebsiella oxytoca; identical to SEQ ID NO: 180360

SEQ ID NO: 203606 - DNA, 294 bp, Klebsiella oxytoca
atgaagagaatgagttttgcgctttcgctggcagccagcctgatgttctccagcgtggcgacagccgcaccgctctccggactgaagtttgaacagcaaaagcagcagatagtgaaagatgtgaggaaaaattgccctgccagcagcgcgctggatgatacgcagtttgctaaccgcgtgctggaatcagcggaaaataagaccgccgtacaaagcgcgacgcgggcgctggataaaaacaacagcgccgcttatcagaaggccattagcggcattcagtgccctacgccctag

SEQ ID NO: 203607 - DNA, 942 bp, Klebsiella oxytoca
atgtctacaatcaacgatgtatcacggttagctggggtatctaaagccacagtctctcgggtgttgagtggttcgcgcggcgtaaaggaagccagccgacaggcggtattgcaggcggcggaagcgcttaactaccggccgaatatgatcgcgcaatctttgctgagtcagaccaccggctgcatcggcgtcatttgcgcccaggacaacattaatcaaaccaccagctatctctacgcgctggaaaaacagctcagccagcaccagatgcacctgctgctgcgttttgccaacagccgcggcagagtgctccattcgctggaagagttgacctgcggcctctgcgataatgtgttaatcatcggcgcgcggtttccgctcaatatcgaccggcccgacgtagtgctgattgactgcctggaaagcgacgcaacgaatagcattcagtttgaccacgcctttgcggcggaaacggcctgcaactatctgataagccaggggcggcggcagattgcgctgattcatcctcaggccagcggatttgctgaccaggttctgctgggctataagcacgcgctggaaaagaattttctgccgttcaatcgcaacctggtttttctcgacagccattcgccgtccgtggcggttcaggaactggtgaacaacgcaaccaccctgaattttaatgcgttattggttgccaacgagcagcaggcgcagctggtggtgccgcagctccaggcgtttaatcgcgcggtaccggaaaaagtcatggtgttcagcctggcgggctcgttacagctgcccggtattccgacgattccggcgattgaatattccatggacgcgatggccagccagatagtcaactggctgaccgagaagacgcaaatgctcgccagcagcccgctgcgcggagatttgatcattccgaaccgctaa

SEQ ID NO: 203608 - DNA, 312 bp, Klebsiella oxytoca
atgtacaagattatgctgtgctgctctgccggaatgtccaccagcctgttggtcagaaagatggttgatgccgcgaaggaacgtaacctgccggtgcagattgacgcctacggagtttccgaatttgacatgcagtttccgcaataccaggtggtgcttcttgggccacaggtgaaatacatgctgaaaaacttagctgagaaagccgctcccctgaatattccggtccagccgattaacgccatggattacggaatgcagcggggagacaacgtcctggattatgccctgtcgctgattgaagcgcattaa

SEQ ID NO: 203609 - DNA, 1326 bp, Klebsiella oxytoca
atgagttctctgtatcagtccatgattgccgcgatcgagcaatcaattaccccgctggcaggacgccttgggcagcagaaatacgttatcgcgattcgcgatggtttcactgccgcattgccgtttatgatcatcggctcattcatgctggtatttatctttccgcctttttccccggataccactaacggtttcgcccgcggctggctggacttctcccagcagtatcgcgaacagctgatgctgccgtttaacctcagcatgggcgtgatgacgttctttatttcggtggggatcggcgccagcctgggacgccagttccagctcgacccggtgatgtccggtctgctggcgtttatggctttcttactggttgccgcgccgtacgccgatggcaaaatctccacccagtacctctctggtcagggtatttttaccgccttgatcaccgccatctattccacccgcgtttacgcctggctaaagcagaacaacattacgattcgcctgccgaaagaagtgccgaccggcgttgcgcgttcgtttgaaatccttatcccggtgctggtggtgatcgcgaccctgcatccgctgaatctgtttatcgaagcgcagaccggtatgatcctgccgcaggcgattatgcatctgctggagcctctggtttccgcctctgactccctgccggcgattctgctttccgtcctgatgtgccagatcttctggttcgccgggatccacggctcgctgatcgtgaccggcattatgaaccccttctggatggccaacctgtcggcgaaccaggcagcgctggcggccggtgcggctctgccgcatgtctatctgcagggtttctgggaccactacctgctgattggcggcgtcggctccacgcttccgctggcgttcctgctgctgcgtagccgcgtcacccacctgcgcaccattggcaaaatgggtatcgtaccgagcttctttaatatcaatgaaccgattctgttcggcgcgccgattatcatgaacccgatgatgtttatcccgttcgtctttgtgccgatgattaacgccgttctggcttacggggcgacgcgcctcggctggctcagccaggtcgtttcgctgacgccgtggacgacgccggcgcctatcggcgcatcatgggctgcaaactggacgctaagcccggtggtgatgtgtttaatttgcatggtgatgtcggcggtaatctacctgcccttcctgcgcgcctatgaacgctcgttaatgaaaactgaagttgaaaaagcaaaagccgcagtgccggttgccgaaacggtcagccaataa

SEQ ID NO: 203610 - DNA, 303 bp, Klebsiella oxytoca
atgattgaattagaagatgcggtaatggaaattatcgttaatgcgggccagtcacgctcattatgttttgaagcgctccattgcgcccgcaacggtaatatagatgaagcgcgcttgcttctgaatgaagccgatggctatgcccgccgggcgcaccagatgcagacccggcttatcgagcaggacgctggcgaagcgcgccagccgatgacgttaattatggtccatgctcaggatcacttaatgaattcactgctcgcccgtgaattttcggaagagttaattcatttataccagcgttaa

SEQ ID NO: 203611 - DNA, 744 bp, Klebsiella oxytoca
ttgtctgataacaacgaattgtgttcatgtgatgctgaatgcacggatgtttttttctcaatagttaaagatcaggtgcagagcatgtattccctgcttcatcaggaaaaaagacttaccagcgaagaggaaaaaagacgagtaaaacaatggtttcgggatgccttgagtgatatgagggggtggagtcgagaatctaaaaccagaattgttaatgggaaggtgaatgattgttacgagcagtctcaccttaaggtcggtgttttcggaaaggatatagattgttacctggatgctgccggaatccttttctggtgggggcaatatgtctggaagagaggtggtctgggagaaggtattcgcgccatgctgcgagcaactcactgcctgggggcatggcagggagcccatcatcaactcgataagcaagaggagcatcggtcactcagtgaagtgcggagcgaggctggaaaaaaaggggcaaagtctaaaagggagttgtttgaaccagtaaaaaaagaatttctgtccctgattgaggagcatatgcccgccgaaggctggaaaagccgggcccaggcagttgagagtgttgagtctgagttacgtttattcatcgtcgggcagaaaataaagcctgaaccgattgatctggaacgtctgattggtgactggtgtcgggataaaacgtcaccagaatttggcaaacaagttaaggaacttttaaaaaggcccggaacttga

SEQ ID NO: 203612 - DNA, 1176 bp, Klebsiella oxytoca
gtggagaactttaaaatcgtagcggctttatgtcggcagattatcaaggatggggcctccgcaggtgctttgcagcagatggagcgcctttatgatgccctcagaaacgatcagcaggttgcagaagcaaagctgctcaggggactgattaacaaagccagtacgctcaataccctggagccagccagggttgagctctcccgtgtctcatttctcagaaagcaggagctcagggaaaacgttaaagtgcctgtggataaagaaagtggttctccccttgcgcagatcatttttccggaagagcttgccaatgccgagcttccggtcatgcccgacgagctggcatccgcggtcagtcagctgattgagcaatggaataatctggataaactggctcggtttggtgtgatgccatcgctgagctgcctgcttttcggactgccggggacgggtaaaaccatgctttccttttatatcgccaggatgctcggattaccgatcgtgctggccaagctggatgggcttgtttcgtctttactgggtaccagtgcaagaaatatcaataatctgtttgattttgctgctcagtatgactgcctgctgctgctggacgagtttgatgctgtggctaaagcccgcaatgacaaacatgaggtcggtgaaatcaagcgtatcgtcaacacattactgcagtgtattgatgccagatcgaagagtggtatgacgctggcaattaccaatcatgaagtattactggatcctgcagtctggcgaagatttgagatgcgtatactggtacctaagccaaattacgtagcaaggttgaagattattgaaaaatatattaatcccttgaactttacggcggaagagataaaatttttgaccgtactgacagatggatttaacggttcagatattcagttaatgttaaatcacttcaagagaatgtccgctattggtaacaccgatcagacttttattgaggctgttcggtcatttgcagtcattcatgcaggcagtgaagttaacgaattcatgcagttgttatcaaataatcaggacgcagcaataatgagcttgttgcataaaaagcatgagttcacgcaaaaagagattgcgctggtttttgacgttactcagtcaaaagtttccagaaatataaaagagtcctga

SEQ ID NO: 203613 - DNA, 2517 bp, Klebsiella oxytoca
atgaaaagaaataatccggttcaggttattttaaattcagagcagtataaaaatacgccacaacgcagagcgatgggtaacaatactgatttttacgctgatcgtgatgatgccttcaaaaagcacaaaagaaacctccttgatgaagtaggaaatgtcagaagccagctcaaccggtcaggtcacgatcttggccttgtgaaagttgagcttaatcctcaggcgctggcgaaatctcaccgtcccgttgactctctctttcccggaagtaaagcgcctgtggtgggcgccctgggaataggggagctgctcatacaggtgacggataaaaatctggttcatctttacaacaaaattgatagcgctgaagaatataccaaaaaggtatacgacgaaaaactgcgcaaaaatgtcaataagcccagcgaagcaaaaagcgagacgggggcaattgaccgtatcagtttttatggcagtgaagagaaaattgccttttctgcggaggatagcgctgcctggcatgccgataaggatgagggatttgccggctatcaggttgaactggttgatttcagacccgttgacgccaagctgtttaccgtgaccagcgatgccataagttcgatgaagcggtctctgagggagcagctcaagatgctgggggccggcgtgtatgcgacaaaaatgagccgttatccgtcatcatctgaagccatcatgatccagcttctcagaccggattcaggacacgattttaaggtggattttgacaagaggctggagctgaattttttaccttctgacgttgattattcctcgaaaaggcacaggctcctgctttctgttcttagcgcaagcccggtggtgaagcgtatttccctgccgccaaaaatttcccgggcgaacccgtcacactctccggtggagatggacttctcgctgcccgtccgaacggagggagaagattatccccgtgtgggcgtcattgatagtggtatccatcatgccgaactggcccagtggtgtgtggaagtatccgatggctttgaagctgaagactgcgatcccaaccatggctcacaggtggccagcctgctggtctgtgggggcatgctgaatccggagcttcctcaggtcgatgatgacggttgtctgctctatgatatctggatccccgttcacaacagtaaatccaatacgttcaccagctatttttccgacccgggtgactttttcgactggctggatattgaggttggtgatgcggtggcgaaggggtttcgcatctttaacttcagcctcaacttccgcgagtttgtccgcgatgattcctacagctttgccgccacgcaaatcgaccgcatttccaaaaaatacgatgtgctctttgtcatttcttccggaaacctgcgtcctatagatttccgggccccctgggcttcaagaccggctgcgctgcatttttctgacgttgacaggctttctcagcctgcggaggccgtcagcgccattaccgtgggagcggtaaatccgcctggatgtgacatcagcgttcacggtgcacctacggtctatacccgtcgcggacccggagtggccatgggcgtaaaaccggatgtgatccactatggcgggtactccctgaagacggggcgaaccggactggtttccattgacggcagcggagaactcgtggaagaggcgggaaccagtttctctgcgcccttggtatccaaaattcttgccagtctggaccaaaggacagcaggcaaactgtcacgcaattctcttgccgctatgctggttcatcactcagacctgacgccgccactcagagataagagcgtggatatctcttcagcaaggcgattcgccggattcggcatgccactgacctcccgcgatatgcttcacagtgacgacagcagtattacgctggtgctgagcggaagccttaagcgcagcgaagtactggagtttgatttcaactggccccgtagtctgaccacggaaggcggaaagtgccacggtaaagccacgctgaccattgcctacgatcccgtcattaatcagaactatggcgcagaatattgccgtgtcaacgttgacgctgtgcttcagcagtttaagcgggactctcagactgatgaatgggcgtaccggaaaaactgccagtcagtctgggacgttcgcctcggtaaagacgttaactatgagaaaagccaaattgacttcggcctgaagtggtggcccgtcaaaaaatatgcgtttgaaaccaaaactaaggctggcgtaggtgcttctgaccagcggcgactgaaaatcagttcaatcgagagaacgccaggagagtttccagacgaggaagttggttttaccgcactactcacaatcgaagatacacagaacagaacgaatgaccttttcaacgaggtcagacaggagctcagcgcttatggcattgagtttgaggatattaccgtgacacagcatctcaatattagggcaggccaataa

SEQ ID NO: 203614 - DNA, 213 bp, Klebsiella oxytoca
atgttaaacagaaatctagaggttctgacctcctacttcaatggcctgttggaatcagcgccgcagcatcgggaaaatgtgacaacaatccttgctcagattgaaatcatgaaatcgcggccagttttctctatggagccctcgattcttcttgcccgcaaggaaaccgatgaatgcacgatctgcaagaagcaggtgctgtgtgatgagtga

SEQ ID NO: 203615 - DNA, 732 bp, Klebsiella oxytoca
atgagtgagccaaaatgttattttgtggtttcgcgatatcccaatgattccgatcctaagggaattggcttttcccctgttggcaacgggaaggtgcctgaggaatatctggcgtttcgccttgatgtggatcgtgttgttcagaccgttaatgcactgtttgaaaaggataaagaaaagcggctagaagtctacgagcaggtatttcaggctgcgaaggtctgtttctcaggccgggaggctgactttgttccggcaagccaagcgctcagtgagctgaaaaagactatcctgagttcgtcatggaccttggtcagaaaccggataatgggggtatacggtctctatgccctgctactaatgattattctgggcgcagcacagtatttttataatgctgaactgaaaaacgtacccgccgtgctcatcgggacctgtataggttcctggctgtttgtttcaatcaaaaccaaaagcatcgtatttgatgaaatctacgagaacatcagccagcatcgcagtctgctaatgaggctgatttactgctgcacactgtcatcggctgttacattatgccttctggcaggattttttgagattaaactcggggaagtttcaacggcgctgatccccggtaacgccatcattgcggtggcggccgggattttttttgggctgggtgaatcttcacttgccacaaaattgtcaggcaatgttaaagacgctatttaa

SEQ ID NO: 203616 - DNA, 954 bp, Klebsiella oxytoca
atggacgataatgcgtacccgcagcggcatcactcccacgtgactgacagtatagctaaaagcatgctccggctctttattccgcctgaatggatactgcgggagctgtctgaaaatgactacggcattgattttcagcttgagttcaccagcccgggcaatcaggttacggggcagattgtggggattcagcttaaaggcacctccaccggaaatatgagcaatcagggcagccatagcgtttccgttaaacggagtacgctgaggctctggcgcagttatgaagcacctgtattaattgttctggttgataccgtatccggcatgatttactcgaaatcaattgagcgcgaaattcgacgggatccagacagatatattctaagcaactcagaatcactcagcttcaccttcacttcagccgacctattaaccaaggagaaagcgttcaatgactaccagaatggtaaaatcctgcgacgtatggaccacgatttgccttcagtgattcaggtccatcgtgactttatgaagcttttctggcgttacggacgtgacgagcatatgcccgtagacggcgatggcacattcgatttggaaaacttcggaaagcataagtacgagcgtcagttgcgtggtgtttattcgcggatgcaaaaattgagttattttcttggtctcagttggaatgtactcacggttgaggcagtcatccgtaatgaaaaatggaatagctacgatgggaatgaaatgatggagcatcattttacgtctattctggaccggctggacattcagtttcaggatatcctggcactcgtgcaaaagattgtagtggcttacaaacggttctgggagatggctgacccggagctggtaaattttgcgctgaatccctgccccatgctgtcaaagcttacttggaatgagcgccggaagtatctcggtgattaa

SEQ ID NO: 203617 - DNA, 480 bp, Klebsiella oxytoca
atgatgattaccgctggatcccgacttaatagcctgtgctatgagtttttcatcgaatttgcacgatatgagttctgcctcaaaatgacgggttttacgcagggggacggggcagcaaaggccaactgggatcgctatgcggctgaggttgaggacatcgtcgcttcgcccggaaccacagaactggccggcgctattgactacattctgagtcatcctcccaaaaagcagatcgtcagaaacggtgaactagcctgggatgaaagccccgtacagagcacaagtaaggcgcagctggtcctgctgttaatacgcagaatacgaaacaaccttttccacggcgggaagtttaatggtcgctggtttgagcctgagcgaagtgaacttctaatgcaccacgcgctgattattttaaaggcctgtgctatgaaccatgcgggtgtcagtgaggcttataactgcatggatgtatctctatag

SEQ ID NO: 203618 - DNA, 348 bp, Klebsiella oxytoca
atgcacttacacctgactgaatcctcagcccatcctggaatgcaggtcaccgccgaagccgagcgcgagtactggatgagtcgccagagagcggcagtgaaagcgcccgctgaaatcgacgttcacgccttccatgacgcgctgggcctgatgtacccgctcaactggtcaacgagtgagagcggtagctgggagacattcatgctgcaggagatggtctgcggtgacgtgacagagatttatgcccgctgcggagccagatatttccggctgcgggatgtgtgcaacctgagccatgcgcagattaaagcgcgcattaaggagggatttaacctgttccggaaatga

SEQ ID NO: 203619 - DNA, 231 bp, Klebsiella oxytoca
atgacgatttctattctttcaccttccactgaggctgtaaagccccgtcgtcaccagcgcattctgcgcgatgacatcgccgcgcgggagattgacccggcgctcaaagccttcggacggcatattgcccgcagtattcgcaaggggcgaggcgtccatatcccggcgatgaacaacaccgccttcgggcaggtactccgcacgcttgaacttaaacgcgcatgtaactga

SEQ ID NO: 203620 - DNA, 555 bp, Klebsiella oxytoca; identical to SEQ ID NO: 54522

SEQ ID NO: 203621 - DNA, 516 bp, Klebsiella oxytoca; identical to SEQ ID NO: 54523

SEQ ID NO: 203622 - DNA, 1278 bp, Klebsiella oxytoca
atgaagccgatgacgattatctccttaaaacaccaactttcgcaattcctctgtcctgaatttatcactcgaattgccagacgaacgggtttcttaaaacgtgagcgcaccattgagccgccatcgctcgttttaagcctgattgccgcactcagtaaaggcaattgccacgccattgccgatctccatcgacagttcaatggcatgagtctcagcgaacaacaatttgtcgcttataaaccgtttcataatcaattgcgtaaacctgaatttgcacaatggatgcaacgattaactcagtttgctatcgcccgctttgttcgtgaacttaaatcaaccttaccccgcaaacttgatggttttgacgatattctcttacaagatggcagttcttttcgcgttcatgatgggttagcggacgtcttccccagccggtttccgactcatcccgccgcgattgaatgccatatgacgttgtcgctcaaacatcaaatgccgaaaaccatgactatcactgccgatacagcctcagagcgggcgtatttgccgaaaactgaactgatgcgcaataagttactgctggcagatgccgggtatgtagacttcaattatttcagtcagttatctgagcatggcggttcattcatcgtcagaggcggtaaaaaccttaatccagtgataatcgaagcacgcaatggtcaaggtcggctattacccaaactagccggtctgaaactcaaagaaatcgaccgaaaaacgaatcgctcagaggttttggacttaaaaatcaagcgaggagcggatgaattccggttagtccgtcgttggtttgccgaagaaaaacgattttgtatctgggtcaccaatttacccgccacggagtggtcagccgatgagatcatgatgatttatcggtgtcgctggcaagttgagttactgtttaaagagttgaaatccgataccaactggcgacgttttgccacgagtcaacaggccataatggaaggcttagtttgggccagtttgctggcgctgatcatccgtaggtacatcgcgatgcaaagtctgtcatccgcttcagtctataaagcagggaaaaatgtcgatgtctggttattaccgatattggaagcttatattcatcaggcatggtcggaaataacagtccggctggaatgggctttgttatatatatcaaagaatgcgaaaaaagcacaacaaagaaaatcgaagaaaaccaggaccttagatggcatttttgaaagacttagttcttaa

SEQ ID NO: 203623 - DNA, 405 bp, Klebsiella oxytoca
atgagagcctactaccttgaaggagataatattgagtggcttattggtgtgtgcctgatccttttcgttatcggtgttgtcggtgcgctggccatgtttgttatccctgaaaagattaatctgcgagtctgcagggctaatgtatttttctttagtgcgcttatggcagtggtggcgtttgtcacacttatcgtctttaccagtcggtcattcacgatggatgagctggaagccgggagacactggaaaaatgactgtaaactccttgaggcaaacatgccgacaggcgcttttaccagccctgttaataaactggactgtgatggcatcatcattaatgtgccaggtgaacggtattatgcgtatatccatcagtgggaattataccaggcgaataaaaaatga

SEQ ID NO: 203624 - DNA, 393 bp, Klebsiella oxytoca; identical to SEQ ID NO: 139382

SEQ ID NO: 203625 - DNA, 1041 bp, Klebsiella oxytoca
atgacagacatcattgagcatgaagaagatagtgaaccaaagggtaaggctaaaggaggaaaagccagggctgcaagaatgactcctgaggaacgtaaagagtcagcaattaaggcagctcaggctaaaaaggaaaaagcggctctgcctacggtaattaacgaaggcaagctccggattggtgataccgatttggatgttgcggtgctggataatgggattcgcgttgtaacggtaacatccgtttttgaggccttaggcaggactcaacgcggatataaaaaatcatcagaaaatcaaaggtttatcggtgagatccaaatgcctccttttatggatgcaatgaacctaattccctatgtaagtcaagatcttaaagaccagatccctagaataaaatataaaactgaatctggcgttatcaaggaaggccataacgtattaattctgccattagtaggcgatctctaccttcgagcaagggaaaataatgcaataaaaacaaaggagcaaagctctgtagctcagaaagcggaggtccttgtccgctctttagcaaaagttggtgttatagctcttgtcgatgaagccactggttaccaaagaaacagagagcgtgacgccttagcaaaaatccttgaggctttcgtagctaaagaaatacagccatatatcactacattcccaccggaatactatgaagaacttttccgattacgcgggcttgaataccccccatctaatccaaaattcagaccgcaatattttggtctgctaactaatgacattgtttataaacgcctagcgccaaatattcttgaagaactcaagaagaagacaaaaacagcctcaaaaggaacgaaactattccaatccctgactcccaacatcggacagcaaaagctgagagagcacctttcatcagccataacggtgatgaaattatcaacagattaccccgacttcatctctaagatgaatagaattcaccctaggcttgatgacataattcctcaagaattagaggattcagataaatag

SEQ ID NO: 203626 - DNA, 150 bp, Klebsiella oxytoca
atgaatcacatcgaattcattgagaagaacgtccgcgaagagctgatgcgccagggattcaccttggcagtggctcagggggggggcataccaggcggtcgatatgtacaagcgcatgtcgcaggccagtcgcaaggggaggatttttga

SEQ ID NO: 203627 - DNA, 387 bp, Klebsiella oxytoca
atgactatcacactacaggcagtaaacgagctcatcgcctccctggagagcgcaggcgagctgtcgatcagagagcagaagttcctggagctggctaaagcgtaccagcagctggctgcggagaatgtggaggcaaaaaaaataatcagcgaatgccgggagtatttcatcgctggggtgatgaagcgtatcagaccaacgaatgaaggctacctgcatatgatttgcgacacgtttgcagacgaaaccccagccaccgatcgcatcgtagccgggattaaggctgatggggtggaggagtttgcttcgtatatttcgctctacaatagcaacgcggagcgacacgccattgattttgccaagcagctgcgcgagggggcaaaatga

SEQ ID NO: 203628 - DNA, 405 bp, Klebsiella oxytoca
atgacaactgatatcaccgaactggcgcagaggttaaaacttgaggtccatcgcgcggtaagcaatttcaaccctcagatgaatattaaaaccagagacctaaaggagctggtagaggcgctggagaaggcgcagcagcgcatcgtcgaactggatagaaaaaactgcgagcttgattcgcttactcagcgctgggctgttgagcgtgctgaaaatgcagaccgcatcgccgagctggagtcccgcgccgtcacctttaagttgccatctacaccagagccaagcgcgtttgctccgtgggtagccaaagccttttaccaattccacaaggatacagttaagtcatgcgttgcggttttttcagatgcgtgccgcgccgctggcatcaaggtggaggctgagtga

SEQ ID NO: 203629 - DNA, 900 bp, Klebsiella oxytoca
atgttccgggatatcgaggacaggtatctcggcatcaagcgcgctctgaaaacgctcttcgaccagcgtctgaccgggagagagcgagaggttaacagccacagctggcacttcctgtgccacgaccacggcgaggatgtgcgcctctaccaggtcaatgccggcaagtttatctacgacatgtcggcgcaggatttggccgacctgcttgaagcggtacaggccattctcgacgattacctgctggaaggcggcgaacaaaacctgtgggcgatggattacgtcgtcgctgaatacgaaagggggacgttcggtgcatacacaaacctttcccagcaatcaccagtatacgcagcgcaaaccagcatccatcaactactaagtagccccgcttacctcaaccaaatagctgcatcacgggtaacaacctacagtgattggcgaggtattagcgatgatgccaggagggatttagctggtgttattagtgatgctgtatcaagaggtgtaaacccaagagaaacagcgtcggtcattagcaaaaggctggatgtgagcatgtccagagctaaaacgatagcccaaactgaacaggtgggggcattaaggcgcgcgcagcgaaatgaaacagattgggcgaaagagcggcttggtctgaatactgccatcctatggatttctgcgctgaaatcgacgacaagggccacccatgctgcgaggcacgggaagacttattcgacagaagaggttgccgagttctattcaaagaatggcaatgctttcaattgctactgcgccaatgtcccatgcctattggatgatcaggggaaactttataacgatggactgactgaaaagctcaccaaagaaagagaaaactggaagtccaccgaggattaa

SEQ ID NO: 203630 - DNA, 588 bp, Klebsiella oxytoca
atgagtcaagaaaataaggcgcttgctgcggcttacctgaaagagtgcgtcaattacaacccggaaacaggactcttcacttggctgaatcggcctctggaacactttaagtcacttagggcgtgtaacgcttggaactcaaggtattccggcctggtagctggcagcatccgaaaggatggatattgcgcactaaaaattgacggcaacggctataaagcacaccgcatagcctggctgattgcgcataatgaatggcctgacgatatggatattgaccatatcaatggcatcagaaacgataaccggctatctaatttgcgacttgcaaatcgaaacgaaaattgtgcaaacgtaaaggtcagagtgaactgctcatctggcttttttggggtgcattggtttaagaaccgcggagagtgggtggcccaaatacgaactgggaaggtgaagaggcatcttggctatttccatggtattggtgatgccgtccgggcctataacgccgaatgcgaaaagctcaatggcgaatacggcaagcgcaagatagagcacaatctgaataagctccgagaattggggctctga

SEQ ID NO: 203631 - DNA, 435 bp, Klebsiella oxytoca
atgactttttctttggactacgacgttagcgaactgttcgttaatagtgagagcatggaaaatgtagtgaaggttaacaggcttaaagctcgagagatagcattaaaaaaatacaagtacgtcaaagatatagaagactctggcggcaataaacatgctgctgaattggatgtacaagatgccgtggtggagctattaaccaaaatcgggttatctgagcataaagccatggtggagcttttcaattctgtacttttagaagagacgctggcccttaccatgctggacgctgataaaaagcaatctcaatttgaagagaaaattaaattaattgaggatgaagccaaagattcggcgacaatgacgacggcgatctcatggataattgccgccgctgtagtattagtgtttgcggggtttctgttttcaaggtaa

SEQ ID NO: 203632 - DNA, 216 bp, Klebsiella oxytoca
atgcaaataatgcctctgagtacgcgcagaacaaattcacgttctttaaaactcccagcgatccagatggtactattgctggcttggctgctacgactaatggccagtcattctgggttgcgcagggtcctaatgcgctttcttccgcatggcagtatcaaaacgtcgctggcgttgctgttcttcaggccaagcaaccaggcacagctgctgtaa

SEQ ID NO: 203633 - DNA, 816 bp, Klebsiella oxytoca
gtggactgctgcacatgcctttctatcagtccatccaggtggaaattattgattgaagctaaatggctgtggtgtaaactttacggtatccaccacagcatggttatgattaaaatgaaaaaatcagcccttcttatattattatcagtttcactatgcgctggggtttcatatgcagcatcatttgattgtgctaaggcaaaaagctttgctgagaaaacgatatgtacaaacccacaactttcaaaagatgatgatgatttaaaatatttatatggaaatgctaaggcgtacacccaggaccgaaaggcattttctgagataactaaagctctttgggattcaagagaacgatgcagtgacctaaaatgtgttgatgaatggtatgatactgcgttcgcaatttacggcgcaataaaggaaactggcataccagaatcaaatggtgcaaatgatatattaaagaatgaaggtgcaacaaaaccttcagaaattacagaaaaacctgatgagattacaactccgtcagccaagaagcctaaggaaagcaaaagagattttagcttatacgactctaagaaaagggcggctccagttgaacataacgcaatactatataaagacactccagaggcattcgaatttatagatacccttgttgggtttgttagacaaagctcttacaaatgtgactctgttagctctttcatacctatggtttcatcgaatggctttacgctcgcatgtaataaattcagctacaaatacgaaattaaaaataacggcggcaacgtctctgtttctgtggataattaa

SEQ ID NO: 203634 - DNA, 573 bp, Klebsiella oxytoca
atgaaaatcgacaagaaactgaatctggtcaccaatattgcccgcgatgacggctcgatcgtttacctgcatgtgaccccgttcccctacgaagtggtggaagagcactgcattctgctggggaacctgttcaccaaattcatctcgcaggttggtggtcttggtgccgccagagtcgccgcaatgatgctgcggcagagcctgaaagcggaaatcgataacggtcggacggggccaaacatcgttgatgaaattcagcgactgacggtcgttatccataacgtcgacggccagtggaagaccgccccgcttgaagtggcatttaaacaggggatagtcgaccctgacgaataccgagaggttgagggcgaagtggttttttttatggtttcctctgctattcagaaggcgaacctgatcgctccaaccgtgggaacggtgatcaaaatgtacgatgggcaactaacctcatcgagcgttacggcgtttcgcgattcgttgcagacgtcgaagccggatatcgataccccgacccagaatgcccagccggaaacgtcatatataccctcttag

SEQ ID NO: 203635 - DNA, 1422 bp, Klebsiella oxytoca
atgaacgaagacgatttcgaaatcggcagctgctctcactcagagttgatggcattgctggacagcgacgacattcagcccggctctacggttggctatcagacctgcaaaacggtttacctctaccacccgctgggcggcaagatggtggatcgcccgattaaaatggcgatgaatgagccgcgcaccgtgcatgtcgcccagtcttacgggcttgagcagcgcctgcgtgacgcgttcgagcgtgaatggaaagcgatgggtgcgaaccagcacattgcaaacgccgcgcgcatcgcccgtatttacggcgtatctgcgatcgcaatgctggtggataaccaggagccgaacgaatcgctggactaccgcacgctgtacaagcacaacgtcagctttaacattcttgacccgctgaacacagcgggcagcatcgtgctgaatcaggatccgaacgcccaggacttccagaaagtcgacggtatcagggtggcgggcaagccgtatcacaaatcacgctgtgtcgttgtgcagaacgaggatccgatttacctcgcgtacaacccagcggcgttcggctttaccgggcgcagcgtttaccagcgcgcgctctacccgctgaaatcctttatccagaccatgcgcactgacgatatggttgcggtgaaaggaggcctactggtgacgaaaatcaagggtccaagctctgtcgtcaacaacatgatgcagaaactcagcggcattaagcgcatgatgctgaagcgcggtaagacgggagaagttctccagatcggtgagagcgataatattgagtcgatcgacctcagcaacctggaaaagcccctcgactctgcgcgcaagcacattctggagaacgtggccgccgccgccgacatgccagcgatcatccttaactccgagacgttcgcccagggcttcggagaaggcacggaagatgcccgcgccgtagcggtgtacatcgataacatccgtgagtggcttgatcagttgtatgagttctttatccgaatttgccagtatcgcgcctggagtattgaattcttccagtcgctgcgtgccgacttcccggagctgaaaaacacctacagcgtgtatttcgcgagctggataaacaacttcgaatatcgctggccgtcctccctgaaagagccggaaagcgagaaggtgaaggtcgacgagatacgctttaaggctatcgtcagcatgctggaaacggtacttccgcagctcacggcggacccagaaaaccgcgcgacgctgatcgagtgggcgtgtgaaaacgccaacgccaacgagaatctcttccctcagcggcttaatctcgattacgactctctgaaggaaaacccaccgccggagccgccgaaagctgaagagccgggcggcgggatgatgctatga

SEQ ID NO: 203636 - DNA, 192 bp, Klebsiella oxytoca
atgaccacaatcacaattaacacttacgaccctgaagctcgtttcgatatgagtcaggaagaagcaaaatccttcttcgcttttgttgaaggtaaagccaaggaatctgggttcgacgttcaatacgactgctgcaactatgtcgatgaagaaagcgagcgatttgttgaaaaatgctttggggactattaa

SEQ ID NO: 203637 - DNA, 690 bp, Klebsiella oxytoca
atgaacgaacaatacctgcaatacgtacgtgaagaaatagcgctggctacggctgattttagcggccgcaccaaggggcaattagtcgccctggtagagcaacttcagttcactaatgagcgctacccgcgaaaacggcaatacgtggttgatgaggttacaggaaagaagatcatgcttcgcaatcctccagtgccaggaaaacaatcccacgccaaaggcacttcgattccacaagtgatcccggtggagttctcgacggcaagctggcgtcgagctatcgcgaaactggaagacgctgaaagcgcctgggtgaaatggaactatctgcatgagacagatttcagcctgcaaaccatcattgtgcagcatggctggcagctattcagcgagacgattaaaggccgccgcatggcagggaagaccaaagaaaagctcaaagcgctcatttggcttgcggctcaggacgtaaaagaacaactggccgggagagaaacgtacctcagcgaagagttggccgcattctctggtgtagcccccgataactggacgcataactaccgtgactactggcatgcaatgaaaggcgtgttttttggccttgacagggattcgcttatttctgtcgtgcgatcacgttcacaacaaaaagcgactttttcgcagcgggttcttgcaaaagtcaattaa

SEQ ID NO: 203638 - DNA, 240 bp, Klebsiella oxytoca
gtgaataaggtcgaactgcttgagaagatatcggcgctcgctactgaatgccatacgctggcctgtgagcttgatattggtgacgagcgcaccgaggtgttcgaaatgtatgaggttttgcgacgcattcaacgccggggcgcagctagtgaaatgctggcggcaaccaaccctctgctatgccctggtattgcggatgatgaggattgggtggactttgatgatgaggatgacgactga

SEQ ID NO: 203639 - DNA, 507 bp, Klebsiella oxytoca
atgacaactgatatcaccgaactggcgcagagagaaaaattcgaagcgtgggccgaagaagctggcgcgctgccgtggggaatactgaaaaagcatcgcaatcaagacggcagctatccaggccctcattacacctacatgtggaaagcatggcaggccgcaagtgctgagctggtagaggcgctggagaaggcgcagcagcgcatcgtcgaactggatagaaaaaactgcgagcttgattcgcttactcagcgctgggctgttgagcgtgctgaaaatgcagaccgcatcgccgagctggagtccagcaccgtgaagctgccagatgatgcagagcacgacattatggctcctgtagccgcgtatttatctgagaaattcaagtgggacggcagagctgtccgatgggatgggcgcaatgaatatgatgcattggccgacagagttaaatatgctctcaggatggttattcgtcgcgccgctggcatcaaggtggagactgagtga

SEQ ID NO: 203640 - DNA, 858 bp, Klebsiella oxytoca
atgaaaaacgaaatcgaattcaaatttggtgattacgcaatcatcgagcagaaacgccacggtgtacctaacgagatgtttgttcacaaggtggttggtcagcttcgctctaacacctgggttgatgttccagtgagggttccggcgactgagacgctgcacggtgagatggaggacatttgtctttgcatctgctgcggaattgacgagaccggggttcgccgttatcgcgtcaaggatatgcggcgccattctcctgtctctttggtggctgatgaaaagagaggttcgactatcacattacaggcagtaaacgagctcatcgcctccctggagagcgcaggcgagctgtcgatcagagagcagaagttcctgaagctggcgaaagagtttcgcatttgcagcgcttcactggatgccgccataaaaaccgggaatatgctggcagaccaaaatgctcagctggctgcggagaatgtggcgctgaagtcgtttggcgacaagctgaatggtatgcataacgcactgaatggagaaggtactggcattcaagggcgtgcagaagtggcttgccagcagttcgcactggaagcggcaatggaagaattcgacgctatcgaaacccccgccaccgatcgcatcgtagccgggattaaggatgaggcaaaatctcatgacctcaacgcttttatcagccattacagcgctgaactcgatgaacatatcgccaatggtggtgatcaatttgatgcgacatcaattcgcctcagaggatttatcgtaggtggtcgtatgttcagagagaaacttcgtgatgaagataaggcattagcgctgcgcgagggggccgacaaatga

SEQ ID NO: 203641 - DNA, 390 bp, Klebsiella oxytoca
atggtcaggcaaaagtgtagcggtattaggcgcagctatttagtcagcacaggttgtcaacaatcccgttcttcattacaacaaaagcctattcctcctgacgagcaaatagaacaactggcctccgtgagcgccagcgcaaaatatctgaaatatcaatgtcaccgcagtgatttacccagcgacgcggtcatgaccaacgctattgataaggtagccaggcagcggggttgggatatcgctgaagataaagccgtgtcgcagcggagtgagcaaatttatcaacatctgcagcgcgacagcacgccggaatcaaccaagtgtagtagctttaatcgtctactgaagcctttcatcgacgctctacccacagcatttaacggccagtag

SEQ ID NO: 203642 - DNA, 1086 bp, Klebsiella oxytoca
gtgagcatcatccagcacgttggcgaacgggttaaacttgagggtatcgccatcgagatatacgccccccatgttttcacacagggacttatagccatcgcccatatcgaacacccaggcaaacccgccggagtcgagcacactgcgaatgaggggctgaatcagaccggttttacccgccccggacgtcccgcagaccgccatgttgaaattggtattgttcattccctcgtagaacaggtcgatgaacgccagctggtttcggtaggtgggcgccaggagtcccgccggcgccagcgggctgtcagcgacgatcggcaggaggttagccacctggaacgtctccgcccgcttaaccacgcctgccgcctgcagctctttaaacagaccctcaccacacttgaacggcatcatggccagaaagttacgcaggtgatggtagcgggccgggataagctggaaaccgcctttacggtagctgttgagcacctgctgttcagcggcgagagaggcctctgtgctgtctgcggtgtacgtggtgatattaaagaagtaggacaccagggaggtctggttggtcgacagtcgctggcggatatcgccccactcctgcatttcctttatcacgttcggaaagtacttcgcgtaggaggttttgcttttcttctccacgtccatgaacttcaggttggcttcgttctgggtcttcacctggtcctccaccatcagcgtcagcgtgatgacaaaggggcaggaaatggagagctccgggttaagcaggttggcgtagttgtccgcagcggtccagaggaaggccatttccggatcactctccagatggtagctcgtcacccgggtcacgcactctttcccgtcgcgccccaggcggccaattttcagatgaccggcggtgacctgcatatcaaagctgtcatcgacacattgatagttcagatcctgataggggtccagcttatacggtacgcggtacatttcgtgcgggtccgggtttatcagctcacgcatcagttcgaccagcccggcagcatcaaggatacgcgtcggaatataggcaccgcccagtga

SEQ ID NO: 203643 - DNA, 441 bp, Klebsiella oxytoca
atgtttgcctcgttcatcatcatgttcttccgctactggcaccataacctgatcaaccgggacgatattttctgggcgaagaacattcgcaagattgtggtcaacgaggaagtgggcgacaccgggcgctataacttcggccagaagtgcgtgttctgggcggcgattatcttccttgtgctgctgctggtgagcggggtgattatctggcgtccgtactttgcgccggcgttctccatcccggttatccgcgtcgcgctgatgctgcactccttctcggcggtcgcgctgatcgtggtgatcatggtgcatatttacgccgcgctgtgggtgaagggcaccattaccgcgatggtggaaggctgggtgacgaagacctgggcgaagaagcatcatccgcgctggtaccgtgaagtgaaagcgaaacggacgaaggattga

SEQ ID NO: 203644 - DNA, 429 bp, Klebsiella oxytoca; identical to SEQ ID NO: 31918

SEQ ID NO: 203645 - DNA, 249 bp, Klebsiella oxytoca; identical to SEQ ID NO: 31917

SEQ ID NO: 203646 - DNA, 2502 bp, Klebsiella oxytoca
atggctctggtaattgaattcatatgtgatttgcccaacggcgtgcatgcgcgtccggcaagcctggtagaaaccctgtgcaatactttttcgtcttcggtcgaatggttaaatacccgcacggaaggacgcggaaacgcgaaaagcgcgctggcgattatcggcaccaataccttgaagggggaccgctgccagctggtcgtcagcggcgaagatgaacagcaggcgtttgacgcgctgtcggcattcatcagcgaggagttcccgcactgcgatgcgccgctgccgacggcggaatccatggacgttcagccggttcctgaatccctctcgcgcctcaatcccacgctgtttcacgccctgccggtctgcgccggcagcgcgggcggcaggctcacccatcttaaatccctcgacctgcgcgattcaggcgctttgcccgcagcgggcgcaattgaacaggaacaggcggcgctggacagggggctgaccctgctggtgaaaaatattgagttccgcctgctggataacgacggtaccgccagcgcgatccttgaggcgcatcgctctctggccaccgacgcctcgctgcgccagcatctgctgggcgggctgctgagcggcctgagctgcgccgaggcggtggtcgcgaccggcgaacacttttgcgcccagttcagcgcttccggcaatagttatttgcaggagcgggtgctggacgtgcgcgatgtctgcttccagcttctgcagcatatctacggtgaggatcgttttccggcaccgggtaagctgacggaagaggccatctgcctcgccgatgaactcacccccagccagttccttgagctggataaaaccctgcttaaaggtttgctgctgcgcagcggcggcaccacgtcacatacggtgatcctcgcgcgttcgttcaatattcccaccctggtgggcgtcgatatggaggcgctgctgccgtgggtcgatcggcgagtgcagattgacggtaacgccgggctggtggtggtgaatcccgatgaagcggtggcgcgctactatcagcaggaggcctgggtgcaggcgcagatccgccgccagcagcaggcctggctggataaagcggggcgtacggaagacggtattcgcctggaggtggcggccaacatcgcccattcggtggaggcgacggcggccttcaacaacggcgcgcagtcggtaggcttgttccgcaccgaaatgctctatatggacaggcccagcgcgccgtcggaaaacgagctgtataacctattttgccaggcgctggagccggccaacgggcgcagcattatcatccgcaccatggatatcggcggcgacaagccggtggcctacctcaacattccggcggagaacaacccgttcctcggctaccgggcggtgcgtatttatgaggagtatcaggcgctgttccgcactcagctgcgggcgattctgcgcgcttccgcgcacggcgcgctgaaaatcatgatcccgatgatctcctcgatggaggagattctgtgggtgaaagagcagctggcggatgccaaacagtcgctgcgcggcgaacagattccgtttgatgaaaagatcccgctgggcatcatgctcgaggtgccgtcggtgatgtttatcatcgaccagtgctgcgaagagattgatttctttagtatcggcagcaacgacctgacccagtatctgctggcggtggatcgcgataacgccagggtgacgcgccactacaacagcctcaatccggcttttttgcgcgcgctggattacgcggttcaggcggtgcatcgccagggtaaatggatcggcctgtgcggcgagctgggggccaaaggttccgtgctgccgctgctggtggggctggggctggatgagctgagcatgagcgcgccgtcgatcccggcgaccaaggcgcgtctggcgcagcttgacagccgcgcctgccgtcagctgctgaatcaggcgatgcagtgtcgtacttcgctggaggtcgagcacctgctggcccagttccgtatgacccagcaggacgcgccgctgattacccctcagtgcattacgctgaacagcgactggcgcagtaaagaggaggtgattaagggcatgaccgacaatctgctgctggccgggcgctgccgctatccgcgtaagctggaagcggatctgtgggcccgcgaagcggtgttctccaccgggttagggtttagcttcgccattccgcacagtaaatcggagcatattgagcagtcgaccatcagcgtcgcccgtctggcgcagccggtggcgtggggcgacgacgaggcgcagtttgtgattatgctgacgctcaataagcattcggcgggggatcagcatatgcgtattttctcgcggctggcgcggcgcattatgcatgcggagttccggcaatcgctggtgacggcgcagagcagcgaggcgattgcggcgctgctgcagcgcgagctggagctgtaa

SEQ ID NO: 203647 - DNA, 1077 bp, Klebsiella oxytoca
atgaatgaactggtgcaaatattaaaaaatacccgccagcacctcatgaccggggtttcacatatgatcccgtttgtcgtgtccggagggatcttgctggcagtctccgtcatgttgtacggcaagggcgcggtgcccgatgccgccaccgaccctaacctgaaaaaactgtttgatatcggcgtggccggcctgacgcttatggtgccgtttctggcggcctatatcggctactccatctccgaccgcgcggcgctggctccctgcgccatcggcgcctgggtcggcaacagcttcggcgccggtttcttcggcgcgctaattgccgggattattggcgggctggtggtctactacctgaagaaaatcccggtgcacaaggtgctgcgctcggtgatgcccatcttcgttatcccgattatcggcacctttattaccgccgggatcatgatgtggggcctcggcgagccgattggcgcgctcaccgccagcctgaccggctggctgcagggcatgcgcgaaggcagcatcgtgattctcgccatcatcatgggcctgatgctggccttcgacatgggcggtccggtgaataaagtcgcctacgccttcatgctgatttgcgtttcccagggcgtttacagcgtggtggccatcgccgccgtcggcatcgccgtgccgccgctgggcatgggcctggcaacgctgattgggcgtaaatacttctccgcggaagagcgcgaaaccggtaaggccgcgctggtgatgggctgcgttggcgtgaccgaaggcgcgatccccttcgccgccgccgacccgctgcgcgttatcccggccaatatgatcggcgccgccgccggctgcgttaccgccgcgctgctcggcgcccagtgctatgccggctggggcgggcttatcgttctgccggtcgttgagggtaaaggcggatttattgccggcctcgcggttggcgccatcgtcagcgccgcctgcgtcatcctgcttaaggccctggcgaaaaagaaaacgtctgacgccaaagccgatgacgagatggatcttgatttcgaaattaactga

SEQ ID NO: 203648 - DNA, 321 bp, Klebsiella oxytoca
atgaccaaaattatcgccgttaccgcttgcccgtctggcgtcgcccacacctatatggccgccgaatcgctggagagcgccgctaaggccaaaggctggcaggtcaaagtcgagacccagggctccatcggcattgagaacgagctgaccgcagaagacgtcgccagcgccgatatggtgattctgaccaaagatatcggcatcaagtttgaagagcgttttgccggtaaaaccatcgtgcgcgtcaacatcagcgacgccgtgaagcgcgccgaagccattatgaacaaaatcgacagccacctttcgcagaatgcctga

SEQ ID NO: 203649 - DNA, 2298 bp, Klebsiella oxytoca
atgactaatcgcactcaacgcttaaaagatcgtctgttcgccaacccgcgcgaaatctccctcgagcgagcgctgctctacaccgccagccataaacagaccgagggggagccggtgatgatccgccgggcgaaagcgaccgcatgggtcctcgatcatgtgcagatttcgattcgtgatgatgaactgattgccggcaaccgtacgatcaagccgcgcgccgggatcatgtcgccggagatggatccctactggctgctcaaggagctggaccagttcccgacccgcccgcaggaccgcttcaacatcagcgaagaagataaacgcatctaccgcgaagtgctgttcccctactgggaaaatcgatcgatgaaggacttcatcaacgcccagatgaccgatgaagtgaaggccgccgtcagcacgcagatttttagcgtcaaccagaccgataaaggccagggacatatcatcatcgactaccctcgcctgctggaaaacggcctcgccgcgctggtggcggagatgaaagcggtgagtcagcggcacccgcagaacaatttttatcaggcggtgctgatcctgctggaagcctcccagcgccatattctgcgctatgcggcgcttgccgatgacatggccgccggctgcagcgacgggcagcggcgcaaagagctggagaccatcgcggacatctcccgccataacgcggtgcaccgcccggaagatttctggcaggcctgccagctcttctggtatatgaacatcattttgcagtatgaatccaacgccagctccatttcgctgggtcgctttgaccagtacatgctgccgtactatcaggcttcgctgaatcgcggccaggatccgcagtttcttcaggagctgctggagtcgctgtgggtgaagtgcaacgatattgtcctgctgcgctccaccagcagcgcgcgctactttgcaggcttcccgaccggctataccgccctgctcggcggtctgaccgagaccggacgcagcgcggtcaatatcctgtcgtttttatccctcgacgcctaccagaacgtgcgcctgccgcagccgaacctcggcgtgcgggtcaacgagctgatcgaccgtccgttcctgcgcaaaaccgccgaaaccattcgcctcggtaccggtattccgcaaatctttaatgatgaagtggtgatcccggcgtttctcaaccgcggcgtctcgctggatgacgcgcgggattactcggtggttggctgcgttgagctgtcgatcccggggcgcacctacggcctgcacgatatcgccatgttcaacctgctgaaggtgatggaaatcgtgatgctggaaaacgaaagtaaccctgacatcacctgggatgggctgatcaaccagatccgcgacaagattcgctattacattaagctgatggtcgaaggcagcaatatttgcgatatcggccaccgcgactgggcgccggttcccctgctctcttcctttattgaggattgcgtgcagcacggccaggatatcaccgaaggcggcgcgcgctataacttctccggggttcagggcatcggcatcgctaacctcagtgactcgctgcacgcgcttaaagggatggtgtttgagcaaaaacggctcagcttcgctgaactgatcgcggtactgaaagccaacttccagacgccggaaggggaaaaaatccgcgcgcgcctgatcaaccgcttcgagaaatacggcaacgatattgacgaagtggacaacatcagcgccgatctgctgcgcttctactgtaaagaggtagagcagtaccgcaacccgcgcggcggtcgctttacgccgggctcctataccgtctctgcccacgtgccgctcggctcggtcgtcggcgctactccggacggacgcctggccggagagcagctggcggacggcgggctgtcgccgatgctcggccaggacgtgcaggggccgaccgcggtgcttaagtcggtcagcaagctggataactttctgctctccaacggtacgctgctgaacgtcaaattcaccccggcgacccttgccggcgacggcggcctcaataagctggccgacttcctgcaggcattcaccaggctgaagctgcagcatattcagttcaacgtggtcaacgccgatacgctgcgcgaagcccagcagcggccgcaggattttgccggcctggtggtgcgcgttgcgggctacagcgcctttttcgtcgagctgtcgcaggagattcaggatgacattatccgccgcaccgcgcatcagctgtga

SEQ ID NO: 203650 - DNA, 876 bp, Klebsiella oxytoca
atgacattatccgccgcaccgcgcatcagctgtgaggtcctggaaacgcgcgccgataaggcgcgcatttttaatatccagcgctactctttgaatgacggtcaggggatccgcaccgtcgtgttttttaaaggctgcccgcatacctgtccctggtgcgccaatccggagtcgatctcgccgcaaattcagaccgtacgccgggagagcaagtgtctgcgctgctcccgctgccagcaggacgtggtcgagtgcccttccggcgcgtggcagcagattggccgcgacgtcaccctcgataatctgcttaaagaggtgctgaaggatgaggtcttcttccgcgcctccggcggcggcgtgaccctgtcgggcggcgaagtcctgatgcaggccgaattcgccgcgcgcctgctgcgccgcctgcgcgaatgggggatcagaacggcgattgaaacggcgggcgataccgcctaccgccgcttttttccgctggcgcaggcctgcgatgaagtgctattcgatctaaaaatcatggatgaaacgctggcccgcgagcagctgcggatgaatatgccgcgggtgctggataactttacccgtctggtggaagcgcatattcacgtgatcccccgggtgccgctgattccgggattcacgcttgatgaagcgaatttccgccggattctggcatttttggccccctttaagctgccggaaattcatcttctgccgttccatcagtacggcgaacccaaatatcacttactgggaaaaacatggtcgatgtcgatgattaaagcccccgaggaatctgagattcaaccattcaggacgctggccgaacgggccggttttagcgtgaccattggcggataa

SEQ ID NO: 203651 - DNA, 342 bp, Klebsiella oxytoca
atggatttcactatcgttgccgtcacggcctgcgtcagcggcgtcgctcacacctatatggcggccgagcggctggaaaaagtcggccaccaggagaaatggaatatcaaaattgaaacccagggcgcgctgggggtggagaacaaaattatggccgacgatatcgcccatgccgatgtcgttctgctggtgacggatattgaaattgacgatgccggacgctttagcggcatccgcaccattaagaccagcatcaaaacctttctgctgcagccgcagcagattgtcgacgcggtgaaatgcattatgaaaaagccagtggtttatcttgagatcccgtga

SEQ ID NO: 203652 - DNA, 3009 bp, Klebsiella oxytoca; identical to SEQ ID NO: 149376

SEQ ID NO: 203653 - DNA, 1044 bp, Klebsiella oxytoca
atgagtcttcaagccaaatttaagaaatttcatgatgctatcaagttaggtaggaaggaccttgagtacacggcggcccgtcttaaggatgagagtattactaccgatatcattgagcgattcaaagatgatggatatccggtcattgaggatttcattcaggggtctttggcaaccttcaccggaatccgtgaaaaagggcaggatttcgatattgatcgtgcaattgttattgaagctggtctggcacctgaaaacccaataacgcctaagcttgcagtactggaagtgcttgaaaaacgtggttttaaaaacgctaagatcaaaaagccttgtgtaactgctgattacaaggctcaaaatcttcatatcgatatcccaatttatcgcaagtacgataacggtcaatatgagttggccgttggtaagagacattcagatgaagataatcgtgagtggtctagagctgcaccgcgtgagcttattgactgggtgaatgattacgacgctgatgaagtctatggttccaataagcatgaccagttcaggcgtattgttagatacttaaagcgttggagaaatcacacttttggtgatgacatgcgtcgcaaaatttactcgatcggtatcgcggtgatggtgaaagagtctttctgcccttcaattaatgatgaaggttttcctgatgacctcactgcactgagagagacaatcaaccatattctcaactatcgtagctatttcaccttggttgatgtggacaaatacaaaatcaatgttgcgcttcccgtaagcccttacagagacatttaccataacagtagtgttgcgacaggtactcaattccgtaaaaaattatcctctcttttgaagaacttggataaggttgttgatgaagagcaagagtctaaacagtgtgagttgctacgaagtgaatttggtgaagattttccagaatgcaccgcaacctcaactgcttcgtcatcggtagttaaaactgttttcgcttcttccggagttgtggggacatcgcaaggcgcatga

SEQ ID NO: 203654 - DNA, 1734 bp, Klebsiella oxytoca
atgaattactcagtcattttgacccacttgaacgaatgcggatacaaggtatccgcgattccatcgaagacggctgaaattggatacttaacagtcgaactggaaattaacggtttgcctgttactttatggcatgtcactgtagcagaactcgccaaaatgcccagttttcttctcgctgacccttcagcttttccaagactggcacatactgcattctatcctgaaaatcgttttgctagtatttgtgtcaatgtgcctgatgctgtatctgtgaattttgaacggcctgaacttgcttttgaagaatcacttaaaaggcatgttgctttgttaagccaggctttaaccgatagtgaatggaatactcaggaattgcttcgtgaattcgaagctggctggttgggtatcgttgagcagggcagtaccccatttctttgcttaactgaaagtgaaactccagaagagttgtgtgttcttaagccgcgagaaggccatttagaccttggacattattatttaggatatgccgaagggtctattccccaaaatactttttcacctatcaatcgggccttaaaaaatcggcagactacagttggtaagggatttgttatcccgctaagcgtggcaaaactagctccatggaaaaaggatgaacttgctgattggtatcttgccctgctgtcagaactatcggtggatgtccgaactaaattaactcagcagtttgctcaaaaacgttcatatgagttttggctggtctttagcgcgagaacgccttcgggaataacatggttcggaattcatttttcccaaaagaaatctggcaaaggtcgaaaaacgttgcctttcaaaaagtcacatctgactgaatggaacctcgatcccatcgaagtattaacttttaataaagaaaggcttatgcctaggagcggagcagaagaatcgctaatcaataaaaaagttatgattgtcggttgtggttccgttgggggagacgttgcagataaacttgcagcttctggcgttggccgtttagatttatatgatccagaaactctatcgctgaataacctttatcgccatattctaccaccgatgtatacttcgtttcataaaacgcaagcattgtggcacagcctcaccagtaaatacccatggttggaggttggaaaatatacaaataagttacttgatttaagaaatcatgaattactaatgaagtacgatcttatcgtcatagcgataggagcacccactcaagaacgactatttcatgattatcttatcaaagaaaaaattaatgttccggtgatcaatgcatgggttgaaggatatggtataggaggacacgcaatactggaagtccctggaacaaaaggttgtttacggtgtgcatatgtcgatcctactgatttttcaagagggttagtttcaaatctgaattttttggctccaaaccaggatctgacgaggaatcatgccggatgtggtgatgcatttctaccttatacctacatagcctcaactcaaactgcactaattactgctgatctcggtgttaaataccttcttggcaaaatacgtgaatcatctagagtgagctggaaagggagtgcagtggatgcaacagaaaatggcttcaaattaagcgggaggtaccatacgttcacccgtacactagaggttctccctttgctcaatgacgaatgtgatatttgcaatggataa

SEQ ID NO: 203655 - DNA, 492 bp, Klebsiella oxytoca
atgacgaatgtgatatttgcaatggataattataatgtactaactgtagagacgaaatatttcagtctccatattgcaaataaagtgattgatatctggcatgcatatcgtcaggttaagtcaatggaaccggaagcgtttggagtgcttgtcggtaataaggacctggagattgagagttacggcttggtcgaaattacggtaccacagaaaggagatcgatgttcaagaatgagtttttctctaagggatccagaacatcagaatatagtcgatcatttgcataagagttcacaaggtcaattagtatattttggcacatggcatacccatccagaaaaaaatccccacgcctcatgcatcgatattagggactggaaacaatgcaggttacgaaatcctgagcagaggcttttttttataataatcggaacagaaagacgtgcactttactattttcaaaatgaaaatctcctgcgacaggaattctga

SEQ ID NO: 203656 - DNA, 1068 bp, Klebsiella oxytoca
atgaacaacgcaacacttatgtatctcattaaaatgattttcagacctaaagatcaattatctcgactgacgcttgggttgcttaggattggaatggcaggattagttggaggttgggcggttaaccttgtattttcagaggcattcctcaagaaaaatattaatatcatcgacgggttaacatttacttatcaaaagtgttctgatcttgcccttttgtttggtgttctatttctgattgctgggtttattttgtggtgtatatgtgcttatattgctctgaaagatttgaataagcgggatattgctcttatccgcgcatatggatttgaaaatactgatcctcaagctgcgggtaaaatgctttctttaagggagaaggcgaaagttttaaatgtagattttaaattattcgattctagaaataaaaataacatcttgagcaatgctaatttcatccgacaaacaatcagggatagaatacatcacaatggggcgacaactgcttatgttacagcaataggtagtgtgccgtatctttatatgattggtagttttatgacagatggacacttggctctaaagttgtttgactttgatcgagacaaaaaagtatttcatcctcttgatgcctctcccacaaatgctaagatagttaaacgttataatggacagataataactgatagtaaatgtgtgacgtcaaacaatggaaaggttatcggtctcgcaatttcttttacgatggaaattttagaaaaagatcttcctgctgattttgtaggacatactttacatgttcaactaagtacagggttccgatttgataatcttcctgaagaggatgaacaggagaaaatcgttaaaagcatcagctatatcatctccgaattaaagaaagaggcagaagaagtacatctttttgtttccgcacaagcatctgttgtcgttaggttgggggctctctaccaagaaggtctgcatggtgccatcagcatttggcactggaattctattgataataagtatgaatggtgtctaagggttactggtaaacacataagttag

SEQ ID NO: 203657 - DNA, 282 bp, Klebsiella oxytoca
atgaatagcctatacctattgaacgaagatacaaagtttcaactcggatgcaacgaagtatgcagacgaatctataaccaccttgcaagcctccaccgtgagaatggaaccttccgttccagcgtcaaaactctggcatctgccctgggatactcggaaagcgggatcagatattggctatcccttcttcgcgatgccaaagtgatcgctatcaccaggcgcagcaatcactacgattttgacgttaaccacaatgtttctttcatcactacaaccaactga

SEQ ID NO: 203658 - DNA, 384 bp, Klebsiella oxytoca
atgactcttaacactatggacaccgtgaacatcgtgaacaccgtgaacaacgtgaacaacgtgaacaacgtgaacaccctaattaactctttccacgatatctggcatttaccagccctgcggcttgttaataaggcgtggcgtgagagaacgccctccgcgctcctggaagcgctgcaatacaccgagcaggcaatcaccgcccttgaacactggtatgctgctgtagagcacctggtgcagatgaacggggataccgtcaccgtggatcaggcgtggcgcattgccaatgatatggaggaactcgccttggctatgcaacacattaccgttgaactcggagagcttgccatccagatcgcggaagaatgcgctataacataa

SEQ ID NO: 203659 - DNA, 219 bp, Klebsiella oxytoca
atgtttctacttaataacaaatcgcgtgtactcaaatataaaaatgatgttctcaccgtcaatcctcagatgattgagatggtggctcagtatgctggttgttcggttgatgaagtgatcaaagcgatggataaatattttcctgacgaatcaccaaaacaagaaaccactattcaggatttgattacacgtaaagtaaaggaatcaaccaaacaatga

SEQ ID NO: 203660 - DNA, 192 bp, Klebsiella oxytoca
atgcaggtagtactaaagagtgctggcattcatttacaggtgaatgcagatacagcagaagagttattaaatctggcgggagtgtgtcgtgtgcttgaaatagatcacggtcatctgcgtcagttattacaccgtgggcgtagtgtatcagaggcactcaactacctggtgagtaagaaaggtggtgaataa

SEQ ID NO: 203661 - DNA, 1071 bp, Klebsiella oxytoca
atgtccactcaagagagaaatggtactattttgtgggttaacacactcaaaggagcatgtatactcctggtcgtccttcaccattcaataattaccaccctagcaccatctattgaatttctttcttctggaattataccagcaaaagtctgggtgttttttaatcagtccgtttctcctcttcgaatgccagcttttttctttgtttcaggtatgctcgcatcaagcgccataataaaaaagaaatggccagatgttttcacaaaaaaagtgtcaaacctattatatctttatattttatggggggtgatacaatggatttttatcaaaaaattaattaccgaaccattgggtgttcagttatcaaactcagccaatagtgcgtacgctaactctttcattgatttttttgagttgatttctagtgcctcaaccagtttatggtatctttatgcattaggcggctattttttagttacgaaacttctcaataaaattaaatacgttaccatttttgtcgctgtcattttaaattacacggcagcactcggagtttttgaacactggggagtagctagtatcgctcaaaatataatattctttgtgatcggagtatacctcagcgaactggtaatcaaactcagcgcaatcaacaagaaaaacataataccatttgttattattttgtctcttgccgtattaaacgtagtgtttggatttggtaaaaatattttcctttgctttaccgcaataactatatctatagttatatgtcaatatctaaataaaaaattcgatatggcatggttaaactgggttgggaaaaacacacttcagatctatgtcatacacagaatatttgtagagatatttggtttgttattgttacatgctggaatcgatatggattggtttaaaaacacatcatactcaatggtgtggggaaccacattcccgttaatggctgtattttcatataccaccatgtcgttatttatatggaaagtgttaaacaatggcgttggtaaaatgctattcactcacccaaaactgacatcaaagaaaaaatag

SEQ ID NO: 203662 - DNA, 624 bp, Klebsiella oxytoca
atggtaggcacaccgacaatttccccgacctttggcgctgtgtgtaacttcagcaactgttttgatacaggcagggtttcgacccggaaccagacgcacattgtaatttgcaaaccggtaaaaccaactgcggccaccgagcagcaacaggcgttcatgatgggtaactacaattactctggatcaccgatcgtataccgcggtgatggtctcgcatttatgtatgcagaccccaacagcatctatggcgcgttcgttgaggataatagtgttacgccaacgaatccgattaataatttcacgacaaattatgacgtcacaaaatgggccgcgttcgtgtcgttaattgatgctgataataatattgccaggattggtggtcggcaggggggcgcgcttgcatggcagggttcaaggacgctaactaacaggactgcttacactgacagaaccatcaggatagggtcgcatcatgctggcgcagcgtatccggcaggagcggatattacaatgggcatggagctgatttttgaagcagcgctaacccaggccgaagtagcatctgttatcgacagtatcagcgcgtatctgaacgctgcatggggcattaacgatttgggttaa

SEQ ID NO: 203663 - DNA, 612 bp, Klebsiella oxytoca
atgaacatgaaaactgaaaaaatcgtgatgatggacagtgatgaagcagccagcatccagacgttaacgggctgggtggcgcgtgacggtcgcttttggggtaatgacgagcatatggctcgctggtgtggtgcaacgcaccgtaaatgcaagagcttccctgacgaacaccctattcacgtcattaatggctattgcgaagaatgccaccgcataagccgtcaggctgcatttgaaaagttggaacgcgtggtttgggctggcgagccgctggttatctttgatgatgaccaatattttttcgatgctgaatctttggctgattactgctgggagcactcacttcttccaagcgaattgaaactcctgatctgcgaacctaattaccctccagagttcgacttagagcagcactgcgaagaaatcatgcccgaaggcgatgattattactgtctacctcaggcagtgcgtgatgctgccgatgcactgaataaggccatcaaggaaagcttgccagtatcgtggagcggtagtgaccgtgttgccatagtatcggatgacatgctcgacgatgaacagaaagctgaaattttggcggagcgtgccgcatga

SEQ ID NO: 203664 - DNA, 513 bp, Klebsiella oxytoca
atgagcacaaacaaagggaaagatggtgaaatgagagtgcttagactgatcacccatattgttcaaaaggaagaaaactgtgatgtgactcgtcatacaaatactaatactgccgacagtggtgcagatctagtattggagcatcctcatggctttttacctcatctgggaagtattgcaagtggtgaagataataatcaactgccagacttgtccgatgcaaagaaagtaaaaacaagaattgatgttaaaacaactgaaagcaaactggggcctgacgtagtcaataaatttgctggtgatataaggcgtaacccggattgtgacggtcatgtcctgatgggaggaatcgacctttcagaccaggcaaaatctgatttcaaagaaattcaagatagacaggcagaggttgggaagacagttgtgtatattcctaattcaggaattgaaaaccttgagcaacattacacagctctgcctaaaagctctagtggcgatgaagatcaaacctaa

SEQ ID NO: 203665 - DNA, 459 bp, Klebsiella oxytoca
atgtctcaaagtattaatctcgttgcatatgagtctgcaagtgatggcagaatttatgaaacaaaaaccgaactgattgaaaccgcatttgttacgacggctttacttgaagagctacaaaaagaatctcctcttattgaaagaaaaatctatgagatacctgacgcagaagaacactattcgatagagtgtttcaatgattctgatattgagagaattctcgttaagttagaggagatgttcttgtccgtactggaatcagacagtgaaaagttgctgcaaaaatcagattctcaagacggaaaaagcctgccgtcaactcagtctacttatataaaatcaagtgatatttccgagtccattaacagattcagaacccttactaacatttttaatatattttacttgaaaaataacaagtatggtggtgacacctctgttgtgttgaaattggggtag

SEQ ID NO: 203666 - DNA, 834 bp, Klebsiella oxytoca
ttgagtcagaaaattccaaattctgtaatcggtgcagtggcttcagttattgcagaacattattacagccactcaagattaaatacgctgtttatggagagcggagctcctggcgattcccccgaaggtaactgtgaaacaaaatgcagtaattggcttaaacgttgtaatgacgatacaacggttaatgctttagaagttctaggtgcagtggttcaagagtttatggatcaggagccccccccatcactattcggcgagtcatcaatttcaaaactagcagaaggccagacaagaatcaccaaagcgctagccaaaaatcaattagcctatcgtacaaatggttatattactcaggctggctcgacagcaatatcaaaaaaacttgaagattttctaaaatctggcgatttttcttctattgaaaaagagtttgaaagggcagtagagcatatcaatggcgatccacatgcatctatcactgctgcttgttcaattattgaggcgaccctgaagttttacattgagcgtttcagcttggctatgccgaataggctcaatgtcatgaatttgtggggcgtagtccagcctcagctcagtttgaattctgatgctacattggctgctgatcagcacaaagtattaaaaggtatttcctctatcattgatggcgtgggggcatttaggtcacacataggatcggcacatggtcgtggtactaatccgcctagtgttatagttgcggaagctcgattggtagttaacgccgcccacacgattgtgatttttatgatggagttaatacatgcaaaaaaatctaacacgtctcaatga

SEQ ID NO: 203667 - DNA, 249 bp, Klebsiella oxytoca; identical to SEQ ID NO: 168646

SEQ ID NO: 203668 - DNA, 351 bp, Klebsiella oxytoca
atgtctgaaccacaaaacgggcgcggcgcgctcttcgccggtgggctggccgccattcttgcgtcggcctgctgcctggggccgctggttttgatcgccttggggttcagcggggcatggatcggcaacctgacggtgctggaaccctatcgcccgatcttcatcggcgcagcgctggtcgcgctgtttttcgcctggcggcgcatctaccgcccggcgcaagcctgcaaaccgggtgaggtctgcgcgattccccaagtgcgagctacttacaagctcattttctggatcgtggccgcgctggtcctggtcgcgctcggatttccctacgtcatgccatttttctattaa

SEQ ID NO: 203669 - DNA, 228 bp, Klebsiella oxytoca
atgggggatagcatcttgtgtcagaaaaataaccacatcataattttcaatatacttttcaactgcttgatttctggtaccgccatgattgaaatcactgcctgctatagtgagcacatcgaaacccgctttttccgcgatggcaacggtatcatctttgcttgtggagtcaataacgtgtacaagcaaattagcaggcgcatatttttctatattagcgactgctaa

SEQ ID NO: 203670 - DNA, 627 bp, Klebsiella oxytoca
atgttacgactgaaaggctgtctgctcgccgcctgtctgctatcgccgctgactcaggcggctgatctcggtacctggggggatttatggcccatccgggagcaggacatgctgcagctcatcacgcagcgtctgcagtcgctgcaatcttctggccagtgggaccagacgatggatgcgtttaagcagcgggttatcgagaacagtcagcgtccggcaccggtggagggcattaagcgtgcggagaaatacgagcagcgctggtttgatcccagcatccgcctgaccgaagacctgaaggacaatgaggggcgggtgtttgcccgcaagggcgatgtggtgaacccgcttaaaaccgtaccgtttgtccagactctgtacttcatcaatggtgacgatgccgaccagctggcctggatgaagcgtcaggtgccggaaaccctgatgagcaaaattatcctggtgcgtggcagtatcccggacacctccgcagcgctggacagccggatctatttcgaccagaacggcgtactgagcaagcgatttggcctgacggcagtcccggcgcggatcacgccggcgccatccggtgaacgcctgaatattgagaccttccctgtaaaataa

SEQ ID NO: 203671 - DNA, 303 bp, Klebsiella oxytoca
atgaaaaaaagaaatttcagcgcagagtttaaacgcgaatccgctcaactggtcgttgaccagaactataccgtggcagatgcagccagcgctatggatgtcggcctttccacaatgacgcgatgggtgaaacaattacgtgatgagcggcagggaaaaacaccaaaagcctcacccattaccccggaacaaattgaaatccgagagctcagaaaaaagctacaacgtattgaaatggaaaatgaaatattaaaaaaggctaccgcgctcttgatgtcagactccctgaacagttctcgataa

SEQ ID NO: 203672 - DNA, 537 bp, Klebsiella oxytoca
atgcaagttcttgatacgaagattaaagatgtgaaaattattcagccaaaagtctttggtgatgctcgcggtttctttctcgaaacgtttgaaaaaaatcgttatagagacatgctgaatttagatttggattttgtgcaagataatcactcacgctcatctaagggagtattacgtggtttacattttcagaagcataatcctcaagggaaactggtacgagtcgtacgcggcactgtatttgatgtagcggttgatatacgtaaagattctcctacgtttggcgaatggcagggggtgattttatcagaggacaataaaacccaattttggattccgcccgggctagcgcacggatttgttgttatatcagatatagcggatttcgagtataaatgtactgattattacactcccgaaaacgagagatgtttgatctggaatgatccagatataggaattgattggcctattgataaacctttattatcagaaaaagataaagctggtaagcgactgacggagctttttgaatga

SEQ ID NO: 203673 - DNA, 480 bp, Klebsiella oxytoca; identical to SEQ ID NO: 104057

SEQ ID NO: 203674 - DNA, 123 bp, Klebsiella oxytoca
atgccgaacaccagatcctttggagttaatagggtattcatgaccatcatggacaaaagagccgccattgatgattttgtaacgaccgtgctcatggtagacggtatggaagcaagggactga

SEQ ID NO: 203675 - DNA, 480 bp, Klebsiella oxytoca
gtggacagcagcctcaccaccatcctgaatccggaagccatcctgtttgccaaccccatcgcgcagggcgcctgcgcagcggatgcgctggccagtgcattccatatgccgctggatgtgctcttctggtgtggtggaagccacggctcactttacccgtttaacggccaggtcagtaatgaatccagcccgctgcagtcgtcggtactggtcagtgaacgtatggccttcaagcttcaccggcagggacaaattatggagagtatcgggaaggacaaggcggtctgttacgaatatccctccccgatcatcccgaaagaacgctggcgctatcagatggtgaacatgtatccggacagtggtcagtgccatccgcttggacgcagcgtgatgcgctgggaggccggcaaaaatccacccaactcccgcaagaactatggctatctgatgtggcgtaaacgcaattgtgtctttctctga

SEQ ID NO: 203676 - DNA, 573 bp, Klebsiella oxytoca; identical to SEQ ID NO: 177960

SEQ ID NO: 203677 - DNA, 507 bp, Klebsiella oxytoca
atgacaactgatatcaccgaactggcgcagagagaaaaattcgaggcttggtttaagtcgtcatttcatcccgacaaaaccgggccctatatcaaagaccaactgtatttcgcctggaaagcggctggcgctgagttggtacaggcgctggagaaggcgcagcaggtagacgaagagctttgcaagctcctgcctccaggtgttgagtacatggaccctccagacggcggcgatgtcacgccgcttgaaggagtacgtcgaatggtggctgattaccgccagcgcatcgccgagctggagtcccgcaccgtgaagcttccgaagccacacgctcacttaatctggattcaggcaggtcatgcgccagatgattactgggatgatgtagcggtatctcatagcgagaaagaccgctgctgcgatgggtcagagcgctatccggtttatgcgcgctgggaaattgaagagatgctcgctgccgctggcatcaaggtggaggctgagtga

SEQ ID NO: 203678 - DNA, 204 bp, Klebsiella oxytoca
atgcgcaccattgaggagattggcaagcatgcagcattgctgaagtggaagcgtcagtttggcccgtttgagaaatgccaggtctgctatgggctcctttcttcctgcgagttgtgccacggtagtggcaaggtgattcaggaagatattgactcatggaataaccccatcaccaagatgagacgggaggcgaaaggtgcctaa

SEQ ID NO: 203679 - DNA, 927 bp, Klebsiella oxytoca
atgaaaataaaatctcaaggatttgcaatcgttaaccctaacaacaacatcaaaaccactgatatcattgattatttcataaaacaatctacgcatgaaatcaaaagagccgattatgataggcagatccttctttccgatgatggccagttttataccggcttggtcttgacatataaaaatcagaaaaaaaattgtctttcaacggttaaaaatggacagttcgagataaaggttgaagacatacaaggtgataataaacttgttaactttaatttcttctgtataaataaagtaagtttgaaaggattatacctttattatcgcggatcatgctcactaaacagtttgtttagctcatggcaatcttacagtaattttgcaataagaaagaaaattaaaaatgaggtaatcgccttaggcaaaaaaccagataaaattaaagttgagagtattcataaaaaatatgaaaagagattggagtttagagtaattattgataagtcaagcttgatcgccatgctttctacgtttagtgaaattaaatcagcaacgttccgctatgattctgttgacttcaaagaaagcgaaatgatcggcgttgagcaattcactagaaatacagaggttacatttaatattagtgataataataaatctaaagtcagtcaaatagcgaatagtcttgaccaaatggtaaataaaatttcagggataacaaaaggtgttgtatctgttgttgatcactctaaaaatgagcgactgattgatctaattaactccccgtgttattttagtgagtatgattttgatacaattgcacaacatgtaaatggtttaaaaaatgacaattacatcagcaatgctataattcaaataattaaagatgaaatcaccaacggcagaaaaaaacatgaatttaattga

SEQ ID NO: 203680 - DNA, 543 bp, Klebsiella oxytoca
atgaatttaattgataattttgtaagatctaagttcaaccatcaagtacgatggttaatattgttatctttattcattgttgctgctatgacatgtgtttaccttaaccttactcaccatcagggaaaggcattctattcattctatcaaacatcaatacgtggatatcttttttctggtttcatctctgtgggatcactactattatcattacatacatttgtcatagtaaacttgaaagataaattattctccactgagagatatatatccaattttagattaagtagaaatttaccaaaggatcaagacgtaaatgaatgtgagctttttaaaccactagatacattatcatcgtttataaatatatcagtttggctgtcaatacttacagctgtgtcgcagtttacaattggtttgatagacgttggagtagcatctgtcttttgcatatggttagcaatgctaaccatatgttttcttcttaattcattaattttgattcgagtgcacatcaaaaaaatgttacatcaagatgtttaa

SEQ ID NO: 203681 - DNA, 345 bp, Klebsiella oxytoca
atgagcaagtcattaaacgcgcgctgtatccggcgctggaaagttgagtttaaaggccgctgtgattcgaaatatagcccttactggcgcaagcgtgatctgcgtgggtatatccgcgaagcggcgctcactaccgcttacagcatggttgagagcatggccgaacgaaacgccaaagttgactacgacggctccctttgtggttggactcctgaattctctgaatggtaccggaagcaccgccaagagtatctcaaagaggctcgggacttcctgaatgaagacgccaccaacgacgacatcgacgaagagattgagggcgagctggaggcttgggatgactga

SEQ ID NO: 203682 - DNA, 258 bp, Klebsiella oxytoca
atgaatggcacagaaactaagcaagttgattatctgtacagagggataattgattattatagcaatatatcaggtctggatattacgactgaacagatcaaactacgtaataagtttatttccgaaagcgcaatagtttgtgatgattctttggatgagcagattattagtctacaggatgaattcattgctgctggtggaatccctgaacaagaaaagttagtgattgaaaaagttcttgaattgctcaaccaataa

SEQ ID NO: 203683 - DNA, 2367 bp, Klebsiella oxytoca
atgtcggtaccgaaccagacaccctataacatctataccgccaacgggctgaccactgtctttgcttatgagttttacctgatcagcgccagcgacattcaggtgacaatcaacggcaacgaagtaacgtctggctataccgtgtctggtgtgggtaatactggcggcggggaggttacttttcttaccgccccggccaatggttctaccgtcatttttgaacgagttacgccgacgtaccggctcaccgattaccaggataatggtgacctgctggccgatacagttaacaaagattttgaccgtctctggatggctattcagcgcgcgtttatttatcttggcgttgcgctgtctcgtcctttgtttggtggtgggcctttcaatgctaacgggtatcggattgccaatctggatgatccggtcgatggccaggacgctgcaaccaaacattatgtagatgaaagtatttccatttcaaattcacatgcagatgatctttttaaaaggacaattagagttccggaggcatcggttcagacggttcccgcattagctgctcgtaagcagatgttgttggggtttaatagttttggagacccgattgctattgctggccagacacagactgctgatctcgccataaagttggctgcctattttggaacgtcattaataggtatgccattatcaggtaatcttttagatctcgttaaaaatatagttacaccagcgatgtttcatgcacaggcagggagctccgataacggaggtcttagctttgcccatgataattcactgtgctttcagacaatgttcaatgctgtgcgtgataatggaggtggtttagtcattatcgatgatgaatactgtgtcgatttttgtcttttcccacattcgaatacgacagtgatgtttgtgggcggcggctccatgcagtttatcaatcctcgttctgctactacaggccgtggtggttttatcattggaagcagccgggagtttaactttgatttggcatggagtttgttccagtctggtgcgtatcctggctcgatagttaacgattctttcactgatccggtacagaaacaatatctgcgtgataacccgcaattcgttcaggctgaacgtgtgaatttcatcaacccggtaataaaagcgtactataccgaccccacatactggggagggtttgctattaactgtgtgaatgctcagcacatcagaatactgaaccctgtgttcaatggatggactgaaggtgtcaatgtgggctccgatgttccgccgaatacgccttcgtgttatgacgtgaaaattcataatatgcgagtcattaaagccgatctcgttagaacttattacgctggttttttctttgcaaactcgacaaattgtgagatatcagagggctctcttgaaacaccactgaccgcgggtaccagtaacggtagttttggggcgcttaatttcacagaagattgcgttataagagatattaacgtcccaaaccttggacggactgtttcctccgaaggtattttaatcaacaactctaaaggttgtttggttaaaaacataaaaatggggaatgctaaatcggccgtcagtacattttatgtcgatgcaacaacgaatgatgcaaataaccccaactttatagatggggttgaggcgaacaactgcgatcaagcgctgggcgtaaccggtaagtatgcggtattttctaacatcaaagcaaccaactgcctacaagagttgtttttcagaaatgcgaatgcaacggggaatcggtttaagggcaagccagattcaattactataagtgaagccagtacgaatattaaatactggtatctcatcaacaatactgttggtggatggcgccgtaaattcacatggttacgtccattagatatactgagaacgcctttcacttctctttcttcatggaattcgaacagttctgtgaaatttaacaacggtgctactgcaacgtttttgtacaagatccccgaaggggttatcgccgtttcaggatttacagcatatggcgattttagcgtaggagccgcagcggcagctacggattcggtatgtacgattgatgttatttcaatgtcggctgtagatggaaatgggacagatcccatcgtacttttatcggcgtcgatttctgcccatactaacggagatggcatctggtctgtctccgcagatgttcaatcatcatcacctgggtttttacctgtagaaggtgctagttcaggcattgataatacaatgtacctgcgagttacgtactcaaatggcgtggcaaataatacccttaaagaaatagggttaagactatacgggaattaa

SEQ ID NO: 203684 - DNA, 324 bp, Klebsiella oxytoca
atggaagcgcttaccatccccgtgaagctgtacattcactacatcactaacactttctcatccgataaatatcacgtatcaatctgtgacatgtcacggaaccacccggacatttatgtgctgctggaaacgcgtgatatcgccatcgatataaaccagccggaacccttcgaccttatagccctgcaggttgaccagctgcgcagccagaaagaaaaccttgctgccgatgcccaacgtcagatcgcagcggtcgatgacaaaattcagcagctgctttgcatcgatcattctcagattgaagaaagtgatatccccttctga

SEQ ID NO: 203685 - DNA, 246 bp, Klebsiella oxytoca; identical to SEQ ID NO: 97636

SEQ ID NO: 203686 - DNA, 1977 bp, Klebsiella oxytoca
atgaaaaaaataacttctgatatgacagaactacaatcaatgaatatcactgaagataacatcatcaagcttaagtcattgtttcctgaagcatttaaagaagaaggcattgattttgatgttttaaagcagcttttgggtgaaaatgtagacgaaaaagaagagcgatatggcctgaactggcatggtaaacgtcaggctcgtcagcttgcgcttagcccttctcgtggcaccttacgcccatgtaaagatgaaagtgttgattgggataacaccaaaaatctcatgatcgaaggtgataaccttgaagtgttaaaacttcttcaaaaaagttatgccggaaaagttaagcttatttatatcgatcctccttacaacaccgggaaagattttgtttattctgataacttccaagataacatgaaaaattatcttgaaatgacaggacaaacagaagatggggtacgaatcaccacaaacgcagagaccagtgggcgttatcacacagactggttgaatatgatctatcctcgtttaaaacttgctaaaaacttattgagtgaaaatggcattatttttgtttcaatagatgacattgaagcatcgaaacttaaaattattatggatgaaatatttggcgaagaaaacttcttagcccaatttgtttggcgtacagatggcaactttgataatcaagccaaaataaaaaactgtcatgagtatatattactatatgcaaaaaaagaaattaatttcccacatcctcctatagtagatcctaacataccaaaagggagcaaattatttaaaccagagattagaaataccattgtgaagaatgggcctaaaaacccgtcaagtaagataacacttcctgttggattcccttgtgatattataagtggaagagttaactgtgctaagaatacgtggcctatttaccattcagatgcagaaattagtgataacaaattaacaaagcctttagttatcgaaagtggatggagttcgaaagaactacttatggattttataaaaaacaattgtaatccgattattgatagtaaaggacaagaaaccagttttgtactaagtcaaactggaactattgaagttgtgaaaaaacgttccgattcacaaagccatgtagtttccgttctaaatggatttggtggtactcaaaaggcaacagcacaacttgatgagataggagcttgctttgccggttatccgaaacctcttgatttaataagttacattattcagatgatagctaagggtgacgatattattcttgacttttttgcaggctcaggtccaactggtcatgcagtcatgttacaaaatgcgaaagatcgctgccaccgtaaatatattttagtacaaattccagaagcactgtcagccgaaaaggaaactcaaaaaacggcagtagaatattgtagaaaaaataatttaaaacataatgttgccgaacttacaaaagagcgcctccgccgcgctggtaaaaaggttcgtgaagacaatccagagtggaaaggtgacgttggttttcgtgttttcaaactcgatacatctaatatccgtccgtgggaagctacagcagaaaccctttcagaacaaattgacgcttatataagtccaattattgaaggccgtagtgaagaagatttgctcacggagttaatgctaaagcgtggtattgacctgagcgtaaacgttgaaacccatcattttgatgggttaaccgtttcttgcgttgacgctggcaaattgtttacctgctttgctaatcaaatccctgcatcttcagtcgaagaactgaccaaggggatcattgactggcataagagtctgaaagctgggaaagatagtgtctgctatttccttgatgacgcatttgaaaataacgttgctaaaacaaatctttgcgccattctggaacaacacggtctgactaacatacacagcctgtaa

SEQ ID NO: 203687 - DNA, 843 bp, Klebsiella oxytoca
ttgtggcagcgcatttgtcaaaaaacgctgtaccgactggcatttgacgaagacgaattgattaaatcctgtactaaatcacttgctgaaatgcagcctgtagcaaaagcaatggtcagtttcagcaaagcaacaatcaaacaaagtcagtcaggtcttgatgttaaagtgcagtctaatggtacaacaagttctgttattgatgttgcggaacaaccgctacctgatattcttggtgttctgcaggaacagactggactgacaagacgcagtttaagcgctatcctgaaagagagtggaagactcgctgattttgctaaaaatccacagcaatttgtcagtgaagctataggccgaatcaactactgcaaacgcctgtcaatagttgacggtattaaatattatccactaagaggagaggtgtatgcgcaaagtctctttatggataaagagctaacaggatatacccgtaatcttttcgaaacctcgtctaagtcagtttacgaatacgttcctaaagattctgaagtcgaaagccgtttcgctcaggaactcgaagaacaggatgaagttaagctttatgtgaagcttcccggttggtttaaaatcccgacgccactgggaacctacaatcctgactgggccttagttatagaagacaatggcgaagaacatatttactttgttgtcgagacaaagagtaaacatattggtcttagtaatgaagaagatgcaaaaattacttgtggcaatgctcactttatctcactcaaagatcagatgagtaatcctgcgagatatatgcgtgctacaaatataaatgaagttttaagtggcaaataa

SEQ ID NO: 203688 - DNA, 531 bp, Klebsiella oxytoca
atgcagggaatagttaaagcagtgccgctgttatgttttttactgctgggctgtgatccggcagaaaaagaagcaccgcgcggcagcgggaagaccagctacgtggcggctaatctgctgggctataaccatatggcaggcacgaatatcaactggttctccgtcaacggctaccggggacacgccgggggggttacctgctgcatatcgctgccggaaaaatggcggcccaatatgcaggtggcagtggagtgggaggtggatcctgacccgtttccgaaggatatccccagattcagcgaccctaagtatgatgaatatatagaaaaacacagggctaactatcgccattataaagcggtggccactattcccgaatatgaagattcctgcggcctgcaggtgcatttcttgccctgtcagcagattaaagtaacggccacctgccacgggccgactcatcctgaccacccgattaaagaacctttcgatctgccggagcctggccagtgcccgccagaaacgccatga

SEQ ID NO: 203689 - DNA, 546 bp, Klebsiella oxytoca
atgcgtcaagcatccattgactggggcctgccgtattctactttaaataattattttgctaagggagcaacgcctggtcttgatgtagtaatcagaatttcagcctatgaaggcgtatccattggctggctagcaacagggaggagcgattggggtactggtatgaatgaagatgccctgaaaagtctggatggaacagggcccaccaagctctcattcaactcaaaggagggggttactgaagagttcttagtacaacacagcaaaccagaagacgctctatcgctaacatggggagctatttttgatgccctcaacgtcaatgacaaagcaaagctgattaacatttttgtaacctttggagctcaaggcgtgataagaatgtttaatactatcaatgaggtaaattcaacttggtacgagttaactaatgaggagaaagaacgtctgataaggttaaacatgcaaatgaaaaaagaggcatctgaaagtagtgaaggtgtgaccaagccgacctcatccagttctagcaagaaggccagttaa

SEQ ID NO: 203690 - DNA, 258 bp, Klebsiella oxytoca
atgaaagagacgctggtcgtcgacgatacggatgcctacattcaggccggaatacaagggtttgggctcattcgggttgccagctatctggctaagccgtacctgcgcagcggcgcgctggtctcctgtctggagaacttctcttctgctttgcccctttcgctggtttatccgcaaaacagataccttcctccttcggtacgggcgttctatgcgtggagtaaagcgctgttacagcaggcggtcactgacgaataa

SEQ ID NO: 203691 - DNA, 801 bp, Klebsiella oxytoca
  misc_feature (731)..(740): n is a, c, g, or t
atgcatacatgctcccgagatacacaaggtacgcctatcccgcttgagcttacattttgttggggtcatcagaaattctggggaaacgctcgtgagttccagtggttcagagcagcccgagcttctcatgtaattggctgtgctttaatggcactcgaacagtggtgttatgaagaactaatgcgtgctcgcccactcgatgacctgcttgaacaagttgttatcggccatgataacattgctatcctgggcgtcgccgcaatgctaacactacatactaagacagtttcccctgctacattgccgctgctaacatcacaacgagtgctaagtgctgatcagcagcgaatgcaccaagacttaatttcttgttcgggcatgttttcttccgacggtcagaccgatccctcacttattgggactacatctaccgcatctatacaaccagaacggcaacaaactttgacaagccttatttcatcacatttcattaagggtgatgaatatagcgatattcttaaaaagaacattctcagttttactgataatctaccttttgagtacgaagagttgcgtgatcggcctgagtgtatttctagattgaggactgaagccttaaagtatgctgaattggtagactggaataactacaattttcatgaagttgagaataggccagacctgatagcggtttctcataccagttctttttcagaatatcgctatattcnnnnnnnnnngccaaaagagaaactgcttcgaagtttattaacgcaactcgacttttatcatggtgtttga

SEQ ID NO: 203692 - DNA, 1086 bp, Klebsiella oxytoca
atgggaacccgaattaacaaagcaggtaagacggttccccggcgtctgaacatggggctgggtccttgtcaggaggtttctctggcagaagcgcgtgacaaagcgcgtgaggtgcgtaagcaaatccgtaatggcattgatccccttgaagaaaaacacgctcgtaaagcgtttcaggaagctcaggcccgtaaacaaaaaaccttccgtgaatgtgctgaagcggtgctggaaattaaggctactgaattaaaaaataaaaagcatgtggcacagtggcgttctacgctggaaacctatgcctacccggttgttggtgataaagcagtcagtgaaattaccaagattgatttgctggcaattctcgaaccaatctggttaaccaaaaatgaaacagccagtcgtgtgcggggacgtatcgaaacggtaatggattacgccaaggcgaaagagtattttgaaggagataatcctgctgcatggaaaggggtattaaaacccttattgccaatgccaagtaaagttcagaccaaaaaacatcatgcggcattaccttataaagagatagcctcatttatggcagagttacgccagcgggccggaatttcagccagagcactggagttttccatactgaccgttgcccgttctggtgaaatcagaggggctgaatggtcagaaatcgatctggatacgaaaacgtggattatccctgctgaaaggatgaaagctgcgaaagagcatcgtgtaccactgtctgatactgctgttgagattcttaaggttttaccacgatttacagataacaatcttgtttttccagccccccgtggtggacaactatcagatatgtcattaacagcggtattaaaacgcatggggcgtagtgatttaacccaacacggtttccgatctacgtttcgtgaatgggccggagagacaacaacataccagagagaggtgattgaacatgctctggctcaccagttggcagataaagcggaagcagcttaccagcgcggcaccttatggcctaaacgtgttacgttaatggatgactggacaagctattgttctgtagggtaa

SEQ ID NO: 203693 - DNA, 2220 bp, Klebsiella oxytoca; identical to SEQ ID NO: 177774

SEQ ID NO: 203694 - DNA, 444 bp, Klebsiella oxytoca
atgagtgtgacagaggaaatgttaatagactatgacttgttgcgccctaccgccaggcagtggaggtacagatattcggttggctctggttggctgtcagccagctcaaaagagagtgctattgagggagcgaccgaggcctacctgaaggcatcgccggatgagcttctcacaagagatcagcgatttgaaaaagcagatcgtgaagaaatagagcggtctgaatcaatgtgggggcatatgcctattgccgagctactgaatatgtttgaaaaaatggggggagatatcagctcccttcgcaactcaagtgcccttgaatttaacggaaacggtgggcgaagtacatcccgcgccgtatcagctcagggagcgcgtgatacagcagaaacgagaatgaaactattacgttacattgaatggcgtcaggagcgtgcagcatga

SEQ ID NO: 203695 - DNA, 1623 bp, Klebsiella oxytoca
  misc_feature (1577)..(1586): n is a, c, g, or t
atgagtttatctacttttttattaaaatgcctaggtcctattgggcgtatcgttatgcctaaagcaaagcaaatttacgctgagcatacggcgggaaataagccggatgaagccatcgaacttcaattggataaatttctaaatgaagccttgggacggctgggggttgtggatgactcgaaaccttggtggtcaactgctatgaatgccctaggtaaagcggctgttcagccagaatcatttaaacgtcctcatatacaaaagtggttaactcagcaagagacgcaataccttcttaaacaacttatcagggataagcttactggtaatgaatactcacaagaaagccttaatatactcgtttcaagctacattgaagaatcttttgagagtaagcagtacgctatttcgataatcactacagcacttgccgtactcgaagccagtgtattgggttccattaaagataaaggtactgctgctattgttcaggcttatggggacaagcagttggagtttctgagcagtctgcgcgaaaatcttaatcacctgatacctgacgacatacggcagattgtcagaattgcacaaaataacgcagaaagcattcagtgcgatataggtggtatacaaatagaacgtacggcatttctgcaggatataaataacctcatcaaatcagtccaattcattcaagtccgcggtttacctggcagtgggaagtctgtactactaaaacaactggctcagcaggctcttgataaaggtcccgtactttttctcagggctgagcagcttgaaggaaaaagctggttcagttatgccagtacgcaggggttatcagcacagccgctattccagttgctctcccaaatagagaaagttggtactcccgttatattcattgatgccattgatagaacggaaaaagagcaacagcctattattctagatatcattcgtactatcatacagtcaccagagcttgcaaattggcgtattgtagcatctctacgtgatacgagcgttgatgcactccagcactggcttggggatacagttaatggaatgacattaggaaccgtatccctcaacaatctaagtaacgaggaagctgaaacacttgcagcagctaatcctctgcttagatcattgctttttagttcaacacagcttgaagatattgttaggcgtcccttctttgcgaaagtactccatcagaattacaccattgatccccagtcaacttttcagcctcgttcagaagtcgacttgattgcccaatggtggcaacgaggtggatacaatgagacaggtcagtttgctgtagagcgtcagcgccaactcattgagttggcaaagctccaagctcatgccttaaacaaaccgatcaaaatgaatcagctttctacaatgatgcatattgacgcaatgaagtctgatggccttcttgactctgtgcgtgacggtatctctgtacgttttacgcatgatatcttcttcgaatgggcttttctccatgtcattgctgagtgtgaggagcgatgggttgatgagattcggtcctgtggtgagcnnnnnnnnnngagtacaactatggggaaaactgggctgcctggttag

SEQ ID NO: 203696 - DNA, 765 bp, Klebsiella oxytoca
ttgcctgactttgccaagcagcaagatccatacactcgagccatttttgctgatggttgtcagcttttcaaaaaagctttagtttggttccaggcgactaaaattacgccgaacgagtccatcaatactttcgcctttccctctgaaactcaacagcaatatgcctacctagtaagctggccctccgattatcttttatggcggcgttttattgaattcattcttgctcacatatctattgtcccaaagagactctatccagatattctcgctgtatttgaggtttggcagaacgtgttcttttgtaccgctaatcccatcacccataaactcttacttcaatgtaatatatggttaaatgatattgataatattaattaccgtgataattggaatgcaaattcctttgattggcatgaaatacctgaacttgaaaaattcaggaaatctttgagacgactaatttttctctcgtcaaaggctgaacctgagatagtctcaacctatctactcaactcaggtcggtcgaatacgctacgccgagatgtttttgacgacgtattaactctttgcccgatattggcacaatcgcaccctagcgaaattgttaatattacattggcctgtttaaaagaagaattacccgaagaacaacttgttcaagcaggtcatcgagtgggcgagcacgcattagttcttcataacaccactgttcgagtgccattaaagcacagccaattacatgagaagctcgggctgctctga

SEQ ID NO: 203697 - DNA, 285 bp, Klebsiella oxytoca
atggagtttggaaatctgattaacctttcacaatcatctctgtgcaaagcattgaatatcgcttccggtaatatgtctaacatcttcaaaaaactcagacaaaaaggaatactcgtcgagcatcatggacatctctatatcaactctaacattttcgcaaaagggatgagccatcaactggatcagaaacgtaaagaacagctgagcaacgctcgcaatctttgcgcagaaatagaacagtatccagaaagttatccagctatgtcaaaaagtgaaagtcaatag

SEQ ID NO: 203698 - DNA, 480 bp, Klebsiella oxytoca
atgaaaagagtcaaattagataataatgatttaatccagtatttagatacaatcaaagaactaaaaaatcatatcccaatagaagaatacagaaacgaatatcgtaggctacgctctgatgatatccctttaatcaaagcccaaaagtttaaatctgcacataccgaacttcgcaggctggataaaaagagactctcatttatagagggttttgttaatgaacttaatcctatcagcagttcaatcgctaacacatctgcaagatcatcaggaaatcttgataagattaatgaaagaatgctctacaggaaagcaattgaagaaaaaagcgatgaagaaataattgccttagtcataaaacagcgtacagaagctgcactggagtttcagcgttcaattgaacagagtcttgaccagctaagtcacatctcgtcaatgctcgaaccatcaagccaaaagcgcaggaaaatgtccctttaa

SEQ ID NO: 203699 - DNA, 1071 bp, Klebsiella oxytoca
atgaaccatatactggcaattatagaaaaactcaatactaacaatggcgttatagacaaagaacagttgccgaaaataaaagatacaattaaaaataacaaaaatcttgtttctgtgatgacttcacctattctggtaacgctttttcatgtctgttatccattcatggatattatcccaaataatacagtagaattttattctaatctgtttatgacattatatcttcgccatgacaaagttaaaaactttgaccgcgaaaaatcttcctctttaagccataatgaagcatatgactgtttctgtacattatgtttttactcaatttatacgaataatcatgaatttacagagcagtcactaaatgaatatacagaaaaatcaatgaagttaaagggacgatttggtgaatgcaaagcggagtcattagctcaggattttattaatgtaacttgtttgattcagcgggaaggatttaataaatatatctttaagaaaaataaattttatagttttcttgttgaagatattaaaaaaaatgaattgcgtttttctaatgttatagtattccttaaagaaattgatgtcatagattgtgcaaaattcttaataatccctctatgcgaatattttggtgtttcaaaatggaatgctttgaccccattggaatacaaggatttattacgtacgtttttctccgatacctacattcatttatttaatgacaataatgaaaaagatatcatggggttcagttcattatcaggggttagtggctggatgcaattattagatatcagtggcaataatgatttatatacacctgtgtttgaagtattaatagatgaatcattgtcaagtgcgaattttaaagatgttgtaaccagtcaagagcagaaaatagtaaaaatttcatttatgaaggtaataatacaattagggattgaagacaaaatagctgaagtgtttatcaaaaacattcagaagatacataacgaagtatattgtgaggccattaataaagtaaataatgaggatgttagtattaaggagttctttgacctgatctaa

SEQ ID NO: 203700 - DNA, 708 bp, Klebsiella oxytoca
atggattttatatatcaggaattagcaaaagcagggatagcactttctgtcaaagagcttttcactcgtgtggtatctgcatgggataaaaaaaatttaagtgggaagcaacttgttagagagttgactggttcagatgtatacctgaactatcttgagaaacatgtagcaagagtggtccgactaagaacgatccatagtgctgattatgatattctactgactaatttatatcatccattaggtatcacatctttatctcccggtgcaactgaacataaagtcaatgacggcttctatatagaaaatcaacatattactaatatcataggaatagcagggcaagggaaaagtactattttaagaaaactgttcatagaacaaataaagaatggaacaaaaataccattttttattgaattacgtagaactggaaatgatgggatcattaaatctcttgaaaatacattaatcaatcttggattgcacccgacatcccaagcaattgatgaattgttatttagtaataaaatatctttaatgttagatggatttgatgaggtcaactcaaagcaaaaagatattttactaagtgagatattgatgttgaacgtaaaatatgcattgcaagtaatagttacgtcgagaccgggtacaactgtttgcaatgaaccatatactggcaattatagaaaaactcaatactaa

SEQ ID NO: 203701 - DNA, 1035 bp, Klebsiella oxytoca; identical to SEQ ID NO: 202155

SEQ ID NO: 203702 - DNA, 459 bp, Klebsiella oxytoca; identical to SEQ ID NO: 178033

SEQ ID NO: 203703 - DNA, 285 bp, Klebsiella oxytoca
atgctccttgtgttggtgctgattggcctgaatatgcgtccgctactcacgtcaatcgggcctttactcccgcaattacgtgcggccagcggcatgagttttactgtggcttctcttcttaccgcattaccgatggtcgcgatgggcggactggcgctggcgggaggctggatcactcgtcatattcgcgagcgtgatagcgtggcggtcggtctgttgatgatcattattggggcgctaatgcgtgagctggcgcctcacagcgtggtgctgctgactaaatag

SEQ ID NO: 203704 - DNA, 471 bp, Klebsiella oxytoca
atgatccacgcacaaattaaccgcgatattcgcctctctttggctgaccagattctgcttatcaaagcgaaaaaagatctgacctttgcgcaactcaccgatggtacgggcttatctgaagcttttgttaccgcggccttgctggggcagcatgcactgccggctgatgcggcgcgtctggttggtgaaaagctctcactggatgaagatgcggtgctgcttctgcaaatgatcccactgcgcggcagtattgacgatcgcgtacccactgacccgaccatttatcgcttctatgaaatcctgcaggtgtatggctctacgctgaaggtgctggtgcatgagaaatttggcgacggcattatcagcgccattaacttcaagctggatgtcaaaaaagtggctgacccggaaggcggtgaacgcgcggtgattacgcttgatggcaaatatctgccgacaaaacctttctaa

SEQ ID NO: 203705 - DNA, 660 bp, Klebsiella oxytoca
gtgaaagagattattgatggctttttgaaatttcagcgcagcgtctttcccgaacgcgccgagcttttcagatcgctggcaaaccagcaaaacccacgcgcgctttttatatcgtgttcagatagccgcctggtgccggagctggtgacgcagcgtgagcctggcgatctgtttgtcatccgtaatgcgggcaacattgttccttcttatggcccggaaccgggaggcgttaccgcatcggtggagtacgccgtgtcggttttgaaagtaaatgacattgttatatgtggtcactctgactgtggcgccatgacggccatcgccggatgccattgcctggacagtatgcccgccgtcagccactggctgcgctatgccgattcagcccgcgtggtgaatgaatcacgcacgcatatttcattgcaggcgaaaaccgcatcaatggtgcgtgaaaacgttatcgcacagctggccaatattcagacccacccgtcagtacgcctggcgctggaagaggggcggatggcattacacggctgggtttacgacatcgaacgtggcgatattgccgcctacaacggtgccagcgggcagtttgtctcgcttgccgaaaatccaaatacctgcgcgatgccgcttcgcagcctcaccgcagcttaa

SEQ ID NO: 203706 - DNA, 888 bp, Klebsiella oxytoca
atgctgttacgacatattcactactttctggcagtcgctgagcatcgaggctttacccgtgccgccacggcgcttcacgtttcgcagcccgcgctttctcagcaaatcagacagcttgaagagtcacttggcgcgcaactgttcgatcgcagtggtcgccatattcagctcaccgatgctggcgaagcctggttgggttacgcgaaaaatgcgctgagatcgctggaagagggaaagcgggcaattcatgatgtcgaggatttgagccgtggctcactgcgtgtcgccgttacccccacgtttacctcgtggcttatcgggccgctaatggcgaggttttatgcgcgctatcccaatatcacccttgcgttacaggagatgtcgcaggaaaagatggaagagctgctgctcaacgatgaactggacatcggcatcgcatttgatgatgttcattcggcagacatcgacgtactgccgctactgaaggaatcccttgcgttgatggtgtctgaaagccatcctctggcgcaacaggagtgcgtagccttgtcacatcttaataatgaacgactcattttactgagtgaggaatttgcgacgcgcgaacaaattgatcgctattgccgccaaagagatctgcatccgcagatagtaatagaagcaaactctatcaatgccattctggaactggtgcgtcgtacaacgctcgccaccctgcttccatcgccaatcgccgcgcaaaatgagggattaaaagccgtttcactgacgccgcagttgctggaacgaaccgccgcgctgatgctacgcaaaggcgcgtggagaacggccgccgtgaaggcatttacggcaatggcgcaggaagtgacgaaaacgtacacccggtaa

SEQ ID NO: 203707 - DNA, 636 bp, Klebsiella oxytoca
atgacatcaaccgcactctcatcgacactcaaaggcggcgcgctgatcctgttgcttgccctgatttacaccggcctctttaccgctgaccgcacgacctggctcatggaggtcaccccggtcattatcattgtgccgctgctattgtccacgcatcgtcgctacccgctgacgcccctcctttacacgcttatctttttccacgcgcttattctgatcggcggcggcatgtacacctacgccaaagtgcccatcggcttcgacgtgcaggagatgtttaacctgagccgcaatccttacgacaaactgggccactttttccaggggctggttccggcactggcggcgcgagaaattttactgcgcagcggctacgtgcgcgggcgtaaaatggtcggttttctggtctgctgtatcgctttggccatcagtgcagcctatgaattgatcgagtggtgggcggcgctggcgatgggccagggcgcagatgatttcctggggactcagggcgatccgtgggatacgcagtcggacatgttctgcgccttgctcggggcattaaccacggtattgctgcttggtcgggcactgttgcaaatagtcggtggtgataaacttatcatccccttttgctga

SEQ ID NO: 203708 - DNA, 168 bp, Klebsiella oxytoca
atgaaaaagcatctattagccatgatggtgactgctatttctgcaggcggcatgatgacttccgcttttgcggatacggcgaccgtttcgggtggcactgttaattttgttggccaggttgttaatgccgcctgttctgtttctgctgactccgttgggctttgttga

SEQ ID NO: 203709 - DNA, 1503 bp, Klebsiella oxytoca
atggcgatatacagttttaaaatggagaatatcagcagaggcgaaggcaaatcttcagttgcctccgctgcatatcgtcatcgtgaagtattcactgataatcgtactggtgatattcatggtcgtaaaacagcgcataaaaaggacctttattttgcgcagatttttgcccctgaaaatacaccaccagatctgatagtagatagtgaaacactctggaatgctgttgaagcatcagagaagaggaaagatgcccgtctcgccaaagagtttaaaattgccctgcccgctgagctaacaccagaacaaagcattgaactcaccgctgcttttgttcttgaacacttcaccaagaagggaatcattgccgatgttgttatccacgatattaatggtcataacccccatatccatatcatgggaacaacccgtgaggttcattctaccggctttggtaaaaaggtccgtgagtgggataaacctgaaaccctcgatagctggcgtaagggctggcaggacttctgtaacgaactccttgagaaatatgaacatgagactcgtgttgaccaccgttccatcagggttcagcatcaagaagcacttgaactggcagcagtggctgttaacaatgaagacaaagctatctggcttgccaaagctgaagaaacaaaccgtgatccaatgcgacacatcccccgtagtcgctggaacactcagaccgctcaacagcagcgtgcagcagaacaggctgttcgtgatgacaggaaggaagaagccaagaagacgtattccctgtttaaagatctgccactggatattgtggttgatgtcaggaactttactgtatctgttctccctgagccggaggaaatcatattggctgatgttctcgccagtacagcagataacagaaaaacaatacctgctccgacgattccagtttcacaaaaaagaccagcaacaaaatcatatcgtgatcctgataagctaagtcaggttaaccgagaccccaaaccgtcactggtgatccctacctcacctcggactaaactgaaaacccccacttctccagcaactggcacgattaaacgcgctcctgttaaaagtaagaggaagcaagttaaacctcgccagagtggcgtctttaagcgtttcacagtctatatcatagactttttcaaagaaaaatttgtctgggccaagaagaagcctgccacggtttcaggcgatgttgaacacgataagcgtatagcagaaaactacgtgttcgatgaagtgctgggcatctatgtgccacgcactgaacatgaaaaacgtgtcagattcaacagtgacacgtatagtccaaaaccggatgagatcatgcgttttccaagtcgcactaaagaggaacagcgtaaagcaggtaatgatccgggctatacctcttcatcgcaatcagtatcagaaagaaataagaatcattcttcatttagggcatcagtattcaataaaagtagatga

SEQ ID NO: 203710 - DNA, 675 bp, Klebsiella oxytoca
atgaatgtatttaacagcaatgattatgaaagggcctgcatatggtatgaacgcatcaaatattgcgttgaaaaatttaacataaaaatagaaattctaaaggagaaattagcagtggatttactgaacaatcaaagtgtcaactattttcatacagattaccaatcgataatagataactttgaaacagaagtttatcacattattgaaacatatgaagtagaacaacgatacctgccattcttatgtatgatagtcgaggagtatgttgatttaatatatgactcaaccagctttgttttacgtgtgttaggtcacaatggttttcatgagcctcataatattccaacctttggctatgaggtatatgaagctattggtatattaaatttaggcatagaagatttaaaagagcagacaatatataaatatcataagatggattttgcatatcacgattggtactctaagtatggcgaacaagagttgattaaattatgtactagttttgaaggccgagtcgcagggctatttaaagaatactgtttcgagaaaaactgcattcctgtattgatggctatcattattaatgaaactgaccagatttatggattttcagattacgggtttattgattctttaatcatagctatagaggacaggatggatgaataa

SEQ ID NO: 203711 - DNA, 132 bp, Klebsiella oxytoca
atgatatgtgaaattatacaagggtttaaaagtttcggatggaataagaaaaataaagacataagttcttcgaaaaacaaggcatttgcccgactgcaatggattacaaaaaaagatcgtggtgatatataa

SEQ ID NO: 203712 - DNA, 330 bp, Klebsiella oxytoca
atgagagagtcagtattagttaaatataggaaaagtcaaaaaggattttccctgttagagcttttgttagttcttgggattgttgcagcactaataatagcctcatttatcgggtatccgaaggtaagaggtgcaagatatgttgatatcgaagctaaacatattggacagatttatgcctctgtgaggaatgtgtatgcagggcaacctgactacagcgggctggcaacaacagcagtggctatacctgcacaatttttcccggatgacatgctttcaaaaaaaaaccacatggggaatatcatcatgggggggctatgttgtcgttga

SEQ ID NO: 203713 - DNA, 279 bp, Klebsiella oxytoca; identical to SEQ ID NO: 88479

SEQ ID NO: 203714 - DNA, 477 bp, Klebsiella oxytoca
atgaacgatagtaaagaagccaaaatcgcaacactaagcaatattcaatcaataattaacagactagcagatacctcttcaaagctaaaagcaacatacataacaatcgtttcagcaattctgactgtttttatgacatatataataccaaaaaaagaaggtatagaaggcccattcaacccagaagaaaaattatatagcataataatatttctggttatttttttagcgtttcttctaatagactcttactaccttagatatgaaagggttatgcgaaaagtttatgactcaaaggcgcgtgacattccagacgatataaacagcgttataaattactttgatattagcgcgacgtataaaaaaaccctaaaagaaggtggcgttagttacatgccaagcaagtcacagtttttattttattttgtcccctttcttgttatatccataacaatatccatgatggtactgaggtga

SEQ ID NO: 203715 - DNA, 837 bp, Klebsiella oxytoca
atgcaaaaaaaatacactataaaacttgaacagttgcgttctgatttagataattacaaaaaaagcagctttgttcattcggacaaattaatgtatgatggtataaacgtcaacgatcgagacaggttaataaccgaaataaaaaattacatcaaggataatgatgtaataaacacagaaaccatcattaataaactattcccgacgaaaaccccgcacctttttatatcacacaaaagtgaggatgcgaaagaagcaataacacttgcaaacatattacactcaaaatttggcatagaatcatttattgattctcaagtatggcatcacataaacgacattcaaaaaatacttgatgacgagttttcaaaaaaaagggaaaacttatatgattataaaaaatgcaatatagtatccagcaatattttctcaatgctttcatcctcgctttacagaacgatagatgactcagatggatttatttatatagatagaaatgacgcacacgaagacattggcatatcgaaatcaaacatggttaatattaaaacagaatcaccatggatttatttggagaacatatacacgaactcattaagaataaaacaacacaatcgaaaaaaaatcatgttagaaaaagctgggctgaacaactacgcagcagattcacaagtatctacagaaagcaggaaagaaccaaaatttatttactcaacagacctagtagatgcagtggaaatcaaaagcctcaataacgcatttaacgttcaatatgacaagacaaaaaagcaccccttagaaggccttgattatttttacagcatcatcttagtatag

SEQ ID NO: 203716 - DNA, 249 bp, Klebsiella oxytoca
atggaaatcaaatgtattgaaagtgagcaaatatattttgctaagatgaatgggtatagtttcaaactgtcagataagaaatggcaactggataaagaaaactgtgtataccctcataaagttgtagatagaatgcctacaaacatgaaacttagctacttaaaacattggcttactatgcgtctgaatatagttctttctatattaaaagcattaacaatttattttataagtggtttggtgcgatga

SEQ ID NO: 203717 - DNA, 135 bp, Klebsiella oxytoca
atggaaaacaataccatcaaatgcccgtactgtttcaaagagggtcaacgtggttttcacgtttgcactgggtgtcaggtgattattctgtatggaacctatatagtctggtatgtgtttgtggttattctgtag

SEQ ID NO: 203718 - DNA, 552 bp, Klebsiella oxytoca
atgaagacgattttactcattgctggcgtagctctggcactggcgggatgtggtgaaaaaggcgattttgagaaagcgatcaacgcgaaaatatcacaatcaaagctgtgctactccctgcaggacaacgacattgtattcaacaaaggttttccgattaaggttaaccgtggctaccgttctgccggatacagtgccagtgatgaaatccttaaaggacttgctgaacagggtctgctcactgtttctcagcagtctaacggctttagcagtgttgatgttctggaagtaacagacaaaggccaagaggttgagttttgggttcgtaaaggtggtgcctgcgttggtcatcggattgttgacaagattacagaatggacggaaccgggtgaaggtagtcaaaaagtagttcgcgtatcttatacgtggaaactggctgacgttccttcatgggtggacaaaaaagcgttctccagcgtcaagggtatgaatgaacctgaagagagcatgattaatcttgttaaaaccagcaatggctggaaagcgctctaa

SEQ ID NO: 203719 - DNA, 192 bp, Klebsiella oxytoca
atgcactgtttaacccaggttgtggtttcctgttttactagttttttgctcagcgccgtggcgattgaaaaagagcttagttttaatatggtgttgctcgccgcggggcttggcggggtatttgcagggccgattttgaaaattcttggcgagaagattaaaaaggctctggaaaatgcaaaaattcattaa

SEQ ID NO: 203720 - DNA, 1077 bp, Klebsiella oxytoca
atggctacatttaatgtcccgacgctccgccagcttattcgtgccggtattcaggatttagagattgaactcgaccaggaattaccgattatcggcgttgaacgcgcgttaaataccgctttcagtggcgctttacgcgacgcctacgattatcagacgtggattaaaaaccagataatcccgtcagagcagtccgccgacgaaaccattattgataccgcccgctatgagggcgtgatacgtaagaccgcatcctatgccagcggaccggtcaccttcaccgggacaaagccgctggtgattgatacggagatgcagacgcaggacggtgtgcgcttccacgtcaccgccaccagtgacccgtcagcgggcaaaatcaccgtcaccgtgcaggctgacgagacgggcctcagcggcaacctgattgcgggcgacgtcctgaccctgatttccccggtggccggagtgaacagcgacggcgtggtggcggatgccggtatctccggcggtgcggacgtcgagtccgtggccgagttactgacgcgcctgctgtaccgcaagcgcaacccgccaaccggcggcgcgctgcatgattacgttatctgggccaccgaactgccgggcatcagccgggcatgggcctttgactgctggcacgggctgggtacggtgggccttgcgtgggtctacgaccagcgcactgacattatcccgaccggcaccgaccgcgaggcgatgcaggcgtacctgttccgccatcaggacccggctaccgggacatacgtcggcaagcccggcggtatcgaggtctggcccattcccctgacgctcaagccggtgccgctgactatccgcatcattcccgatactgcggccatccgttctgcagtcaccctgagcctgcaggcgctgttccgctcggtctcgccgggcgacacgctgctgctctccgccatccgaacggccatcggctcatcgacgggggtcacggattacgagctggacctcaccatcaatcaggccagtgagaactacgagctgctgacgctgggggctatcacatggcgcatcgtgtag

SEQ ID NO: 203721 - DNA, 498 bp, Klebsiella oxytoca; identical to SEQ ID NO: 178003

SEQ ID NO: 203722 - DNA, 204 bp, Klebsiella oxytoca
gtgaccgcgccgctggcgggcactatctggaaggtcattgccgcggaaggccagacggtggccgaaggcgacgtgctgctgattctggaagccatgaagatggaaaccgaaatccgcgctgcacaggccgggaccgtgcgcggtatcgcggtgaaatccggggacgcggtggcggtgggcgacaccctgatgaccctggcgtaa

SEQ ID NO: 203723 - DNA, 354 bp, Klebsiella oxytoca; identical to SEQ ID NO: 178045

SEQ ID NO: 203724 - DNA, 288 bp, Klebsiella oxytoca; identical to SEQ ID NO: 178031

SEQ ID NO: 203725 - DNA, 282 bp, Klebsiella oxytoca
atgccacgcggtaaagcgtggccacgcgaccagacggcggcgctgacgtcactgctccggggcttcagctcccgcctgcagctggcggaggcgaacgcggatttgctggtcaccgagatgcgcccggagaccaccgacttactgttggctgactgggaggactatctcggtctgccggactgcaacgccatccctgacggcttcgatcgccgtcgtgacgccgtggtggagaagtatcaccgcaagggcggactggctacctggcagattgagcaggcgtga

SEQ ID NO: 203726 - DNA, 288 bp, Klebsiella oxytoca
atggcgtttacattatcagcacctaaaaccgttcagatccattatctcggcgggtatctctgcgatcgggaaactgaaattgagctgatttacgccgtggaaagcgtcagacaggacagcggtggcactgttacggcctcgctatccgtgcgctacgacgaccaggcaaaaatcatgacgggtgattatccggtgactctggacgtcacatcgtctcagtcatgggccgaacaggctgaaacgcaaatcatgagcttagatgaattcgccggcgcaactgctatttaa

SEQ ID NO: 203727 - DNA, 210 bp, Klebsiella oxytoca
atggctgacaaattaatcccggtgaattgccgcgtaagcgtgatggccagccaggtggcttgcgtcgttgcgcctgattataaagatcacgtcgaagttcacctgctcgatgggcgcgttgaatatctggagttctccatgcgaaatgaccgttggaccgccaaagaccgctttgaacaggctgttaacgacgctttaaagggggaataa

SEQ ID NO: 203728 - DNA, 246 bp, Klebsiella oxytoca
atgaccccggaccagatttaccagatattgctcggcggtctgggtctcttcggtggcatctggatacgccggctgcagtcagatattcgcgatctcgaaaaggccgtagagcgtatcaaggatgaatatcagcgccgggaagattcccgccgcgaccatgaccagctgattgaccgcatccgcgatatcaaggaatcggtcgatcgtgtactcgaaaaactggacaagaaggcagacaggacatga

SEQ ID NO: 203729 - DNA, 699 bp, Klebsiella oxytoca
atgaatagccaatcaacaatcaccagaaaacgtcttgaggcaattgcgtacggctccgttcgtcagagccaagaggaaggcattgaacttgcccggatggccttgactactatcgatagcgaaatgccggtgcaagattatttttcattgctggtatctgctgcaagagttagggctgataaggcgatgcgcaagtatccgcagccgaattacgtactaaacaaggtggcagaagagcacggcgaggtgataaaggccgtaatccactacaccgaagggcgcgaagagtggtcgaacgttgaatcagaaatcattgacaacctggctatgctgctgcgtctggtcatagagggagatcaggttatagggtttactcctcctgacgcacgctataacgggatctccagtgctgacaatgatatggcgcatcaaaaccgagttatcagcatcagacacaagaattattcccgtcttgatgattttgaaacatcagctcgttcatggcttgatgctgctccacagcctgccgaccaccagaccagtacgttagtgatgtgggtcaagcgtctttccctgtcacttcgctctgtaagccctgataacaaattacctaaagcggcgatgagttatctgcaaaataacggccttatcagcatcgctgattgccttcgggggaacaatgaagagcctcctgcgtaa

SEQ ID NO: 203730 - DNA, 1404 bp, Klebsiella oxytoca; identical to SEQ ID NO: 32307

SEQ ID NO: 203731 - DNA, 147 bp, Klebsiella oxytoca
atgaagagattttttgatactgatcctgaccattacagcaaatacgccctacgtcggtttgccgcagtggtcaacactgccggatggattgcatttttggtggtgacctggattatctgtgtggtgattgagtggtggactgcatga

SEQ ID NO: 203732 - DNA, 666 bp, Klebsiella oxytoca
atgtctgacctgctgaaccccgcgcatattgcccatctgcggcacctttttcactgccattctccccttgttcactgcatgaccaacgacgtggtgcagacctttaccgccaacgtcctgttagcgattggcgcatcgccggcgatggttatcgatccgggcgaagccagccagtttgccgccattgccgatgcgctgctgattaatgtcggcacgctgaccgttgagcgtgcggaggcgatgcgcgcggcggcgcatagcgcaacgcaggcgggcaaaccctggacgctggacccggtagcggtcggcgcgctgaccttacggacagaattttgtctggagctgctggcgctgcagcctgccgccgttcgcggtaatgcgtcggaaatcatggcgctggccggaatgagcggcggcgggcgcggcgtcgatacgaccgataccgccgccgcagcgctgcccgcagcccaggcgttagcccgccagctgaataccgtggtcgcggtgaccggggaggttgattacgtcaccgacggccagcgcattcgcatggtcaccggcggcgatccgctgatgacccgggtggtcggcacggcgcagcagggcggccccggcagctttactcccgccttcctcgatgcgctctatgcgggaggcgatctgtga

SEQ ID NO: 203733 - DNA, 378 bp, Klebsiella oxytoca; identical to SEQ ID NO: 184901

SEQ ID NO: 203734 - DNA, 375 bp, Klebsiella oxytoca
atgagcgaagtgatggcaccaaaagatacggcggcgcggcggcgtggtaagcccatagaagtctgggtaacggatgaggaaaaagctgccattacagagctagctgaccaaactggcttgtctcgttccgcttacttgcgcgccgttggtctgaacagaccggtcggagcacgagccgatcttgaggcagtgcgcgagttggtgaagctgaatggcgatcttggccgggtagctggcctattgaaactctggctcgcggaaaagcgcggtcaaggtgcaaaacccatagacgtcgagcggatgatgatcgatttccgcgaattgcaggtagggattcgagagcagatgagtgctatcgtctttactcggaaatga

SEQ ID NO: 203735 - DNA, 312 bp, Klebsiella oxytoca; identical to SEQ ID NO: 147011

SEQ ID NO: 203736 - DNA, 240 bp, Klebsiella oxytoca; identical to SEQ ID NO: 147012

SEQ ID NO: 203737 - DNA, 570 bp, Klebsiella oxytoca
atgaatcaacgtatagggtacgttcgcgtatcaaccgacgaccagcacctggacctacagcgcgacgcgcttcagcaggccggatgcggcgttatctacgaagaagcggctagcggcaagaacacggctcgaccagagtttgaacagtgtcgcaaggcgcttcgggcaggggacaccctggtggtttggcggctggatcgtctcgggcgcagcctgcccgacctagtgcggatagtggctgaacttgagaagtgcggcgttggactcgagagcttgacggagaagattgagacaggcagtgcagcgggcaagctggtttttcatgttttcgcagcgctagccgagttcgagcgcggcttgatccgagagcggacgcaagctggtctgatcgcagcttgtgctcgtggccgggccggtggtcgtaagcctaagctggatgatcaacaggtgcgggagatcaaggctcttttgcgcgatccggacatgcgggttgccgaggtggctcgacgttatgatgtttctcgcaccaccctttacaagtacgtcggtattgttacgccgcgccaatga

SEQ ID NO: 203738 - DNA, 2157 bp, Klebsiella oxytoca
atgactgaaagattgaatatcacgcgtggtgtaaacaagaagccggttgctaccgacgccttagagcaaagtctcgatatattgcgggacttacagggtgacgtctttacaggctatccgttgatcgctacgccagatggaaaatattcgattgatgctactttggtgagcccatcgaagggcattgttttattcgatttgatcgaagggccagacgttggtgagtatgcagaacgtcaagacgatttggcaaacaagattgaagcgcgattgaagttgcaccgtgagctggtcaaggggcgtcagttgctggtgccactgtcagtgatttcatttgctccaggaataaataatatagaggctgtagccgtagagaactatcccctcgtgaatgagcacggccttgctgctgctcttaacgaactgaattgggtcaatgggaataatgatctatacaggatgacgctctcggctatcgagagcctcagcagcattaggaaaagtcgctctaagcgtgaggttcatcgcttagattcgcgaggagctaagctcaagcgtctagaagattccattgcgacgctcgatcatcggcagaataaagctgttattgagacagtggatggcgttcagcgtattcgaggattggctggatctggaaaaaccattgtgctggcgctcaaggctgcctatttgcatacgcagtacccagattggcgcattgctgtaactttccatacccgctctctgaaagggcagtttcgccgtttaattaataacttctgcatagaacagagtggtgaagagccagactggacgaagattcgtattatcaatgcctggggggctccaggtggggatgctagggatggtatttactatgaatattgccgagcaacgggaacagagtttttagatttcagtaacgcatctggcagatttggaggaaatgagcgagcttttgatggagcttgccaggctgcactggcaaatgcttctgatgctgcgcatctttacgacgtgattcttgcggatgaagcgcaagattttgcccccagttttttgaagctttgttattcaatgctgaagccgccaaagcgattagtttacgcctacgatgagcttcagaacctctctggaacttctcttcctccgccagaagaaatttttggcaatgatgcggctggacggcctctagttacgtttggtgatgaccgtaggcgagatgtgattctgcagaaatgctaccgaaactctcgtcctgtgttggtgtcggcccacggtcttggcttcggcatttacagagaagctccgcaaggagctccgaccggattggtccagatgttcgactatccggcgctatgggaagagatcggatacaaggttaagagtgggcaattggcgaagggtcagcatatcgttcttgaacgtacaacggaaactagcccgagatttttggaagagcattcagatattaacgatctcgtccaattcatcaagtttgatgatgaggcgcaacagaacgcatggttagttcagcagatccagagcaatttgacagtggacgaacttcgccacgacgacatcattgttattcactcagatcctcgaactgctcgtagcagtactggcccaatccgtaagaagctcttcgaagcgggagttcagacccatttggccggtgtagatacagatgcggacgtattcttccgaacagatactccgtcagtaactttcactggaatttaccgtgctaaagggaatgaggctggcatggtttatgtcatcaatgctcaggattgcaatggttccggtccaggtctttctagtttgcgaaatcgccttttcacggcgatcactcggagtaaggcatgggtacgtgtgataggttatgggccgcgtatgcaggagctgattgaggagtttaatgctttgaaacagagtggctttgtcttggattttacatatccagatgaggccctgttgagcaagttgcgcattgttcatcgtgatttgtcaccacaagagcggcaacgtcttgagaaaagaaagagtcaacttgctgatctgctgggtgatttggagagtggtgagctgcatccggaagaccttgatgacataactcgcgagaagctaaaaaaactcctcgggggggcatga

SEQ ID NO: 203739 - DNA, 669 bp, Klebsiella oxytoca
atggtgctgaccccgaatgctatcaaaaaagatattgatggattaatttctgatttgatagaaaaaggcgtttgtgatgattcaaatttttctgcgattcgaccgcatggccgtatggttgatgttaccttcagcggttcagagcatgtctccattgcattgggcgatatcgaatacgccgagatttatcgcgagctagcagataagcgttccttcaacatgaagctggtcgatggcgcattgcttcagataatgtaccgagtggaaggtgctgttctgctacagcacaggcttgccttttacccttccccaagtctgttgccatttcaagatgatccggatgcgtacatgcgcgacgaactgttcattgagattgttcaacgcagaattgttccatttccgttacgttttgattttgatgcgcgagaaggtgttcatgtcgatgctgttcatcccaaaagccatcttacgctgggcgatgtaaaaggttgccgtattcccgtatcagcgccagtgacaccacgttggtttgttgaatttattttgcgcaatttctaccaaacggagaggcatgatttcattagcggcctgccaaggcaccagataaaatttccagcgtctatcactccgaatgagatgggacttatgcacatgttcattccatactaa

SEQ ID NO: 203740 - DNA, 228 bp, Klebsiella oxytoca; identical to SEQ ID NO: 147016

SEQ ID NO: 203741 - DNA, 219 bp, Klebsiella oxytoca
atgcaagagcaagaaacacttagcgtaacaattccatccagtggttacattcgacgcttccgcttggctcagcacctcggcattcacgtggccacgttggatcgctgggttcgcgataagcacattccatcccccgttaagttgggagaaaaaatcactgcttttaatgctgtagagattaacaactggctggcagagcgccgcgggaaggtggtctga

SEQ ID NO: 203742 - DNA, 474 bp, Klebsiella oxytoca
atgctctttgttgccggtgccgaactcccgcagccaggcgttatagctgtgctgtaccgcatcccggcaggtctgtgcatcccagccggtgatgccggcgctcagcagcaacgccgcctccagaatagcgaacctggcggctacgcgatgtacctgctcgccgtagtctgcaggtatcaggctgcgccagcgggcctcactcccccggacagcttctgtagcctgctgctggtggtcggccagccacttaatccactgccgcccagcggcgccgtggtggtgctggtatgcctccttcagcgcatccgcgtgctgcttgccgttctggtgctcgtgaaagtgaaccgccttactcagcgggatattcagcagccgcaccagctgcccggctttggtcctgcgtccggcgcccgcaatgaaggtttccaaatccatctcgcctgtgctgattgccacggtgcgccagcgctttaa

SEQ ID NO: 203743 - DNA, 1410 bp, Klebsiella oxytoca
atgaaatttgacatagatattaaaaattttggaaagataaaaaatgcaaaggttaatataagaccttttactattattgctggtccaaattcatcaggtaaaagttttgtaaccaaggcattatatagcttctttaatactattaataatgatcatgttacttcatcagcatttactagtttaacttttatcaaatcactagttactgctatctcttataatttatcaagaccaagtcaaaatgaatcacagttgatttttgagttgcaatataccgtttctgaaatggaaaaagttattgacagtgaattccgcactaatactttaaccaagcaaatatcaggaatgcctttattggatgccgcatccaaaagggctcaactttattttaatgaacttgaaagcgccattaaaccaaaagcaaaatataaaaaggttgccggtgaacttgattctatcaaagtacatttaaaaacgataagaagtttagtcgaacgtcctaatttatatctggcagatgaaatcgaaaaaggttttattaatgaactaaaagaaaacttcaaagttgcgaaactggcggacttaaaaaacttcaatgcaaatcccgaacaagatatctgctttgattttgataccttaggcgccattcatattaacaatgaaagagtcagctttaagattgccagtaatagcatagacgaattccaacaattatataatgttgtttatttggagtctccaatatattggaagttaaaagactcattagactcgcttagaactagacagagatatttccagtttttagctcgccaaaaaaatgaagggttatccagcgtgcccaagcatttttatgacctgttagatttgctgactagtaaagcaaaggatgaaaaatctttatgtgattcaccattcagcaaaaacattaaaaaagctattggtggtgacttgaccatttctcaagctggtgaaatcctttttaaagaaaaaaatagcccacgtgcggtgaaccttcattcgacggcattaggcattactaatttaggtttgatctcattgttacttgaaaggggagttatatctaaaggtagttatttatttattgatgagcctgaagtgaatcttcacccatcatggcaaaaagtgatggtagagactctttttgatttaagtaaaaatggtattaatgtcgttatagcaagtcatagcattgatatgatgaaatgtattgaaaatattatggacgataatgacgatctaatcgactgtgatcactttggaattaatcagttaacgactgagggtgattctgtcaattcctcaagtaatgcacttaaaagaatcgctgcaataaaaagggatttgaataaatctttcttcgaaatgtttttagatggagaaatctaa

SEQ ID NO: 203744 - DNA, 573 bp, Klebsiella oxytoca
atgcagccattgattaatattgatgattatttcgagttaatggatcatgagtttaatgatgttgcaatacgcccaacaaaagatgggtacagaatagatagaaacgggataaaaaatcgctgcaattatgcaaatttaaaatctgtcgattatttacacgagagcaacaatcagctcaccctaatagagtttagtgaccttgctaagcagcacttagcaattctggataagatagctgcatttaaagcctgtaacttagataaacgtgaaataactcgaaatgtaaaaaggcttcatcgagaaattggcagcgaaattaaaaacaaatacatggacactctctgtatcttaagaaaaattcctaatgtttttcataatgtccctgcatggatgatcgccgattctggccgtctaataattgttgttgcaccgacacaagatgatattgaagaaagtaaaaaagaagatattgttagggtgtttgaaaaattaaaagatgatttaacatgctctatacctgatgatatttttcgaagtgtaaaagtagtccaggtagattctttttttgggtag

SEQ ID NO: 203745 - DNA, 870 bp, Klebsiella oxytoca
gtgattctgactctgacagcgattcggactccgacagcgattctgactctgacagcgattcggattctgacagcgattcggactccgacagcgattctgactctgacagcgattccgattctgatagtgactcggattcggacagcgactctgactctgacagcgactcggattccgacagcgattccgattcggacagtgactcggatagcgacagcgattctgactctgacagcgattcggattcggacagcgattcagattcagacagcgattccgattcggacagcgactcagattctgacagtgactcggattctgacagtgactcggatagcgacagcgattctgattcagacagcgattctgattcagacagcgattcggattccgacagtgactcggactctgacagcgattcggattccgacagcgactcggattcggacagcgactccgattcagacagcgactcggattcggacagcgattcggactcagacagcgattcggactctgacagcgactccgattcagacagcgattcggattccgacagtgactcggactctgacagcgattctgactccgacagcgattctgactccgacagtgactcggattccgacagcgattcggattccgacagcgattctgactctgacagcgactcggattcagacagtgactcggattccgacagcgattctgactctgacagcgactcggattcagatagtgactcggattccgacagtgactcggattccgacagcgattctgatactgaagcacccactgcagcacagaacatcacggttaatgacaatgttggttccatcactggtgtgcttcattccggtgatgtga

SEQ ID NO: 203746 - DNA, 351 bp, Klebsiella oxytoca
atgaacaacattcggcgcaacatgaatgcgctagtgagggacattaccgggcggcgcttacctcgcgcaatgacagccgctttgcatgaggccggattcgtagccgcaatctatacgccagttgacaccagcacgctgattaactcgcagtttaaagaggttattactaacgggacgcgcatcactggccgcatcggatattcagcgaattacgcaatctatgtcgcagatccgactatcccgcagaagttcaccctgcccagggccaggaaagagtttttgcagcatggtgttgctgatgcaaaaccgcagatggaggcagctttcctgcgagaattatcaaaacgctga

SEQ ID NO: 203747 - DNA, 192 bp, Klebsiella oxytoca
atggctactacccctacccaaaatccgcaatttatctggattatcgcagcagttcgccgcgatatgccgacaattaaaccccaacttcaccatatcgccgcaccttctgagcgtgaagcccgccgttctctggttcgcgaacacgtctgcttttttgccggccgcatccgtctggaggtggctcatgcgtaa

SEQ ID NO: 203748 - DNA, 1491 bp, Klebsiella oxytoca
atggcatcagaaaccattccaagaccggagcaagttcgtgccgcgcgcagcttgctcggctggtcgcagcaagatctcgccgccaaggcaggggttgcaatctccacgatcgctgacttcgaacgcgggcagcgcagtcctataccaaacaacgcgcttgccatccgtcaagcgttggaagcggcgggtgtgctatttaccgagacaggcgttagtcatggctttcattggacgttcatgactgagcgcgggacgagtggcttgatcgtcacttttacccccgaagcggccgggccagtgatcgactttgcgtcaatctttggcaaagtcgagcctccaaaggtttcgatcgacacaatccagtgcgcaacgccagaactcaggaacaaggtccacgattacgtcgatcggcatgcggctaaaacgccacatctgttccgcttgcgcaagatgctcgacgacatgcctgacggggagttcttcctgctcctgccaacgccgccgtcctcaacggctgagcaatttcgctatgagcaggtactgcaccagctcaatcatccgcaagagcaacctctagatgaacacttgcaggtcttcgggcgcttgcttgagaaatatgacttgtgcatgcctcgaaccgacaaacatttcaacatcggcaatgccaagaaggcagacagaacttgtcgattttgtggcaactcaaggaagactggagcacaattcaataaggaggcccatgccattccagccgcactgggcaacaagtacctcaagctcgctgacgaatgtgacgattgcaatcagtatttcggagacaagatcgagcccacccttgtcgagcttctcaatatccagcgggtgtttctcggcattgaagctcgcgggtcattgcctactgttaaattcccagggggcaggctgttccgtgatggcaacaacgacaagatgatggtcgttgtatccgagaaaatctctgaggatgcttccggcgtactgactgcgcaactaggaacgggaaaacccatagtcccacagagtttctaccgcgctctgagcaagatcgccctatctgttattccagaacaagaacttcctgcactggcgaaaacgatccgttgggtacgctatggcgaatcttccgaagctcctttgccgaagatagccgctgcagtggtaatgctccctcccgacccatcggcccagatcactttgtacatccgcaaggagcctcattcgaagatgccccatgtcttgtgtgaattccgactggggtgctacatgtacgtctatgccctgcctttctccgagagagatgatggaaaccttttgggattcttcgaggaagaggaattcaagcaaacttttcggcactacgcatcggtgccctcgtggagtcaacaggactacagcggaaaccaggaaatccaggtgctccaaagtattagactgcaaccgagcaacgcgcctattgatgggcaaccatcctga

SEQ ID NO: 203749 - DNA, 219 bp, Klebsiella oxytoca
atgagcacaaccaggaaactacggctggggccgctgcccaagatcgagagcgtgaagctgaccttcgcctgcccggccagcttgaaagccgatctcgaccgctacgccgcactgcatgcgcaggcgtatggcgaggcggttgatgccacgacgctgatcccgcacatgctggaggcgttcatggcgggggatcgaaacttcaagcggctctcaaagtga

SEQ ID NO: 203750 - DNA, 1278 bp, Klebsiella oxytoca
atgagccaggatgacattcccgaccttgccacgcctcaggcggacaaggtggctcccgaggcggtggcgctgcgcgcccaaccgcgcccggtcacgcgcctgaaccggcgcacgctggcgatcctcgccggctgcttgtcggttggcgtgatgggcgcactgatctggtcgctgcagccgcagcaacgcggcgcgggtgaatccaccgagctgtacaacgtggatcgcgtgtccaagtcggagggactggatgcgctgccaacggactattccaagctgccaccgctgccgcccgacgtgccggaactggggcctcctttgcctggcgacctggggccagccatcgtgaactcgcagcagccggtcgccgccacctatgccgcgcccggctacgaccccaacgatgcgctgcgcaaggaagaagaagcggcggcagcttcatcggtgttctttcgcactggctccccgcaggctgcgcccgtggcgcagtcgcaggtcgccgccgcaccgggcttcgctgccaatgccgctttcgatcccctggccgctggcccggcctcgacggcggcccagcctgctgatccgactgccgtgcagaaccggcaagaccagaaagaggcgttcctgacaggcggttctacggaaacccgtaactccggcaacctgcaaatacccacctcgccgtatcaagtgatggttggaacggtcattgctggggcactggtcacgggcatcaagtccgacctgccgggcgatgtgatcgccacggtgacggaaccgatctacgacacggccactggcaagttcctgctgatcccgcagggttcgcgcatcttgggcaagtacaacagccaggtcagctatggccagagccgcgtgcaggtggtgtggaaccgcatcatcctgccggatacgtcttcgctcacgctcgacaacctgatcggcaccgacccggcaggttatgcgggtctggaagacgatgtggactggcattgggatcggatctttgccggtgccgtgctgaccacgctgctgggcgtcggtgccgaactggccgcacccgagaaccgccaggacggtgatcgcgtcatcatcgccgggcgcgacagcctgcaggacaccgtgaaccaggtcggccaggaagtgacccggcgcaacctcaacatccagcccacgctgaccagccgccccggcttgccggtgcgcatcatcgtgaaccgtgatctggtgctgcggccctatcagccgctgttcttcatcaaggggacttcacgatga

SEQ ID NO: 203751 - DNA, 1005 bp, Klebsiella oxytoca
atgaatgcacatttccgtaaagccgcattgccggtgatcttgctggcatcgactgtcctgtttgcgggctgcgccacgcagggcaagccgccgccggtgatctcgctcgatgaaccggtgcaagcgcagccattgcccgagccgcccaaacccatcgaagtggtggccgtgcccgaaccgttggcattgcccgcgcagttgaagccgctgccggacgtggatgcggccccggcggcactggagcctgctgacgagaaggtgcgcgtctcccgcgccaatgccgaggcacggatcgcgccgacccgcgagggctacgtcaatgcgattcaggtctggcccttcaccgatggcgcgctgtaccaggtctatgcgtcggtgggtcgcgtgacggtgatcgcgctccaacccggcgaggaactggtgacggtcgctgcgggcgacacggtgcgctggatcgtgggtgacacctccagcggcagcggggccgatttgcgcgtcaatgtgctggtcaagcctattcgttccggcttgaagaccaatctggtcatcacgaccagccgcaggacgtacctgctggaactgacctcgaccgacaaggcatggatggcgtcggtgtcctgggactatcccaaggatcggatgctggccttgcagcgccaggcgcaagccgccaacgcggccgcgccggtcgatgcgggcctgtcgttggagaacatccgatttcgctatgcaatcagcggcagcaatccaccgtggaagccgctgcgcgccttcgatgatggagagaaggtctatatccagttcccggcaggcatcgcccagggcgaactgcccccactgttcgtcatcggtgcgcagggggatgggcaactggtgaactatcgcttccgctcgccgtactacatcgtggatcgcctgttcggtgcggccgaacttcgcctgggcgccgacaagggcgacgtggtgcgcatcgagcgcacggatggcattgccgggaggaactga

SEQ ID NO: 203752 - DNA, 1377 bp, Klebsiella oxytoca
atgaacgacgtgacggtcatcgaccgcttcctcgacaccttctcgcgctacatcgactcgggttttgggctgctgcagggcgaagtcgcgttcctcaccgccacgctgatcgtcatcgacatgaccatcgccgggctgtactgggcgatgagccatgccaccggccagggcgatgaagtgatcgccaagctgctgcgcaaggtgctgtacgtcggtgccttcgcctacatcatcaataacttcaactggctggccagcatcgtcttccgctcgttcgcgggcctgggcctgacggccagcggctcgacgatgagcatgggcgaattcctgcaaccgggacgcctggccaagaccggcatcgacgcggcagcgccgatccttgagcagatcagtgacatggcgggcttccccgaggtgttcgtgaacatgacgcccatcgtggtcatgttcctggcctgggcggtggtgatcctgtgtttcttcgtgctggcgatccagcttttcatcaccttgatcgagttcaagctgaccacgctcgcgggcttcgtactggtgccgttcgcgctgtggaacaagaccagctttctcgccgaaaaggtgctgggcaacgtagtgtcctcgggcatcaaggtgctggtgctggccgttatcgtcggcattggctcgggcctgtttgccgagttccaggtacatccggccgagccgtccatcgaccatgcggtggtcatcatgctggcctcgctcacgctgctggcgctgggaatcttcgggccgggtatcgccaccgggctggtctccggcgcaccgcagcttggcgcaggcgcgatggccggtgctgcgattggtgccgcaggcgcggcggttgccgtaggtgctgcggccaccggcgtgggcggtgcggtgatggccggggcgcgcatggcaccggctgccgccaagctcgccggggctggcgcgcgggccgcaacctcggcggctggcagcgcgaagtcggcctttcaggccggttccgccgctgcgggcggcggagccaaaggcgcgatggcagggctgggcaatgtcgccaagggcggcgcacagaccgctggtcagcgcgctggtgcaggcatcaaagcggcggcagccaaggcggccgcgccattcaaagcaggctggcaaggctctggcgccgatggcggcgcaggcggtagcactgccggttccgggcaaaccgccgctggcgatgccaacgcgcagaagcaggaacaacccggctgggccaagcgcctgcaacgtcgccaacaactcacccaggccaccaccacggccgcgcacacgctgcgcggtggcgacggcggcggttcgggccaaggcccgagcctgcgccccgatgaatga

SEQ ID NO: 203753 - DNA, 273 bp, Klebsiella oxytoca
atgaccatgaagctgattaccccgttcttgttggttgctgcacttacggcctgcggaccgtccgagccgccgaaacagcaagccaatgtgcctaccgtcgaagaactggctgccgcccctgaacgcttgaaggagctgcgccgccaatgcaagaccgagcgtccgacgatgggcgatgtgctgtgcaaccgcgtggccgaagcaacgaacaagcgcttcttcggagacggcaaggtgccttacacgccatcggagacgccgccgaagttctga

SEQ ID NO: 203754 - DNA, 945 bp, Klebsiella oxytoca
atggagcttcggcatctgcgctgtttcctggctgtggcagaggaactccacttcgcccgggccgccgagcggctgcacatcgagcagtcgccgctgtcgcgcaccatcaaggaactggaagaagacctgggcgaacagttgttcatccgcaccagccgcagcacacagctgacacgggcgggcaagctgtttctggaacatgtgccgcgcatcttcacggccttgcagcaagcccgcgacagcgtgcaggcagcggccaacggctttcatgggcaattgcgcattgccctgtccgacggcattacgccttcgcgcctgccggcgttgctggcgctgtgccggcaggaggaacccgaagtagagatccggctgttcgaggtgccgttgtctcagcagatcaaagggctgcatgacgacctgtacgacgtgggtttcgcgcaggccgatgaagtgggcgatggcgtcgtggctcaagcagtctggagtgatcccctgatggtggcagtgcctgctcggcatccgctgctcaggcacaaacgcatcccgctggaagaggtgctgcgccatcctctggtgctgtgcgatccacaagcatgcgaaggccatgcgcgccaggtcgagcgtgtgctacgccgggcggacacggaaccgctgattgccgagcgtgtgtcttcgtgcgatttgatgatggccctggtatcagcgggctttgcgctggggatcaccggagcaccgcacattgcggccagccgcgaatccggcgttgtcgcccggccactcgcggggcgtgcgcccatgctgacgacctatgtgctgcatcgggaaggcgaatcctcggacgtgttggagcgcttcatcgagcgcgtgttggccatcgaatcaccagaaggctacagatctacatcacccgttgaacccgactccctggaggacaacgatccatga

SEQ ID NO: 203755 - DNA, 1485 bp, Klebsiella oxytoca
atgatcgcgtctttaccctggatacgcaagatgaactcgaattcctgcctctcgacgccgcctgcgcgcgccgtcagcggcccgccgtggctcggtttatccgtgctgctgctggccggtttcgtcacgatctttgacctgttcgtggtcaatgtcgccattcccagcatgcaggccgatctgggcgcgaacttcgcgcagatcggcttcatcgtcgctggctatgaactggccttcggcgtgctgctgattaccggcgggcggctgggcgacctgttcgggagacggcgtctgttcgtcaccggcatggccggcttcacgctggcctcggccttgtgcgggctggcgcccagcgcggaattcctgatcggtgcgcgggtgttgcaagggctggctgccgccttgctgttcccacaggtttatgcgtccatccgcgtcaacttcgacggtgacgacagccgccgcgcctttggcctgctgggaatgacgctgggcctggcggccatcgccgggcaggtgcttggcggctggctggtgcatgccgatctgttcggcctgggctggcgcagtatctttctcatcaacgtgcccattgggctgttcgccatcgcggcggcacgcaccatccccgagtcctgcgcaccgcagcgcccggcgttggactggatgggcgtggcgttggtcagcgccgggctgacgttgctgctggtgccgctgatcgaggggcctgggcagggctggccggcgtggagcctgttgtcgctaggtgtggcggtgctgctgctggccctgttccatcggcagcaagagcaacggcgtatggcgggcggcttgccactggtggacatgcgcctgttggcccagcgccgcttcgcgctgggcgcggtgctggtgctgctggtctattccacgtccagttccttcttcctgtgcttcgccttgctggtgcagaccggactgggacttgaccctttcatggcgggcagcatcttcgcgccgtgcagcgtgggcttcgtgctggcatccctggccgcgccacgtttggtggcgcgctgggggacgcgggccatcgtggcgggtgcgatggtctatgcggtgtccatcgggctgctgatcgcacaggtgtggatggctggcgcggagctggtgcccgcgcggctgatccccgtgctggtcgtggttggcgctggccaagggttcatcatgacgccgctgctgaatctggtgctgggctttgtcgatgaagcgcaggccggcatggcgtcgggcgtgatctcgaccgtgcagcaggtcggtgcggcgctgggtgtggccgtggtcggcatcctgttcgcagcggcgctggctgccgatgaaagtgttgccgcacaggccggcgtgtacgcctcggccttcgtggccggcatgctctacaacctcggtgcagccctgctggtctgcgtgttgttgctgatgctggcgagaacgcagcggttagcgggctga

SEQ ID NO: 203756 - DNA, 801 bp, Klebsiella oxytoca
atgcgaactctggaacgaacccgctccgatctggcggctttcctgcgggcgcaccgcgaacgcctttcgcctgccgacgtgggcttgcccagcggtggccgccgccgcacgccaggactgcggcgcgaggaagtcgccgcgctcgccggtgttggtctgacctggtacacatggctggaacaggggcgcgacattggcgtgtcggccacctttttggataacctggcgcgggtgctaaaactggatgctgccgaacgccgccacctgttcctgctggcccacgaacggccgcccgccgaaccgggcaagacctggtgcgtgctgccgccgatggtgcgccgcctgatgcacgatttaccgcacccggccgtcgtgctcaatctgcgatgggacgtattgggcttcaatgcaccggctgatgcacttttcggtttcggcaagcacacgcccgagcggcgcaatctgctctggctgctgttcaccgatccggccctgcatgcccgtttccacgaatgggaagcacaagccccgctgatgctctccagcttccgccgtgacttcgcccgcgccacgcaggaagcggacattcatgaactggtggatgagctggaacgggtgtcgccggagttcaaggcgtggtggcggacgcatgatgtgcatgcgtcctgcaacggcgtgcgcaaaatggtcatcaacggtcaggccgaaccgtttgagcacacatcattgacggttgacgaagaccggcacctacggttggtggtgtatgcgcagcagctcaaaaccgctgacggtgaatga

SEQ ID NO: 203757 - DNA, 600 bp, Klebsiella oxytoca
atgacggcccatcccaccgccgcacgcacacccaaagccgcgccgcttcctcgctcgcgcctgcgcgctcgcctcgtgctggcgggcttcgccgccgtcggcctcgctgcgctggcctgggcggctttggtgcagccgttgccgcgcctgatctacaacccgtccgacagcgttccggtcggctggtatcgcgtcgatccgcagcgccacggtgccgactcgctgccacgttctttgtccgtggacagcatcgtgctggcaccgcttccagccacggcttccacgctagctgcgcagcgcggctacctgccgacccgcgttccgctgctcaaacgtgtgggcgcaatcgcgccacaacacgtttgcatcgtcgccgggcaggtacgcatcgacgacgtgccggtggcggccgcgctgcctgccgaccggctaggccgaccgttgccatccttgcagctttgccgtcgcctcgaatcaggcgaactgttcctgttgagcgtgaccaatccggcgtcgttcgacagccgctatttcgggccggtcagtgcatccgccgcgatcggcgttgcgcatcccatttggttggagccgcgtccatga

SEQ ID NO: 203758 - DNA, 546 bp, Klebsiella oxytoca
atgaccacatccgtattgtctgctgccgcacctgccgccatcgcggtcacggctacccatgaagcctcttccagccagcctgtcagcacgccactgacgcgcgtggcgctggcttacatcgaaccgcgcttcaagctctacctgcgcttcggcgcaccagctcgtacgctccagctcgatcgctggcggcgctgtgccatgttcatgccgggagcaatgctctgccgcgttcgctggcaggccaacgactacggcacgatccgctggcagctcatggtgatgcaggctgctacaccgcttgatgccacgcagcgcatccccggcgtgcagccaggcgcgtgcctgctgctgcatgccgaaggtgacgccaatgtgcgcgccgtgctggaacgcatcgacggcatcgaggcgctgggcatcgctgccattgacgtatcgcccgcgtactggcgcatgctcgccaaccggctcgccgcgcatttgccgctgcccgaatacaccgccgagcggcacgccgcctggctggccgggagggcgctgccatga

SEQ ID NO: 203759 - DNA, 288 bp, Klebsiella oxytoca
atgagcgacaacaacaacccacccagcggtaaacgcccggccaagcgggtcggcatcggcgcgcgtccgcccgccaatccgcacgccgaggcgtggattcgccaaggcgacgcggatgcgctcaacaagggcgacctctacaccgctcgcctgaccctcgacatcacgcctgccatgcgggcacgcatcaaggtgtcggccttcacgcaaggcgtgaccgttgccgacctgctacgcggcttgctggagcgcgagtttccagaacaccgcagggagaacacgccatga

SEQ ID NO: 203760 - DNA, 825 bp, Klebsiella oxytoca
ttgcagcagcgcgaacagctcgacctgttccgcgcactgccgggcgaggacatggcaccgcgcgatgcccaggacttgatggcctatccgtttttttcgctggcgaagtcgcggcgcaccgcgccgatcgacttccgcagcggcaacatcaccattcgcgtggaaggcacgcaggagcacggcatcgctacgatctgggatgccgacatcctgatctgggcggccagccagatcgtcgaagccaaggacgcgggcatccagccgtcccggcggatgcaggccacgccctacgagatcctgcgcttcatcgggcgcggcaagtcgctgcgcgactaccagcgcctcaaagccgcgctcgaccggctgcaatcgaccacggtggccacgtccatccgcgagaccactgggaggcgcttgcaccgcttttcgtggatcaacgaatggaaggaactggccgatgccaacggcacgccgctgggcatcgagctgatcctgccggactggttctatgcgggcgtgctggatgctgctttggtgctgaccatcgacccgacgtatttccgactcacgggcggcatcgagcgctggctgtaccgcctggtgcgcaagcatggcggcaggcaggaattcggctggcagttcgacttccggcatctgcaccgcaagtcgggcagcagtacgcggttttcggattttgcctacgacctgcgggcgctggtcgcccggcaatcgctgccggggtacgagctgggcatcgtgcggattcccgaggacgacatggaattgctgaccttccggcccgtgccgcagacggcacggggataa

SEQ ID NO: 203761 - DNA, 282 bp, Klebsiella oxytoca
atgcgacccgctcccttacggcctgccgccgctcccgctgccacacccgcacaaccccaacgctatctcaccaacgacgaagccgccgactacctgcgcctgtcaccgcgcacgctggagaaacagcgcgtcatcggtggtggcccgaagtttcgcaagttcggtcgccgcgtcatgtacgccgtggccgaccttgatgcctgggcggaaacgcgcagcttcgagaccacttccgaccccgaatatgccgagcaccactcggctgacagccgtgcgcgctga

SEQ ID NO: 203762 - DNA, 828 bp, Klebsiella oxytoca
atggctgatcgcagtgccgagccgtggtatgccacggcggcctatctctacgttctgcacctggatggcccagcgctggcctgggagtacctgcgccgccattccgactaccggcgcgactggctgcgccgtcgtcgccaaccggatgcagccgagcactgggggctgcgcctgctggaagaccccgccctggatgcgcgggacgcgcacccagcctggttccccgaccacgatgccgtggttcagctctacccggatgccgatccaccgcccgatgccctgtgctttgagctctggaagctgccgggccacaaacacctgatccatgacggcaagcgcctggtgctggtggcccgctggcccggctgctgcctgcgcttcgtgctcgccccaggcttggccgatggcatggcttacgcctatgccatccgggcctgcgccgcgccttgcgaacgctatgcggccctggcgaacgaattgaacaagatcgccgtagccgccggtgccgtacctgcggcgaccgtccggccacgtccgccgctgtccgcattgctggaactgcacacgctgcaggcgttggacgcaaccctggcgggtgcgtcattgcgggaggtggccgaagggctgtttggtgtggatgccgttaccgccgactggcacgccgacagcgctttgcgcgcccgcgtgcggcggctggtgcgccgggccaatgggctgatgcgcggcggctatcgccgtctggcgcaacttccccccgttccgccgcatgagggggacgtttcgcatcccctgcagaacgtccctgagcaagaaccccaagtttcttga

SEQ ID NO: 203763 - DNA, 348 bp, Klebsiella oxytoca
atgactccgctaatcaccgccgacgagcgcacgcgcctgctggccaacggcgaggctagcgccgtcgggcaggacaccgacccgttgcccgtggtgcgcctgttcaccccggatgcgcatgccacctggctgctggcttcgctcgacccagccgatagcgatactgcccatggcctgatcgacctggggattggcatgcctgcgctggggactgtgaagctgtccgacctggccgccatcgtcgggccgcgccagcagcccgtgatgcgggatcgctacttccagccggtacggcggttgtcggaatatctgcgactggccgaaggcaacggctcgatcaccgattga

SEQ ID NO: 203764 - DNA, 291 bp, Klebsiella oxytoca
atgcagaagcgaaccgtccagcgcggccgaccggccggctctaccaccttcgacgccgagctggcccaggccttcggcgcggcggtgcgtgcgctgcgcacggatcgaggcatcgcccaggaaacgctggccaacctggccggcattgaacgctcgcatgtgggcaagatcgagcgcggcgagcattcaccgaccctggcgatcatcttcaaaatcgccggtgcgctggagtgcagcacagcagcgctgatggccgaagcggaaaaccgactttcggcttccgagacgtag

SEQ ID NO: 203765 - DNA, 315 bp, Klebsiella oxytoca
atggctaacatcggcaccttcaccgcagagaaaaacggcttcaccggcacacttcgcaccctgacgctcaacgtcaaggtcaagctggttcccaacgacaagagtgacaacgagagcgcacccgactaccgcctgcaagcggctggccacgacatcggcgcagcgtggaaaaagaccagcgaggccggacgcccttatgtgtccgtgacccttgacgatccatcgttccctgctacggtctatgcccgcctgatcgaaggcgaggacggcgcacacgacctgatctggtcgcgtagcaagcccaaagcggcgtaa

SEQ ID NO: 203766 - DNA, 210 bp, Klebsiella oxytoca
atgagccacaacaccacgaaccgcccacgcatggcctcgacctacgcccccggcacggtacgcgcccgccgctggcatggcgatggcgacgtgcgtggctaccgcccgcctcgcggctggatagcccgcgccgacctgaccgacctacaccccatcacgggccgcgccttgccgcgtgccgtgtggtggatcatcgaaactaaagaatag

SEQ ID NO: 203767 - DNA, 2085 bp, Klebsiella oxytoca
atgaacgctatcaaccacaccgaagcccaagccatccacgccgcagccagcgccgcgcctgccgtgctgctggaagccgccgacccgagcaagaatctgattctggtgccgctgtcgcggctggtgtcgcgccccacgggccgcaacgtgcgcaagaccccgcgcatgtcgatttctgaactcgccgccagcatccagcgtgtcggcctgttgcaaaacctgatcgtgaccgcgaccgctgacggtgagcgttacgaagtcgtggccggaggccgtcgccttgccgccctcaagttgctggcgaagaagcaccgcatcagcaaggaatgggaggtgccttgcctgttggtggccgatggcactgcccgcaccgccagcctgaccgagaacgtgcagcgtgaagccatgcaccccgccgaccagttcgaggcatttgccgcgctggtggccgaaggccgccccatcgaggacattgccgccgatttcagcgtcacgccgctggtggtgcagcgtcgcctgaaactcgccaacgtgtcgccgcgcctgctggccgactatcgagccgacgccgtgagccttgaccagttgatggcacttgccatcaccgacgaccacaccgcacaggaagccgcgttctacgatgcgccgacatggcagcgcagcccgcacaacctgcgcgaccgcctgacggagcgcgagattgatgcccaccggcatccgctggtgcgcttcgttgggctgaatgcttacgaggccgcaggcggtggcacccgccgcgatctgttcgcggaagccgatagtggcgtgtatctgaccgatgccacgttgctggaacggctggcgcaggacaagctggccagccttgccgccgaggtgaaggccgaaggctgggcatgggtggatgccacccccggcgcgacccatgccgacctgcaagccttccagcgcgccccgaggcagcgccgcagcccgaacaagcgcgaagcccaacgcatcgagaagctgcaaaccaagatgcaggcgctggccgaggccgtggatgccgccctggacgccgaggacgaagaaaaggccgacgccttgcaggaggaaggcgaacatctgggcgaacagttgcaggcgctggaagatggcttgcaggactacggggaagccgtcaaagctgccgccggtgccatcgtcaccatcgaccgcaacggcgtggccgtgattcatcgtggcctgctgcgcgaagccgaggccaaggcactgcgcacgcttgaacgactgcggcagggtttcggcagcgaaggcgaagccgggaacgacgacaccggcgaggaagccgacgacgcccccaagcccgccgccatgtccgaccggctggcgcagcggttgagcgcccaccgcaccgccgcgctgcaaatcgaagtcgcacggcatccacaagtggcgctggctgcgctggtgcatggcatggtgcagaccgtattgcacggcagctactacggccacgatctgccgctgggcgtgaagctgacccagcaagaccggctggaaggcatggccccggactggccggaatcgcccgccgccgtggctctgcgcgaactgcaacaggtagcgggtgaagccttgccggaggacagcgccgaactgtttgccgcactgctggcgaagtcgcaggatgaactggtgcgcctgctggccgtatgcgtggcatccacggtcgatgtggtgacgccccgcgtcacgcagcaccagccgggtgccgaactggcgcaggcggtggggctggacatggcggcatggtggcagccgaccgcagacggctatttccagcatgtgccgaaggccgcgattctggaagccgtgggcgaattcgcaccggagcacgtcacccggctggtgaagttgaaaaaaggcgacattgccagcgaagccgaacggctggccgatggcaccggctggatgcccgccatcttcgccgccaaagccacgcagcaggccgcgcaggaggtggtgacggacgaggcagccgaagtgcaggaggaagccgcagcagcagcggatgagcagccgcaggccgaggcactggctgcgtga

SEQ ID NO: 203768 - DNA, 828 bp, Klebsiella oxytoca
atgcttgcatcccgtttcgcttcccgttccccggtactgcgcagcgattccccgctgtccgatgaccagattcaccgtgtagcgccatccatctttgcggacgcaccccacgaaagccgttcccagcgttacgcctatatccccaccgccacggtgctgaccgaactgcgcaaggaagggtttcagcccttcatggtgacgcagacccgcacccgccacgaagaccggtgcgactacaccaagcacatgatccggctgcgccatgccagccagatcaacgcccgaggcgaagccaacgaaatcatcctgctgaactcgcacgatggcaccagcagctaccagatgctggccggaatgttccgtttcgtgtgcagcaatgggctggtgtgcggcgataccgtggccgatgtgcgcgtgccgcataagggcgacgtggccggacaagtgatcgaaggtgcctatcaggtgctgcacggttttgaccgtgcgctggaatcccgtgaatccatgcaggccatcacgctggacgaaggcgaggtcgaggtgttcgcccgcgccgcgctgtcgctcaagtacgacgacccggacaagcccgcacccatcaccgaatcgcaaatcctgatgccgcgccggttcgacgaccgccgcccggacttgtggatgaccttcaaccgcgtacaggaaaacctgaccaaaggtggtttgtctggacgcagcgccaacggacgccgccagcagacccgcccggtgcagggcattgattccgatgtgcgcctgaatcgcgccctgtggctgttggctgatggcctgcgccagttgaaagcctga

SEQ ID NO: 203769 - DNA, 534 bp, Klebsiella oxytoca
atgccctggatgaaatgctactggttcgcaagggtttctgcgtctgcccagccgggcaacggtatcgagcagtgccaagcacagcgccccagttgggggcaaggcatcggcaccgagcgctccagaaaaaagcgcgtcggcccgaaggaaaaagcgctgaatggtcgccgcacggtcactgcgctgtcatcgcctgcaacggctaaaacacgccgcgttgaaagatcacacatggctgcctgtcttcgatcggcgacggcaaacatatctcgttccaggtgcgttaagcggcgtgtgcggtacgcctgtttgggatctgcagccgcttgtctgcgagcaaagacgccgcttgtcggagaccggcgcgagaaagccatcgtcggagagattctgaagatccagacacgagcctcaatcggtcatcgctgcatgcccatgcgcaggaaacaatccagcagaacggcaccagtgtctaagtgctgcagggaagacaaacgtattgttcaagcggcacatgctattttccgtccatag

SEQ ID NO: 203770 - DNA, 813 bp, Klebsiella oxytoca
gtgaggtacattgactcgacgcgattgcgtttgcctgatggttggctggagcgtgcggctgcggcaaaaattgcagtcgagaatggtgcgaatccagatgattatgcccggatctggagagaactgaaagacggattggcgaatctttttaatgacaagtgttggtattgcgaagtttcagttcctcgctcggataacgccgttgatcattttcgaccgaaaggccgcgtaagagacgctgagaatgagcatagaggttatcgctggctcgcttttgaacagtcgaattttcggtatgcctgcacgttctgcaattctcgccggaaagatatcgagggtgacactgccggtggaaaggctgataggttccctctgttagacgaggcgcgccgagtttatgagccaggggctgtcactggcgagcgaccaattctggtcgatccttgcgaagtcggggattggcggcttttaggatgcagaaaagagaatgggaagccttgtgccacgagtgatattcccgagcaacgccagcgtgcagatatttcgatagaaatataccatttgcatcacgagccaacttgcaaactgcggcattcagaagctgtaaagcttttaggggatattgaggaggcaaaggcactgttcattgcgacacaatctgatgctttacaagagccagcgttcaaaagggtggctgcgcgaatattgaaatctattcatgtcgacagtgctttcagcggcgaaatgcggtttctgttgagcggagagagggatatggctcactcttggatccagaccttgttggaaacttga

SEQ ID NO: 203771 - DNA, 1722 bp, Klebsiella oxytoca
atgcgcctagataggatcaccataggtagcccgaaaagcagccctacgcatcaattcaaaaatctaaaaaatgtctcaatcgactttgatcagcagcattggattacggtcgtaattggatggaatggcacgggaaagtcaaatgtacttgaggcgcttgctaccatcttccgggacttcattcaaggggcgcgaaaacctgcatttgcattcaatcttgaatacaggatttcttctggttcaactgcgttgcacgtcaatattgatgctgacccggatcggccgcgtgattcacttattattcatgtcgcaacagacgcagaggctaaaagcgatgagttattcgacgcctctttcgagataagttcgaaaacctccgccctacgaggaaaaagaattccgctgaagagtttcttcgatcctaaattcgggtatttgccgcgatatgtatttgcctattattcaggtgaaagtgaccggctctatcaagtattccgtccatacttggaggattttgataaaaaattaaggcggggggaggatcctggattaaaaagactgttttatgccatgccagtacatagccagtttgtcctgctggcattccttattcagcagtccgatgatgtaaggaattttttggccgaacacttgggtattgatccagatgaggggatcgagtcggttttatttgtactgcgagagcccccttggacatctaaagaaggagaccctcgcttttggcgtgctaagggagtcgtcgcctcttttctggaccgcctctacaatattgcattggccccagtcgagctcagccgtcgtgagcgcgtttccctttggagcgacaaggtacttcaattcaaatatttatacgttaaagacatcgcctcgctccgcaaactggtgggtgagcagcgtccggctgaattttttcgtgacatggaaagcacccacgtttcccagctaattgatgaagtacgcattcgggtgcgcctccaaaagaatgacgggacagttacctttcgtgaacttagcgaaggcgaacaacagctattgacggttttaggcctgcttagatttacggctgaaagtgaaagtcttttcttgctggatgagcccgatacgcacttaaatccacgttgggccgtcgactatttcaactatctacgaacctttgctggtcaaagtaatgatgatcgggaaaatagccatatactgttaaccactcataatccgctggcaattgcagagcttgtgcgggagcaggttcaaattctgcagttatcaaaggatgcagaatcgacgcgcattgtcgccgtgcacccggaacttgacccgcgcggcctgggctacgctgcaattgtaacaagcgatatgtttggtatcgcctcaacgcttgatcagccgacgcatttgctcctagagcggcaaagggcatacgcaggtaaagagcacttgacacctgaagagctcgcagccctatctgaaattaactctaaattggaacgacttgggtttcgatttttccatcccgatgaagagtattcccgctacctacgcttgagaagcgctgcactgcgcgctaagtttgagtcggacgatccggagcagttagctaaccggtcaatagcaatggagtccgaagagcgggaggagttggggcagcgactcattcgggaactacttgccgagcagcgcgataagcaggagcccgatcagtga

SEQ ID NO: 203772 - DNA, 1629 bp, Klebsiella oxytoca
atgagtaagcttcctcagggatgggtgagcgttaatattgcagatgtggcggaagttaacccacgcaaatcagtcgatctttcgccagatgagttcgtaacatttgttcctatggcggctgttagcgaaataactggggcgatcgccactccgatgaggcgcccccttagacaagttaataaggggttcactcagtttgccgaaaatgatgtgatcttcgcgaagattacgccttccatggagaatggaaaggctgccgttgctgccaatcttactaatgggataggtttcggctctacggaatttcacgtctttcgaagcaaaggggcggttcttccgaaatttctttggtatttcatccgccaacagagctttcgggataacgcgcgaaaagtaatgtctggcgcagttggtcagcaaagagttccggcagattatttaaggagccaccccttattgctgccccctatccaagaacaagagcgtatcgtcgccaagatagataatttgatttcccgtagtgcgcgtgctcgtagcgaattaaagaagattccttctctactagcggcatataagtccgcagtgcttgaattagctttctcgggaaaattgacagccaatcttcgcggcagtaattctgatactacttctggtcttcccgaagggtggacgatacaaagattgggcgatatcagtgaaattcaaagcggaatccaagttgggaaacgtagaagcggacaggaagaactagttgaggtgtcgtatcttcgtgtggccaatgttcaaaggggatggttgaatcttgacgagatcaagacgattttcgtcaccccggaagagaaagcccgtcttttattagcacagggtgacgtgctcatgaacgaagggggtgatcgtgataagttggggcgggggtgggtctggaatggtgaagttgacgaatgtattcaccaaaatcacgttttccgtatccgtatgaaaccggcgaccttgccgccagaatttgtctctcatttttctaacgagcgtggtcaacaatatttttttgatgaaggtactcagacgacaaatttagcttcgatcagtaaaagaaaggtagcggctctgccactgccggttcctccttttgaggaagcggtagagattgttcgtcggatagaacgcacttttatgtggttagatcgggtcgctgccagtcacggtggtgcttctcagttgctggaaaagctcgacactgcactcctctccaaagcttttgaaggacaactgattcctcaaaacgcaggtgacgaaccagcgtcggctttgctagagcgtgtcaaagcagaatttgtggcacaacccagaaaaattcaaagtcgaaagcagatctaccaggggcagacacgggagaaactcatggcgatagaaagaacacttgagcaggttttaacagaggcgaagaattggcttcctgcgcaagacgtatttcagcgctgtggaatcggcgacggagcgtctaccgaagagattgagcgattgtattcggaattgcgagatttggatttggccggaaagctggagacggaggccgtcaatgacgatcagggacgtaaaatttacgaccgcatccgtttgaaggcggtgtaa

SEQ ID NO: 203773 - DNA, 1416 bp, Klebsiella oxytoca
atgaattctgaaagtatcgtacagaaaatatgggacctttgtcatgtccttcgaggtgatggtgttagctaccacgaatacatttcggaactgacttatcttctttttcttaaaattgcagaggaaaataagacggagaatctcattccagatgggagacgatggagcgatcttgtcgcttataagggtgataatcttctagatttttatcgggaaatgcttacgtacctaggcgcgcatgcttcaagcgaagcagtgcgcaaaatttatgccttcccgacaaccgtattctcgcattcagaaaacctcaaggcggttattgatggaatcgcaaagcttgactggcattcaataacatttgatggcatggggggtatttacgaagggctgcttgcgaagaactctcaggatgcacgatccggtgcgggtcagtattttacgccgcgccccctggtggattgtatgattaagctacttcagccacgattgggggaagtgatacaggatccggccaccggcaccggaggtttcttgatctcagcagatcactatgtgcgttctcaagtgagtgaaaagaagtacaagagtaatcctccacgatatgagggtgtggaaattgagaaagggacgtatcgcatctgcctcatgaatgcgttcctccatcgacttgagtctcatctgattcttggtgatgcactaacaaaagatgcagaagatctctcccccgcagacgtcattcttgcaaatccgccttttggatcaaaggctgggagcgctagaaagcaacgagatgatatcgcttacgccacgaccaacaagcagctcgcttttctccagcatatatatttagggcttaagccaggtggtcgcgcagcagttgtactccctgataacgctttattcgaagacggagtgggaagaaaaattcgacaagatctgatgaatcgttgcgatcttcatacgattttgagattgccatccgggatattctatagtccaggcgtgaagacgaatgttcttttctttacccgtggccgaaagaatactgggaatactcgggccgtatggatttacgatatgcgccatgacgccccaagatatggaaagaaaagacccctgcaggctgcggacttctcctcattcgaggccgtatatggcgttgatcttgaggcaatgaaattacgtaaagatcaaggtaaaggggggcgctggcgctgctttagtcgagaagaaattgccgagaaattcgataatttgaatatctcatggctttctgaaacggaggcagatcctgaagatggacttacagaaccagatgacatttctgcggcaattctacttcatctacgcgccgcgctgagcgagatagaggcggttgccgacgagttggctgagagctcggagactgacaaatga

SEQ ID NO: 203774 - DNA, 303 bp, Klebsiella oxytoca
gtgagcaagatcattgaatcgctgcgcggcgacctggcggcgctccacgaggcaggagccatcggcaaggtgacgatgcgcgagtttgacgcgatttgcccgccgccggtgcgggagttcgacgcggccgacattaagcgcctgcgcgaaggcttgaagttcagtcagccggtgttcgcgctgcacctgcataccacggcatcgaccgtgcgcaagtgggagcaaggcgagactcgcccggccggcccggcgctcaagctgctcaacttaattgcagacaagggcttgcagtccatcatctga

SEQ ID NO: 203775 - DNA, 525 bp, Klebsiella oxytoca
atgagcggcggccggtaccccagccttgcctgtcccgattgtcgtgtcgctgtcacaacaatcgagcgtaccgttcctctcgtggtggtacggcaagggattgaaagatatgcccgttacgggtatagtttggaggttgatgtgaagagcatcctcaagcgcaaggactttgcacggtggcaggcgggagagaagctgcccgatgctgcattgtgcaaggcagttcaggagatggaaagcggtctgattgatgcggacttgggcggcttcctctacaagaagcgggtggcccgtcccggtggtgggaagagcggcggctaccgcacgctgctgtcggccaggattggcagccgctatgtgttcctacatgggttccccaagagcgacaaggcgaacgtcacgcaggatgagaagaaggcgctgcaattcgccggcaaggtgtttctggaactgactgcagaagccctgtcgaaagcattgcaggttggcgtgttaatggaggtgcattgtgagcaagatcattga

SEQ ID NO: 203776 - DNA, 1200 bp, Klebsiella oxytoca
atggcgaagatcaagctcaccaagtccgcagtcgatgcggcgcaacctcaagacaaggccatcgaactgcgggataccgtggtgcctggctttctgtgcaagatcaccccggcgggccgcaaggtgttcatgctccagtaccgcacgaatgccggcgagcgacgcaagcccgccttgggccagtacggggaactgacggtcgatcaggcacgcacgatggcgcaggagtggctggccgaggtgcgcagggggggcgaccccggcgcggccaagaacgccgcccgcaaggcaccgaccatgaaggagttttgccacaccttcatggaggactattccaaacagcgcaacaagcccagcacgcagcgcggctatcagggcgtgattgaccgctgcatcattccgatcatgggccggatgaaggtgcaggatgtgaagcgcccggacgtggcggcgctgatgaagaagctggcctacaagcaagccgaggcgaaccgcactttcggcgtgctgcgcaagatgttcaacctggccgaagtgtgggggctgcgccctgacggcacgaatccgtgccgtcacgtcccgatgtacccgcccggcaaggaaactcggctcatcgtggatgacgagctggtgcggatcttccgtcacctgaagtatctggaatctgagggactggagaactacgtcatcccgctggcgatccgcctgcagttcgagttcgccgcccgccgctccgaaatctgcccgctggagtgggattggattgatctggagaagcgccgcgtcgtctggcctgacagcaagaccggcggcatctccaagcccatgagcgaggaagcctatcggctgctgtccacagcgccgcgccgggaaggctgcccctacgtcctaccttcgcccaacgatccgactcggcacatgacccacggtgaacactacggcggctggactcgcgtgctcaaggccgctggtgtgccgcacgttggcacgcacggcattcgccaccgggcgaccactgatattgccaactcgggcgtgccaaccaaggtgggcatgaagctcacaggtcacaagaccgtggcgatgtttatgcactatgttcataccgaggacaagcctgtacgggatgccgccgaactggtagcgagtcggcggctggcgattacgggcgcatcgtgccctgcggaagctacggtatga

SEQ ID NO: 203777 - DNA, 858 bp, Klebsiella oxytoca
atgctgacaccggcacaaagacactttcagaaggtcatggcagagaggcgaggctccagtgatgagcgtgacgcggagacgcgcaccgcgcatgagcagatcctctttcgcctgcatatgcataaatcctcgctgagccagatccagtcccgccaggcgaaggccgctgtaaaggccagcatccttcctgagtttcagggatggattgacggcacgatcgagggcgacagcgggcgcgcagatccggtcatcaccacgctgatggtgtgggcggtggactgctccgactatgctctggcgctgcgtatcgggcgctatgtcgttaagcatggcctgggcatgccggatgacaactatcgccgcccggcacccacggtactgaccgaggaaatctgcaatcccattctgagcctcgccaccacggacgccggagccgatttgtcaggctatatccccatgttggacgagctggccgaaattgtggctgacagtgatatgccggatgaggttcgcgcgaagctgtgcaaggtgagggcattttgccgtcgtgacacggaagacgcggaaacaaaaggcgaagcgctgaaactcttccgggaagccatgagcctgaacccgggcgcaggcgtgaaacgggagatcgcctctctggtcagcgcgctgaagaaggcgccgcagaccagcgcggcgagtggtgatgcggaagatgagccttcatccagcgatacagcggcaagcgaaaaacccgcaacagaaaaagcaacacgaacgcgcaagaagacgaaaacggcggcgggcactcaaaaagccacccgcaaaacggcggcaaaaaagacaacgaaaaccgccacaaagtaa

SEQ ID NO: 203778 - DNA, 546 bp, Klebsiella oxytoca
atgaatattgggtatgcaagggtaagtacaattggacaggatacagctattcaagaagcctctttaagggctttgggatgctctatgctatacatggaaaacatctcagggaaggacactaaccgtcctgaattacagcgtatgattgataatgtacaggctggagacgtggtatatgttactaagctggacaggcttgcacgtaataccaaagatgcattatttattgctgatgcattgaaagataaaggcgtgggactggtatgtatggacttagggcaaacagacatcaactctgactttgggaggatgatatacacggttatagctgctgtgggggagtttgagcgtaagcgtatattgcagcgtactcaggaggggagagagaaagcaatggctaatggtgttaagtttggaaagcctgttgatgatgaactacatacgagtattgttgattgctggaataaaggtatgaacaagaaagctatagctgaacatattgggtgtagccgcactaccgtacacaaggtaatagaggggctttaa

SEQ ID NO: 203779 - DNA, 831 bp, Klebsiella oxytoca
atggctagaccgttctctcaaagatatggacacgttaaagttgaaaatgtttttcagttgaatgatttaaacgaagaaacccggaaggcgatttggaattacttgtatttgggattgttcggcaatggagatctgaatgcaaagcggcatcaatgtgccgagtgtatatggatacattattttaattattctgctgataatattcctgactatagtagggatttgtcctatcgcgattctgttttgactacaattaaaaaatatatttacagatctgaatggtttaatgttttcgatttgttagaggcgcttctggattatacatcagatttttatcagttcgatttgggtgaatacattaatgctgtctttgaaaaatatggtgtgggctatcgggtaattgatgggctaattactcctatatcagatgaagtggaaattgaaagtattaagggggcgttagctaataacacggaatccgctaaaaatcatttcacaagagcactagagttaatggctgatagagaacagcctgattatagaaactcaatcaaagaatctatctctgctatagaatcattatgcaagaagatctctggtaatgagaaagggactcttggagattgccttaaaactattgaggataaaggacatattcatccagcaatgaaacgagcattccaacagctatacgggtatacaagtgaccagggtggaatacgtcacgcgttaacggatgatagtgaggagcctacattagaagaagctcgttatatgctggtgatatgtagcgcttttagtaattatcttgtatctaaaatggctgattga

SEQ ID NO: 203780 - DNA, 1284 bp, Klebsiella oxytoca
ttgattttgcttaccaaacgtatccgctataccttccttcgggactctatctattacattcagttttgccttcctgatgggaaaatgtttaggcgctctctgaacactgatagccatcgtgaggccagtgttttgatgatagctttaatgccttttatccttcaggttaagaatcgccagttaactccagaagctctctgtctccagcttaacgcgcttaacactaatcgaatgcttgaaagggctgctaagactttcccgctctctatgccgctctcccttcctcctaagaaacagatagaacaaaagaaagggctgcatttaggagaagcttgggcccaatacaagcatgagcgggggaagggatggactgctgctatccactctgcaaatgagcgctatatggaagtgttattaaccgtacttggaagtgataggaacgtagccaccatcacaaagagagacataaagcaggtgatggaggtggtagaaggcctccccaagcgagtcatacaaccttacaggtctatgaatataaaacagctcattgcgtgtgatgtgccggaggaacacttgatagggacagaggctattcacaagcatttaaaaatttataaatctttgtttaaaacatttttggtggaagaaaaggacgtactgacagccgcccctacagatggtgttatagccccgccgtctagcgctcgctatggagcttatacaaatagtgagatgaagagctttgtccgttatgcaattgaagaggctaagcctgaatggctcaaatggattatcctccttcttgcgtatacaggagcaaggaggggggagattgcaaccttaacccaaacacaggtgagatacgatgatgatagtaatcgtcactatctactcattacggacggaaaaactgagaacgcagcgagggaggttcctctccataaccatcttattgatttaggttttctggagtttgtttctagtaagaagacagagcttttcagcgaagtggcgggcaccaatatggctaagattggtaaggtgatgtcggatatcagggaagagcttaacatcccatacagagacatccacaaccagcggaggatagtgcacagctttagacatagcgttgtcacagcagcttctggatggatgaatgacatcactcacttacagcaggtagtagggcacgagaagacggggacagggataacacgtaggtatattcacaccttccccctgtctgttgtatgtcatatcattgatgggcttaactggcggtaa

SEQ ID NO: 203781 - DNA, 273 bp, Klebsiella oxytoca
atgaatattagtgacagcgtactaactaatgcgttcatacaagcaaaggtggctagggatggctatctatatgcctacgctcgtaagctctttaaacagggaggacttaatgtcctctcttcaagagagcgtgcttatatggggatgagccattggcagcatttctataattatacagataagcttgttaaggctggcttagctgtatgtgaatatgatgagtatggaggtatgacatatgtctctcctgtggaacaaaacaacatgctgtaa

SEQ ID NO: 203782 - DNA, 1833 bp, Klebsiella oxytoca
atggcaaatggtttattcgatacttctgatattggtggcggtgttagtggtggcgtctccccacaacaggctgtagctccagctcccagcgctattacagcggcggtaggcggcggggcattaaatgcaattagtaatgtatttggggggctggctcagggctttgaagcaggagccaagaaagcccaagctgctaaagatgcaagtgttattagtaattatggtcagaagcttacagctctggatgccgctgtggcgcaaggctctatgtcacacgctgaggcgcagcgcagacagcgggctttgtataactccgctattgctaacaacccccatctcacagagaagcttacaggattcactaaagacgtaacaactaccgacggattaggggatacgcttgctaaagggacagccgtagaccagcagattgtaacagatactaagagcgcaactgctgatgggtttatcaccccgagcatgactccagaagaacaagagaatggccttaacctctatcgccaacgtcaacagcaaatcggggaaatgaaattttatagccagcaactggacattcagaagcagaaaatgagcattcaagctcaggcagagagtattgcggcatcccgtgtgcagcgtgctaatgctgctgctgatttacagcttaagaaaaataaaatgtacgctcaacaggctacagcagacttcggcgctaacgtttacgcccatacacaaactcaattggatgagattggtaagaaactagcagcaggctctattactaatgagcaagctatgtcagaagctaatgctattaaggacagcattatggcgcagacaatgaaaatcaggggcgctgctggcggtgattatgtagatagtatttctaaacctatttttgattccattgataaccgcaataagttcttctctggacaaattagcgctgatacccttaaagcccgtctggatagtctgaaagctaccgctgaattgcctatgatggctgaccctaatttagctaaaatcgctgtagcttctaaacttgtggcgggggtagacccttctttattgggaacctcagggcagtatttacaacagtatttgaagaagaatgttaaccctagcgccacccctgctaacccgctctccactgacccggaagagaaagctgatactaaggtgtacactggctctctagtggatgtgactaataaactttccaataagagccctaccattgcagaccctaaagggacaatggaagagttacagaatcacgttaaccagcttttaaaaggaactggcagcttctccggcgctcatgctgaccctaaatcttacaatgaagtggttaactatttggctaacccagccttccttgaatatcagaagatgggcggccgcattgaccaaagcaatctggaaagcgttaagaatgttatctccataaactatctggaaaaacttgtccccgccattcaatctcaatgggaacaggcacaaaccactgtgggattccctcagaccgggaagcaagtgggggccgtctttatgcctacccctaacactaaggcggctgagaacgttgtacgctatgtgtggacaggaaacacgattgagtttaaagcagctccgggctatgcggataatgcaggtgtacgcgctaaggtgggagagcttcagcgtaaactggcccctctcatcaataaatccgtaatgatgcgtgctcacttagatggctcctctgactattctaaatattttaaaatgagtgaagctgaaatgttcggggtgaaagctcaggacagctcctctgtaaatggtcgttaa

SEQ ID NO: 203783 - DNA, 234 bp, Klebsiella oxytoca
atgatctataatctgattcctttccctctcgatattattcctgaagaagcattgaagattgtggaatccaatttcattattctttctggtgctcacatgaaagctattgtgacacatgaccggcaagcaattgaagatatccgcaatctttctgagcagctcacctatattgagcattcccttaaagcttctattgatggcaagctcttagattctgattacaacttacattaa

SEQ ID NO: 203784 - DNA, 525 bp, Klebsiella oxytoca
gtgctatttaaagccccagaatttaagcggcagcgcgtgcccctcagaaagagcagagagcgcagaaaagacagatacagtgacaccacccctgaatattctacacgtaatggctactctatttatgcttacaaaggtgtagtaattgagaaaaggatgaatgtgtattccattggtaaacgcatccagattaaaggctttcctgaggatgtaataatgcggctcaatgggacatttacagcagcgtacatcctgaaagatttaattgattttggattggagagcgtggataagaagcgccatgctgaagtaagagaacggcgtaagaactggcaatgcccacattgtaaaaccatcaccttattagacgctaaacataaacatatagtgtggcgttatattaagaatgaatggggagatgaagagcggcaggacacagggaagcgccgcttgaaatgtcactactgttttggggaaacgctccttgaagatgttgagtatgtctcagatgagacgatgttttaa

SEQ ID NO: 203785 - DNA, 4746 bp, Klebsiella oxytoca
atgtcagataataaatactctattgatgattttgaggacgggcaagattaccagattgaagattttcaggatgttgacgctgtaggagaaactcctccccctgctacctcaaccccttctaatcgaaatcaggctgctactgtagctcttctcaattctaatgaccctatgcagcagatggcaacttatcaggctgttaactctgagttggtgaatcatggcagcagccctacaatgcaggatattacggagcaggttacagctacagaacaggcagctaaacagcgcactacagcccaatacttagcggacccttccatctccgatgaatggaaacagagtgcaatccatgcagtgaatgaccgcagcaacccaatgtataacccacgcgctctgttaggtactaaggaggctgtacaggtcacccctaatcagacagaagaggcagcagatttaagggaggtttgggccgctggtatttcctcagcaatcaccgctcaacgtgagcagcagaaaacactcaacgctatgaagcaaaagagcaactctgtagccgactattcagcaatggcggaagatatcctccctttggtatctggtgctaaacaagccgggctagaaacagctatgggtggcactggtggagaagcgcttaaagctttctttctccccggtagctcacgcgctgctatggctgagaagtttaacagtcttcctctggaagaacgtagcgctgcgttaacagccctgtctaatgccctctcctctgaggggaaaacgattctactcccggactcaatcgaccagtctaattatgaagccctacagcagattgtagagaatggttcttacactatctcagataaatatattgataacatcatgggcctgttagatattgctggcattggctctatgataaagggtggcctgaaagcaacgggtaaacttgctaaggctgctggggcagtggatgaagcagcagaagccgccagtgctgtagagcgtagctggcagcgccgtttcattgctacagacatccagcctacatctccttctcaggtgattaaggatgctaacccggaaaaggctcgccagcttcacacaatggctgaagcagatgaaaccggggatgtagcagaagcgctttacggtactagccgcacagaggcagtggcaggagatctagccccgcaacccggtagtgtaggcggttcagtaaaaaataaagtgcatcgtccagagattgcctctgatatggctgaaatggcagacaatgacattattaaccttgtcaccaataccgcctctcctcatatctcccagcgtgagaaacaagctttagccgctaacgtgtctaatgatttctttaatgctacagggatggcgtctcgtaaagagatgtcggctattacagaggctcctgatggtgggttacacatctccgctgtatatggccctacagacagtggatggtcaaatgtacaggatgcgtttaatcaagctcagtttgcattaagtaaatatggtgtagatgaaaatgacattaccatccttatgcgtaatggtgatgaatatattccaattgacagggcagctcaggataagctcctgaaagggaataacacgcagattaaaggcgatttcctcctacaagttaatcagcgttatgaatataacgccagtgatttagcagatacacagtttgagaagtttggcgttagctcaatattcaatgtgcttaaccgctttgaatttgctaatggtaaaactggacatggttccctcacctctcaggtgattgaccctgcttctatgttctctcctgaattcctcaaaggcgctgtattaggagatattcagagcgaccgtgtagcagctaagctgatggaaatatctaagccttttgtggatacggttaagaagattccagcagagcgacacttcgctatggagcgtcgtattaaagaggctaacctgaaagggcaatctctctcacccgtaactctcaaggctgagggatggagtgctcaggagatagctggatttcagagcttccgtaaaactcaggataccctttgggctttaactaacgctgatttagttaagagctataaagctcgtggatatggtaaactaacttataaggaaacggggtttgatgttgttgcccgtcctgttaaacgctctcaagtaggggttggtgttagagcctatgacccaatcaaagatgaagtgctcactttgtcaaaagctgagcttgatgagatgtatgcaggaaacaaaagcattgctgaggccgctgatgtaatggatattgatggtatcaaagttcaacttgtaatcaaccataacagcgctgatgctggttacattcgtccactgagccacggtgaaccaatcctttcgtatcggcatggatattacgcggtacgctataagcagcctcacttcattgagcgtaaactatttgatgagaatggttcccctctgaaagatagtaacggaaatgaaatatggaaaactgtagcaactgccccggatattccctcagctaacaaggccattgaacgatataagaccacctctccgggggaatatcgtttccgaaatgaccttaaaggagaggactatgagaaagcgaatacgcaattgcatacagccagtgggttaagtgctcagcgtatccgtggaaaacgcttagaagatgctacgggtagtaatatggagcttgatgctgtacacattgagtccccgggggaagcgatgatgaatagcattaacgctattagttctcgtgtctcctatcgtgactggctggaaacatctaaaaagcgcctcatggctacctactctgatgtaatgcctactcatcatgggcgcactgtctatccttctaatgtgtctgagattaaaggtacatccaaacaagccgcagacgccaaggctacctttgagtatatcagggctatggagaatggatatactaacttaatcgatgatggttataagtcaatcgctaacagctttgctgagatggcgggaacaaacggctttggtaaggtggagcgtattttacgtggagcctcagaagcatctcctgttaataaagtgaagtctgttccgtttgtattacagattgctcttaaccccctacgccaattagttatgcaatcctctcaggtaatcctgttagctactcgtttccctgcgtacacaggccatttgattggagataacctccttcttattactcatcacctaatgaatggtggtattcctgaggctgtcttgaagacgttcgggcgcagcaagggagagtgggaggatatgatgaaggcgctggaagaaagctccatcactaaagggattaataagcatgacctagctaaagggctagtagatacaaccgttgacgcctcagtgaaaacaatgaaggcagcacgtgacagtaagttgaagaaggttgctaaagcccctattaccgtagggaaaactgtagtagccggttctcgtaagattggttttgatgctggtgaatatatggtccaggcatcctcctttatggctcactacagtgaagctcgtaagggtggcaagttgcttaccaaagcagccctggacgatgtaactcatcaagcccgtaatttcacaggtaatttctcacgctctggaaacttagcgatgaaccagaataccctgtcggtgtttacgcaatacttacaagtgcctgtcaaacttgctcagctcgtgttaactaataaagctattccacttaaaaatcgtgctgcgatggcagcatctgtatccctcctctacggaattgggacagaagacatttacaacctattctcagatgaactaccaacaaatgagtttgcgcgtaatgttgtagtggatggcctgttaagcgccagcgtcaacggtattatttccgctatctctggagatccttctcgcattgatgtaagcgccctgaatccaattaacgcctatggggtggtggaattcttagggaagattaatgagggtggattcagcaagctagtaactgaaagcccggcaggctctcttatctttggcagcaatccacgcattactaacctgactcggacagcgggaatgttaatgggatatggagatgttgctgaggggattgagcctatgttgtgggggcaattgtggagagatgtagctaacctctcctccggtgcttccaatggctataaagctatgttggctcttgaatatcgtaagcagtttgcttctgctggcggtactatcgcagacaacatatccacccctgaagccttcgctattgctctgggcttccctgttaagaacggggcggttaattggacgatagttgaagatatcaatagcaagtataaaacccgaaaagaggatatacaggaagtattcaaccaacattcccgtattctaattgcggaggggctgggagatgaccagctagcttatcaaattaagatggcccagcttgctatgtcactttataaggatgacccggaagcttctaaaatgtggtggggaatggttaaacagaaagttgaagatggtgatgaccgtctgttacgcaagattatggaagcgtctaaatgggccactccagaagacactaacaaatggcttgataaagtaccagacatcacctcagaagaacgcgctaattataaagcgtgggcctctatgtttaacaaggctcctaaagaagatactgaggaataa

SEQ ID NO: 203786 - DNA, 375 bp, Klebsiella oxytoca
atgtctgatttatttgagggatgcaaatcctctttccgcatctggagcattctggacattccttcctttgaatatgaagggaacaccatccccttccccccacaacatcgcattgtatttgcctatatggcttccctagctaatcgctatggggatgtaagagcttcctatttttctgtatgtaagcgcactggcatggatgaaatagaagaagtggcggcaatatttaagtggttggaagcattcgcccttattaagcgtaaagtaactatctttgatgaagataaaggtaagaaagaaaccacacgctatgcaattaactatcctgacaatcaattcccttataaaactcttcccccttcaatggagcgataa

SEQ ID NO: 203787 - DNA, 390 bp, Klebsiella oxytoca
atgagctatccatttgaagaaatgatgcagaaacttattgaagctggttattccccggaagatgcagctaacgctattgctgctgatgctcagcgtgtagcagaagagaagaaagccgtagccacaacagccactttacgcaatcaatatggtggttttgatgttaataagaataaagaattcttctcccaggctcgtaaacaggaagaagctaaaaagtattttgaccctctggaaggaacaggcatcacctctacagactccctctctaagaaagagcagatggagctaatccggggtactcacgctggcaagggtgctaatgtatcccctctccaaagcgttaacgctggagtagatttcttccgtaagatgcgtgaaggtaaataa

SEQ ID NO: 203788 - DNA, 300 bp, Klebsiella oxytoca
atgtacaatgaatcctccattaaagtgttaagtgaagaagaagctgctattcattccccctttggtattgcacattccctctcaactaaatattcaatgttagacgctaagcattgtaagataattggtgaagcgctattcctcactaacactcccgtatccctgtatgagcgccgctattgctctccattgaacgctgtagcaaatgacatacattttacagcagaagaattagacacgctctcagggcttctggaagcgtttaaagacattactaaaagacaacataaaggaaaataa

SEQ ID NO: 203789 - DNA, 210 bp, Klebsiella oxytoca
atgaataacattctttcccttgttgaagagctagccgctttagatgaggcccgctactccacccactctaaagagaaacgctcatggaataatccagatgatgccatttcaagaggagcaaggaaacaggaaagcaagatgtcacgctcctttcccccacgtaaatctccttatgcatataatgatttcatggaagtgaatctagaataa

SEQ ID NO: 203790 - DNA, 171 bp, Klebsiella oxytoca
atggaaaattgttcttcacataaaaaccttaaacgcttgcaggtgaggatacctccggctatgcgggaagccctttctaaccattgtaccgaaataggaaagtctcctaatatgcttgttctctcccttctcaaaaactatttagaaattgtaggagcttatgatgaataa

SEQ ID NO: 203791 - DNA, 249 bp, Klebsiella oxytoca
atgagttttaatcacacacggcctacatctgaagcattaactgcttatcgacgttcctccaccgaatcttacaaggagaaggtgaagccagtagtagaggaactattgacatttggttatggttacacagccttagcttctgtattaaatgggaaaggtattttcacaaaacaagggcgcccattcactaagggtaatgtacgctatttattgcagatcttagagctggaaacccacaacaataaataa

SEQ ID NO: 203792 - DNA, 576 bp, Klebsiella oxytoca
atgtcttatactccatatagcattcatgtaggcgcaatcatcccaacgaacaattgtggtgatattcgtgtggttgaatacaaaaatattaatcatgttgttgtccaatttattaatactggctacatcaagctcacaagaagctcctccatccgcgccggtaaagtagaggacaggatgaagcccaccctcttaggcgttggatgtttaggagatggagggtttcccaccagagtgaacggaaaagagacccgagaatattcactatgggctaacatgcttaaacgtgtttatggctccaaccctaagtatgcctcctacaaaggttgcaccgtgcatccctcatggctgaactattcctcattctgcgcaagcttgcccaacctgattggttatgctgaatggagggctaatgaaaaagaattccatttagataaggacattctgtgggtgggaaacagagagtacggcccctttacttgcatgtttgtagacgcagccactaactccctagaaagctctatccgtaggtggcgcattgagcacgtcaagaatacattgtgggaggcggcgtaa

SEQ ID NO: 203793 - DNA, 210 bp, Klebsiella oxytoca
atgaaagtttttccccttatgcagtgtctgaaagctccttctggaagcgttccaatgtctgagctgatggctcatttagatattgagcgtgaatatttagtagcggatatccaatgggcttacatcaatcgtttcttggacatgtatattagccaaacggatgagctgatatatacgattctccctgaaggcatctacttccaaagctaa

SEQ ID NO: 203794 - DNA, 843 bp, Klebsiella oxytoca
atgatttgtaacactggaaagttttttgtagacactaccactggagagattgttaacccatctccttactgtctgtcagaaggttatgatgtgtcaccggcggtgactgaagccctgacaggtctccctttgaaagagacttatactactacctccgaaattaaaaaaggtaaaggtcgtaagcctaaggtgattgataacccgtattgctccctcttccagaacttagagcgtaaggatatttcttctaagaagaacttaactactatctccgaaattaaatcagtagctatcttgccctcagtcattgatgatgtattcactggagcgttacgcttgaaggaaccgggagctaacacagaggttccacgcaatcaacttctgtttgttatgtcccacctagaatctctgtcagtagaaagcattcaagccctgttcactgccaagcgtgagcttagaggtgatgatgttccgggggagcgttattgccgctacatcctgcgtaaatgtgaaagcgttattaacagcctgtcatatcacattgagcgtgggaacatcactaaaactacatcatttgatttcgcccaggatgctaaggattatgaaaagtatggatgtgtaccttcctgcgtaatctcaccagctccatttactaaaggtgataaagagatgattcgtaaactggctattgaagggaagctcaaagaagcagatgaatatgtccagcatatttcagagattcaagcacgcatggttaagcgcttcactgtccctacaatgcgccagattgaagctgagatgaaagctgagtttccgtatgacccttacactgagcagtattaa

SEQ ID NO: 203795 - DNA, 213 bp, Klebsiella oxytoca
atggcgaccgttgcgccgcccatcagggagagcgtcaggaccagcgttttcttacgcccgattcggtcgccaatatgtgcgaagaccaccccgccaatcgggcgaatgaaaaaggtcaacgagaacgagagccaggagaggattaaaccgatgaccggatcgaccatcggaaagaaaatcttgttgaataccagcgccgccgccgtaccgtaa

SEQ ID NO: 203796 - DNA, 201 bp, Klebsiella oxytoca; identical to SEQ ID NO: 88480

SEQ ID NO: 203797 - DNA, 279 bp, Klebsiella oxytoca
gtgaaaattgacaaacccttgtgcaataaaattcttcagcacctcttggaggactacccatcaaatatgtcgtcagagtcctggagcaaggctgtcgaaggggaaacagacataaagcatgtagcagcccagtttaaatacttggaagagaaaggttatatccaaacaagaattgatgaagatgatgaggatgggaaactcatatttaatatcgtactaccgctcaccagtatcaactcatacggcatagactttattgaagcggggggattttcttaa

SEQ ID NO: 203798 - DNA, 492 bp, Klebsiella oxytoca
atgatgatggtattaggactttttgtatttgaactcaggacgctgccctatcagcagttgcagctgtcccgtaactggcggcacgtcaaaaatgatcgtgttggccgtagcgcaaaatggcagtacgtgggcgcgggcgaaaatcagctgacgctgggcgggctgctctatccagaaattaccggcggcaacctgtcgctgggtgccgtctcaacgatggcgtataccggactggcctggcctttaattgatggggttggctcgatttacgggatgtatgtcatcacggggttacaggaaacgcaccaggaatttgatcgttatggtaaggccaaaaaaattgagttcacgctttcactacaaagggttgatgaggatatcagggaggggctgcaaagcgcctctgtcagcgacctgatggcaacactgaaagaaggtgcagagactgcattaaatacagctcaggagacgctaggcggtctgacctcctga

SEQ ID NO: 203799 - DNA, 546 bp, Klebsiella oxytoca
atgaagaacatcatcaaaaaatgttcgattgcggtgattgtggccttgggcatttcgctggcgcccgggagcgtcagaacatcgaaagaagggcagcagaaaattgcaggttgggaagactgccgcagtacgccttattactgcacggcgggtgctctgaccattggtatcggctccacgggcggcgtggaaaaccgcgaatacagcaaccaggaaatagcgcggcgctggatcaacgatctgcaacgggcggagaactgcatcaataacaatttccacggtgacgacatgccgcaactcacctttgaggccatgacggatgccgccctgaatctgggctgcaccgggctgatgtggttcaccgataaaaacggacgtaagcagaggaccacgatctggaagcatgcccaggccagacaatggccgcagatgtgcaacaggctgactgattttgtcaatgcgggcggtaagcgctcccccggactggttaaccggcgcaacgattttaaagcctggtgcctgctgggcctgagtacgccgtcatga

SEQ ID NO: 203800 - DNA, 369 bp, Klebsiella oxytoca
gtgccagccggtctttttgtcgccagtatcaacgccacgacattcactaatgtgtttgccgagtgcgtcgcactggaagaggtcggggtcggtctgctgaataacttaccggccacgacaatcggctacctgtttgacggctgcgtgcaactgagaaccaacgtcagcacgatattcaacctcagcagttattcgacgattgtcaccacgacggccacattcaggggatgctctgccattacgggcaaaggcctggagtttatgggcaaagtgccaaacgtcacggcgcattattacgcgttctacaactgcacaagcctggacgatttcacagatttacccggtaactggataacgaataaattatga

SEQ ID NO: 203801 - DNA, 360 bp, Klebsiella oxytoca
gtggaaaaccgcgaatacagcaaccaggaaatagcgcggcgctggatcaacgatctgcaacgggcagaaaactgcatcaataacaatttccacggcgccgacatgccgcagctcacctttgaggccatgacggatgccgccctgaatctgggctgcaccgggctgatgtggttcaccgataaaaacggacgtaagcagaggaccacgatctggaagcatgcccaggccagacaatggccgcagatgtgcaacaggctgactgattttgtcaatgcgggcggtaagcgctcccccggactggttaaccggcgcaacgattttaaagcctggtgcctgttgggcctgagtacgccgtcatga

SEQ ID NO: 203802 - DNA, 261 bp, Klebsiella oxytoca
atgaccaaatcatcaaacgtacatgacctgttatctgcctaccagaaacaggcgcggaaaatacccgcaaagggtgtttactcctcaaaacagcgccgtgaagaagtacaggcggctcacacacgaaaggtactgcgtcagcgtaggcggtcggttgggaagtccaataaattaggggggcgtagccgggctgaagtgctggtggcgatgatttgcgagatgaatttctgggcgttggtgtgccgctctaaccgtcactag

SEQ ID NO: 203803 - DNA, 282 bp, Klebsiella oxytoca
atgaccaataaccagttaacagatgagcaaattgctcagttgttgggtgatgcgtgcatggtgattggcgataggttcgcgactgttgacgaactgagtgcagcgaaggcaattagggcgttagctgtggagctgcaggaacgccgcaaggcagacagcgagccagtagcgtacatgcgcgatggaataggggttagctttatgcacgccggtaatttagacgcgcctgtaaagttaaggtggggaacttggattccgctttatcgccatgcaggagattaa

SEQ ID NO: 203804 - DNA, 315 bp, Klebsiella oxytoca
gtgaaaattaaaattgtggtatcccctccgcgttataggcgtgagcgcttagagggtgattggccagcgccgctccgctctgtaactgagattgggggccgggtagatatcatcgttaaagatgatgccggagatactcgcggagagctggtggctaactaccatgaggactaccggaaggattcaacttttggcgagtatgagcaacgcgccgccgagtgggccaaatctttggtgtcagttatcaagctggccacgtttgacgataaccagattgaaggggttcaggatggcaaagaaaaaacgccagtctaa

SEQ ID NO: 203805 - DNA, 264 bp, Klebsiella oxytoca
atgaaagatttcaaaattgaatatgtgaatggtgagctggtggctctcgacctaaacgggatgtcattgctggataacgtacagggcatttcctttaagcatgagctgggcgagctgccggtgattaacgtcactcagggctacaaaatcaccgcgcctgaagaagcgccgcgcgaggtatccggcgaagtaattcaagatgatggcggttatgaccagcagcagcgccgcagcaagcgacagcgccacgctaaacgccgttag

SEQ ID NO: 203806 - DNA, 204 bp, Klebsiella oxytoca
atggctcagctcaataaactgaaaaatggagatttaacgatgccgcaaagcgatcaagtcgcccgcctcgaaaacaaagtaacccaactgcagcaagccgttgcagtccagaacaaccagcttacgcaggttgccggtgttgtggatagtctgcgcgctgaagttgccgagctgaaaaagcaggttgcagaacagggtaaataa

SEQ ID NO: 203807 - DNA, 273 bp, Klebsiella oxytoca
atgggttggggcgttaaactatacgacaaaaacggaaatgagatggtggatcggtttgtccctgtattcatcgcagattatatcactgagccctcaagtggtagccgtagctacccagcagtccaaggaaaagcattaaaggctttgcctctaagttatatggggaatggtggttattacggtacgcctccaggagaggcttctgtatcaggtaactcaattagttggaataatatttcgcaaaatgtccctttattggtggtgtatgagtaa

SEQ ID NO: 203808 - DNA, 633 bp, Klebsiella oxytoca
atggcttacggtttacagatatttagagatgatggttcactctggatgagtcctgatgtaaccccgatgaactttattaaaaaaatccgttttaatgccggtagcggtgagctcgctaccggtattcctgaagggaaatcaattgcattttttgttcggcatgatcaagaacatgggcgaggtcttttctctcaaataaaaaacggtggccagtggaatatcaaatataaagatgcgcgcgttgcaggttatctttatatttttgcaaattgggtaaataaaacttcaggttatggcgtagctgtctataacgctggtgcggaaatggtctggaatacggaaatgttacctttgcagttgacttacatcgataacccctacggcgtagaccaacgcggcgatattactatcggggtagggtttaacgtcgccgttttgcctggtgtatgttctacgtggctggcaccgcttgaaccagcccatcatatatttctagttggctctcttttggctggcgcgtcagggaacaacatttatatcacccgctacgatggcactcaagttaatgggacaacaccggcatggcgttacagggataagttcctttgcataaacactgattattatgactga

SEQ ID NO: 203809 - DNA, 930 bp, Klebsiella oxytoca
atgcccacttataaacaagttgtgaaccatgttaagaaacatgtactgtggaaagatgagtatttagagcgctaccatcgggtcagagatgaatggattcagaagcatttagctaaactttaccaagctgaatatgatctaatggtgctcatcagaactcaattcttttgtcactttcaggctaatggctcgctctattttgatgggtgctataaaacagggaaaggtgacaactcattgctttgtactaaccttgctttatggagtatcgagctagcctgcgatcattttgatattcgggaagagcggggatataccacgagatttagccatcagggagaaagttggttaacactattcgcctgcaatcaattctctttagttccttactgctatccggccattcagcgagggtttcaaaatggcgtattgaaagaaatcgtcccattttaccgtgaacagaagttgggtatcctggcgatggagatgatggcgcgtgagcggggggatacgatcaactgggaagcaatgcaagtgcatgtggatcctgtctatctggacttttgccaaaatattgtattgtcatcagatgataaactcgtccgcactgggttgattacgttatgtgataagcatcttgagtggaccgattttcataatagcgataagcgtagttacttgactggctatgaaattcagcgccaggatctcttactctggccatttgaatatcaggcggtaaaaaactggcgagcgcgtcaagggttaagtacaccaatgattgaacatccattgatgaatagcccgatggcaacggcgaattgtcctgacttttcgcagtggcagcgtccagagtggttcaatccgttagttgattttttggcccaacgcaggcctgatctggcatttttacgacaactctttatttaa

SEQ ID NO: 203810 - DNA, 2301 bp, Klebsiella oxytoca
atgattacagggataaaaatgaaaggattcttaagtgtactggccgccgttgttgtgttatctggctgcgatggcaaagacaacacccacgaaggatactatctgtttgatcaggttaatgttgagtttgataacagcaaaactaaaccgcaagacaacctactgtttcgccctgcgcaacagcagcaaattgcccaacagatcaaacaacagaatagcgaaatctacttcaactttacgtcctcgaccgtggagtactacaccccgttcaaccaccagaggggagatattatcaatgaacgcgtacagctgaacggtgtcagctacacgatcacgcaggaaaaaggacatacgctgcgcctgctttcggataaggcaacaaactgtggtttttattcctgccagattacgattacgctaaaaaaaaccagtactgactcccccgaattcatcaaacgtcagcagcagcagcagcagagtgagaacgattaccaaacgcaaatacgccacaatatcaactacttccaacagccggtgctggacgatttcctcggcattccactctctcttggcaatgattttgccatcaaaatgcccatggatatgcgccttgtcgaccgtacaccggcggactgtacccgaaactgtaatctcaactcgctcccactcgcttcgcaagatggtggtgaaatgtcgattttcacttactatagtcggcaggaaaagcacggcggcacgctgtacatttttaacggtaaatcgagcgaaataacgataactgaacagttagtaaaacaggcaaaggtacttttccagacggaaaacggcgcgatttattacaatacgcaaggggaactggaagcattctattttcgctacgataccgccagtgggcgttatcttgtcggcgtagctcatgccgctacggcggaacagatcgccagagaatttaccatcctgcgaacgatggaccctcactatcgcgagcagaacattatttcaatggacgatttacagctttcccggcaggcgctggaggaaaaatatcaggcaaaggttagcgacgtctttgacgcgaccagcgttcagaaagcgatttggcagacaatggaacttatgttgtcaaagcccaaacgtttttatgactctgatggcatgatgatgctcgctccagtttggtttccttcacaaaagagccacgaagatatctatgtacaaatttacgctaactccattgattcactgatggaaggagaggaaataggattagtcgcaagagataagccgaaagggaaacgtgcgggtaacttccttatttttgaggggcagaattttgcgcgctattatttcatgatcaaaatcgacgagcaactgacactagtgctgggcgcgccagaaagcggcggtaatgagcgggaaaaaatgttcctgtctcaggtttttaaacagctcgatctggcaaccagtccgctcgctactgttcccgcagaagagagaaaaaacctgtttaaatacaagtcatcatcgtcgcgaatcgatgtgcgtagcgatgagcgccatttcaccgttgacgagggattgcttgatagccatggtaatcttattatccctcagccaaaaaatggttatttttcaatatttactgagcaacctccattcatcctcgcttcgctgagaaataaagatcatcaggatgtttgctggtcaatttttaacgaacagggaaaaaaaatactcgatactgactcttatacggagattattgaacaacatttggtcattgcacgtaaaagtaagaaagagggcattttcgatctggctagtcaacaatggctattgctgccaacttatcaaaatatttattggatgaagagtgcctttatcgctactgatgaagaagacaggaaataccttattgataaaaaaggtaatgtattaatttctgatgtgaaatatctttataacacggatcgtaaaaaccattttgccgtcgttaacagggatggcaccgttagtctggttaatgggcaggggaaggcttggtttcatcatcgtggtaacgccttgcgatatattgaagaaattgatgcttggctgatcatcgctccggatgaggaaggagaaagggtcggcgtgattggtgaacacggtgagatccttattcctgtagaatacgatgattacaagataacgggtaactacttgcaaatgttgcggaaggagagcagcacttttttcacgctcgctcaaattaaggactggaagaatcacttgccattacagggggttcctgcgccgtag

SEQ ID NO: 203811 - DNA, 597 bp, Klebsiella oxytoca
atgaacagctcagaacttttggccttgatcaaaaaagatgtaagcgatgtaaagcagaacggtgctgaaaccattcttgtcgataatttacttaactatctttcagaaatagatgtgacagaacaaccagaggataatgctttaaccctagaaggaattaagcatcaaaactcaactcaattggaattgtttaagattgaaaataatttccaaatggagtctttcaaagccgctatcagtatcggtgcaaatgcttgcagaacatttttaataatgaatggaggtgcagcaatcgctttgttagcatttcttggaaacatttggaacaaaagctcctcgactgaggcagcatctgctatcgccactgcgcttgttcttttttgtatgggagtggtccttgctggagtctgcgctgggttttcctatatctcgcaatccctcttcgtctcatcagaattagggaataaaaaatccctgctgtattgggggcgcggaataaatcttatggcctgtatatgcggtgcaggttcaatttttatatttgcctatggctcattctctgcatatcaatctatgattgcacaattagtaaaataa

SEQ ID NO: 203812 - DNA, 894 bp, Klebsiella oxytoca
atgaacgttctgcttactggcggtaccggcctgattggccggcatctgataccccggctgctggagctggggcatcgcgtaacggtttcaacccgcagccctgaaaaggcgaaaaaccgcctcgattctcgcgtcactctgtggcgcgattttgagcatcaggtgaatcttaacggttttgatgccgtcatcaatctggcaggcgaacctatcgccgataaacgctggacggcggagcagaagcagcgcctctgccacagccgttgggatatcacccaaaagctggtcaccctaatcaacgccagcgacgcgccgcccgcggtgctgattagcggttcagccgccggctattatggcgatctcggcgaagttgtcgtcaccgaagaagagccgccgcataatgagtttacccacaagctttgcgcccgctgggagcagattgcctgcgaagcgcagagcgatcgcacccgcgtatgcctgctgcgtaccggggtggtgctggcgccgcgaggcggcattctggccaaaatggcgcccgcctttaagcttggcctcggcggccctatcggcagcggcagacagtatctggcctggatccacatcgacgatatggtcaacggtatactgtggctgcttgataacgacctgcgcgggccgtttaatatggtttccccttacccggttcgtaacgagcagttcgctcatgcgctgggccatgcgctaaaccgtccggcgattttccgcgtcccggcggcggctattcgtctgctgatgggagaatcttccgttctggtactcggcggccagcgcgcgttgcctaaacgcctggaagcggccggatttggctttcgttggtacgatctggaagaggcgctggccgacgtgctgcggtag

SEQ ID NO: 203813 - DNA, 393 bp, Klebsiella oxytoca
atggattacagcaaactaagcgactttgagctcaattgctcgatcgcagagatgacggggcataagccacttagtgaagagcaaggctatgctgggcttcaagaaggtaatattactgctgccattgttcgagggccgcgtaaaatcggaggttttgacccatgtaacgaaccggcagacgcatggcccattgtcgttgaaaataaaataagccttgtgtggattgcggaaacttccagatggtgcgccagccatggcggcaacgctgaaagcgaatattggggatgggacgagtgcccggatgtttatcatgaaagtataaaccccctccgcgccgcaatgatagttttcctcatgatgcatgagtccgaccaatcaccaaccatcgaatga

SEQ ID NO: 203814 - DNA, 165 bp, Klebsiella oxytoca
atgaatgttcgggctccattacagccaaatgaaatgatgattcaagctggtataactgagctttttgaaagctttccaagccttgaggattctggtctagatgatgatgagttaagcgatgcaataacattcatctggcaagcaatgttcgcagaaatcaaatag

SEQ ID NO: 203815 - DNA, 606 bp, Klebsiella oxytoca
atggacgcactaaagcaacgcattatcgacttcatcaaacaaaaccaacctattaatgaccagcaagccatatccactttcggtatcggcaagaaccgatggcgcgaggaaaagagcaaacttaaacgcatgggggagatatatcccgtctgcggggccggcactttcatatcaaaacatgattacgatgactggttagaaaatggcggaggcaaggagaaagtaagagcctcacaggccaaaggtggactggtgaagggaaacaataaagattccaagaagctaataatcgaatacctgccaaatatctctaccccaatgacttcaggcgctatctccagagcctgcggagtcaacgaaaagaccggacacaatattatttcagcgctcgccgacatgggactcattgagcatgatggcgctgaatacaatcgacgctatatgccagtgatggaagggcagccgcatgtgttcgtgaagcggaaagcagacaaacagaagtcgctgtgcaggcgatatgacccgaggagcaacgtagtggttcgtgactacatggcaagcccggcccgcgctcggctgatggctgtatacgggaggatgggatga

SEQ ID NO: 203816 - DNA, 138 bp, Klebsiella oxytoca
atgcagaagctcgctccatcatttatgcgcgttatccatacgagaagcctgattatgaaaatggaatgctcacgtatccaggctactgcattgaagcagatgagccggaaagatatcaaaaaatgcatcgaagattga

SEQ ID NO: 203817 - DNA, 285 bp, Klebsiella oxytoca
atgagcaagttagccatcgatttatttgtaatggatgatgcttgcgagccttacatttgtggcgttcgcggcgcttgcacaattagagacttacaggccatcgaaaaggaaattatagagaacagggaagatcacctctctggaagtggaatctacgctatcgaagtaagctggtttaaaggtcagtttgacgagtatgggcgttgcgaaattgcccctgcctgggaatgggaaattatcgaatcatcaccatttgatttcccagcggaggattgccatgactaa

SEQ ID NO: 203818 - DNA, 516 bp, Klebsiella oxytoca
atggcagtaagagagctcaacttaacgaaagaccagcaggactggcttgaaggatggctggagttgtggggggcgtgggtatattcgggtcgactggaaaaacggatgagcagtgtgatcgctcagtttatggaaagggtcgaaccctcccgggtaatgaccaggccaatgtgcaatgacgatgacggaatgttgatttctcaggtcgtagattccgttatgcgcatcgacacaaaggcctttggcatcctgcttagctactactctcatggttcaactgagtacgcaattgcatcgtactatcatgcaaccgcaaagcctcgcaaagtatcaggcagagggagggagaggctatctaaaccatcactgtcaacatgtcgtagagaggttagagaaatactggaggcgtcgaggtatatgctgtttcaacctcttcaaaatgctttcagcggtcgcaaacgtgtagctaaagtaaaacatatttcctcgaatgtgttgacatctttgagctattga

SEQ ID NO: 203819 - DNA, 267 bp, Klebsiella oxytoca
atggatgaaagatacagcaacgcatcgtacggcagtgctggtcttgcagcattcttcgccagcctgtcattgcaggattggggattcataattggcgtcgcgttcagcatcgttctcggcgtcctgacttatcgccttaataagcgagagcagatgaagagaacgaagatattgcaggacattctgagtaaaacagatgccgacaacccttcagcaactgcaaaggtggtcgcggaactcgggcaaaaagccccgaaggaaatatga

SEQ ID NO: 203820 - DNA, 495 bp, Klebsiella oxytoca
atggaacctgcgttaagaaataagatcgctgcttccataggtggtggcgctattgctatagcaaccgttatgctttctggaaaaggtggacttgaggggcgggaatactatccctatgaagacgttgttggtgtgcttactgtatgtgatgggcataccggccctgacatagtcaaaggaagacgctattcagacaaagagtgtgacgcactaacccgtaatgacctaacccgaattgcaagacaggttgacccattcattaaggtcaagaccaccgaaactcagcgggcggcaatttattcctttgcctataacgttggtgcaacagcagcgatcaactcaaccctccttaaaaagcttaatgccaaagactacagcggtgcatgcgccgagttaaagcggtgggtttacgctggcgggaagaaatggaagggcttagttaaccggcgcgacgtcgaatatgaagtttgcacatggggacaaaggaatgcttaa

SEQ ID NO: 203821 - DNA, 417 bp, Klebsiella oxytoca
atgcttaaaaagctacctctcggtgagatcatcacaatagcggcgatagccgttgtcattattctggcaattaagctggcatcagataaccgcaagctaagcgaagataatggccgcctctcagagcaaataaaagagatcggcagcaaaaacgatacgctatcgaactcgctcgactcgctgatcggtgaagtgtcggccatgaataaaattgtggcaacagaatcaaaacgtcgagcagctgcagagatgaagtctcagcgcctgcaagaagaggtgaagaatgccctcaaggataacaaatgctctattgagcttatcccttctgatgctgttatcggggtgcgcaaagcagcagatagtgcgcgaggcagtaaaggttccggtggtgccgataccagcaaacctgatgaatga

SEQ ID NO: 203822 - DNA, 2541 bp, Klebsiella oxytoca
atggcaaatcagtttctcactcaatgcgaaaaaacagttaatgctgctgccggccgcaatctgtctgaagatgaaatgggtcgcctcgtatctgacatggaaaacacagtcaaacggatacgcgctgagaacgaagggatttcgcttgaggcagcagcgttacgggctgccgaagaacttagcaatgctgagaaactggcaaacgttattgaagcacgtaacaaggctctgaatacgcgcattgcagcgcaacgactttcgttcattcgtgactcatttccagatcgccctgatataggcctgtcagcaattcttgttgggagaaatgaagcccgcactggcagccgatcctctgcgtctgcggaacaatttcaactgcgatcaaagtatctgtccggactgaatcacgaccttgaacaagcgggagtgctgaaatatctctccagtggctcaaatgatgctgaagtagccgatgcgatgtggcgtcttggcaaaggtgagtctacagatggcatgatgaaagagtcggttaaaatcgccgaaataatcactaaatggcaagaatcagccagacttgatgccaacaaggccggtgcctggattcgtaagatgcctggctacattgctcgccagggccacgacatgatgaagattcgcgctgcaggttttgctgcatggcgagacgctattctaccaaaattggacaaggcaacattcgaaggcgtagcagaccaggatgcatttctgagaagcgtttatgatggactggcgtctggtgtccatcttgcctcagagaagccagactggaagaaaggcttcaagggctcacagaacgtggctcgtagagccagtcaggagcgcgtgctgcactttcttgatggccggtcatggtatgagtacaaccgggagtttggcgttggttccgtgcgtgaggctatctatggaggccttgaagcatctgcccgtaataccggacttatgcgcattctcgggacgaatccggagaacatggttaattaccttgcagataccatttccgcagatctgaaaggtaacgaaaaggctctggctgcatttaacgatgccaggcgttcaactataaaaaatgaaatggcagaagttaccgggcagacaaacatccccggttcctctgcgctggctagatttggctcaactacccgcgcggtggattcaatgctgaaactcggcggtgccatgatctcctcgtttaacgatttggccagtaacgcccttgagcttcgctaccaggggaagaacttcatgtcagccctgacagaatcaattcaggggagaataaaacgttattcgacggaagagcagaaagagattcttagttcacttggtgtttacgccgactccatgcgtgatgagatactgcagcgcttttccggtgatgtaacgttgccaggaaaggttgcaagattgcaacgtcagtttttccgtcttaacgggctgaattggtggacagatgcatcaagaaacaccacagcaacaatgacatcgcattggctggcaggcaatgcaaaatcaccccacgccacgctgaatcctgaccttaaacgtgctcttgacctgcatggaatcggcgagccagagtggaacatttatcgcaccatggacatgaagggctcagaaggtcgaaccttcatgacgccagacggtattgattctgttccagatgatgtgattgctaagtatgtcgcagataaaaacgtcactgtgaatgagcgaagcattgcgaatgctcgttctgagctgggtgataagttgcgtggatatattctcgatcgggtcatggtagcgatgacggagccaacagcaaggacgcgagcgctgatgaagcaaggaacacaaccaggcacggtgcagggggagctcattcgatttattggacaatataaatcattcaccgcctctttcatgcagcaggcgttgggccgcgaagttttcgggcgaggttacaccccagcaccattgggacaaagccggtggggtagcgtatcgaatgcgctatttaaaagcggcaaaggtgagatggtaggcctggcgcaagttgcgttatggatgacctttttcggatatctatcgatgcagaccaagctcatgctcaaaggccagacgcctcggccggcagatgcaaaaacgtttctcgctgcagcagcacaaggtggcgggttaggcatcttcggtgacttcctgtttggagaggccaaccggtttggtaacggtccaattacttctttggctggacctgtcgcaggttctgctgaccagttagtaacgctgtttcagaaggccagatctggggatgcaaaagccggtgacttctttagatttactgtggaccatacgcctttcataaacctgttctggtcacgtccgatactgaattacttgttccttaatcagttgcaggagtcgctatcgcctggctctcttcatcgatacgagcagaacattagaaagaatcagggtaatgacttcctgatccctccttcacaattcatgctcggacgttaa

SEQ ID NO: 203823 - DNA, 138 bp, Klebsiella oxytoca
atgtttagcggaataatcgttggttgcgttatggtgttttggtatcagttcatttttaaagatggcttcaaccgcgatcggttttatgcgttccttctgttcactggaatacctggtgctgcatggctttttctttaa

SEQ ID NO: 203824 - DNA, 948 bp, Klebsiella oxytoca
atgatgaaagttgtttcattattttcaggagctggcggtcttgaccttggttttaaaaacgccggttttcaaatcgtctgggcaaatgatattgactctgacgctgtacaaacatataaaaaaaatattggcgatcatattgttctaaaagatttgtctcaggttgatatgaatgatatccctgattgtgatgttgttatcggggggtttccttgccagggattttctcaagctaatctcttaagaaataaagatgatgaaaggaatcagttatatttagagtttcttagggttgtagacgctaaaaaacctaagttcttttttgcggaaaatgtacggggtattttaagcctagataatggtacggctatagaaaaaatcgaaagtgattttaaagcgttaggctataaagttaaaaaacagctcttcaatgtggctgattatggtgtgcctcagatgcgataccgagttattatcgttggtgttagaaacgatgtaaatatagagtatatgtatccgctgccaacgcatacctctcctaaaaaagttaataaaatggggttagctccttgggtaaacatcggtgatgctcttaatggcattcccgaacccgattctaattgtgatttattgaatcatgtatactcagcctataaaataacaaataggaatttcacaggtcatagggaaacagatccaagtaaaccttcgcctacaattcttgcaagaggtaacggtaaaggtggggtttgtgctattcagcatcccaaaaatcaccgtagaatgtctgttagagaatcagcaacaatacaaacatttcctttagattatgagtttgtgggaagtatgacatcttgctatcggcaggttggtaatgctgttcctgttttatttgctgagtctttagccaagagtttaaaaaatattattgtaggtgataataaatga

SEQ ID NO: 203825 - DNA, 933 bp, Klebsiella oxytoca
atgaaagttgtttcattgttctcaggcgcagggggattagaccttggtttaaaactgtctgggctagatatcatctgggcaaatgatatctatgaagatgcagtagatacctataagaaaaatataggtgagcatattgttctgggtgatgtatccaatatcagttcatctgaaataccgaattgcgatattgtggttggcggatttccatgtcagggattctctgtcgcaaatatgaatagaaagtctgaagatcctcggaataaattatatttagaaatggttcgtattattcgagataagaaaccatcatattttatagctgaaaatgtgaaaggtattttatccttggataaaggtcttgttatacaaaagataacaagtgattttgaatcgttaggatataatgttaaatacagccttctaaattgtgctgattatggtgttccacaaactcgaatgagagttattatattaggcgtaaggaaagatttgcctgatattgaaaactttccaccgcctaagactcatgaaaaagatgggataaatctacctaaatggatttctgtaggccaggccttgaaaaggtttactgagccgggggggaatagtgagttcaaaaatcatgagcattcgttgtataagcttacattcaatgggcatctaggacataggtttatggatccggataaaccagctccgacagtaacaggtcgtggagatgagaaaggtggtgtagttgtattacaccaccctaataatgagagaagaatgactgtcagagaaattgcggcagttcaatcattcccggatgacttctttttctgtggtagtaagacgtctggatatcgacaaatcgctaatgctgtcccaccaaaactaggtttagccttaggtaaaatgttaactgagcatcataaaacgatagaatag

SEQ ID NO: 203826 - DNA, 1257 bp, Klebsiella oxytoca
atgtattcttttgttaaaccatttcctcaatatcgttggagatgggcttcgatgacaccatccgaaagtttgaatattccagaagtctactttggctgtttacgtgttctttcattgaatgaaggtgaacatgtaaacagtaaacatgtttttgaattactacaacaagtagaaaaagatattaaggattataatgacttaaacgtgtcattagcacgttctgaaaacaggaacctttttagaaactccggtcagtattggaaaaatacgggtaccttgttaagcacagaacatggaatagaactgactgattttgggcgttcttattcttcagggctaattactaaagatgaattttctgctattgtaattaagagtatggagcttcctaatccatttattgaagatgatgaagttatttctgagtggtatcatgaaggtgttaagattaaaccattagaactaattttatgtattatttatcacctttacaatttcaaatgcgaacatggatatttaaccactaaagagttaattgaaatagtgataccaatggctggtaacaaagccaccgcttatgacatctttaaagtaatacttgattgtcgacatggcacaactttaggatctgattcttggatagctaatgaaaaatctaatgataaaagaatagccagggagtttctgctttttctcgaaaattatggatatttaaattcgagacaatctcagaatgaaagggcaaccaatctaaatcaagagttttatctaacagactaccagtattctttagctaaatcactcattgattctcctgagatatcatataaatcaatgtcgcctgaacaagctgtaccgaaacttgcagaagctacagaggtaatcgctagaaaacgagttctcacagaaatcactttacgaccaaaacaggctgagttcagaagaaagctgatggaggcatattcagggaaatgtttattgtctaatgcaagtgtaagtgaggtacttcaggcatgccatattatccctgtgaaaaacagtggtaatgattctgttgaaaatggttttattttgcgctctgatctccatcttttatacgattcaggccatataaaaatacatgaagatggcaccgttacattatctgattacttgaaaaaagacactttttacagaaaaaccttacccagtaagataaagttaccgtcattccttaatattgaaaacatacgaattaggaatgaatacaatatgtga

SEQ ID NO: 203827 - DNA, 288 bp, Klebsiella oxytoca
atgcccctttgtaccatggttgaatattgtaatgcactaagtgaggcgcttgagcatcaaggggagtttcgaggatgggtagaggcgatgctgtacaaagataagctatatggtacatttgagcgcaaagatgaagagccaggcccatttaaagtatttgcatatttacttcttgaaaaatggtttatatcaccggaaggagatgtgtttaaaaccgataccgaagttcaagctaagttaaatgaagagataatcaaatacaaccaaaataaaatcagaccgcgatga

SEQ ID NO: 203828 - DNA, 1863 bp, Klebsiella oxytoca
atgcgtcttgaactaggcgctagcaatagtgtgaagtgcaattgcacgagaaccttacttactgaaaaaaggatcataatgtatctgtctaatttaaggatagccaacttccgaaatttcgagacggtagacattcccctgagtggtaacattgttttgctgggcgaaaatcgagtaggtaagagcaatctgctgttcgctatccgcctggtgattgaccccacattgcctgattcagccagacagctaaagctgtcagatttctgggatggctgcgatttatccacggcccctcaaattgagatacatcttgagttcgccgattttgacagtgacccctcactctcagctctgctgaccgattttcgtatcgcagaaaacccagccttggcaagactcagctacgtctttcgaaagaaggatgatattgccggagaacctagctcgagtgaggattgtgagtttatcgtatatggcggaggtcaggaatcacgtgccatcgctagtcgcgttcgtcgtcggatagccatagatatgctggatgccttacgagacgctgaagcacaactcgcatcatggcgtagctctccgctacgtcctttacttgaagatgcgttcgcgtcattgagccgtgtagatctgaacagagttgccagcgcccttgaatccgcaacggagacaatggagacattcccacctattaaggagcttgaggaatctctgcgtggcggcatacttaatcttgccggtactgcccacgatcttgatgcacgtcttcgttttgcaccgacagacccgctcagattgatgcgctcaatatcaatgttcattgatgatggaaaaagaggaattactgaagcaagtcttggatctgctaatgtggcattaatttctcttaaactggctgagtttgcctggcgccgcgccaagaacgaacgaaatttctcactactttgtattgaagaacctgaagcacacctgcaccctcagcttcaacgggctgtttttaataagctcttcaataatgccgatgaaacgcagtccttgattgtaacaagccactcccccactctggcaagtattgctcctctccgttccgttgtacgtctttgcagggatcaggatgggcgcactagggctttttctttggctaaacttcctgtaaccagtgatgaactcgatgacattgagcgatatctcactgcaaccagagcagaactactttttgcaaagggagttatatttgtggaaggagatgccgaggaggttttaattccgggcttcgcggaagccatggggatcaatcttgacgagcttggtatcactgtatgcagcgttgcaggggtgaattttgaaccttacgttaagctggcaggaagtttggggatcagcattgctgttatcactgactgggacccactcgacggaagcaaaccacctttgggtaaagcacgagctattagtatctgggattcaatctgtgctgtccgtcctgatatacacaagctgactgctgatgagaggacctggtttgtggataaaggttttgatgagtgtagcgatgtatggaaaacagctggtatatttcttagttcacaaacatttgaagtgtctgtagcaaataccccgagactaaaagacgcactgcttaatattctcgatgaacagggttttggatcacttcgctcctcaagaattgcatcctggcgagccggccagactcctgaccctgctcaactcctcgcgatgatatctgatattggcaaaggtcggctggcagcgaaactcaagaaaaaagctcccgggcttgtgccaccggaatacatcgcagcagcaattcagtatgtggtgtccaatgtctga

SEQ ID NO: 203829 - DNA, 1794 bp, Klebsiella oxytoca
atgtggtgtccaatgtctgaccggcacgcgctgtcaatggcgttaagtgagctcttaccgaacaaagagcagtacggcgctgcaaccgagcgaggacactgcgttgtcattgccgggccagggagtggaaagactaaaacactgacgaccgccatggctcgcgccctcatggatgacgtgattgaccctcgtggtgtggcctgcattacctacaataatgagtgtgcaactgaactcgaagaacgtctggtctactttagcatagccagcagcgaacgaaactttattggtaccgtgcacagctttgctttaaaccaggttttaatcccctactcgcgttgtataccagacttgctacccaatggctttcgggtagcgacccgagatgagtgccgtgccgcagttgaggctgcttatctggcaaagttcggtgcaaacggggagcctcatgcccgatggaagtttgcagaagaaaaacggcgtcgggacgtgaaccgactgttaccctcttggcgaaataacaacccggagctggcagatttcatcgaaacgtatgaagcacatcttcggcgtttaggtcttattgattttgatgatatgccgctcatcgcctttcgtatgatcagggaacatgactggatccgtaatgctatccggtcgcgctatcccgtcttattcgtagacgaatatcaggatctagggcatgcccttcatgaactagtgctgctgctgtgctttaacggtggaatacggctgtttgcggttggtgatgccgaccagtccatttatggattcaatggtgcaaatccgcggttactggacagccttgttttacgggatgaggtgaaaacgttccgtcttcgtttcaactatcggtccggcgcgaaaatcatcagggcatcaatgggggcgttgggagaagagcgtgattatcgtggaccagacggaacggcagaaggggaaataggatttcacggagtcataggcgattatgaaacacaggcgcgttatatcgctcaggatttaatcccctcgctgacagcccggggatttaagcctgaacgcatcggagtactctaccgggcagcctggctcggagataaagttgcggatgcgcttaaggccgaaagcatcgccttcatccgtaccgatactaatgcgttaataaaacgcaattcacgccttgcccgcttcattgaagcctgcagccagtgggttacagggggatggaaagaggcgtcccctgcatttaatttgctgctgggtcaggcactttctgtagtttatggccgccgtgcaagcagtactgaagaacaactgctcaccgtacaactcatcacatttttacgaagcggaattgatcaggctgaaactgcccatgaatggcttcggcgattcgacaaagaacttatttccagctggcggattatcgcgcagaatccccaggtggagtgggacgtcgttactgagttactgaaacgaaccgatcctgcattaaagctggatatggctctgatcgtatttgccggaaaggaggaaagtgccagacgagttacgctgagcactcttcacagtgcaaaaggccgcgaatttgatgtggccattatgtttggcgtcaacaagtatgattttccgggtaaacgcgaccttgtttcagataatgcattacgtgaggctcggcggctgttttatgtaggcgttacgcgcccacgcaaagagttgcacatggtttataaaaaaggtgaacattccccttggattgctgaactctatcatcgtagccagcagacgtag

SEQ ID NO: 203830 - DNA, 1185 bp, Klebsiella oxytoca
atgatcagaacaatagcaatacgtaatttcaaatcgttggttgatgtctcgatcgacctgcaaaaatttaattgttttgtaggcatgaacagtgcgggtaaaagtactatattgcaggctatcgacttcatatcgcagcaaatgcgtggatacctctacctctggttggaagatcgtggctgggagtcgaaggatctgtactcccgaacgagcaatactaaagcgttttctcaaccactgtttatagaagttatttatgatctggacggaaaatgcctcgtctggcaaggtcatttcaatcgtagccttatgcgaatgacccgagaaagtatccatatagacggagaaatgtaccttgaggttattgatgggaagtacaggacccatgaaagaagctatgactcaataccttttgagtatagtggttcaattttgggaacattaaaagataacgtcatttcttctgatgttattcattttcgtgatgcgctgaaaaatatccgttctctcgagttactgtctcctcatttattgcgaaagcgttcccgttcggaaattaaaccctccggagtcggcattggtggagaaaaactttcggggtacattgatacgttaactcacgatgataaaaaaatacttcaacagatactcatcaaattctacccacagatagctggtctgaggacgtcgacgttgaaaggtggttggaaacgactgattattcaggagcgctttgtcgatgcaaacggtgatgaggctatttgcgagaccgaagccggacaactcaatgacgggttgttgcgtattttggccgtaattgctcagctagagtccaaagaagggtcattgcttctcctagatgagatcgaaaacgggattaatccgcaagttattgagctgttggtagatgctttggttaatgcaaaaacgcaagtcattgtgacgacgcatagcccaatgatcctcaattatcttgaagatgatgttgcgcgtaagggcatccagtttgtttataaatcgccacaagggcaaacgcgtgttcgacctttctttgaaatacagcgtataaatgaaaaacttcaggtcatggggcctggtgaagcattcattgataccgaccttcaacgactggcgcgtgaaaatatagagcttgatgagatgcaacaagaccttgttaaggattga

SEQ ID NO: 203831 - DNA, 756 bp, Klebsiella oxytoca
atgatcgttgtattgagtggagaggggccgtctgatctcggcagttgtgtaaacgggcagggagaatgtctgataaatgatttcaaccatggaccgatgacatattttatagataaagagctggaaacattgcttgggttctctcttcttgaaataacgccagatcgttacatttttgtctcaaaatctgagctgatcagactgacatcagcgaagcgacaaaaccgagccagtatgagtctgttagggaagaaacggcctgaagtagagacaggttacttttatctcaatgctttaatactggggaatagagctgctgagcttgcaattgagcatgaagatcccgcagtgatcgcagtactttttagggactctgatggcacacgttctgcggacttatcactatggcaaaataaagtaaactcgatacgtcatggatttgatatttcagctataggcgaacgcggtgttgccatggttcctaagcctaagtccgagagttggatgctatgtgtgctaagagatggttatgaacactgtgcaaggctagaagatttatccgggaatgataatgtccccgactcagccaaaaggcagctggaagaggctttaggaagtaatgcttcgacatctgaacagattcatcacctcgagcaaagtggcattgatacggcaagacttgctgcacagatgcagagttatgaagcattccaactaagtttgactgctgcataccgcttggcagcacaggtatag

SEQ ID NO: 203832 - DNA, 573 bp, Klebsiella oxytoca
atgaataattacgctgaaaatggtgtgtcgaggacaaactctggtggtaacgatgtcatgcttatccgtggtgtgttgaagcaggcgactgatcattatccacggctggctgcgctgggttttacagttcaggagagtagtacctgtttctgtgacaaagtacgacatgatagtgcccaattattgcgttttcatgctgaaacgtattgcattataagcgactactcaaagaagcgtatcgaagcgggtaaaccgtctcagcctacgcttcttcgctggttatgggaggctggaagtatttcaacatgtcggatgatgatgctattcaatcaggctgtttgcagtcatccccgacatgactcttcagcaatggatggaattcaggaagtcatgtcgttgctggtggctgcatggcgtgaagtagaaccgggcggggaattaacggaaataaaagcacatcgggcagagagaacaatgccagcagctttcgataaacgttatgcagagttacgagatgcagcattgcaaatgacctcacctgttgcttttgccaagagttgttcgacagtgtaa

SEQ ID NO: 203833 - DNA, 465 bp, Klebsiella oxytoca
atgaaatttctaagccaagcatttcttatatcactttgtgtcgattcaacagctacaataaactgtgtttttgggtcaattgttgacagccaattggtattattggctgttacaggtactgcatcaatatacttaccggctaatacaccctcattgcagtttataaagccaacgatatttaggcctaaatttctctcactactgattgccttatatgcctcaactgcattgttaccacttccgataatccatgtttctcgttgccataatccacatgcatctaatactcgttttgtaaacattctacatgtaggcagcaataccagaattaatatccaagtgagcacccagagaaatcgagagaatgtccaattagtaaacgccattacggcgatttcaatcgtagcaaaaataactaaggttcttaatatttcctttaactcaaaccaaaatgttttacgataa

SEQ ID NO: 203834 - DNA, 234 bp, Klebsiella oxytoca
atgtacggtgaaatcccgtatcatgttaatcacgattcgcacctacaggggctcaataatgagactgggtattctatttccggtggctatttttatcgtcgccgttgtttttctgggctggttttttgtcggcggctatgcggcaccgggcggggcgtaatgaagaaaagcaccattattatgcttattgtcgcaattgtggccgtggcgggtacgcagctgggctggtggtaa

SEQ ID NO: 203835 - DNA, 702 bp, Klebsiella oxytoca
ttgccgcaggccgaaaatccttttaacggcgcggttgttcgcccgggcacgaaaaagaagaagacgctgacacagacgcaaatggacgcgatgtaccggctgatggagcagtatttggaaacagagggaaggcaggggaacagcagtatgttcaacggtcgcagaaatgcgctactcccggcgtggttctggctgacggtggtgaatgtgtttcgttataccgctatccgacaaaatcagcttctgcatatccggctgggcgacattaatcttgaggaacggtggattgacctgaacatcgagggggcgaaaaaccatcgtgaacaccgggttccgatcgtctcgtcattgtatccgtcgctggaggaactggtgagaaaagccgctgaggctgggatggagtcggacgatcaggtgttcaatgtgggctggttcgacctgatgagaaagagtaagtatccggaggtgatgaacgagtacccgctgagagcgttctttcgccgtttatcccgggaatgtaagtttacgatcacgccacaccggttccgccatacggtggcaacccacatgatgaaatcacctgagcgcaatttgtatgcggtgaagaaactgctgggtcatgtcagcatcacatcaacgctggaatacattgatgaaagtgttgatagcctgcgggatatactggaaaccgaattgatgtag

SEQ ID NO: 203836 - DNA, 255 bp, Klebsiella oxytoca
atgaatgatgtctcctttgggcttcttactgaacagtatttttacagcaaatcattacgaccggcgacggagtggagctaccagaaagtggttcgctcattcgaagggttcacatcgtttaacccgactaagatcgatcacttgacggtgatgaaatggcgtcatacggtgctgaacgaccagaattgtgcgacccggacgtggaacaacaaagttgcgcatatgagggcgctgtttaatttcggcattaagtag

SEQ ID NO: 203837 - DNA, 1164 bp, Klebsiella oxytoca
atggcgctgatgcagcaatttcctcttacggaaagtgggccgtatgcccgtcccggagggatggctgactatatgctggaaacggtgtcgtatgcggcacgattgtcgaaaagttacatgttgccggttggcgcaccgccagaagaacaggcggcgcaaagcgcggcctggaatgcggtagtggtctatgcggcaatgttgtcttcgcttgaatatctttgccatcttcacgtcgagctggagaacggcaaacgctggtttccgctactggatacgcctccggaaccttatcgctttcgttttgcgccggaaccgtctccggaacggttgcagagttttggtgccatgctggcatggaaggttattcctcctgaagcgattgtctggctgagcagctggccagaggccatcaagaccctgtcaacgtacctgactggcttccgggcgcagtcgggtgtggtcaacgctattgtaacggaagctattcgcctcactgccggagcgccagaaagtgaggcactggttgcaccggccacaatagttccggttcaggctgaaccattgcagggtggcacgttgctgtccgggctatctgatgatacgacggagctggttgcgtcgtattccgaagaggaaatccttccggtagcggaacctgctcctgtgtcggatgctgacctgatattcccggatgagcagcaagagccggatgatactgacgcgttgctggcaatgatgggcttcgccagcgttgatgcagcagaaatcggagaaatcccgccatcggccgagttgaacgatcccggagaggtattctggcaatggctggtcacgggatgccgttccggtagtctgattccgaacaagcctgaagggcggattcatctggtcgccggttacgtgtttctgcgtgcgccggggatttttcaccagtatctgacggagacgaacgcgccaggagaggataaagccaggcttcagaaagcatttgagagactggggcatcatcggcaggacaatggcacgatgtatacctgccagttgtaccagaatgaacaacgggaagggcgctttcagaaactgagtggctatctgatacttgccagtaagatttttacgggcgataacaatcctggggataacccgttactgattgttatataa

SEQ ID NO: 203838 - DNA, 870 bp, Klebsiella oxytoca
atggatgtattcaaaatttccgttgatacacagcaggttcacaagattacccaggagaactttgatcaggttacgaaaaagcaggctccctggtatcagccaattaatggtcaccagggatggtttgcggtttgcccggcttgtgacaacccgatccagattataggaatgcttgagcgtgatgcgccgtatgggaagcacttcttcccgactgccggtgccgtggctgtaccgttgaaaggtcgtgttgataaggaagaatatgagtggtgcccatatgccagcaagaataagcatctaacgaaagatgatcggcgagcggcgggtagtgaacttgctgtattgataaaacaaaccttaattgagcaatttgaccgggttatttacctgttagaaaagggaactggaatgaggatctcatttgccctggcgaaacagatgcttgaagaataccgtgcggctgaaggctggcgctacaggggagcaacacggcagaatataccttgggtatttgcatacatgatgcaggctaagcggttgagaggacggatatttttcgatgcaaaatttaccgaagaactcttaaccagacgaccagatttaacctggaatgccaatgggcaaattgatattaaggacgataaaaaattctgcgatttgagttttagtttcatcagacatcgtcgccatgttgatcaacatacgttgtctgaaagtattgagttcaatattgcgaactcaaaacaggaaacggtgtgcaaaagggaaattatttttgaacacgactatttcctgaaactgataaacagtaaaaatgaagctaacaggaaaatgaaccttgttgatcttgccagaagcgtgctggcctga

SEQ ID NO: 203839 - DNA, 225 bp, Klebsiella oxytoca
atgaaagataacactcctgctgtaacgcgtactcatattgatgttgactgctgtgacagcagtgcagtttttgtgcttgataatggtcatgatcatttcgccgtttcccttgaaacgatactctcatgtctgaaggtggcagaggagcacggccatgtacctgaaattggcgcggactggtggtgtcttatcgctaaccatactgcgctgggatacccgtcatga

SEQ ID NO: 203840 - DNA, 843 bp, Klebsiella oxytoca
atgaataatgatgatttaaaagaccgtcgaaatgcggctctggcggagaataaatgtttcactaaaggacggcttcgtgatgaattcaggatgaaacccgctcccggggcagtgccggtaaaatggtataaaagcagttatggcggtaaatatggagtttacaaaatatctgattgcatccccatgcgcgaaaaacgcccccaaacagaaaaacagcagcaggcgagtgcccggttggcgatacaggccaaactgaaaagcgaaagagggcgatgcgccgtacaggcacataactggctcagtcaggagcctctttttcttgataccgaaacaacaggactcgatgctaaggctgaggcgctggaaatcggcctggtagatgctttgggctgcgtagtatatgagacccgcttgaaacctaccgtgagtatcagtccggaagcctcagcagtgcatggaattgatgacgtagcactggtcgatgctccctgttggtctgatgtggcagaacgactgcaattccatatcggccagcgaccgttggtaattttcaatgctagttttgatatacgtatcttgaagcagacggcggcagcgcacaacgatcctgctcactggctgggttccctgacaactcactgcgcaatgatgctttctgccaggtactatggtgctaccaaccgttacggcaccatatcactagccaatgcggccagtcaggctggcttgacctggaccgggctggcacattctgccgtgaccgacgctgtaatgacggcacaagtcgtgaatgccattgctgaatattactctcagttgcagtgtgaaatgcgagagttttag

SEQ ID NO: 203841 - DNA, 936 bp, Klebsiella oxytoca
atgacgaagaaaacaactcaccgtaaatctgccccacggcaggatttattccagaccgtaaccgataagattattacggcgctggagaacgggacgacgccctggcgtaaagcatggcaaaccggaaaagagggtttgcctgctaatgccatcactggtcggaactacagcggtattaacgtgatgctgttatggatcgatgctgccgataagggattttattccaatcgctggctgacgttcaaacaggcgctggatgccggtggtcatgtccggaaaggtgaaaaatcgacgctggtgacactgtttaaaccgttccagaaagaggcaacggatgacagcggccagccggtgtttgatgagaacggcgaggtggtcatgcgggatcgctgttttatgaccagcttccacctcttcaacgttgagcagtgtgaaaacctgcccgacaatctttatccggaaataccgtttttgcccgacgtggagcgtatcacccgggcagaacagatagcagcctgtagcggcgtatctgtgatacatcgtcatcaggatcgtgcctattaccgcccgggtgttgaccacattatgatgccggaagccgctcagtttgattcggcggaagactactacagtacgctgttgcatgaactggtgcattccaccgggcacgcttcgcgactggcgcgtgaaggcattgtttccacttcgaagaagttcggcgatcctgtttatggatttgaggagctgatagcggagatgggatcggcatttctgtgtgctgaacttggcattcatggcgacctgcaacatgagagctatattgcctcgtggctgcaaacgctgaaggaagacaaccgcgctgtatttcgtgccgctcgctttgcccgggaagcatttgaatacctggtgttgcgggagcaggcgctggcagcgtaa

SEQ ID NO: 203842 - DNA, 336 bp, Klebsiella oxytoca
atgacagaccagacaaatagcgtattttctgctgaagatttatgcgagctggcaaaacttgaaggtgatttgttggttgtggccgcattcgaacgtctggatatcggaacacaaccggatgaggataacttcacggataatcagtggacgattgccagtctggcccgaacttttgcacggggatgtgttggcgatttgccgcgttatgcgcacccttcatgcaaggctcttttcgatgaggttatggagcttgccagaacagtgtgcccgggaacctgggatcattttttcaaggttggcctggatgaatcgttagctatggctgcgatggactga

SEQ ID NO: 203843 - DNA, 399 bp, Klebsiella oxytoca
atggataacgtaacgatgattgacatgcaacctgttccctttggcctggttcttctgaaatatctgcacactccacgtcgcgtggctccgtttttagcgtgggctaagcgtctgggtgatgattatgaagaaaccagccggtgggaaggtcgggcgttgtcaaacaacggattctatcttgtccccaactcccgtctgacttatggcgtcagcgtggccgggaatggctatgaaggcaccatgacggcagaggcttttggcatcacgctgtcgttgtttgccctcgggcagatcgccaatacgacggaagaggacagcgatatcctgctttaccacgctttacgtgattatgcgttggatcactctgaatcggtcgagattatggccgcgatagactga

SEQ ID NO: 203844 - DNA, 195 bp, Klebsiella oxytoca
atgacacttcagcttgaactgactgatgacgaagctctggcattgtcgcatctgactcaaagtctgacatggaacacgatgcgtgactttgtcatgactaacagcgaatgcgatgaaatgcttgatgcggtccggaaattagaaagaacgttgacggaacacggcttcaggcaccagtacggttgccttgcttaa

SEQ ID NO: 203845 - DNA, 282 bp, Klebsiella oxytoca
atgacgaatcgcttatctctggcatttatgcctgtttctatcacgctcccggcctgggaacacgctattgaagtgtttgatttttcccagtgggaacgtcggcaatttgcgctgattaaagccgcgcagaatgcctggagccatcgttcagatcctgattctcagcaggtgacattttcgctgacgctatttgtccgtctgggagacgaaaccgacagacggacgcaaaactttgtcgccagatatgttgatgatgtgctggttgtaaccctgggagaataa

SEQ ID NO: 203846 - DNA, 891 bp, Klebsiella oxytoca
atgtcgaaattaagtaaacagctcgttacactggcaaggcagggaggtggaggatttaaaaccattgcggatcgttcaaagatcgccacccgtgtagcagaaagaataactaagctaaatattcagatccgggacgtgaagcatataaaaaccaatcatattgagctgtatgtcaagagccgaaaggctgaaggaatatctaaaagaacaatgcagaatgagatggccgcaatcagaaatattctgaccgttgccggtcggacaaaacttgccgatcctggtcatgagaaattaagtaattcagctctcggattatccgatgccagtcgtgacggtactaaagtcgcaattagtagcgaacgctatctcgcagcgttcgcttattcagataagcaagacgttggcgtagcagctgcaatgcaggttgctcgttgttttggcctgaggacagaagaagcggtgcaatctgttaaatcattaaaaacctggcaacgtgctttatcacgtggtgatgatcgtgtcaggatcgtatttggtacaaaaggaggacggccaagagatacgacggttatagatcgcgataaaatgctaagtgctgttaatcatgctctgaaagttgctgctgaacagaatggtaagctggttgataaaccggatctgaaatcagcgattgatcgttatcgaaatattgtcagagatgcgggattagttgggaaatatgcgcctcatagtctgcgatatgcctgggcgggtgaagcaatggaatatcataaaagtaaaggaatgagtgacgatgaggcgaaagcaatggtgtctatggatctggggcacggtgatgggcgggggcgttatattgaacgtgtctataataaaccggatatcgaggaataa

SEQ ID NO: 203847 - DNA, 243 bp, Klebsiella oxytoca
atgccgcgaacagctctgcgagctggggaacctcgtaaaaactcaacatattgttaccccgatgcacagatatcagtcgagacgcaggaagcgcaaaacctaaccgtgccgtcggggccagatgtatcactcatgttctgtgtgaagattcagaatatagatcgtgctcgtttccttatttcaggagaagagcttgatctgtattcctttgtgaaaggggacaagtatgtcgaaattaagtaa

SEQ ID NO: 203848 - DNA, 243 bp, Klebsiella oxytoca
atggatggcgtagtcaagtggttcagtgaagagcaaggatacggatttattactgataaagacaataacgattattactttcacatttcaaatgtgaaagggactgtgattcctaaaaacagccagaacgtattttttgatgtcgaagataataaagcaaaaaacatcagccttacacgtaaaaaagaaagtacatttaaaatattatcccctgattacagaaaatccatttttgatttataa

SEQ ID NO: 203849 - DNA, 1530 bp, Klebsiella oxytoca
atgacggctgacagctatctggaaatggtgctggtctttatgggctggctcatcaacaacgcgctgtggatgattattaccaccacagggatttttgccattccactggcgtttaaaatcgccggtgtctggctgaaggttcgggaagagggggatgatgaagggaataagggggcgctggcgctgccacgcatggaacacgttctgtatgttgcgtttgtggtgatcatgttttgtgcgatgccgatgcaggatatcgatatcacaacgatgaagtttgatcgcacccgttcttctcaatgtggcgtgaatgtacctaaaccagacgaatccggctatgggccgctgattgcagagtttaacgggcagacggcaaaaatcccggcgtggtggtatctggtacattcgctatccaaaggggtgacgcacgccgctatcgcatcgatcccctgcgggaatgacttccggttgttacgtttcgaagttcagcatactcagctgatcgatcccattatccgggaggaggtgcaggagtttgccagccagtgctatgcgaaatcgtattacaagctgaagaacagtaatccgaaactgaccgcagccacgattgattcagttggctggattggttctgattattttctcaatacttcagggtattacgactattacacctcgacgtcgccgcgagaggcgtggccgtatagtgaaagccgggatagtgggtatcccaacgttggccgtggtggctatccgacctgtaaagactggtggagcgcatcaagtaaggggctgaaaagccgcctgctggaaaacttcgatacccggacggttaatatgatgaaggcgaagtccccaggtaactgggaagaaagcctgttgcgctggctggtgagtccgcagaacacgcacttgtccggtgggggcgatacttacatgatgggaaatcagcaggggcaggggacggggatcgataccggcattaagcaggcgctgagcggtcttggcgcgctttctgctcaggtgacgcaactcccggcgtttgatgctctgcggcaggcgctaccgatggttcatgccgttttgctgatggctatcgtgatgtgtatcccgctggtcatgctgtttggggcttacgatccgaaggtggtggtcaccattacttttgcgatgtttgcgctgatatttgtcccgttctggtgggagcttggcggctggctggatgacaaactcatcgagctgatgtacgccagctataagggatatacgaacagcttcaataactggcttgccagtaccggctcggatggctggataatgaatctggtgctgggggcgatgtatgtgatgttgcccatgttttggtttggggcggtgagttggagtggtgttcagattggtggggctttatcttcggtagtgaataaagcgacccaaggagccaaagatgccggagctaaaggacctggagttgctgggaatgtagttaaaacggtagcaacgaaaggggcatctaaaaagaaaagttag

SEQ ID NO: 203850 - DNA, 333 bp, Klebsiella oxytoca
atggacgttattcgtaaaccgctctggcagcgggtattgcgggccttactgatctttggtgccgctattctggctatcgggggctttagcttcacactgctgcactttgcaggtagcgaaacagagctgaggacgtggttgcttcagataaaaacgccgctcctgttctggcggctggcgctgtatacggccatcatatttttctggctgcaccgtgtccggggctatttcctgcgtcactgtacccgacgttttcaggtttaccggctggaaatgatgatggtttgcctgttcgtgataatcgaaatcaccagttcgcgttgggggatgtga

SEQ ID NO: 203851 - DNA, 1416 bp, Klebsiella oxytoca
atgaccaataaacgtgcgttttgtgctggcattctgatgggatgccttgcgctgagtcttccggcccgggcggttttcgacctggataatgatgtgattaacaccgattccagcaaagggctgaaaggcgcggttaacgataatctcttttataccattggcggcgggacggtgatatcgcagccgcccagtaacaataatatggagaaactgggcatggggattggctggaacagcgatctgatgtgcggcaattttgacatcaataccaccgttaaaaaccagctaaatggcgtgaccagcggttttaaggacatgatgagtaacgtgatcagcagcgccaccggcgcagtagccagcctgcctgcgatgatcatccagcgtgcgaatccggggttgtatgaactgctgaccaacggcgtgcttcaggccaatgtctcgtttgataaagcccagctcaattgccagaacatgtcgaagaaaatggcggattacactatgtccagccagtggacgcaggcggcgataggggaagaattcaagaacattgtctccactacgccggatgcggtggctgcggataatcagctaaaaacctccaccggcaaagagggggtgaagtggattggcgggcaaaagcgtggcggtagcggccagcctgcaataaaacccacacatgacctggcgaaagcgggcttcaatattctgaataagcagtcagtcaccagtaatggcggcgtcagcggatcggcctgcaatggctctttgtgcaaaaagtataaaaccagcgaagaggcggcggaagccgtcgtcaaagtgttgggcgacaggacgattcgtacctgttccgaagccagtgattgcagcagtggtggagtggaaaatgaacccggcgcatcaactgccggtgtcggtttttcgccgatgctggaagagaccacgcaggagaatctggaaatccttgtgaagctggttaacgggaacctgacgcctgacgcgactaatctggcgacgctgaaaacgggagatctggcagtatcccgcggtgttattcaggcgctgaaagatgacccggataatgcggcgctggtacagcgtcttgccagcgaactggcgatgtcagagaccatttccaccgcacttgggatgcgccggatgctgatggccggtcagtcggaaccgaatgctgcggatcagacaatggcgcttgaagagtccgaccgtcgtctggagttcctcgaccgtgaggtcatggcgctgaagaacgaaatggagatccgcaaggccatcagcaacaactccattcttgtcacgctgacacgacaggaaagccgcgaagccgatcatggcctgcgccagccggtgcagcagaatgatgacgccatgcagaatctgaatcagaaggcagaggaataa

SEQ ID NO: 203852 - DNA, 954 bp, Klebsiella oxytoca
atgatgaaaccgcttcgacgacaccggctggggattgcgttagcgtttggttgcgcagctcaaccctttgcggctggagcgattaattccgcgcagattatcgccagtgcgttatccccccagtgcctggaatacaaaatcgtcggcatttgttactggctgctttgtacgccttttggttgtgtggtgaaaacttccactaaagtacgtcactacatccctaacgccgttgtctccagctacaaccagacgggaagtaatccctggacggaaatgtcgattctgggaaccgggcttcctgctgttgctgaaggcggcggcgcgaacgagcagaaacgtgttgagcgcaaagataacctgcaattcaaaaatgccgatgtgatcggtcatcctgcgctggctgctcccgttttcaataaattcatggggcagatggggtatacctgttccggcccggctaccgcgatgatgccgtatcttctcagtaccctggatgcggctatgtggcgttctggtctgccggagtcgttttatccagaagcactgacgcccgggctgcgcgaaataggttccacaactggcggcaatatgtggggaaacgtttatccccgcagcggttttgttactcaggtcaatgactataaagcggcggcggtcatcgcgcagcgtgcggcagatgttgtcacccgtaccggtcaaattcatgtttatcaaccaatgacagccagtgccagaccgggctactggcctccttcgccggtaacggaaaacaccggcacccgcaaccacaaatggcaacagctgacgccttcgctttcaacatcctgtgccgtctttcctgacagccccaatcctgttgcaaccgatggcaattacgcctgggcgttatggcaaccctacagctgctgtaagcgacgcggtcagaccttcctctacagcgtcgattttcaataa

SEQ ID NO: 203853 - DNA, 399 bp, Klebsiella oxytoca
atgagaccttcaaagttcctgatctcgctgctggccgttgctgttcaggctccggcagcgaccattgtctacaccgacagccatcatcccccattgaatgcggccagcggccaggtggtttacctggatgcgccggatactgttcagcgccagctgtttggtgagttgccaactgatccagtacaggcggagcaggttgccaggactatcatccagtcaccgggctggcagcaaaagcagcaacaaatcgggcaggcgtaccagggcgtacttcaggcatacagcctgaaactggagaagtatcccgccgtggtatttgacgatcgctacgtggtttacggcacggcggatattgcggtggctgaagcccgccttgctgaatttcagggggtgcaatga

SEQ ID NO: 203854 - DNA, 630 bp, Klebsiella oxytoca
atgcattatgagatattagttgaggggcagtgtgaattaactgcactttcaatcctcatgcctaaaattgtgggtgattataataatccaaatacatggaggattcataagcatagaggtattgggtctattcctgaaaatccaacagaaccaccaaaacccacagatgtgtcattgttaggacaactgccagcaaaattacgggcgtatgctgcgaatcctgatcctgaaagaaaggtcgttatattagttgatgttgatgataaggataagattacttttcactcagagttagttgcgttgttagattactgtgtgaatgattttaccgcttatttttcttttgctgaagaggaattagaagcttggtattttggtgatagaaatgcacttttggcatataacccaaggatatcaattgttaaactaaactcatatgttcaagactcaatatgtgatacgtggaaattacttttagaagcagatgatcctgctttggctcggttaaataaaagagattctcgccttttggagaagaaggttcaatgggctaagaaaattcctccacatatggacgtgaatataaattcttccccaagctttatagcatttaaagaagttctcagttaa

SEQ ID NO: 203855 - DNA, 1263 bp, Klebsiella oxytoca
atggctttgatagaaggatttagaatttcaaattttagatcacttaaagatgttactttaggtaagacttggaatgatcgaaccaaaaaaccacttacacctttgactgtggttattggtcgtaatggttctgggaaaagttctctatttgatgcttttggttttcttgctgattcattaacttatggtgttgaggaagcatgtcataaaaatggacggggtggatttgaccgattacgttcagctggtactcaagagaatattgaatttgaaatatattatagagaatcaccaaaagaaagaccaataacctatgaattatccattgggcttgatgattctggaaggcctgttgtaaagaaagaacgacttcgtcagcgtcgcagaggtcaaaatagaggctggcctttttcatttctggaactctatgatggagtgggaaaagtttggtcgggtgattctttatcagaaaatacagaagataatattgatgccttacttaaagaagagtcgaatggtacgatgccaatcgagcttgatagtagacaaatgttaggtgtcgctactttaggtaatttaaaagagcatcctcgtattgcccggttcagaaaatttattgaaggatggtatctttcatatttcacacctgatgcagcaagagatttgcctcgaattgggccacaaaaacatttgaatagaattggtgataatcttggcaacttcgtccaatatatggaaagagaacacccaaggaaatttaaacaagttttagccgatattgcacagaagattccgggtattgttcagattgatacggaagcatctcctgatgggcgtttgttgttacgattctttaatcgaggttttgataaacccttttacgctcaacaaatctctgatgggacattaaaattatttgcatatatgcttttgttggaagatccagatccagctccatttgtttgtatagaagaaccagaaaatggtttataccataaattattgcagtccttggcggcagaatttagaagccatgcaactggtaaaaaaggtgattctcaattatttgttactactcaccaaccatattttgtggatgctcttgatcccgaggaggtttggatactggagaaagagaagaacggttattctgttcttagtagggcatctgattatcctgatgttgtcgcaatgtatgaacagggattacctttaggaagtctatggtatagtgatcatattgatagtaaggattatgactaa

SEQ ID NO: 203856 - DNA, 405 bp, Klebsiella oxytoca
atgcgattcagatccactgtgctggacgttgtggacggcaatatttcggataccggcgtgttgtttgatgcgccaccacagggcaatccacgaatcagccagcgccatcatgcccaactgacggaattatgtcgtcagatccatcggagaactggaggggaggtgacgtttatctgctcgcctcatcgcgtggccgggcataactgcctggctgttcaggcggaaggtaagctggggacggtcaatctgctgctgacggttaccggcagtctgcgctggccgggggaggtggattacgaacatgcgctgcgctggtatatcaatgtacctgatgcggtggatatgattttttttgtacaggagacagtaaatattttggttggagttcaacaaaaggtgacttga

SEQ ID NO: 203857 - DNA, 711 bp, Klebsiella oxytoca
atgggagagtcgctgggcgtatttatgcagggcttcctgggcgagctgtttaaccgcccggggcagaactggccggaagcggatgtcacgctgattgacctcggtacgctggcgcgtgaaggctatgaagcgccgctggccgtggcctatacctcactggtcaataccatcaataatatcgctgaacgtgaccagtttctggacagggagatcgtcttcccgaccgatgaggcgcacatgatcaccacgaatccgctactggccccgtatgtggttaaagtggtgaagatgtggcgtaagctcggcgcgtggctgtggctggcaacgcagaacctggaagactttccggccacggccaagaagatgctcaatatgattgaatggtggctgtgtctggtgatgccaccggaagaagttgaagagatcgcccggtttaaaaagcttaccgctgagcaaaaagcgatgctgctgtctgcgaccaaaacgccgcgctgctacaccgagggtgtggtactggcaagccgtattgaagcgctgttccgggctgtgccaccaagtctctatctggcgctgggcatgaccgagaaggatgagaaggcggctcgccgggcgctgatggttgagcatgatatcagcgagctggatgcagcgaagcgcattgcgcatcagctcgatattgcccgtggcattgccacgaaggaggcagcctga

SEQ ID NO: 203858 - DNA, 231 bp, Klebsiella oxytoca
atgcgtatctttcatctggccctgttctttggggtacccctgctcgccaacgcggccgaaaagcagcagagtaccgctcagcactacttctttgactattcggccatgcagcgcaattttaatctccttcagaatggcatttaccgctacctctcttccgagagtgagcaactttgcatgttggccccctctttaatagtctttcttcgactttgtgaatggctggaatga

SEQ ID NO: 203859 - DNA, 1152 bp, Klebsiella oxytoca
atgactagtcgtattgaatgggttcgcgacaattgccgccttctgaaacagctctctgccgaatataaaaaaacccgtccttttgaaggactgaccatcggtaccgggatccatcttgaacccaaaacggttaccctcctgctgactctgaaagatggcggggcacgtgtggtgtctactggcaatctgaacagtacgcagaaaagcgctgtcgactaccttcgtgaacacggcgttgaagtgattggtgaagctacacgtgataaagctcagcatcttaaatatcttcaggccgttctggccgaaaaacccgatctgctgctggataacggtggcgatctgttcgcagaatacttaaaagcaccctacggtacgctgcagggcggtaccgaagaaaccacttccggccgtatgcgactggttgaactgcgtaaagagttaaatatgccgattctggttatcaatgatagcccgattaagcagtttgcagagaatgaacacgccgttggtcagagtgttctggaatcctatatgcgtatcactaaccgcgtcaccaacggccagcgtgtcactgttttcggctatggtgcctgtggtatgggtgtcgcctataacttccgtaacgcaaacgcgaaggtcagtgtagtggataccgatccgctcaagcgcctgcaggctcacctggatggatttgatacgccgtcacgtgaagatgccattcgttctgcggatgtcattgtcaccgtcagtggtggtggccgtattattggtggagaagatattcctctactgaaaaacggcgtcatcctggcgaacgctggtcacttcccggtggaaatcgatgtcgattcgtttgctaaaagcgatcagattgaaaacgttaccgaatttgaagaaagcattgcgtcttaccagactaaagcgggtaaaaacttcaaaattatcactgaaggacacatgtttaatcttgccggtccgcgtccactgggtaactcgatcgaatccatggaccttggctttgccctgcagtccctgtgcctcgaagccgtggctcgcaaaaaagtcaacagttcccactgtgttgttcctgttattagggaaatcgacgagaaagtcgcgaatatgtacatcgacctaatctataaaaaataa

SEQ ID NO: 203860 - DNA, 870 bp, Klebsiella oxytoca
atgaaaaaatccgggctgggaaaactgctgtgtattaaagcaacgcttttaatttcattttctgctgtggcagatgacagtgaatatatttcatcatggtggcaccagagtgtcaacgttgttggtgcatataatactaaatttggtccgaagccaaataatgatatttatatggagtatgaggctttttcaaaaaattcatggctggattttcatggctacgctgatattccaaaaacatttggtgctggtaacagcaacgacagcggcgtatgggacaaggggtccccttttttcatggagattgaaccacgcttctcatttagcggtataactggcattgacctgagttcatatctgtttaaagactggtattttgccaataattatatttttgatatggggcagaataatgcttcccgtcagagtacatggtatatgggtctgggtactgatgtggatactcatagcccattataccttcagttaaatatctacaaaaaataccagttccaaaattatggtgcagccaatgcgaacagctgggatgggtatcgtttcaaagtaaaatatctttatcccatcacagaagtgttaggaggatcgctgagttatataggatacaccaattttgattttggttcacatcttggagacgactctgctccgggaacccgtactaataactcaataacatcgagccatattatttctctcgcttataagcatttccattatgctctggttggcagatactggcacaacggcggacagtggcgtgatggtgccggactcgactttggagacggtatgttttcagcggaaagcaacggctggggttattacgctgttattggatataacttctga

SEQ ID NO: 203861 - DNA, 1254 bp, Klebsiella oxytoca
atgaaaatacagtctctgctgaaagtcatgttattttcccagtatttcatctggggatgctggctggttacatttgcctcatattccatgagttcactgaaattcactggttcagatgtaggttttatttttagtgctctgggtcttgccgctgtagtaatgcccccggttgtaggcataattgcggataaatggattagtgccaataagatctatattttttgccatcttatttccgcggcatcgttgtatggcatgtccatgattaccgacgctgagtccatgttctggatgatgctgctgaatgcggtagcctatatgcccactattgcactgtctaataccatctcctacttcacgctggaaaaaaatggactggaagtgctggattttccccgcattcgtatctggggaacgatcggcttcatcatcgccatgtggcttatcagcttccttggtttcgaagtcagtcgtaaccaactctatatcgcttccggtgcatctgtattcctggcaatattctctctgtcactcccccgcgtggtagctccggcgaagagcataaaatcaacgtggctgcagaaaaccggactggatgcttttgtccttttcaaacagaaaaacattgcgctgtttctgttatttgcaacactgctgggatccattctgcagattactaacacgttcggtaacccttttcttcaccatctggcggctcttcccggggctgaaaacagcgttattgcccggtatccgtcagtactgctgtccatctctcagatatctgaagtcgtgtttattctgactattccgttcctgatgagccgactgggcctgaaacgcatcattctccttagcatgattgcctgggtagctcgttttggcctgttcgcctatggcgattttacgtcagtttccggcgtctcaatgctactgctttcgatgatcgtctatggctgcgctttcgatttcttcaatgtatccggctccatgtatctggcacgagtggccggtgaagaaatgcgcgccagcgctcagggcctgttcatgaccatggtgaatggaataggactttatatcggctctatcatcagtggccacgtcattgattatttcaccgtcgatggggttcagaactggtcttccttctggcttgtgttcagtggttacgcactcattctggccgctgttttctggttagtttaccggggtgaaccgcaggaaacagtccaggtatcttcagtcaatcactaa

SEQ ID NO: 203862 - DNA, 927 bp, Klebsiella oxytoca
atgagaaaaaaaatattcatcctgggttcttacaatgtggatattgtgtcgtatctagaccggtttccggtaccaggagagtcagttgccgcaacatccagttcaacatttccgggaggaaaaggggctaaccaggcactggcggccagccgcgctgggggaatggtcaattttgctgtaaaagttgggcaggatgcatttggccgcaatgcggaaaaagagttaccagaatcacccattgcttctcttgatgtctttgtctgcaacagcaagcccactggaaaagcgctgatcatgattaatcagcgttccggtgaaaacattatcaccatcgatctgggtgccaacgcagcatttaccgacaccgatattcaatccctcagcgataagattggcgagtctggttacttcctgacgcagctggaaaataactgggatgccacactaaaagcgattcaaatcgccagggataaaggcactaccatcattcttaatccggcccccttcagtgaggaaatcatgggagtcctggaactcatcgacattatcacgcctaatgaaacagaggcagaactgatcagtggtatcaagattgaaacgacagcggatgcgatcaaagcagcgcgcaagatcaagagcatgggcgttaaaaatgtccttattaccctcggagcgaaagggggggttctggtgaatgatgagtttatgggggacttacctatatttcctgcaaaatgcgtggacactactggtgcaggggattcatttaacggcgcatttgtcgcacgccttgccgccggagatcccatcattgatgcagcaatttacggtagtgcttttgcctcctgcgccactgagttgatgggagcatcaagccatccttcccttgcggatgtggaaacccgactaaaaagtcgggctgtttga

SEQ ID NO: 203863 - DNA, 573 bp, Klebsiella oxytoca
atgttcacccacctgagcaccgccagcagccataccgcttgcatccttaatgaaatctccggatgtgtatcccgtgtgccagcgtgtacagaccaacacaacctttttcaggcgctttttgacggtgtcagccctttgtcatcacgatgttcgtttccggtgcatgttactgcaagtgccctcattctttctcccactcacagcgagatactattgctcaggcatcgacggcttaatctctggcttcagcctggaggccatctggagtccggggaaaccccactgcagggggcctgcagagaaattaatgaggaaacaggactcaggaacgaccatctgaccctgttgttcgcggagccagtcgattttgatgttcacaggatcggtgaaaatacagcgcggtccgaaccttctcactggcatgcagacctgtgctatgcaatgagcaccagttcctggcagatcgatattaatgatgagtctcactcatttgcatgggtgtcagtacatgatgatattgtcgttaacaatccaagattctcaagaataataaccagtatcatgtcgggctga

SEQ ID NO: 203864 - DNA, 1047 bp, Klebsiella oxytoca
ttgaataataaagataataatgagttaaggcttgatgagtcttccgccgatgaacagcaggtcaccagtaagcaggttgctcgtgaagcgaatgtttcccagtctacggtttctctggtcttatccggtaaggctgaagggcgagtctcactcaaaacacgtcaactggttgaggaaacggcacggcgaatgggataccggccaaacctgagcgcccgcaccctgcgtacaggggtctcaatgaccatagcccttgcggttcccgacgtgaaacagcccttctttggcgaagtgctttatgcggccgagaaactggcagcatcgaaagggtactctgtcatccttgtcgatacctctgctgatccgttatgggctgagcgtatcgtacagatgattgaaagtatgaccattgccggctgcattgtttatgcgtgtgacagggggtcagataagattcttgctcgcacaggaaataaaataatccatattgagtccgaagatgccagtctgtgccacatcgatctgaatgcgagcagtggaatagagcaggttctgcagcatctgacaaccctcggacacgagaaaattggctactttgccgcacagtacaataaatcccttttccgctatcgtttcaaagcattcgcggacagagtcgcgcaccacaatcttccggctgatgaacgctggtatgtaggttcaacttttgacctggactttgctactgaaaaggcgctgaggctggttaaaacggatgtgacagctattttctgtgatgatgatcttctcgctggcgcggtttacagggcctgccgtcaggcagggcttcgcattccggaggatatgtctgtggtcgggtttaacgacattgaaatggcccgcatgctttaccctgaactgacaacagttgctatccctgcggctggcattggtaccatggcgctggatatgttttttgagcatgttctgaatggttccgggcaccctgaacccaggctccttgagttagaactcgtcgttcgaaattcaacatgttcacccacctga

SEQ ID NO: 203865 - DNA, 936 bp, Klebsiella oxytoca
atgaaagaaaaaatcattattgataccgatcctggtcaggacgatgcaattgcaatccttatggccctggcaagcgaagaacttgatgttcttgggatcaccactgtggctggtaacgtttctgctgagctgactgaaataaatgcccggaaaatatgcgaacttgcaggtcgtcatgatcttcgggtttataaaggagcaacaagaccgttgctgaaaacgcttgtcaccggtgagcatgtccatggcagtagtggaatggatggtcctgttctgcccgaaccggtcatgccttctcaggaacaacacgccgttgatttcatcattgagacgctcagaatgcagcctgcagagcacgttacactctgtacgttaggcgcgctgacgaatcttgctctcgctttctcaatagcaccggacattgtcaggcgggtgaagcgtattatcatgatgggcgggggattttttgaaggaggcaatattacgccgacagcagaatttaacttcttcgtcgatcctcatgcagccaaagcggtactgagtctcgggatcgatatcactatcattccactggatattacacataacgtactgacgagtaagagcaaaatagcgaagtttaaaactctgggatcgtgcgttgccgaagcctgcgtgaccttgatggaatatcacgaacgttttgacgtcgagaaatacggcagcgatggtggtccacttcatgatcctaacgttattgcctgtcttctcaaacctgagctgtatcagggcaaactggtgaacgttgaaatcaatactgatgaaggactggcacacggtatgtccgtagtagattggtggcgggtgactgaccggaaacctaatgcgacatatcttaccagtgtggacagcgacggattctttgaacttttatattcaaaaattgcgttgtattag

SEQ ID NO: 203866 - DNA, 549 bp, Klebsiella oxytoca
atgcatttaaatgcttttgtaaactttaataattatcagacaataaacctatatcaaaaacaaggagagatgaccatcatgaagattgacttatctatagctattaccacagccttattttcagcaatttgggttatcctggctacgactttaaatattcctgcatgggctggttttctggggtgtacaacctactttgccataaatcaacatagccgaaaggcttttttaatttgcgccctgtcgcttatttccgggagcttctgggcatgtatgtcccttgaacttacacaattttgctccggctcgttgtttgtacttttcattgcgacaggtttaattgctttttttatgtgtatccaggcaaggttgatcattttatctttcattcctgcggccttcattgggtcctgtacggtatttgcaggagccaaccagttaacaagttcgttagaagcattatttattggcctgttaactggatatttaatgaaatcgtctggttataaactacatgaattaacagaatctgagaaacagaagccttga

SEQ ID NO: 203867 - DNA, 1200 bp, Klebsiella oxytoca
atggccgtcgttcccgttgatgatgttatccagtgtacgctggcgaagatgcaaagccggattgagcaaaaaacgcagtccggcgagcagagtaatgagcagagcggactgctctttctggggaacgtgcatgacgccgttccccggcgtttatttctggataaccgtttatcaccgctggataagatggcatgggtgatgatccggctgtatgcccagcagaacgaaggcgctgtttttcctacctacgacgaattgcagtgtcagctggcacttccccattcggataaggcctcgcgggaaacggtcagcagggcgttgttgatgctgcgtcttaccgggtggctgagtttgtgcaagcgtgtcagggataaatccggacgcattcgcggcaatatctatgcccagcatgatgagccactgggactgtttgacgcggaatatttcgatcccggttggcttgatgccgttgctgatgcctgccgacacaccaataaaacgatacgcctgacggcgttggccgttttgcaggatatcaaatccgatactcgtatgcgccaccggcactcacgcgttgcgctgatcgaagcccggttatcagctccacaaactccgcaggaaatggtgtcatcacggcagaagaaaactcccggttctgaaaccgaaccaggtcaaaaatcacagagttcggaatccgaacttagctgtctgaagggggatattttaccgggttcggattccgaactaagccggaaatcaagggatggcggcttagttcgaaaatcgaaccgttacgtacgtagttttacacagagtgtaaaagatacgtacgtagggggcgaaagtcggttgtcatggccgacagcggttatcgaacggctgaacacgcctgaccgggatatgctggagcagcagctaaacgcgctgcctggcgaactggggcaacggatgctggacgatctggctggtcgcatgaaagcaacagaggtcaggaacgtcacggcctacttgcttgcgaacctgaaacgggcaagggaagggcagtttaacgtcggtgacgtaggggctgtgcatccgcctgaaaagcagaaaccggtgacaatgccgctatcgggcgggaaaaaagaagccaaacgcgcccgaagagagtttgtgtctggtgtgatggctgagattcgtggtaactatttcaggtcataa

SEQ ID NO: 203868 - DNA, 522 bp, Klebsiella oxytoca
atgaatgcactgttaacgcagattgttatggaactgaaatccggcaatatccgccgttgtgaggcgatgggattaacgctggaagagattcaggaacttaacagcttaaccgtagaggatctgcattatctggtgaatacaccggtatcgcttctgaccttccgtatcaaccataccaaccttaataccatgctggcgcaggcccgtcgcgagcagacccggacgcaacgtatcgacagggcgttaacgctgggtggctctatcgagctgatgcagcattttttcggcctgacggcgacggaggtcagttcccggcgacgcctggtcggtgttgtgacccggcaggggcgcagccaaatccctacagaagaacaggaactggcggtatggcagcagtggaaagcatcgaatgttgacaacctggaatcactggatgcgctggaagccatgatgttaatcgccgagcagcaggacatttcgttaaccgcagtctgggcgttaaccaaaggatggggtgcctga

SEQ ID NO: 203869 - DNA, 243 bp, Klebsiella oxytoca
atgaaagctgactggattgatgaggcgcaggaagtgacccaactgatggtcgatagccaggttgagcgtatccgctcttcattgatatcaccggcaagatcgtctgctgaatgcgaacaatgtgggaatgagatcccggaagcccgtcgcagagctgttccgggcgtcaggttgtgtgttgaatgccagagcattgccgagttcaggcggcgtgttggaaatggaggatacgatgaaaactga

SEQ ID NO: 203870 - DNA, 1047 bp, Klebsiella oxytoca
atggtggcgacaatcgaatatctctggccgtggatgcctaacttgcttaattcgggtatgggacggcctcagatcgcccagcttatcgcgctgcgaactgcggcggaaaaagcgtggcagacctttagtcagaacgtcgcgttgccgccggaacagaaatttaatgatgtctttggcggtgtttgtcgcgcttttgacgacccggatcactactcagctgacatctttaaagaagagctgattgcggccctgttgcaggcaatgcccgatccgcaattgacttacgatagctggttgattgaactcgatccgcaggaacaaaaccggcgcaaactcttcggcgcgccggagccgctaccccagcatgtactggacgcagataaaacccatgatgagccttcatcgccaccggctgtagaaccgccttctgttgctacggactccagaccgccgaataaaaagccggttgtcaccggagacgattcttctggtcatattgatcaacagcccggtgaagaacaaccggatctttatgatgagaatggcgccggtgattttgttcctgatctatccgtcatccctccagttggtgagcaagtacctggtgataatgatgaaaaccttcatcaggagcagtcagtggcttccgtcgcttttgccgcgaacgggctggagccggtaaccgatatctggcatatcccggctttacaggatgacgttgaacatctacaggatattgcatttcgcctggcattcgaactggcggaggtgatggggattgaagatgctattcaggaagataaatcccttctgggggcaggttattctctcccgtcaaatgcgaacggtgagctgctggccgcattgtgcggtggcggatcttataccccgttatcgacattaaccggatttcttctcggtgcgtccagcccatttgatgaacccttactcaatgatgtgtatgcggtgaaattcctgcgtttaatcagggtagtgcgccgattgcgtgaactgcaacgtcagacattcagggaggaaacggcatga

SEQ ID NO: 203871 - DNA, 525 bp, Klebsiella oxytoca
atggtgaaccggataccccgcctctttcagcagttcggccagctcgcgctgactcacttcgcgccccagttgttcctcgtagatagctcgtgccttctcgatgccaaaccggtcgtgccggatgtccgggagttcctgcggggaacggtaacgctgatggaggatctgctgcctttccgtggatttgggatcgctttgccgccgatgaaaatattggttaactgcatggattacaccctgctggccgaagaggctctgagtgcgctaacctcgattattgttgatagaacgtatagcaaagcggatattcccccggtaactcttcttgagaccaaaatctatgaccttgaggtttataaattaggtcatacgcgggggcaacccgctcaccgtcttgaataccagaccgaacgtaaaagcctgccagctgcgcagaccatgcacgatctggcctgtgaattattccccgaatggcgtgaccgctttgatgcggtactgcaaagccagccgaagggggataaataa

SEQ ID NO: 203872 - DNA, 390 bp, Klebsiella oxytoca
atgaaactctatcgcgcaatgtacagccttcttgagctggatgggcatgtaaaagttgatgagcaatgggtcttttttgaggcggaagatcgttctgacgctttggaaaaaatcccagacctgctgaaggctatgtgggaatgtagtgggtctcagtttgaagtatggaatctctatgatgagagcgatctggtgatgctcagtattgatatgggcattgattcacttcgtgactggcgtttatttgaggtcggttattccgctggttctgcggtttatcttgatgtggaacgtgatggctggccgctgtttcttgtgtctccatccaatctggcccgtctgaataaagcgctggtcgaatgccgtagcgccggaggccagcatgaataa

SEQ ID NO: 203873 - DNA, 663 bp, Klebsiella oxytoca
  misc_feature (23)..(32): n is a, c, g, or t
atggagtggatcatttcatcgcnnnnnnnnnngatcaagaaagtctatggacggaaagctgatgtaatttatccggcggttgacgtcgagcgttttgctttacaaactaacaagcaagactactatatgactgcttcacggatggttccgtataaaagaatggaccttattgttgaagctttcagccatatgccaacaaaaaagcttgttgttattggtgatggccctgaaatgaataaaattaaatcaaaagcaactagtaatattgaaatacttggctaccaaccaaatgatgtaatgcagaaatacatgagtgaggcaaaagcattcgtatttgcagcagaagaagattttggaatcacgcctgttgaggcacaggcttgtggaactcctgttatcgcttatggtaaggggggagctctggaaacaataatttcaatagaaaaagagaatcctacaggattattcttttacaaacaagatgttgaatcgttggttgaagctatttctaaatttgaattatcaagggatttaatattaccagaaaattgtagagcaaatgctttaaaattttctgtcgaacggtttagagaagaaattaaacactatgtggaacaaaaatggaaagactttgaagatagcaaaaaaattcatgattattaa

SEQ ID NO: 203874 - DNA, 498 bp, Klebsiella oxytoca
gtgattcggactctgacagcgactcggattcggacagtgattctgactctgacagtgactcggattccgacagcgattctgactctgacagcgattccgattctgacagcgattccgattctgacagcgactcggattcggacagcgattccgactccgacagcgattcggactctgacagcgactcggactctgacagcgattcggactccgacagcgactcggactccgacagcgattcggacagcgattccgacagcgattccgactccgacagcgactcggattcggacagcgactcggattcggacagtgattcagactccgacagcgactcggatagcgacagtgattctgattccgacagtgactcggactctgacagcgactcggactccgacagcgactctgatactgaagcacccactgcagcacagaacatcacggttaatgacaatgttggttccatcaccggtgtgcttcattccggtgatgtga

SEQ ID NO: 203875 - DNA, 612 bp, Klebsiella oxytoca
atgtgtgtgatatctcttcatggtagaaagaaaacactcaaaattttactgagcatatttttcttagttattgcttatttttctctttatttttactcaaaaggacatgacgacttaatatcgataactttcaaaaatatttttatgtctggtaatttttgggaggctcttattgatagggcaggtaatagatggtatcgggttgaaatggcttatcaaattgctaaagatcactggtggggtgtagggattggagcatatgctgagtacacactcaacacggtaagtcaatatccattctataattcactgccatggtatcttaagccaataggaatgccagccatcaatttatatatagaaatggctgcaacctctggttggatagccttagttgtttggttaatttggcactataaactcctattttcaagtaaaagaaaaaagtttaaaggcactgtaatctatttttctcttttgatttcaatgattatcttaaatattgagtctagtttcatgcgcccttattattgggtattaatcggtatatgtatggcccataacgatgagatattcaaatctgctagtactgaaaaacactccaaaacataa

SEQ ID NO: 203876 - DNA, 294 bp, Klebsiella oxytoca
atgcttgttatgccatctatttacgaaggctttggattacctgttattgaagctatggcttgtgggacaccgactatagcatcaaatacaacatctttaagcgaaatcgcgggtaatgcatctctgttagttgatcctttaaatgtctacgatatatgtgcagcaatgcatacattaatttctgacagaagtgtatgtgaagagcttaagttaaaaggattagagcatgtaaagcaatatacttgggaaaacacggtatgtaaaataaaaacagtcttagaaaaattgcaatag

SEQ ID NO: 203877 - DNA, 258 bp, Klebsiella oxytoca
ttgtatattacagaaattgggtttcctacttcagaaaattatactgtattcacagaaaaggatgttgctgaatacgctaaaaattacattttggaaggcagtaaggtcgactatataaaaggaatatggtggtatgacttgattaatgacggtaacaataaaaagaatagagaacataattttggcatcttaaaccgaaatttgagtgagaaagatgtttcgcaagctataaaaaatgcctctgagtcaattaaataa

SEQ ID NO: 203878 - DNA, 234 bp, Klebsiella oxytoca
atgcgcaataagcgtaaaaacaggcatcgcccggtgcctgtcgatttttcttcgccttattgtccgcagaacgcggcaatacgctacgaaagcgccgatgacccccgatttgatgctaacgcggcggatgaccggaaagcccagggcattgacacgtatgtcctgaagatggttgtattatgcaaccatttgccgaccaggctgactgaccatgacctcatccccgcttattga

SEQ ID NO: 203879 - DNA, 1611 bp, Klebsiella oxytoca
atgttaaaaggtattggtgttgagaatttacggagtttttcacagtgtattgattgtaaccttaagcctctgacggttttattaggccgaaatagtagtggtaaaagctcattaattcgattatttcctttattacgtcagtctgttgaagaaacaaccacaggccctgttttatggtatggtcggtatgttgactacggaaactttgcagaggcaatatgcaagggaagtgataatgacgaaactataattctaaatttcaatatttcacttaatactgcaccgggtaattattggagatctcttcacgatataaacctattcccttttttggacttcaatttaaaaattgcgctggcagagcaaaataaaaaaacatatgcaaaatctgttagttttgagattgatggctcgactattgaagttatacctaattacgatgaagggtatacaatggtttacgccaacggcccagatttcaattggaaaacaaaggctgaagcgacttcaaaaaaagactataagtttttacctatattatcctggattactgaaacaccaaaaaaaagcagttacaaagagcaggtagttataaacaaaaaatttattgaagaatataatgcttatatgtatcgaagcatttttagagaaaaagagcagtcgcacaacgagtttatttgtaagcatgccgcaaaaaagatacatcgattttttcatcctaatacaaagaatgaaaatatttacaaagaactcttaggcatacggagctactcaaaagacaggctagagcatggaattaaaaaactatttaaaaatcatgcctactttataaataacattcgagattctcatacgcgtaatgacctgcttaatgctctacatccttttattttattaaaacattataattccattgctgaactaatcaatgttggtttatcgaaatcacttttatcaataaaatatcttgccccaatcagagctactactgagcgcttttatcgattccaggatttgcaagttgaggaaatggatcataccggctctaatttagccatgattttaaactcattttctgaagaggaaactcaagcattccaagaatggacagatgaaaactttgggtttattgcctttgttactactgatggttctcattatgcaatcagagttaagacagataatgataatgaggaacataacattagtgatatgggctatggatattcccaagtactaccagtaataatgtccatttggcttgaaattcatagtcaagatagttcaagcgatgaagtgatatttgttattgaacagccagaattacatttacaccccgcatatcaggaaaaagttgcatatcttttcgcaaaagtaattaatgcagcaaaagagtccaagaaagacgtcaagtttatatttgaaacacatagtcagtccatggttgatgccattggagaatgtattcaaaataaaatcattaataaagatgatgtaaacattatgatatttgagaaaaataaagaatccggaacatccgctttcacggcaagttttgatgatgaaggctattttactaactggccagtcggttttttctcaggtaactga

SEQ ID NO: 203880 - DNA, 1107 bp, Klebsiella oxytoca
atgttgattgaaattataaacacacaggatgtagaccttaaaaacactaatttacactcatcattgagcaaccttttttgctctttcagagaaggcaagcatttaatattgactgacgtggattttcttcgtaaagtttccgggctcaaggaattaggtagtttaacttgcaatactgctcaaaatctcattcaacaaaccagagagtttaagcaattaaagaaccaagtaagctactattgcaaagtagatatgaaaaactcatctagctcttatatacaagaaaaagatgaagataatttctttactgtcggttactcattctttaatgactcctctaaaatacaatatacaaaattactatgtgaggatataagcgattttaaattatacaaatcaatatcaaaattttatcagcttactaacagaatgagtggagtaaatgttaattttgaagttctcaatggcggcggcgctaatacaaaatacaacttcgataaaattcttgaagagggctttctttgtttatgcatgcttgatagtgataagaagcatccaaaatccggatacggttctacagcatcaaaatttaatgataaaagtgattcagccatatgtaaacattacacaattgaatctcatgaagttgaagccttaatccctactgaaatagttggtcaatgtattattgataaaacaattgaagggaaataccttaatgcatttgaacaaataaaagccttgactagccatactcctagcgcgaaattatacttcgatcataaagaaggttttacaataaaaaaagtgactgagatcgataaaaaatacaaggataacttctggagagatgcaattattaacgctccaaatttcaaaagaaaaggctgtttggaaaaactagaatgtgattgtacaccttcctgtatggccctcaacggttttggtactgggcttcttgaggcgtgttcatctgtaatcgaaagaatgagtcatattaaactgaaagagtcacttcccccaatattaattaatgagtggaacaaaataggcctaaagctattaagctggggttgttcatcacacagtagaactcgaacatcctaa

SEQ ID NO: 203881 - DNA, 1515 bp, Klebsiella oxytoca
gtggaagtacttggtcccggtggtatagatgttttccaccgtatcgcccagatcgctgatgttctgcgtgttctgcgcaatattcgtggtgttaccctccacctgctggttggtcgcgtacaactgcgagccgttcaccgcgtcggtgctgtctgtcgacagctcgcccgccgccacgttggtgatcctgttcaccgtcgtgtcgccgtggctcgccgaataggcgttctgcgacggatcccactgcagcgcatcctgctgcaggcccgacacatcaccggagatgttctccaccgccgtgttggtggcgtacagctgcgagccgttcaccgcgtcggtactggtcgccgacagacggcctgccgccacgttggtcacggtgcgttcgctgcccacatcccccacgctgaccgtgctggtcggattcgccccggcaaacgcatagtcggtcccgcgcagggtgaccccggccgttcccaccgtcgccgccgttttcgagttcgcccccagcgccacatcgttctggttgccggcaatggcgcccatcccgatggccacagagtccaggcccagcgccgacgagtcggtcccggtggagttggcgtggaaatatttggtgccggtggtgtagatgttctccaccgtatcgcccaggttattgatactggtggtattaccctccacctgctgattggtggcatacagctgcgagccgttcaccgcgtcggtgctgtctgtcgacagctcgcccgccgccacattggtgatcctgttcaccgtcgtgtcgccgtggctcgccgagtaggcgttctgcgacggatcccactgcagcgcatcctgctgcaggcccgacacgtcaccggagatgttctccatcgccgtgttggtggcgtgcagctgcgagccgttcaccgcgtcggtactggtcgccgacagacggcctgccgccacgttggtcacggtgcgttcgctgcccacatcccccacgctgaccgtgctggtcgggttcgccccggcaaacgcatagtcggtcccgcccagggtgacccctgcagtccccaccgtcactccgctcaccgagcctgcgcccagcgcaacatcgttcttgttagcagcaatcgcccccataccaatcgccacagagtccaggcccagcgccgacgagtcggtcccggtggaattggcgtggaagtacttggtgccagtggtatagatgttctccaccgtatcgcccaggttattgatactggtggtattaccctccacctgctggttggtggcatacagctgcgagccgttcaccgcgtcggtgctgacctcattcagatcgccatcggctacccgggtgatcttattcacagccgtatcaccatgactcgcggaataggcgttcagcgtctcgttccacaacagcgcatcgtcctgcagtccatctatctcgttaaagatattgttcactgcggagttggtggcatacagctgcgaaccgttgatcgcatcggtgctggtttctga

SEQ ID NO: 203882 - DNA, 390 bp, Klebsiella oxytoca
gtggttttgccgcctttgaccgtcagcgtctcgccgagctttttggtcaccgtgccggtattaccggcgaaggtcagcggagtgttcttcagcgtattaatattggtggtgttggtcgccacgttctggttggtggcgtacagctggctgccgttcaccccgtcggtactggtgctgctcagcgtgcccgccgcgacattagtcaccttcttgctgcccgcgttcacgccggtggtggtcacgctcggcccgccggtaatggtcatcccggaactgttcagggtggtggtgccgccgataatcgccgaggtgaagaccgggttgtccgccatctgcaccaccagattgccgctggtatccacgaccgtattcaggttcttgtctgagtag

SEQ ID NO: 203883 - DNA, 150 bp, Klebsiella oxytoca
atgatggtaacaacagtacaaatactgcaattggtgatggtgctgttgctaagggtagcgcaacagctcagcaagccacagctattggacacaatgctaaatctgattctggtggggtcgcagttggctcaacatcaactgctgcggtaa

SEQ ID NO: 203884 - DNA, 330 bp, Klebsiella oxytoca
gtggtcgggcaagaaaaagattaccgttctgatgtcgtcagcgacattgtcttccgccagctttggccgcgggtcattggcctgccgctgatactgggattaactgtctggatagtgcgtcgcgaactctactcgctgaaacataccgcacatcagctggcgcgccgcagcctggatgacagccgggcgctggatgcaaaacgtgttcccaggaaagcccgaccgctggtcattgcgcttaacgagctgtttgtccgcgtcagcggcatgttcgagctcgagcgccagtttaccgccgatgccgcccaccgctctgcgtattcagagtga

SEQ ID NO: 203885 - DNA, 465 bp, Klebsiella oxytoca
atgagacgctggatctttttttctgccatatttatggttctgtccttggttgcattattctgggcttctgcacgctataataaattagatgtgaaatgccgaggggagtttgaaagtcatattggtgtagattcgcttgccgcaaatgtcggagtgaattttgaaaaaggtaaggggattttaaacattgctggtgaagtccacgggaaagaaagttcgataaaatacattaagattgctactgtgtttaattatagcacccatggaaaattaatgtatattaaggtgagtcagcagtattcatctatttctgttggagaaatcgagagtaaattacagcatcttctgcctctggttttaagtagtcgcaatgttgaatatgtctacgaatttcaaccgcaaagcggaggagactatcttataaagcagcatgggataccgatcctgtattgtaaaaaagtctag

SEQ ID NO: 203886 - DNA, 798 bp, Klebsiella oxytoca
atgagtaaaatctttttgataaatgaggtggttgctttttaccctgaaaaaaatctgctagtaaacaacggtcctggcggaaaaaaacagattctggggaggccaggctcacgttgccttgagattctacttgaggagcctgggacaatcgtcagccaccagcgactatacgataacgcctggcagaatagcatggttgaaacatcaccaaacacgctatatcagaccatattattggtcaggaaggcactcaaagccgtatcagaaagcagtgaagatttcattatcacggtgccgcgtaaaggttttgcgtttaatgaaaacatgcgggtagccgtcgaggaggttgaatctcagccggagagtgaacacttctcaacagaaagcactacgctggcaatggcaaggaatgataaatggccgcaacggtttttattgcatctgagaataaaacccaccttcatgctagtggtgataatgaccatcgctatcctgtcgttattaatggcgggatacaagtattttttgcttaaacaagacgattttgctcgggagtatacttattatcagcaggtagatagctgtatattatatttacggcaacctgttagtctctataaaaatgaaatagagttattcttgaaaaaacatcaagaggtaacatcggactgtgttttacatcctctgcggtatattagtatcgtagcaaagcccgtgagctttttcgtgattgggtgcaacagatctacaggggcaagcagaaattgtacttcatcctatataaggagtgagcgatga

SEQ ID NO: 203887 - DNA, 435 bp, Klebsiella oxytoca
atgaagatatttggttaccttcttggaaacgagacgaatggagctttatttctcaaagaaaagcatctgctattaccgcttaatgctcgatatagcccagtgagactaagaagcactatgtccagactgcttttatttctcctggaaaaaggccatataggtttaattcgtgatgaacacattatgaaaaacgtctgggaaatgcatggcttgaaagcctccggccctcgtttatggcaagtcgttaacgatcttaaaaccaagctcgccagagtaggcattgatgataattttattatgcgcgtcgaaggtcgcgggtatcttattaataacttgtattttgaatcaatatatatacgagcagcctgggtgatgttagataaatttatgactgagaatcataatatagcttctttcaaacttgtcaaggaatag

SEQ ID NO: 203888 - DNA, 552 bp, Klebsiella oxytoca
atgaaataccgtatgttacttagtgccttagtggtttgttgtaccctgccgcttactgcctgtgatagcaaagataaagcggcgtcagatacggcgaacaggacccaaattgctgacggtaaggcgtcaattgtcctgccggaaggctatatcaaaatgtctgacgagctcctggcgcaaaagtatcctgcggcaaatagaccgaaagaggcctggttcgtcgaaaaagaaaaaggcaaggtaacattagcttttaatatgacgcaaaatgctatgaaagaagctcagcttccggagtttgcagaagtcatgaagaacaatcttgcgactttttctcctgaagttagctccatgaccatcaatggcaataaagtgcagcggattaaagtcaccactccggatgcagcagatcccaaaggcgggatttataatgtgatgcagttcgcgtccctggacggcaagttgatgattgcaacctttaacgcgactgccgatctcaaagaccaatacagtaatgcaggtctggaagcgctgtcatctataaaatactga

SEQ ID NO: 203889 - DNA, 147 bp, Klebsiella oxytoca
atggatacttttgaaaagggctcagacctgctgtcaaagcgaatcattgctgtaactggattgattttggcacttggtagtattggtcttagccctattgctgtcgtgcctatctgtttagttatggtcttcttgcttcgcaagtaa

SEQ ID NO: 203890 - DNA, 783 bp, Klebsiella oxytoca
atgtcatcgaaatatgaagagttagaaaaagcgcttaatgaattatcaactgatggactaaatctctacttatcgatggtagatgaatgtgggagcctcagcccagaacttcaaaaaaaactaaaagaagataatatcaaactcaatccatttaaaaacaattatcaaaagtggtatacatcagctgcacgtgtaatcgaacaaataatacctgagagacttgctgaatttaacaagttatattgcgatccaaaacgaaaagaagttgattttataaactactctatttacgattatattcttggacttactacctcaagaggtggaaaagcaatttgcggcccaagcaatgctattataaaaatggaaacacaatataatatacttaattcagcaaaattaaaattcaaatccaagctgtttgatatcaaggaagtattacaggccgatgtgttcgataatgaaatagaagcagcaaaagaactaaataaaaagggcttcacaagggccgcaggtgcggttgctggggtagtcttagaaaagcatttatcgaacatttgcaattttaggcaaattaaaagtagaaaagctcgtccttccatcgcagatttaagccaagctttaaaagaaaaagatgtcatagacactcccaactggagattcatacagcacctagcagatattcgtaatttatgtgaccacagtaaagagagagaaccgtcaaaagatgaagtttctgatttgatctcaggtgtcgagaaagtaatgaaaacaatcttttga

SEQ ID NO: 203891 - DNA, 1026 bp, Klebsiella oxytoca
atgagaaaattacttctttttattagtttgctttttattaatctgtcagcaacggctgactgtaactatcaggatggatctgatgttgccgtaaaggctcgatttaattcggctaaaattttatcggacccaagtttacctgccgggagtgtattggcagtgaggactgtaggtggcgtgtcaagtgcaaaaactttttataactgtggaataaacgatatttatgccaccattgctacaccaagcgttaacccagtcgctggcgttactggagtactcggtggccctgtttatgaaaccggaataccaggtattggttttgaaatctcagaggcaataaaaggtgccaatggacggcccgttccagcaaccctgggtacagtttctgcatacgggcttaatgatgctggtgtcgaacaaatgacagtttggttaataaaaactaaagataatatcgatactagtgtaaccggctcaaaggaaatttccgtatcgtatagagctggtagtgttaatcaagtaaacgccaattcaaaagtagcgcgtttattacgtgtagatataattcttggcccttttgtgtacagagaaacctcatgtaatgtgtcgcccagaggagggagcacaatcaacttatcaaatatagaagcatcgcaacttaacgctctcgcccaaggagctgttactggtaagcagaaagaattcacactggatgtttcctgcccagactcttcagttggtgctaaatatatctattggtttaacccgataactgagaacgtctcatcaaaagatggtgtattgcttaactctattcctgatgccatcgggggagcaaaagatgttggttttatacttaagcaaggcgggaatgcaatcaaattcttcgattatactaattacactatagcaagtgtcaaaaagagccagtcattaaatttcaccgcagattattataaactttcagatagcataactcctggtagcgtacaagccatttttgagataatcctccaggaacagtga

SEQ ID NO: 203892 - DNA, 678 bp, Klebsiella oxytoca
atgcgcgcaggctacaccggcagccagaagtactccacgatgatgtgggcgggcgatcagaacgtggactggagcctcgacgatggcctggcttccgtcgtgcctgccgcgctgtcgctggcgatgaccggccatggcctgcaccacagtgatatcggcggctacaccaccctgtttgatatgaaacgtagcaaagagctgctgctacgctggtgcgactttagcgccttcaccccgatgatgcgtacccacgaaggcaatcgcccaggcgataactggcagtttgatggcgacggccaaacgatcgcccactttgcccgtatgaccaccgtctttactaccctgaaaccgtatctcaagcaggcggtcgcgcaaaacagcgccaccgggctaccggtcatgcgtccgctcttcctgcactacgaagacgatgcggcaacctacagcctgaaataccagtacctgttgggacaagatctgctggttgcaccggttcacgaagaggggagacacgactggacactgtatctgccagaagatagctgggtcaacgtctggacgggcgaaacctaccagggcggtgaaatcaccgttgacgcgcccatcggcaagcctccggtattttatcgtgcgaagagtgagtgggcatcgctgtttgccgctttgcgcaatatctaa

SEQ ID NO: 203893 - DNA, 1140 bp, Klebsiella oxytoca
atggctgatttagcttacattaacccacagattttcaattgggcacgtgccagagcgcaagtgtctgaagaagatctgtctcatagtttaggggttaagctagaaaaggttataggttggtccagcggtgatcaaaagccaacttttggacaggctcaaaaattagcaagtaagttacatatcccgttcgcattcttttttctgccatctcctccaatcgatgttctacctatacctgatcttagaactcctggtaatcatgggttggcaaacattagcgtggacttgaaagataccattgcttctgtagtaagacgacaagaatggtataaagattatttgaaagatcagaacgcggagcctcttggttttattggttcttatgatgtcaatagtaatccagatgatgttgctgagagcatcagacagactcttggacttaaggatttaaatccaaggggcttgaattgggaagaataccaaagaaagattgtcgagggtgctgaggctgcaggaatactggtaatgcgaagcggcattgttgaaaacaatactcgtcgtcctctaagtgtctccgagtttcgtggttttgcgataagtgataatcatgcaccggttgtttttgttaatctacgtgatgctccttccgcaagattgttcacattgttgcacgaactagcgcatttgtggctgggacaaagtggggtttccagtgttggtacttttgaggatcgcagagaagaacggttctgtaatgcagttgcaggagaatttctggctcccgcaagggaggttactgccctctggagtgaagacaaagagttgaatgataatgtgagcgatatcgcaaggactttccatgtgagtcgctatgtcatcatccgaagagcattcgatcttggtttggtctcttacgatacttatcaagattattacagagaattaatcaaccagttcaacaatgctgatgggggtggtggcaacttctatgcaattgccaagaataagaatagcgccctttttagcaaagttttattaaatgaagcacttagcggaaaagtgcttctgagggatgcaggtaaattgctcggtatatctcctgcaaagttaaaacaatatgctatggaaattggtgcctaa

SEQ ID NO: 203894 - DNA, 501 bp, Klebsiella oxytoca
atgtttttgattgatgccaacgtcttcatcgaggcgaaaaataagtactataatatgtccttttgtccggccttttgggattggcttcttcgcgagtgtgcagggcataatatttttagtattcaaggtatctatcaagagctgataaacggtaacgatgagttacgaacatggtctatggataaccgtcatttctttctacccatgagtgatgaagatacacaaagaaatgttgctgttgttgccgcacatgttgcagataaacagcatagtgtgccaatgtcagttggtgcaatggaagagtttttaagaggcgctgatacatggcttatagcaaaagctatgtccacaggggcaacaattgttacgcatgagagacttgatttacaatgtaaacgcaagtttctgattcctaacatttgtaaccactttggtgttcaatatgttgacaccttcactttgttgcaacaattaaatgcatcctttattcttgccgcataa

SEQ ID NO: 203895 - DNA, 357 bp, Klebsiella oxytoca
atgaagtatctcgtaactgctgccgcaacgttaagcctggcggatggttctaagtttgaaatcaccaaaggcattcacagcggcgccgacttcccggatagcgtgaaatctcactgggcttttgaagcgtatgcaaagcagattgacgacgcagaggcggaacaacttgaagcggccaacgctgacctgaagtcgtatgtttccactctggaaagcgccaacgctgaacttctgaagcagatcgccgataaagataaggaaatcgctgatttgaaggcatctgctgaaaattctgttactgacgatggaaagcaggaggctggtaatgccaaaaaacagtcttctaccaacaagtga

SEQ ID NO: 203896 - DNA, 318 bp, Klebsiella oxytoca
atgggcttcagatttaggaagcggatacgcatagctccaggcctagcaatcaatatcagcaaaagtggcgttagtacgtcgattggtccaaaaggcgctactaccaacataagtggaaggggaataaaaaccaccgttggaattccgggatcaggtctgtcatacaccattggtccaggaaaaaaatcaggaaaaacggcatcggaagaggaatttttagaacaagagccaacggttcaaaggaaagggatccattggtggaggctcgcggctttcatcattgccgctattgttttatcgcaaatatttaagcagtga

SEQ ID NO: 203897 - DNA, 597 bp, Klebsiella oxytoca
atggctaaattatccccgttatccaagttgaaagatatcgccgcccagatgctcaatatcaagtgcgatatgcagaaagaactggctgatatccgcaagaaaatatctgtactggaagatgaacggaaaaaaatcagcaattacagtctgagccgtagcgacttattaacggctgcgctggctaatattgacaatctgcataatgagcttgttaataagatgaaagagcagattcttgttacagcagaccgtacccaccgtaaagcggacttcggcggtacaacggtgagttttcttgaaagcgttatgaagggagcctccatggagaggatgtatcttcggctaacaggatgtgacaacttacatgccaacgacacataccttctttataatcatgaagaggttaaacgcaccatcaaaagcgcttttgaatccatcggtgatactgagtggcctgagtgcacatcagttcccgcagcggattcgctggcccgactggctgaaattgacagtgaggttactgtacttcaccagcgcgaaggtgagttgatagcggctgcaaatctggaggggattgatattggtcaggggtactga

SEQ ID NO: 203898 - DNA, 573 bp, Klebsiella oxytoca
atgggccagacaagaacatttgaaattatgtatccggggtcttttacgtcatctgacggcagaaaaatatcattcagtgcgcgggatctgaatgaaatggcagagacgtattctccttcaagacaggtggccccgctgacaataggtcatccggctgataataagccggatttaggaccggttctttctgtcttcgtatataaagaacggctacatgtcaccgctgactttgcggactccctttttagcgagatacaaagaggagcatataaaaatcggtcagcttcgttctacctgcccgacagcccgggcaaccccacacccggtaaaatgtatctccgccatgttggctttcttggggcggcagctcctgccgttaagggcctgtcgccgctcaattttgccagcgtaaatccttctgctcctgtggacttcgccagcgaagccactccggtcagcttttttgatacgaacatctgcgataccacaagcacattcccggtgaaaacacctgatggaacaacaaagcaggcgtttttgtggcgtggtgaagtgctttacctccctgattaa

SEQ ID NO: 203899 - DNA, 3474 bp, Klebsiella oxytoca
atggcgacaggtgattctaatcttaatctggtcatgcgcatacgggctgatatggctcaggccagccagtcgctgaaagagttatccgaggatattaccgatacaggcaccgctgctgcgaccagtgcccgtaaacttgatgaacagtcaagggcacaaggtaaagtgacggagaccgcccgggggcaggctcaggctgaacaaagcgtggcgtccgcaacatcgcagacgggaaatgcggttggtcaggctgcaacggagtatgcagggtatcaggccgcgcttgcccgtacccgggcggagatgggagcgctccagagtggtgtgggcggcactaccgctgatatcaatgcacagagggaggccctcgctgcgctggttaaccgaattgatccggtcgttgccgcttatggtcggctggatgatatgcaggagcaactgaatgcgttccggggtgctggcctggtcggtgatgacgattttgagcactattcttcccgtctgaacgaactgcgccagcaggtggaaaaatcagcttatgcctcaacagaggctggtcgcaaagaagcggccgcagcccgggaggccgctcaggctgaagcgcaggccgctgcgacaaaagaacagtttatcaaccgcctgcgtgaacaggcggagacaatgaatctcaccacctctgagctgttgcagtataaagcggctcaactgggtatctcggcggaagccgccccgtttatacaacgtctttccgagcaaagcgccgccatgagcaaaggtggcatcagtgccgggcagtacgcacaggccatgcgttatctgccgatgcaaatcacggatgtggtgacgtcccttgccagcggaatgcctgtctggatggttgccatccagcagggcgggcagattaaagattctttcggagggataggtaacacgctcagggcgatgctgaatgtgctcacccctgcccgtatcgctatgggtggcgttgccggtgtgatggctgctatcggtatcgcggctgtcacagcaactaatgaccaggaagaatttaaccgttcgatccagaaaaccggtaactttgccggggtgacggctgacgaactggagcagatggcccggcagggtggcgagttgcgcagtaactacgggcaggttcgtgacattctcaacggtctggtcagtagcggcaagtttactggggaaacgctgggcgcagtatcacaggccgccagtacgatggcagagctgagcggtaagtcagcggacgaagttgtctcacagttcctcaaaatgtctgacagcgcagcatcatgggcagctaacaccaatcagcaataccacttccttgatctggaaacctaccagcgtattcagtcccttgaggagcaagggaaaaaagaagaagccattgaacttgcatcaaaatcttttaacgatgcgggcctgcaacgtctccgggaaatggagaagcaacttaactgggttgccagagcgtggggtaacgtcaaggatgcggtaaatgatgcctgggaaggtattaaagacaaagttgccggtgcgctcggtatcagcacgcttgatgagcagattgccacgctggaaaaacttgttgcagacggtggttactttgcgggtaaagagttcatacctgttcgtcagtctgaccgtgatgagctggcacgtaagaagcaacaacgcgatgaggcacttaaggccgccgaaacagaagggaagcgtaaacaggccgatgctgacactatttctgctgctgagaaactgcgtaacctctggaaaggcaaccgtaccgaaatggagaaaacagcggatgcgatagaggaaacccgcaaggcctacgagacaatgtggcgtagtgccagcggacgcaaaaccctccagtcccggggtgttacctccgccgatggcaagaatttttcagggggccagtgggataccgacgtcagagggcttgataagtcggggcagaaagccgagcagtacaataaacagctccagcagacactgaaccagaaaaaggccattaccgaactcgatcgcgttgaggctgaaatacgcaacggtgcgctgaccggtgccagcaagggagaacaggacaaagcacgtgcgcttgcgaaacagatagatgccgctgaagcggcccgtaaggcttcgcaggaaggtgcaagagcgacaaaacaggaggctgaagaaaatcagcgttttgtcgaacaactccagaaacaggtcgataaaagggttgagggtgctgccgcgactcgtgcgcaggaaatagcgacccgcaaccttaccgccgaacagcgccgtcaggccgaagcggctaacgcagccattactgcccaggaatttcaggggcagaacctccagttacagctcgaatatatgcgcgataccggtgataccgctggcgcatccctgcttgaagtacgtaataagttcgccaaccttcgacgcgaatttgaagccagcggcaataccgaaggtctgaactggattgacagactgatgcccgtcgctgaaaccaaaatccgtgtcgatgacctcaaaaagcagctggatgacctgttcacttaccagtcgcagcaggaaaccagcattcaggctcaggttcagggtggtcttctgagtgagattcagggacggcagcgtctggttcagcttcaccaggatgtgggcgacaaaatcaagggctaccttccgcaactgaaagaactggctaccgcacccggtgaagccggtgacaaaattcgggaaatgatccgccagcttgaaggagagctgggtaagctgaatcaggccgggaatgagctgactcaggcattccgtgacggtttgcagagcggtatcgagagttcgctgatggggcttgcaaaagggaccatgagcctgagtgatgccgttaaaaatcttgctctcagcatcgtcaacagcatggcgcaaatcgcctcgcagcaacttgctcagatggctacctccagccttatcgggagcagcggcggtatcggtggtctccttggcagtgtcttcgccgctgatggcggtcaggttcgtggcgctgggacgacaaccagtgattctatcccggcgatgttgtcggatcaggaatatgttgtccgggcgtcagtggtgcagcagcctggcgctctcgcgtttcttcatgactacaaccgccacggtatggcagcgcttgaaggctggctccctcgcgttcgtcacgctactggcggactggcgggcatcccggcgcagaatatgccggttccatcttctgttcctgaaacggcaatggcaactccaaccgggtcatcaggctcccctatcagtctgcaacaacaactggtctttgatgctggtgacgcctacaccgcaggtgctcagacactggcaggacagcgccagttcacaacacaactccgctctcaggtgccaaccctgaagcaatggttgaacatcaaataa

SEQ ID NO: 203900 - DNA, 483 bp, Klebsiella oxytoca
atgggcggtagcatttatatgacactcaaacggtgtgagttgtacgaggaaataaatgatgtcctccatgacttcggtactaaaaaaggaatggcgaaagaggatgtaattgaatttagcgatgcggttattaaactgcttagtgaggtttttggtggaagaaacttcacattccctaaagatgtgcaatttgatattaaaactcgtgatgttgccatttataaagaactccttggctcaaaaaatgttgctgctctttctgaaaaatatggcataacagaaagagctataaggaagtgtgctaataaaggcaagctatacctcaaaaacaaggccataaccgatgatgccatttataaagaatacaaatcaggcgaaggtacggaaaaagaaatagcattaaagcataacgtttctgtgacttatgttattgatgtaatccgtgagaaagaacggattgaaaaagataacgccaaacaataa

SEQ ID NO: 203901 - DNA, 570 bp, Klebsiella oxytoca
atgaaaaataaaaccaaaaacggtgccgcagctgccgaattcatcccgatgaaagatttctctaacggttgtgctgacgatgtattatttgtcagaggaagtgctgatacttccagtctgtgggaggccacaatgtcacgcttaacagcaataaagaatctgcttgagtttggggcagtggcattacagaagactggaaatattaataatgaaacttccatgctgaccgattcggcactgattttaatatcagatgcagtttcaatcatggatgcattatataaaagcattaacgaacaacccgaacaggaaaaactgggtaaatatgttcgggaaaatacaggtgaatctgtttatctcgtcaatgatgccgaaatggaaaaaatcatcatggttaaagatatggcgaatatattctgtaatctaacgggagtgacgccgcaagatatcaccgtcaatggtaattcgttctgctccgtaatgggggatatctcggacagaatcgacggggccacgcgcgaccttccgagagttccgttgtccgccatttccggcagctttgccgagtga

SEQ ID NO: 203902 - DNA, 507 bp, Klebsiella oxytoca
atggctaatcacgattctaaccgcaaaggtgcggtaaaccaaaacgaaacgaacagcaagactcagggccgtcacgtcatgacacctgaaatccgcaagatttattgccgccagctggtcaaagtgttgctgcgtcatgccactgaggccgaagtgctgtacatggcggcgggtctggagggtatgggtacagtgatgaccgggcgcaaatacggcgcggctctggtgcttgagcatcaaaaacgccgggattattgcattcagtgcatcgaagtgatctcccgccacgccacaccatcggagctgaacggaattagcctggctctggatttgttcgtcgccaaaatgctggcagagaactaccgacccggactcaactccgctgcctatgatatttactgcaactgcgcaatgcaggaacgggatatcaatagccttgcgactaagctactggacagattgcaaaacagtgcttcccgtaacggaggtcatagcgatgaaaaataa

SEQ ID NO: 203903 - DNA, 423 bp, Klebsiella oxytoca
atgagtgaaataataagtaccaaaccatggtataagcacctcaataagtcgcagtggcgggcgttttccgcagcctggctgggctatttactggatggttttgatttcgttttaattgctctggtgctcaccgaagtacaaagcgaattccagctcaccacggtacaggcggcgagtattatctcggcggcgtttatctcccgctggttcggcggtttgctgctgggggcgatgggtgaccgctatggccgccgccttgcgatggtcagcagtattattcttttctccgtcggtacgctggcctgcggctttgcgcccggatacacctccatgtttatcgcccgtatggtgattggaatgggaatggccggagagtacggctccagcgccacctatgtgattgaaagctggccaaaacactag

SEQ ID NO: 203904 - DNA, 168 bp, Klebsiella oxytoca
atgatcgtttcatctaaagcaccgaagtacaacatgagaataccagcagatgtaaaggaagccattgaaaaagcagcagaggcagcggggaggtcaatcaataccgaaatggttatgagacttatagatagcctcaaaaaagatgggttatttgtgcctcagaaatag

SEQ ID NO: 203905 - DNA, 237 bp, Klebsiella oxytoca
atgtcacgtgaagagccgcagataaatataagaatttccaatgagttaaaggcaaaagttaaagctcgagcccaaagcaaccgtcgatcaatgaatgcggaaattattcaaataattgaagatgccgtggatggccggtcattcaatagcgctgagtttgccaagcaagaagccgatcgcttcagggatgctcttcttgagactttttcgaaaatgtataaaaaggaagaaaaatga

SEQ ID NO: 203906 - DNA, 654 bp, Klebsiella oxytoca
atgactcttccagaaaacctcaaatcattaactaatattgacttgaatgatttgtctgaaaatggtcttgttctgattattccattaagcaaatcacaaaattttcctttagttgagaagctatcaagcttaatggcatctgcaaggggttcagttaatggtcgagaggttattttgtgtgtttctgatttgacatcttctcggcaatgcgatttatctatggagatcataaacattgcaagctcatggaaggggttctcagtgatagctagacgcaacgttataccaccacttagttgttatcaggttttatcctgtatgatcgaatccttccaatgcatcaacaaaaaagcacactgccaaactagagtaagcaacgcctccttccttcgcccatacgtccttcactcattaagcatggtgaacagagatggattagaagccatcctgccgtgcaaattagtcagcagtggattctacgaccctttgattgatgccagcttggccgaacagtaccaggcacacgccgtatcccaaggcatccactggtgtcctcattttgatgaatctttaattagggttatagatggcaaggtagatgctacaaaaactaatgaatacgatactttcatcgaagaacaaaaacccacctga

SEQ ID NO: 203907 - DNA, 690 bp, Klebsiella oxytoca
atgaacgaacaatacctgcaatacgtccgcgaagaaatagcgttggctacggccgattttagcggtcgcaccaagggacaactagtcgctctggttgagcagcttcagttcactaatgagcgctacccgcgaaaacggcaatacgtcgtagatgaagttacaggcaagaagatcatgcttcgcaatcctccggtgccggggaaacaatcccacgccaaaggcacttcgatcccccaagttatcccggtggaatattcgacagcaagctggcggcgagccatagcaaagctggaagacactgaaagcgcttgggtaaaatggaactatctgcacgaaactgatttctcattgcaggctgccattgttcagcatggttggggaaaattcagcgaagcgattaaagggaagcgcatcgctgggaagacgactgaaaaactaaaagcgcttatctggctcgccgcgcaggacgttaaagagcaactttcagggcgcgaaacttacctgaatgaggaactggcggcattcgttggcgtggcccctgataactggactcataactatcgtgattattggcgaagcatgcgcgatgtgtttttctctctcgacaggtgttcattggtttctatagtgcgatcacgttctcaacaaaaatcagctttttcgcagcagggtcttgcaaaagtcaattaa

SEQ ID NO: 203908 - DNA, 951 bp, Klebsiella oxytoca
gtgacgcgttttctcatcgtctggagcgttttcagcgtaagaaaatggttcgcgcagctgagctggcgctaccggccttttaccggctatggccaaaaggcggtgcgcaggatcatgcgtttcacccccatgccgctgctgttgatagcggttcgcgcgctatgtcggctacggttattgggccgacactaccgcggccgtaccgccgtggcgacgcaaaactaccgctgcttgacgggcgccgacgggcgaatcgatgccgcatggatagccatgcgccgtcagttgctggaaatgggcgcgacctggggacagcacccggctacgctggcccagatgcaggcgtgcacgcgagagcttgatgccgttgtcgcgcctctggtggcgcaaaagacgccggtcgtcctcgcgccgctgcactgcgtttccgatattttagcggcgatggtcggggccggcgtgacgccgggaaaagccagcgtggtggtctcctccagcgcggaaagctacaccgtcgccagccgaaaaatgggcggcgtcgcgctctcttactgctcaatccaccaggataatacgtcgctggccagcgagcttatggcgttaatgaccaatgtatcggaagggcgggaaaatatgattattttccccgacattcctgccgattacaccgtgcagacccatgaagcgcagtccgggaaaataagctgccgactctttggccgcccggcgaaattacatagcggggtacagcgattttctcgcatcgtatcggcgcaggtggttttttatcacctctattatcagcaggggataaaaataaagatctattctccgctgagaccaaaagaggtcgcggcaaagctaccgacgatgattgaaaacaccctgcgtgactatccgcaggactggcttttgtggcacagccattcgctctattttattaatcactga

SEQ ID NO: 203909 - DNA, 2220 bp, Klebsiella oxytoca
atgaacggggtgcagatccgcattcgcggtaaagtgcagggggtgggattccgccccttcgtctggcagctggcgcagcagttggggctgcgcggcgacgtgtgcaacgacggcgacggcgtgctggtgcgccttgtcggcggtgatgcgccatttctcgccgcgttaacccggcgcagcccgccgctggcgcgtatcgacagcgcggcagcggcgccttttgtctgggacgctgcgccgccaggctttaccattcgccaaagcggggccggaagcatgcgcacgcagattgtgcccgatgccgctacctgcccggcatgcctggcggaaatgaacaacccgcaggagcgccgctaccgctatccgtttatcaactgcacccactgcgggccgcgctttaccattattcgcgccatgccctacgaccgtccactgacctctatgtcgccgtttccactctgcacctcctgtgcggcggagtatggcgaccccgccgatcgccgtttccacgcgcagccggtagcctgcgccgagtgcgggccacggctggagtggcgcgggccgcaggcgcattcatttggcgaggcggctcttgaagcggcgacggctcgcctgatggcgggcgatatagtggcggtgaaagggctgggtggtttccatctgttgtgcgatgccggaaatcctgaggccgtcgcgaggctgcgggcgcgcaagcatcgcccggcgaaaccgctggcggtgatgctggcgacaacggcggggctcgatgaaccggcggtgacgctgctcacgtcccccgccgcaccgatcgtgctgctggataaaacgcaggtggccgggctgtgcgaccagattgcgccagggcttgcggaagtaggggggatgctgccgtctaatccactgcagcatttacttgcgcaggcgctggcgcgcccattagtgatgacctccggcaaccttagcggtcgcccgccggcgttaaccaacgcagaggcgctggcggatttagccgggattgccgacggttttctgctgcataaccgcgagattgtgcagaggatggatgattccgtagtgcggcaaagcggcgagatgctgcgtcgcgcccgcggctacgtgccggacgcgctggcgctgccgccggggtttcacgatgcgccgcccctgctggccctcggcgcggatatgaaaaatacgttctgcctgctgcgcggcgacgaagcggtgctcagccagcattttggcgatctcgacgaggagggcgttgagatgcagtggcggcaggcgctgcgcctgatgcaggagatctacgcttttacgccgcagcgggtggttgccgacgcccatcccggctaccgcgcttcgcggtgggcggcgtcgcttatgctgccggtggagcgggtattgcatcatcatgcccacgctgccgcgtgcctggccgagcatcgctggccgctggagggcggcgacgtgattgccctgacgctcgacggcatcgggatgggggagaatggcgaactgtggggcggcgagtgcctgcgggtcaactatcgcgagtgtgagcatctcggcggtttgccgtcggtggcgctgcccggcggcgacctcgcggcgcgtcagccgtggcgcaatctgctcgcccactgcctggcgtttgtccctgaatggcagaattatgccgacaccgccgcgctgcgccagcaaaactggccgctgctggcgcgagcaatcgagcgtggtattaatgcgccgcaggcatcgtcgtgcggccgtctgtttgacgccgtcgcctgcgcgctgggctgtgcgccgctagccctgagctatgagggggaggcggcatgccgtctggaagcgctggcggcgacctgcgaaggcgtggatcatccggtgaccctgccgtggcgcgaaggtaaactggacctggcgacgttctggcggcagtggctgagctggcaggcgggcccggcgcaaaaagcgtgggcctttcatgatgcgctggcccgcgggctggcggcgatgatgcgcgattgcgcgaacgcgcggaacattcacacgctggccttcggcggcggggtactgcacaaccggctgctgacggcgcgattgaccttttatctggccgattttactctgctctttccgcagcagctgcccgccggcgatggcgccattgccctcggtcaggcgatcgtcgctgcggcccgcctgcaggcttaa

SEQ ID NO: 203910 - DNA, 966 bp, Klebsiella oxytoca
atgagtaactttctgttagaagccggacgccagaccctgatgctggagcttcaggaggcgagccgcctgcctgaacgcctgggcgacgacttcatccgcgcggcggaaaccatcatccactgcgagggcaaactggtcgtctccggtatcggtaaatcgggtcatattggtaaaaagctggccgccaccttcgccagcaccggcaccccggcattttttgttcacccggcggaagcgctgcacggcgacctcggaatgctcgacagccgcgacgtgatgctgtttatctcttactccggcagcgccaaagagctggatcttatcgttccgcgcctggaagaaaaatccattccgctgctggcgatgaccggtaaatccacttcaccgctggcgctggcggccaaagcggtgctcgatatcgccgtagagcgcgaagcctgcccgatgcacctcgcgcccacctccagcaccgtcaataccctgatgctcggcgacgcgctggccatggcggtcatgcaggcccgcggctttaacgaagaagatttcgcccgttcgcacccggcgggcgcgctgggcgcgcggctgctgaacaaagtccatcatctgatgcgccgcgatggcgacgtgccgcgcgtcgctaacgacaccagcgtcatggacgcgatgctcgaactcagccgcaccggcctggggctggtggcggtttgcgatgaacgcaatcacgtgcagggcgtctttaccgatggcgacctgcgccgctggctggtgggcggcggcagcttacaggatatcgtcagccaggcaatgacccgcaacggcgtcactctgcaagcggaaagccgcgcgatagaagccaaggagcgcctgatgaagcacaaaatcagcgccgctccggtagtggatgaaaacggccagctggtcggcgcgattaacctgcagaacttttatcaggccgggatcctttaa

SEQ ID NO: 203911 - DNA, 183 bp, Klebsiella oxytoca
atgcttccgcaaccgctgacaggccgcaccgatggggtgggggtggttttaaagacaaaccccctgctgcaaggcaccacccgccccctcaaatttttacgcgcggtgaattttttcacagcagtaagccagaaggaaacaagaagttatggcaagaccacccaaaccgcccgcttaccttga

SEQ ID NO: 203912 - DNA, 318 bp, Klebsiella oxytoca; identical to SEQ ID NO: 197345

SEQ ID NO: 203913 - DNA, 969 bp, Klebsiella oxytoca
atgattaataaaatagattcacacagaaaacatcctgatgtcactttggaacaacatgtaaaaaaaaatttcatacaacttcttaatcagattaaaagtctagttgataacggcacggctatttgccccatatccgagactgtttttattgagcttatgaaacaaagtgatgagaaaacgagactggctactgcaaagttaattgatcgcctaagttttggtattacacttattgtgagtccagaaaggataatgcaagaattagctaacgctgtttattcaatgacaggtgttaaaaacgttatatcaatagataacttggtatggacaaaacttagctatgtattcggtgaaacacacccatatcaaaccgcctttgaaccagctgaggagttggttattcaaaaatcttttttcgattacatgggggatattactctcactaaaataatgggttatttaaatttcgatagttgggagcaattcaactggcagacgctggcaactcaacttaatttagataataaaaaacatgcagatgaaatccgaagctatcaacaagcatatcgtatcgagtttgaaggtggattaaacctgttcaatgaacaattgctacaattgtttaaagaagttagcaatgcaggacatgacccatttaacgttaataaagaaaagctatctgaccaacaacgatttaaaaaattttcaaagctagtgcgaacattgcatataagagcttgctgttattcagcagtaaggtgggaccaaaaacgccaacttacaggtaatgatcttctggatttccatcatgctgaagcagcgctaggatattgcaatttatttttgactgaaaaaccgttaaaaactttagttagtcagaatcatttaggattaatggatgattttccatgtgctgttgaatcatcagccattggagggctcagggttctaacctctagaaaagactaa

SEQ ID NO: 203914 - DNA, 219 bp, Klebsiella oxytoca
atgttttctgccggaagtaaaaacttaatttgtcccgatagcgttggctcctttaaaacggacattaatggaacaaactatgatttaatcacttcttctgatagtaaagataatacaaaaaaactaaaagatatgaccaagagctgtgtcgtccttgacagtgataatgcacaacaatgggatacttttttcgaaaataacgatcaagacaaaggataa

SEQ ID NO: 203915 - DNA, 276 bp, Klebsiella oxytoca; identical to SEQ ID NO: 197351

SEQ ID NO: 203916 - DNA, 678 bp, Klebsiella oxytoca
ttgcccgccttgctgaatggccacgagccagaccggcatcccgctggccagcgaggtgacgacgtcggttatctgcatcggcaggtatcgcatggcctgagcatactgaccggcgctgataccgcctttgctcatggcggcgttctggtcggtaatcttctggataaacggcgcagcttccgccgaaatgccaagctgtgccgctttatactgcagcagctcggcggtggtcaggttcatggtctcggcctgctcgcgcagccggttgatgaactgttctttggtggctgcagcctgtgcttcagcctgtgcggcttcccgggctgcagccgcttccttgcgcccggcatcagtcgcagcatgagcggatttttccacctgcaggcgcagttcgttcagacgcgaggaatactgctcgaaatcatcatcaccaacgagacccgcgccacggaatgtgctcagctgctcctgcatgtcatccagtcggccataggcggcgacgactggatcgatacggttgaccagggcggtcagcgcagcacgctgggcatcaatatctgccgtggcgccgtcaataccactctgaagcgagcccatctcggcccgggtgcgggcgatagcggcctgataaccggcataatctgtcgccgcctgctgggccgcatcgccggtctgtga

SEQ ID NO: 203917 - DNA, 366 bp, Klebsiella oxytoca
gtgagccagcgacagttcttcttcgatgcgcagcaggttaaggcgtggtgcgctggttgtagtggtgccaaaggtatgatcggctaccttgccgccaaaagcctgtttctgcaggtagaagaagcgggctgctcgttgaatgtcggtcagtgtttcttccggggtatccttcatccagcggtatatctggcgactgaccagtgcccatctgaactgccggacaaactcatcaaggtgatgcttgatcacccggtagagattgatcagctcgccgtgaatatcattgatgacctcaaccttgctgggctctttcatgaagtacagcgcagcagcaccgcagaacggctccacgtagcaggtgtgtga

SEQ ID NO: 203918 - DNA, 570 bp, Klebsiella oxytoca
atggttgatgccggtgcgttcggtgtgctcggtaagggcgttgaagccgcttttaaggtcaaagaacgcgctgagaaccccgcttttaaagccagtgacttccgtctcaagcgccacgccttcttcgtccggtgtttcagtagtggtgcggcgaaccaggcgggatttaagctcctctttttcattgcgcatcgtgccgagttcttcttttttctcggccagcatctggcggctgatttcaaggtcggtcttcagctcttccttctcgcgggcatgtttggcaatcatctcttcggccagctcaagcagcgcagttttgtcgccttctttggccacttcgatcagggcacttttctggtcttccggcaggcggcggaactggcgcagctcgcggtagccgatgcccatgcgggacatggattccagggcttcttcgccgaaggcggtaagattggcaatatccaaattggctttatccgcagatattccgagcacactgcagaactcatcccatgtgcccgaaaactccgaaccgttcggtgtcttcttgcctttgaggttgcggtatag

SEQ ID NO: 203919 - DNA, 792 bp, Klebsiella oxytoca
atggcgaacgcggggcagccagcccctgaccgcgtccataccgtggcggttgaaggcgtgcagaaagtccagcgctccgggctgctgaaccactgctgcccgggtcacaaactcctggtcggagagcatcgccggaatggagtcggaggtggtgctgccggggccgcgaacctgaccgccatcagccgcaaacacactgccaagaagaccgccgataccgccgctgctcccgataaggctggaagtggccatctgcgccagctgctgtgctgccagctgcgccatgctgttaatgatggtgagagcaaggttcttcaccgcatcacgcaggttcatcgtgcctttggccagccccatcagggagctttcgataccgctctgcagaccgtcgcggaatgcctcagtcagttcattccccgcctgattcagcttgccgagctcttcttcgagctggcggatcatttcccggattttgtcaccggcttctccgggtgcggtggccatctctttcagctgcgggaggtagcccttgattttgtcgccaacttcctggtgaagctgaacgaggcgctgccgcccctgaatctcattaagcaagccaccctgaacctgcgcctgaatgctggtttcctgctgggactggtatgtgaacaggtcgtcgagctgctttttgaggtcatcgacgcggattttagtttcagcgaccggcagcagcttatcgagccagttcagaccttcggtgttgccgctggcttcaaactcgcggcgcaggtcagatacgcgattctgtag

SEQ ID NO: 203920 - DNA, 321 bp, Klebsiella oxytoca
atggatttagaaaacatctttcgtgacgttaagctaagcaaaaccgaaatgaccgtgctgcgttttattcagaatgaccctgagcaatgcgtacgcgagggcatccgcgccgtcgcggaacactgttatagcaacccttcctcgctagtgcggctggcgaagaaactgaaattcagcggctggctggagctggtctattttattaaattcaatatcaccatgccgaaactcgatgtcaccaacgatatcgactacatgagcattcagccgatagagcggataacttctctactggaaagtgatgccgggcgcgataaataa

SEQ ID NO: 203921 - DNA, 1434 bp, Klebsiella oxytoca
gtgccgctgtcggccagcgccattatccgcgccctgcgccagtaccggctgcaccctgaccagctgcgggcaccggctccggcagtgcagctggccagccgccacccgaaccacgtctggcagctggatgcgtctatctgcgtgctttattacctcaagaacccggccaaaggggttaaaggtgataccggactgcgcatcatggatgagaaagagttcaacaaaaataaacctgccaacgtggccaaagtcgtcaatgaccgcgtctggtcttttgaaggaaccgaccacaccaccgggtggatctacctggagtaccggttcggtggcgaaaccaccgagaacttcacctcggtgctcatcaatatgatgcaggaacgcggcggcgctgacgtgctgcacggagtgccgaaggtgctgttcaccgaccccggcgcagccctgaagtcccccacgatgggcaacctgtgccaggcgctgggtatcaggctgattgcgcacaaagcccgcaacgcccgtgccaccggctcggtggaaaaggcccgtgacattctcgaacgggatttcgaacatggcctgcgcttctgtcgggtggagagcatcgacgaactgaaccgcctggcgcgtctgtggcggatgaagttcaaccgcacggccattcacagccgttacggcatagcccgcacggataaatggttgctgatcaccgaagagcagctggtcaaggccccctctgttgaggtctgccgtgaagcagcggtgtcagcgccggtcagctgtaaggttgacagctttgtccgggtacgtttccgggggcggcagtacgacgtttccgctgtgccgggtgtctgtgtgaatgaccgcgtgatggtagcccgcaacctctaccgtgacgatcaggctcaggtcgtgatgaccggtgaggacgggctgaaatcgttcttcctggttgacgaggtgcagaaagacgaacacggctttgctgttgatgccccggttattggtgagagctttaaaccgctgccccagaccgttgcccagcagcatcttgatgaagttgagcagcacgtcttcggcacggccagtaaggaagaaaccgaggctgcgagaaaaggcaaagccctgccgttcggggggcgtttcaacccatatctcgatattgagcgcgacgatcacccgacctacctgccaaaacgcggccaggaaagtcaggttcgaggcccgcgcatcgagcagcgtccgttatcccatgttgaggcggctaaattgctgcgtgagcgcctgacggcggctggccataactggttcccggaacactacgcgcagctggtcagtcgctttcctgaaggcgttccggcagaagatattgacgccattgcgcaggaactggccgggaacaaaacgccacgactcagtatcgttaacggccattaa

SEQ ID NO: 203922 - DNA, 861 bp, Klebsiella oxytoca
gtggtggagaactttggccggctggctccgtcgggtaacgataaccctgcgggtgcatccgggctggggttaggggctggcggtacacagagtgaaccgctgtatgttgctggcaacttctgccgcaacgggaagaacttcggcatcttccttgaaaaacagcatggtaccaacgcgccttacagttctgagcacaccataatcatggggaatacctgcaccggtaataacggaggtatgggcgattgtggcgtggatggcatgattatgcagggaaacaacttctctgaaaataattatggcgtcgttatcagtccggggacagtgctggcttaccccggttcgcgcggcctgttgttgggtaatattatcgccaaaaatgctaaacatggcgtctattacaacagcacaacagagcaacgtgatggtgaatatgcaatcactaataacactattcgtgataacggggaggatggtgtttgctttaaagcgccgggccaggaagtccgcagtatggaaatatccggaaaccgtatttataacaacgggcgtcatgggttccatctggaagacggcacagccatcaatatggacgtgattaataaccgaatctggaataacggcctggccgctgccggaaacgggattaacctggcctcagaggtaaaactcagctcgttcactggtaataaaattcgagacatccaggctacaccgacccagcaatatccggttaatgccactggagccctgaccgacgtcgatatttcgttcaaccactgcgtaggtaacgcgcagaacaccttgaatcttacaggcacaaaaaaccgcgtcaccacgctgaacaatccggggatttga

SEQ ID NO: 203923 - DNA, 462 bp, Klebsiella oxytoca
atggttgatgccggtgcgttcggtgtgctcggtcagcgcgttgaaaccgcttttaaggtcaaagaatgcgctgagaaccccgcttttaaagccggtgacttccgtctcaagcgccacgccttcttcgtccggggtttcagtggtggtgcggcgaaccagacgggacttgagttcttctttttcattgcgcatcgtgccgagttcttcctttttctcggccagcatctggcgactgatttcaaggtcggtcttcagctcttccttctcgcgggcatgtttggcgatcatctcttcagccagttcaagcagcgcggttttgtcgccttctttggcaacctcaatcagggcgcttttttggtcttccggcaggcgacggaactggcgcagctcgcgatagccgatacccatacgggacatggattccagggcttcttcgccgaaggtttggaggttgttgattga

SEQ ID NO: 203924 - DNA, 234 bp, Klebsiella oxytoca
gtgcatcagacgggtgatgcggtcgaagcccagcgcgtctatctgctggcgcatggcgtctgccgcctcaatatccaccggacgctcgcctccggcctcgaccttaatctcacgggatatcagcgcatcctgccgctggctgaaggccgacttgacctcatcgtcactcagtacctcgcggtaaatcttcaggtcaggtgcgccacgatgctgcagaacgctgtcatcggataa

SEQ ID NO: 203925 - DNA, 855 bp, Klebsiella oxytoca
gtgttgctgaaaaccgatgagtcctctgatgcaaccagccggatggccaccattgccgatataaccggggatgccctgcagctgggctccccgctgaccgacagctggcctgctggctcgctggtgtatccggtgcgtccggcagtgctgacagaaccgccgtcgctgtcccgtctcactgataccgcgacgaccgcacaggtgcgcttccgcatcgcagagcacaatgccttcagcgatacgccggttctcacacagtaccgtggccacccggtgctcgagtctgaaacagactggggcgaatcggtcagcgggagctatcagcctctgatccgcgaactggataacggtagtagcgtgcctcttcgcattgatactgcaggtcgtccgttctggcggcagacgcacaactggttcaccaccaatcgtccggcacagacttccctgcgccagcttctgtggtacctccggggacgtcagcgcccgatatgggtgcccgggcagacgctggacttttccccgacgaccggcatcagcggcaattatgttgatgttgttgaggcgggctttaccgaactgggcatccgcccgggtcgccgcgatatctgcattctgctggcggatggcacccggcattaccgccgcatcaccgctgtcagtctggtcagcggtgtggagcgtcttgtgctcgatggcgatgtcatttcagcaggtcagcaccagatcgtgtctatttccctgatgaccctggcccgccaggacgccgacagcgtgtcctgggagcatgcgaccgacgccgacggcgtggcccggattgccaccacttttaccggagtacgtgatgagctggagtga

SEQ ID NO: 203926 - DNA, 498 bp, Klebsiella oxytoca; identical to SEQ ID NO: 178003

SEQ ID NO: 203927 - DNA, 207 bp, Klebsiella oxytoca
atgccgactgacgggtttggcatcatcaatcagcctttccagttcgctcagtgttttaggggtcagcccggcttcattcacgtccacctcaagtcggaatgttcctggctcgtcgctgacgtcaaaccactcggcgaatgtcgccgaaaaacccatatcctcaacaacgcgacgtacagcaccgcgcgtccccttccggcggtgtaa

SEQ ID NO: 203928 - DNA, 204 bp, Klebsiella oxytoca
gtgaccgcgccgctggcgggcactatctggaaggtcattgccgcggaaggtcagacggtggccgaaggcgacgtgctgctgattctggaagccatgaagatggaaaccgaaatccgcgccgcacaggccgggaccgtgcgcggtatcgcggtgaaatccggcgatgcggtggcgatgggcgacaccctgctgagcctggcgtaa

SEQ ID NO: 203929 - DNA, 177 bp, Klebsiella oxytoca
atgattacgggtgcgggcgtgctcgctcacctgttcatccgtgtaatcttttgtctcgtttcccgcgttgatgacatcttccaccgtcgcaataacaatgcccgggttaaccagaagctctatattttctgtactgctgaccgcaagccatattctcagtatggtgaaacgccctga

SEQ ID NO: 203930 - DNA, 204 bp, Klebsiella oxytoca
atgaatgggttaaccagcgaacattcgcaacagccaatcgcaaagtgtaagcaaaggtgtgaattgtccgttcccggaatcattctccgctcccctgtgggtaactatttcacccgcaacgctaatctgcgtcacaattgcattaacccaaaagtaccaacccttgaatctgccgcgctttcccgtaacataaatgccatgtaa

SEQ ID NO: 203931 - DNA, 1224 bp, Klebsiella oxytoca
atggaaggaatacattctttagaagaaaatgccatagctgtttctgaaagtgacgatctcgagattatcgagtctaatcaagatataataagtgatgatcctgttacaaaagaagatattgaaaatcttgtaatttattcgcgggattggactattgaaacaataattagtcaaatagaatctgggaatattgatctcaaccctgcttttcaaaggagaaatgtctgggaaaatgataagcgttctaagctaattgagtcatttattgtagggtatcctgttccagaagttgtactggctgaaataccaggtaaaaagaagcaatatgtagttattgatggtaagcaacgccttcttgccatacatggtttttttaaacctgaaaataaatattggaaaggtaaggccgagttaaaaggattaacaattcgtaaagatttggaaggtgtttcatttgatagattagatggagatgaccttaggcttttgaataactcagatctaagatgcaccattctatcaggatatcaaacaacagctgtactttacgatgtattttatcgtttaaatactggttctgtacctttgtcgatgcaagaactaagaaattcattacataaaggagatttttctgttttcataactgagaagactaactctgaaatcccactgcatgctattatgtcattgtcaggtccagataaaagatttaaagatattgaagtaatgcttaagtttttagctcttaactttaataaagataagtataatggtaatttaaaagttttcctagacgggtttaccgaatatgctaatcaatcttggctttctaacaatgaacttataaccaatgcttgtgatgagtttgatcaggcgtgtttattattggttgatatttttaaaacgccaaagctagtcggtagaaaatggggtcctatcaaagataattgggagtcgagatttaatagatctgttttcgaagttttagttcagtacgcatttaatataatcaaagacggccattctgcattgttttccggtgataatgaaaaaaatgattttatagagtgtataaaagaagcattcacaaatcaaggatttgcatcctctgtatcgactacgacaaaaacagttgaacaacattcgataagatttaatgttttatttgatattttaaatagcaaatttggtttgcattatactctacctcagacaattcaataa

SEQ ID NO: 203932 - DNA, 663 bp, Klebsiella oxytoca
atggattattcagttgatataatgaaagccttcgatactctggttagagtaaatacgactctttataatagatatatattaccacatataggcgttgtagactcaactgatgaggtgttttccttagacgttaaatcgtatttaatattgttgcatgcagccattgaggactacatagaaggaatcagtgtcttcactagtaatgcagcttgcgagctattcaaaaatgaaggcaaaataaccttaccatttatttttttatttgcaaaaagtaaatcattcaaagacagagtatccgataaaaaattatctgaagaattacatgactctccgcgagattttatggttagttcgttaggggatattaactcaattgcagttgtaggtgcgattgataataatggaataaatgtaagatatctcaataatcttttgcagcattgtggcatcaatttcgatgtgtctgaaaatgatttcattagttggaaaagtttagcagactatagaggtgattatgctcatgcagtggtatttaatcatggcaaaaaacctaaggcgacaaagcttatatcaccagaggctgctagagatctagggagtgattgcatcagattttcggaaaagataagagatgaagcattaagtagtttaggcttaaattag

SEQ ID NO: 203933 - DNA, 453 bp, Klebsiella oxytoca
atgattgccgacgtgacctttgaactgactcgctatcagccctcgccgaataagtttgaggcggggacgggcaatattgctgatgccgtcgggctgggggcggctatcgattatgtcacctcgctggggatagaaaacattgcgcagtacgagcacgccttactggagtatggcatcgagaagctgtcggctattccgggcctgacgctggtcggtaccgcggcgaacaaaaccagcgtcttatctttcgtgctggcgggtcatgaaaatgcagccgtggggcgctatctcagtcaggtcggcattgccgtgcgatccggacatcactgcgcgcaaccgatcctgcgccattttggttatgagagtaccgtccggccttcgctggctttttataatacgccgcaggaaattgattttctcgcagagcatgtcgcaaggtttgcttcgcggtag

SEQ ID NO: 203934 - DNA, 528 bp, Klebsiella oxytoca
atgatgaaagcattttttagccgcaccgtgctggcgctggtggcggttatcggcctggcggccagcgcgcaggccgaagcgctgcgtaccattcgcatcggcgtaccggaccaaagcgcgggcagcaagccgtttattgaggggccggtcggcatggcgtttatccgccatcagctggaagaggcgtttaaaccgcagggtgtggaagtgcagtggcagtttttcaaaggcgcgggcccggcggtaaatgaagccttagccaaccgccagctggattttgtctacctcggcgatctggcggcgatcatcggtaaagccaacgggctgccgacgcgcctgctgctgggcagccgcggctcggaatcctggctcgcggtaaccaaagcctcagggattaaaacgctggccgatctgaaaggcaaacgggtcgcggtatatcgcggcacggctgaccagctggcctttgaccgggcgctgcaaaccgtcggcctcaatgagcgcagtttgcagacgatcaaccttgactag

SEQ ID NO: 203935 - DNA, 1770 bp, Klebsiella oxytoca
ttgttgaatataaaaataatcaaaagactctgtatcgttgtcttggtgtttttttcgctggtcattcggcagggcgcgggcgctgagttttctgccagctttaagggggtggatattcaggagtttattaataccgtcagcaagaacctgaataaaacgattattatcgatccggctgtacacggcacgattacggtgcgcagttacgataggctcaacgatgaacaatattaccagtttttcctgagcgtgctggatgtatacggctttgccgtggtggacatgaagaacggcgtgctgaaggtggtccgcgccaaagatgcaaaaaccgcggcggtacctctcgccagcgatgctcaaccgggaaagggagatgaagtcgtggcgcgcgttgtgcccgtcaataatgtgcctgcccgtgatttggtcccgttacttcgtcaattgaatgataacgccggggtgggcagcgttgtgcattatgagccttccaacgtcctgttgatgacgggacgggcgggagtgattaagcatttgatggaaatagttgagcgcgttgataaagcgggcgatcgcagcgtcgtcacgttaccgctggcctacgcgtccgctgccgacgttgtcaaaatggtgaccgaattaacccgggatgccggtaaatcagcgtcatcgggcttaatgatagcgaatgttgttgcggatgaacgtacgaattcggtattgattagcggcgaaccgaattctcgtcaattaattatcgcgatagttaagcagctggatcgcgaacaatttgttcagggcaacaccagggttatttatctgaagtatgccaaagcgaccgatttggtcgaggtcttaacggggatcggcgacactattcagggcgagcaaaagagtgctaaaccggccatcgcattacgcaaagacattactatcaaagcgcatgagcaaaccaactcgctgatcctgacggcggccccggacgttatgcgggatttggagggggtgatagctcagttggatattcgtcgcgcccaggtcctggtcgaagcgattattgccgaagtacaggatgctgatggtctcaatctgggcattcagtgggccaataaaaatagcggcatgtcgcaatttaccaatacgggcctacctattacgaccgcaattgccggagccaatcaatataaaaaagagggcgcggtggatagctcgattgccagtacgctcaacggtcttaatggtattgcggcggggttttatcaagggaattgggcgatgttattgagcgcgctttccagtaatagcaagaatgatattttggcgacgccgagcatcgtgacgctggataatatggaggccatgttcaatgttggccaggaggtaccggtgctctccggctcgcaaacaacctctggcgataacgtcttcaataccgtggagcgcaaaacggtcggaattaagttgaaggtaaagccacagattaacgaaggggattctgttttactggaaatcgaacaggaggtttccagcgtggctgacgccgcctccagcagtagcgctgacctgggggcgaccttcaatactcgcacggttaataatgcggtgctggtgggaagtggcgaaacggtcgtcgtcggagggctgctggataaaagcgtgacggatagcgtggataaagtcccggtgctgggagatattccggttctgggttacctgtttcgctctaacagtaaaaaagtctccagacgtaatctgatcctacccgcgtaa

SEQ ID NO: 203936 - DNA, 954 bp, Klebsiella oxytoca
atgaagaagaatatacgtgttatacctaaaaacattcatagcaagttaagaaggcttggcaatacagtcgttgctggcacttcgatcgcatttacagagaatcaattaaaaaatggaatgttagagcatctcggaatatattttgataatgatgttattaaatatgaggcatcgatcattcctgatccattgcaaggtaaatattcatttaaaaatgttttcggcgaggaagttatcagaaaagacctcccaaaagaaactcactataccgaaattgagtcacctaactggggggatagctctaacggtacacatactgttagattacctcacgataaataccccagagacataatcccaccaaaacttatagcaattgaaattaatcacaagaagtcctcggacagctattttatatttaatttcagagcaactagaattttagaaaaaaattcaaataagtttaatgatgagttgctatttgatctaaatcttcttcaagaaaatctcggtaaatgtggcgttgagaatgctgataaacctatatctacttatgctgatacacttatagtctcatgggacatatttccgccaggtagcaaagaagaaattttagcaagaattttcaaaggaaaaaacataactgacgataagaaagccgttgctgaaaatagatatgagttcttcatgagccttgaacctaaaaaaattgttactggaaatagtacgttcagtaattacattggagctatgctagaggacgatctggttgtttttgagaacatagaatatggcaatgcgatatatattctctatgacgactgggatgaaatcagcaaactatctcgaattgatttgttatcaggaagagcaggaagtaattttgatagaataatccacagtggtaattggaaagaggaagtacgaaaaaaagttgctactggaagattatga

SEQ ID NO: 203937 - DNA, 192 bp, Klebsiella oxytoca
gtgttaaaacagaagaagttcgaggcggcaattgaagagctggcccgcctgcaggggcatgagctgaacgccgccgatatgctggagttacgatggagggtggccggtacgctcgctgcgaaagaacggcaccgccagcggatgactgcccttgatttccagtggaagaagcctgcctcaccgcgcagatga

SEQ ID NO: 203938 - DNA, 750 bp, Klebsiella oxytoca
atgaaaaaaatattagagaaatgcacccgagatgattttaattacatttcaaatacacttgatagctatttatcattcacgaatgataaacgccgaaaagagttgctagaagcatatgaagagaatcctttattacattccgaattggtggcactggtcgattctcaaattaaatacttcggctcttccgattttgcttacgccaagagaagtctaattaacggcgatggttcaatatcagcagaagaaataattgaagatgtatgtaagaagcttaaaattaatataaaaataggtggttccatagaatcaacacttgagaaattagtgatggctgtagtagaaaaagaattgctaagtaaaagcccagaggacctatcgaaagcattcaaagacatgggggtgggcgaaatcgatagtgatgatattctatctcatttaaaaaaaaatggaaaagttgcaatacttcctataatcttccaaattctaggtcccaaaactgccctaggcattgttgagacgattattgttagcataatagcaaatattataggacgagaggctgctaaacagcttgttaaagagctgctaaagcgtaatccatggattaatagtttgggtccttttctatgggttgcatctggtctttggatcgtttttgatttgcaaggtcctgcttaccgaaaaactgtacctctttgcttatatttggggattgtcgcactacgagatggtgaagaggtcatttga

SEQ ID NO: 203939 - DNA, 453 bp, Klebsiella oxytoca
atgaatgattatttggtgccaacattttggaaactctcacatggtgcccaagaattcactttccaggacatggtggaatgtatagatgaaaaacttgtttatgtacacagaactaccgccagtaagggtacctctcacattagccaagccgaaaattttgttaatgcaggtattggtgactatttttacctgacgcacggtaacaatggtatatatctactaggtcaattcattggccccgtcaattttttcacaaaatatggagatggctggatggatagaccatttcgtttaatacttaaagcaaaaaaccaagagaaatataaagcaattaaaaaatggtggactccaaatgataattcaacattcacaaaagtccctcttgatgagcatcaggactttcaagaactaatacttaaaccatatttcaatgttagcctggataaattttaa

SEQ ID NO: 203940 - DNA, 360 bp, Klebsiella oxytoca
atgagactgaccagccgcaaaaaagaaatattgagctacttcgaaccggacaaccgggaatgggtgacgggcgagatcggtgcgcctccgcttgatgtatacggcgtggcgtacctgctgtatggaacgggcatcaacgataaccggcactggctcgaatccaccaggagaacgctggaagcaatggtgaaagatgggttgttggagaggtactggagccgtgaggcgcggagtatcgtactgggcagcgagacaaccgctacagttgtccgctatggcatgccgggtaccgtttcagtggtacgcgatacaggaggcgcagataacgccatagcaggtgaatgcgtgcggcttagttaa

SEQ ID NO: 203941 - DNA, 903 bp, Klebsiella oxytoca
atgacaaattcatcagtagttaagcttcaggctttagccagcgacatgagcaatgacatacagacagtattgctaatagcaaaattaattgcttctaaacttgaccttcatgatttcaccacctggctcaatagtgaaataaatggctatgaaatatggtcatcaattcctgagtacagaagaggaaatgggaaattgtcggcactgcatcgccacgaggggtggatgccttttagtttgggtgatttaactgctgagaatattaaaaaggttacagaatacagattgggccaatcgatatcggctttacagcaatacgttaatgaaggtgaaggaattcaaattcctatgcctgtccgcactaaagaacatttgttaggaaaagggagtgctgatatagacttattctgggacgtgacaaagggtaaaataagccaggttctcataactgtgaggcacaaaattcttgactggtctatagagttaggtaaaaaagggatattaggtgatgacctgatatttacacaggaagaaaaaaatctagcccctatgacagtaaataacacgaatatttttcacggggtagttaataatgcaggcgcaattggggcgggtacttgtggagatgtttatcagcataattccattgtcgaaaacgatttttattcacttgataaaatgcttaaaagtcatggcttgaccgatgaggatataagtaaattaaagataattgttgatgaatcaccgtcacctgtaactaagggcgaggtggaaaaatgctttagtgactggattgggagtatgacgattaaagcattaaaaggtggtcttggtgtggcgggggcgagtgcaccagacatattgaccaatgctttgtgtaaatactttaaaatttcagcctaa

SEQ ID NO: 203942 - DNA, 2484 bp, Klebsiella oxytoca
atggttcgatatgagctgcagcgcctgcctggcgcgccgaaacagcatggaacgaccgcacccggtactgagttgatagcgttactggactcactcaggctgcacaataatgtgaaggtgcgcctgaatggtcgcgagctggacgatgactttgatttatcgtttaagctgcgcgccggcgacgtcgtagcagtattcgatcagccagaaagcggtggcctgataaagacacttttaaacccggtggagcatctcaacccgatccgcttcaccaaaaaagtaatgtcagggctaaccgggcaacagaccgcatcatctccttccatttctactggtgaatcaccgaataacgatgccacggggcagaccaaccgtgcgcggctgtacaaaggaaggccgaatatttatggtcagtgccgggtatatccggatttgattcagcaggcgctgtttgaatacgtcgacaataacaagtacatcactgaatggttcgaagtggggtatggaaaatacactatttcctctgttcgttattccgagtcgaacctgggcagccttgcgggggccagttatcagattttcgaccctggcacgacgataggcaccattgatgtcggctatcagtttgatgatgtcgataacgaagaagtacctgggttgaatgaaagcgaggattttcccgcccagacagcgacgacgacagcgccgacagccatgctgatcgaaagcaaccagctgaaagcgacagtcttgtcgaatgacgataatttctcatacttcgctgcgcttgccgtcccacacccggtgacttttgttatcaacgcgacatggaactcaggcggcggcccggtgacgaggaacgttaccggcagcggaaatatcgtctactcagaaagttatatcggagaggatacgcagtcttacaccacgttctatcttggcgatatgacgggggagatcacgacgctaccgtctgacgccgcgctgaacctgacacttttcaccctcaacgaccagacaccgctggttatagggccatcggtatcaccgcttgcgtccacgcagatttgggtgcatgtcatggttcaactgggagcgacttcgggcacttctcgttatcgaattcggttctggaaggtggatgacaacaacaaccagatcccgggtactgctgagcagtacgattatttctttgataacgattttcaggtgactacacgttatttccgcacaacacataaattctcacctgccgccggcgcaggtcgatatgcggtaacgatcgagcgactggataacagcaatgatggaaacgtcgtgacgttaatggcaattcacgccgtcaacacccgcgtggatgttgtttatccggatgacacgattgccagagtgaccattaaggggagcaacaacagcaacagtaaccgcgagcagaaatacaacatgctcgcacagcgccacaccatcagctatgaccggacgaccggccagattgactacacgctgcgtccaagccgctcatttgctgacgccgtactgcatgaatgggtggttatcggtaagcaggatgtgtccagtatagatgttgcgacgctgtacgcgattgccgactcgatatctgtgccagagctaggctatttcgattacaccttttcagatgagaagctgtcactcggtgagcggatcgggattatctgcaatgcggcgagggtggatggaaacaacatcggtgatgtgctgacgttctggcgcgatgaaaaggtcagctatcctgatgcggtatttgcccgctcaaacatgttctttgacgaatataaggtttcatggcagatgtcgctgccgggaggatatgacggtgtcacggtcgattatgtagacccgctcaccaataagaaatcctatgtttatttgcagattgatgctagcggcattcaggaagtcgaagacgcaacggttaacgccagtcagattagcctggatggttgccgcaatcgaagccaggcggttgaccgggcatggcttgaggctcagcgcattatgtattcacgaatgagcatgacggtcaaggtgctggagactgagcaggtggtgcgtggcgccgttgttcagtgtccggatatgtacgacaacaggcagcagaacggttatctcactggccgcaatggcgatatcttcacaacgtctgaacgcatagatttttcgtttggcgatatgtgggtcgtgatgacagatagtctgggtaattttcgtggccgctggcgtgcctatcctgtatccggtactgccaaagcctttcaggcagtcgcggatgctttcgatctgaatatctacaatggtgctgactgccaggtggccagtcgctactttattgcaaccgacagcgaattaaactcgactatctggcgtgtagaaacagccaaacccaatggcgattacacacagactattaccttgtctgaatattcagactcgatttacccgtaa

SEQ ID NO: 203943 - DNA, 396 bp, Klebsiella oxytoca
atgacgcagagcgaatttatccggcttgtgaacggcaagccgtgggttaaccgtgcctgttgttttgagcagatggattgttgggggttggtggtgctgtattaccggcatgttctcggtctggagttgcatcatatccccggctacgaatcgggcgccgacttcatcacctgctattcagaggagtcagcccactggcgaagggtgcctgtggcatctcctggctgcctcgccgtgttttattacgcagatcgacctgttcatgtgggcgtaatgctggacccggttaaatgcctgcattcacgcggtgagttcggatttgtgcgtgctgacagcatggtcatcctggcgaaaaaattcaacaaagtggagtatctggttcatggttcgatatga

SEQ ID NO: 203944 - DNA, 543 bp, Klebsiella oxytoca
atgaagaggattgtatgtgttatttttgccattttgcttctttcagcatgtgactcaaagccctcgcaacgtgaaattgaatccgcggccaataaaggcgattcatcagctcaatatgagttatataggctttactctactggaaaggctactgaaggcaaaaatgatgatgtggctataatgtggcttgagaaggcagcagaagaaaataactctaatgctcaatatatgctagggactatttacaatattggtagtcaaggtgttattaaaaatagccaaaaatctgcatattggcttgagcgttcggtaaaaagcggaaacgagactgctctttttttaacggccatgaactattggtatggctggggcgttaataaagatccagttaaagcatatgcctatttgcttgttgctcaatcatttgacaacgaacacgcaaaaaaacaagacgttgagtttagatatgcaatctctcaggagcagagggaagaagctgaagaaatggcgatcgcgattaagaaaaaacacttcaaaaaataa

SEQ ID NO: 203945 - DNA, 636 bp, Klebsiella oxytoca
atggcgcggctagaccggccagtcgaaagcagagaacacagactctgttgccgcgcacctctctctgtgaaacctactgtgaggtttaatgtgaaagatcataaagacatccccgtggactgggtttcttcttgcattgattacaacgctgattctggagttcttacatggaaaagaaggccttcatctcacttcaaaaatagacaggcccactcggcatggaattcaaggttccaaggcaagaccgttggatggaaaagttcggcgggttatctatccttggctattgatgaggtgaaatttcaggctcaccgcgttgcttgggcaatatatcatcagtcttctccctctggcgtcattgatcacataaacgggaacaagactgacaatcgcatcactaacttacgagttgtcgagttttgcgagaatatgaaaaacgtcaaaagatactccaacaatacgagtggaattgcaggggtaaggtggtattcacaacgctctaaatgggtggcatacatcaatgttgacggcaagcgaaagcaacttgggtattacgccttgttagatgatgcgatcgacgctaggaaaaaagctgaagttgagaatggataccacgaaaatcacggcagagaataa

SEQ ID NO: 203946 - DNA, 486 bp, Klebsiella oxytoca
atgagaaagattaaccagagcgcgttaaaagagcttctaagttatgacgagaagacgggcgtatttacgtggattaaaaaacgtcagaatgtagtagtaggaagagtggcggggcatatagatagacttggttacgagaggataaccatttcaggaaaaatatatctctcccatcgtttagcatggctttatgttcatggatatttgccggaaaaagagatagatcacataaacagaataaggaatgacaacaggattgccaatctaagagaggcaaccagccaactaaactccctcaatactggcatgtacaaaaacaacacatcaggaagcaagggcatttacttcaacaagaaggccaaaaagtggcaggctcaaattcttatagacggaaagcgcgagtatttaggtctctacgatgatgtaaaaagagcggatatagcatacagaattgctaatcacttcaggcttgcaaaactggattga

SEQ ID NO: 203947 - DNA, 456 bp, Klebsiella oxytoca
atgactatcacactacaggcagtaaacgagctcattcagtcgctggagagtgcgggcgagctgtcgatcaaagagacaaaggttctggcgctggcgaaagattaccagcagctggctgcggagaatgtggcgctgaaggctgtttttagccagggggaaatcccatccgaagcagtcgatgcattcatggaaacagcagtaatggatcatgactggaatgaaacctccgagtggtcatgggttgaaaacgaaacagaggttatccacgccgttctggacgcacttaagcctgaaacccccgccaccgatcgcatcgtagccgggattaagtctgatggggtggaggagtttgccgcgcatcttcgcgctaatgataacggggcatcagtttgcaaaatgattgcgctcggagccgatgatttcgccaagcagctgcgcgagggggccgacaaatga

SEQ ID NO: 203948 - DNA, 693 bp, Klebsiella oxytoca
atgaaagaacgcggaatgatttttaacgctgagatggtgcgggccatcttcaacggtcagaagacgcagacccggcgccctatcaaatggaaacagacgcgattcactgaaattggtgagcgtgaagatggtagccgctggccttggagtgaagacgcagagcatgcttgcgatttctggcacccatgcccgtttggcgcagtcggcgaccgcatctgggtgcgtgaggcttatcgtttcccggcatcgttagacgatgttagcccaactggtgttggtgaaatggctgtggcaacaggatacagaaaaccatgggcgccgaccttctacgagtctacaggcactttcagtgatggatggaaaggattcgaaacccctccaaaagtttctggcgccggaaagcttcgcccatcaatccacatgccgcgctgggccagccgcattctgctggaaatcaccgacgtgcgcgttgagcgtctgaacagcattagccaagaagatgctcaagcagaaggcatggatcttaccgggtggcggcctacatactctgacccagatagtggcggagatacttggactccctatgacaacttcgcacatttatgggaatccatttacggcgaggaaagctggaaagccaacagttgggtttgggtcatttcgtttaagcgcgttgaaggcggtgcggcatga

SEQ ID NO: 203949 - DNA, 228 bp, Klebsiella oxytoca
atgtggtttcaccactccatttactgcattggagaccgcaaccgcatggacaggggacactttctttatccccctgacccacttccagacagctccttgcgtaacgccgatcttcttagcaagcgaactttgaccaccagcaacgtaaacggctttcgccattggggaatcaaaaacctcatcactcataacaaagcccttagtattaatattagagatataaaataa

SEQ ID NO: 203950 - DNA, 306 bp, Klebsiella oxytoca
atgagtaataccacaccaccgaccaaggctatcccagcatttgatatccatgcaaagcttaaatcacttaatgaatgctggtcttttgctatccgtacgcaacctcataatcatggttatgatttcgagttttgcactcgctttattccagatttaacattcgctatatacaagcgcattggtgattatttcgtgctggttgatttctttagctcatacgatgaagcatgtgatgaggcgaaggatattctctatatttatccagaggtcagagatctgatattgaaagccacatccatttcatga

SEQ ID NO: 203951 - DNA, 162 bp, Klebsiella oxytoca
atgaatattgcatcccgtaaaaaagacaaccttgaaataacaatgcgtactgattccctgtactcattgaagcaaatggagcactcaggacagcacagcacgcagatgcgtacgccaatcaactcagggatgagttcaatacattgctctttgctgcgatag

SEQ ID NO: 203952 - DNA, 225 bp, Klebsiella oxytoca
atgaaaatcgaatatcaggattatggcgcagtggcaaatatcgttgtcaccagcacggtgtttgagttccgccggcacaatcgggcgatcgatgtagccctgctcctgactcccgaaatgaccagtaatagcagcggttttttcatcatgagaacagtactaagtggcaagacaaaacacgcgttgcgggcctacaaccacctgaacagggagtcaagaagatga

SEQ ID NO: 203953 - DNA, 738 bp, Klebsiella oxytoca
atgatttctgaattaactttttcaagaaaattcacttcatattggaatcaacttcttccaaacgccaataattttataagaatagttaacggtagtttgattgatgatgtttatcccccccttgatgaaaatgggaaaaaggaaaataatgtttttgttaatgagtgtggttttaatctgtatgttgcaatacataacaatattattagcgagcaattacttttgtcgaatgatcttttttacgccccagaattctcgagagttatagagaaaacagagcttgaattaagaaaatttagctacggttctaattttgaattacctttatcagttcccgaatataacagcattaaaagtatagcgtggaatatattaaataggtatcgcatataccaaaccatctcctcacctttattttcaggttgtgggataatcaataactcatacggagacatttactacccaaatacacttgtagaaataaaatctggcgataggaaatttagtgtatatgatttaagacaattactaatctattttacacttaacttctactccagagaaaaacgccctctccaaaagtttgaattattcaatcctagaatgggaatagtttacaatgatgacataacaatcctatgccgtgaactagcattcatccagccagaagaaatgtttttccagataatgacggccataactgatgaaaacttcatagacacggagtttcagcggtaa

SEQ ID NO: 203954 - DNA, 1629 bp, Klebsiella oxytoca
atgcctaacgtatttaataataataagttagaagactgttttaatttggctttattaaacatcattaaacatggtgatactgatattttcccatatcctttcgagagtcgtttattcgaggacaaaaaagacatagtcattgatgctttaatggatacattcgaaaacttcgaacaacataaagttgattatcagccgactctaattaacagtttttcaagtgtaggttattatggttatcgatgggcaactcaaatagatccatactggaacgcttttttcttagggcttgtcatacgtttatctaaagatattgaagacagaagagcgaactcagataaagtgtactcatatagattttctcctaacttagatgaaggaactctttttgataaaggaatatcatggcgaaaatatcaggaggacagcataactaaatgtcaagatgatagtatcaagtatatacttacttgtgatattgctgatttctatccaaggatatatcatcaccgattagagaacgccttagatcgcattgatccgcaaagggaatactcatataaaataaaaaaactgctacaattattcactgaaacaaaatcatatggtgtaccagtaggatgccctgcatctagaatacttgctgaacttgccttagactccattgaccagttactctcaatgaatcaaataaactataaacggtatgttgatgacttcattattttttgccaatctaaagaggaagctcataacatattaacctttatcagcaaaaaattaatggagaatgaaggtctaacgttgcaaaaacataaaaccaacattgtctcaaaagaagaatttttatctgtaactaaagcaaaattacatggaagcgaggaagatgaagatgcccctatgaaagcaaaattcatgagcttacctatcagatttgacccttattcagcaaatgcagttgaggagtatgaagaaattaaagaggctctaaaagattttgatctcttagccatgctcaatagcgaactacaaaaatcaaaaataaatcaatcatttagcaagcatttgattaaagcattttccgtaacatcgaatgaaactatttcaagtgcatttaaagttatgttcaataatttaaatgaactatatccaatattcaccacaataatgcaagtagcatctgctaattggcaaaaaattgacaccaccacaaaaaatattatcctggataaaataattcaattaattagagatgaatcttacattctcaaagcagagttaaacattgcttatgtcgccagaatgctatctaaagaaaatagtgaaaaatcagtacttatacttactgagatttataaaaaaaacccagaaagtcaattgataaaaaatactgtaactcaatcaatggcaaagctaagagtaattccttggctctcagacataaagaaaaactttgctggattacatcctttgcaacgcagattattgataatctccagtttcttactcggtgacgaagggaggcactggagagaccacaataaagcaacctttaacttcattgaagtaatatacagagattgggctagttacagacaaacatcacgtaatctggaggatgctttatga

SEQ ID NO: 203955 - DNA, 288 bp, Klebsiella oxytoca
atgtttacgatagagaaagaagttgcggttaatcaggtaactgctgatggaattgcggttggaacggcaacgctcaaagtcaccctgacatacaccatcgagaggatcgagcttgaaggggcgaacggtatcgctttttacacggttacatctgacgctgatgcggagggagtaaggaattatatcccgttcacctattcaggtagcggcgatccgctgcctgaagccgaggcagcattaaaagaattgcaatcccggcgcgatgacatgcagaagggcacaacctga

SEQ ID NO: 203956 - DNA, 2172 bp, Klebsiella oxytoca
atggccagaattccagaatcctcatcgtgggaagaagagattgagcttatttccagaagcgagcgcgtttcaggaggcctggacggcgttgcaaaccggcccctgaaaagcctggcgaaccgtacacgctacctgaaaaagaaagccgatgagtcagatgagcttgccgctgaaaaagttagtgccgtaaaaaccttcgctgaaggggcaacactggattcaccaagagatgagatactgcatggtgcttttcgactcgtctggacgggagaattcccaaaaattgttccggctgattcgtcacctaaaacaaccggtggcgtgggtgccggcgcatgggcttatacatccgacgcggttattcgccaggaactgagttcacccgacagcgctaaactcgttggtggtataggatttgtgtcgccggaaatgttcggctacctgcacggtgtttctcctgatgccgtgccttactatcaaaaggctgtcgatgaaggacacgccagagggcttcccgtgcaactgacggggaaatattacgccacaacctatcctcataaagtcactttaccaggcgatgacgggaccgcttacccgggatgggtgactgcggggaatgatgcaaatattgccgcggaacatgaaaatcatatttatgcggcgattcgactttatcccgactccgttattatcggcgacagtatgcagaactgcgcgttaattggagactgggattctgatacgcctgtgattaacaataaccagcacattggttattttatttccggtgactcatcagacggttatattcgcccgcagctggttaatcacggtgtgcgcaacttctttatcggtcgctacgggaatggcgttcttgacagggccattgaagataattttctcatccgggattgttgtttctcaggctggtttgcgggggctgattctgtttgcaatggtttcgttgtcgcccgcgattgctataccggcgacgcatacggcggggcatggtcgcaacgaaatgccgcggtcaccattccgtatctccctccctatccggcgcccgagattttcaaggtgggctgggtcgatgccatccggtataccaaatatcatttttacggcaagccgcgactgtttggccccatagatacggcgattgatacctggttcgatacgtatatctataaatccgccaactcagcgcgaacctccgcaggaggcaggctgacaaacaataccgccagcggctattcagcgcgttcgttccccggcattgcaggccgggcattcacggttctcagtcgttatggacgtgcggtaaacggggtttgccttgacgatgtgaaggtgctggggacccaccgcgtgccgttctacaccgacgcaggcagttacaacgtgattcacacgtcatacgttgaaaagacctgtctcgttgataccacgacgacaaccattgccggtaatcagttctataccgactatcaggacccgtggaatgcgacactgacaaaagcgcccgcgatggtttgtgagggtggtatcaccgtcgacaggacagtcgtgtctgctggcgtggctacgcatccgttcagccagaagccagcaacaatcaacggcccgctcatcatcaatccgttccgtgatgacacagaggactactcgaccgcgcagattgcagagtggaacagcgccgaagggaaaactgtatatctctatgactggcgccgccagtacagcgtccagcgcccgatacgtttttttgataacactcaggaagcattccagtattacaagggcgtctggacgccggttgtcaaatgcggctcggaagtcgtgacgctgaataccaccgtgggaacctaccgccgctcagggcggttagtgcatgcgactttcagaatcgaaaccacgtcaatggcactgacgacaggtggcgcggtagtgatatcagggcttccgttcacggttgccgcactgagtgacgggggattaacggtgtccccgataatttgcagtcgtgccggctcgggtatcatcctcgcgcaaacgaacccgaccacaaaagagattctactgttaaccaatagctcgcctgccgctctctcaataacgggtggaaccggcttaactatttacggctcagttcagtacgttctgacagaataa

SEQ ID NO: 203957 - DNA, 597 bp, Klebsiella oxytoca
atgaataacttgttgatggcgacagggtcgtcggtgctggaacagcgagccgccgaagcgtgcgccgtcatcagtgatttatctgtcccgttgcgtgacctgtggaatccgtggaaatgcccggctggttttctgccgtatctggcgtgggcattttccgttgacagctgggatgaaagctggagtgaacaggaaaagcgaacgtttatcagcgagtcattccggctccatcagcaaaaaggcacgatagcggcaatccgacgggtggttgaaaagatgggttattccttctcaatcgcggagtggtgggaagtggccgacccggcggggacatttcggcttgaggtcgatgttaacgatattgggataacctcccgaattctggatgagttgacccggttgattaacgacgcaaagccggtaagtcgtcacatggcgcaatttaatatttccacaaaggtgcaaggaaatattcatgtcggttcaactttgtgtagcggcgacattatcagcatctatcccgacgactacgcggcggaagaaaacattacttataacggcgtgatttttcacgacagcaattttaattacgggtaa

SEQ ID NO: 203958 - DNA, 222 bp, Klebsiella oxytoca
atggctctggatgattattcctcttatgaacatatttcaacggtctactatctgtttttgaataaagacccgcatgctgttgtaaaaacaacgtttcgaggcaataatgcttatgatggggtggttaaacggactgtagtggcgcgcgtcaatgtgggaacaagcgaggtcgtttcgcaattaaccaatacaatgacaaacgctgccggtactgaaaattga

SEQ ID NO: 203959 - DNA, 309 bp, Klebsiella oxytoca
gtggaaccggctacaccaacgtttgagtatgcagataaaaccctcaaagaatatcgcaacgagcaaaaagaaactcggcactttatcgttgaagaatatgtcggcttcaaaggtgtaccgttcagcgtggctgataccttttatgcctgtatgaatgagtacacttttactaaagatgatgcggtaaagctcggtgatgtgttgggatggtgtttcaacgatttcgacaaggatcctcaatctctgaataataaaatcaatattgatgcatttcagggtagttttagaggttgggatggctctggatga

SEQ ID NO: 203960 - DNA, 2640 bp, Klebsiella oxytoca
atgcgtaataacctgatggataccgtcgctcaggccgtgaactcgcttgtgtcggcactacagttacctgatgaatctgcgaaagcgaatgacacgctgggcagcatgaatttcccccagttcagccggattttaccctatcaggattatgattctgaaacagggctttttattaacacgaaaacgatcggctttatgctggaagcccgacccctgccgggggcaaacaaggatattgtcggcacactggagcatttgttgcggacaaaaatccctcgtggcgtgccgttcactattaatctggtgtccagtaagctcgtcgggaacgacattgagtacgggctgcgtgaatttagctggagcggtaaggaggcggagaagttcaacgccattacccgtgcctattatctccgcgcggcagaaacccgcttccctttgccggaaagcatggatttacccctgaccctgcggaactatcgggtctttatttcctgctgtatcccgagaaaaaagaaaagcaaagcacagatagtcgagcttgagaaccaggtcaaaattatccgcgcctcactgggtggcgcctatattcccacgcgtgttatggacggtgccgcgctggtcgaactgatgcgtgaagtgattaatcctgatccgggggagatgtatcacaaaccctataaactggacccgtatcaggacctcaactatcagtgtgtggaagacagttttgacatgaaggtcacggccgggcacctgaagatcggtcgtcttggtcacaacgggaaagagacagtcaccagggtgaccagctatcaccttgaacgtgacccggaaattgccttcctctggaccagtgcggataactacgccaatttactgagccctgagctctccatctcctgtccgtttgtgatcacactgacactgatggtggaagaccaggtgaagacccagaatgaagccaacctgaagttcatggacctggagaagaaaagcaaaacctcttacgccaaatacttcccgtcagtggagaaagaagtcaaagaatggggtgatatccgccagcgtctggcgaccaaccagaccagccttgtgtcatattttttcaatatcaccacctatacccaggacaatgttgaagcctcactcaccaccgaacagcaggtgctgaacagttttcgtaaaggcggtttccagctgatccctgcccgctaccatcacctgcgtaactttctggccatgttgcccttcaaatccggtgagggactgttcagagagctgcaggcggccggggtggtcaaacgggccgaaacgttccaggtcgccaatcttctgcccgtggtggccgacagcccgctggccccggccggtctgctggcgccgacctaccgcaaccagctggcgtatatcgaccttttttatgaaggcatggataacaccaacttcaatatggcggtctgcggcacctccggggcaggtaaaacggggctgatacagccgctgatccgcagcgtgctggactccggcggttttgcctgggtgttcgatatgggggatggctataagtccctgtgcgaaaacatgggcggggtctacctcgatggtgattcgctgaagtttaacccgttcgccaatattctcgatgatgcccactttgacctctccgcggaacgtatccgtgaccagatgtcagtgatggccagtccgaacggtaacctggatgaggtccacgaaggcctgctgttgcaggctgtgcaggcggcctggctgagcaaagggacgcatgcccgcatcgatgatgtggtggcgttcctgcagagcgccaaagacagtgaggaatatgccgactctccgaccatccgcagccgcctggacgagatgattattctcctcgatcagtacacggtgaacgggatttacggggagtactttaactcggacaaacccaccctgcgcgatgacgcccggatggtggtgctggaactggggggacttgaatcgcgcccgtctctgctgattgccgtcatgttctcgctgattatctatatcgagaaccggatgtaccagtccccccggagcctgaaaaagctcaacgtcattgacgaaggctggaaactgctcgatttcaaaaacgaaaaagtggggcagtttattgagaaagggtaccggaccgcgcgccggcataccggtgcctacatcaccatcacccagaatatagtcgacttcgattctcccaccgcatccaccgcagcccgggcggcctggggtaactcctcgtacaagtcgatcctcaaacagtcagccaaagagttcgccaaatataaccagctgtatccggatcagttctcaaagatggagcaggacatgattaacagtttcggctctgcaaaagagcagtggttcagttctttcatgctgcaggtggaagcgaactgctcctggcatcgtctgttcgtcgacccgctcagccgggccatgtattcctccaaaggcgcggactttgaatttatccaggcgcgtcggaaggagggtgtcgatattcatgacgcggtgtatgagctggcctgccttaacttcccggcggaaatggctgagctggaagcccgcatcgcacgcgataacgtaaggaatacagcctga

SEQ ID NO: 203961 - DNA, 693 bp, Klebsiella oxytoca
atgaatatcatgctgttatggtgcagcgcatctaaacaaggtttcagcgattcccgctggatgacttacaaacaggcacaggtagttggtggacaggttcgcacgcgtgaacgtggcaccacagccattttctacaccacgctggagaaggaaaacgacgccggagaaatcgaccatatcccgatgctgaaaactttcaccgtgtttaacgttcagcaaatcgacggcttgcctctgacaaaggtaactgtcagcccggaagcgacatttgccccgttaccgcaggctgaaaatctcttcaggaagagcggcgcaaacatcattgagaaaggacaaaacgtctttttcagcccatcaactgatgaagtctggttaccggagcgccatctgttcgctgatgcggttaacttctacgctaccggcctgcatgagcttgtccactggagtgggggtaaaaaacgcctgaaccgtgaaatgaaagggaagtttggcagtgcggattatgcagaggaagaactggtggcggggttgggaagtgcttttctgatggcggatctgggggtttatggagaggtacaacatgaaagctatattgcttcttggctgaaagcgctgaaaaacgacaagcgctatattttcaaagcggccagcgccgccgctaaagctcattcttatctgatcggcaacctctga

SEQ ID NO: 203962 - DNA, 1248 bp, Klebsiella oxytoca; identical to SEQ ID NO: 110082

SEQ ID NO: 203963 - DNA, 507 bp, Klebsiella oxytoca
atgattaacgatattctggcgccggacctgcgggtggtcttttgcggtatcaatccggggaagtcttccgcccataccggttttcatttcgcccatccgggcaatcgcttctggaaagtgattcaccaggccggctttaccgaccgtcttctgaaacccgaggaggaactgcagctgctggatactcgctgcgggattacgatgctcgtcgaacgcccgacggtgcaggccagcgaggttgaactgctggagctccgcgacggtggccgtgaactggtcagaaaaatggaagagtatcagccgcgcgcgctggcgatcctgggtaaacaggccttcgagaaagcatttcaggtgcgcggcgtaaaatggggcaagcagcaggtgaccattggggcgacggaagtgtgggtgctgccgaatcccagcggcctcaaccgggcgacgctggataaactggtggaggcctaccgggagcttgacgaggcgctggccacgcgagggctttaa

SEQ ID NO: 203964 - DNA, 699 bp, Klebsiella oxytoca
atgagcacatccgaggttttagatttcctaaacaaaaattctggtgcactgaccgttctgttcacagctgttgtgaccatctcaacagttgtttactccattcttacaggaaagctagtttctgaaacaacaaaaatgaggcaagttcagacagaaccaaagatagaaataactatcaaaccttttgattttgcaataaacattgttcgacttcatgtcaggaacattggtcttgggcctgccataaatgtcacatttaatatgaaggtcatttctggtggggaaattgcccagactctcattgatgagttctctaaagcaaatttcttacagatagggttgaagtatttcggtccggcgcaagaacgctactcacactacactcagttgacacagcaatataatgaaaaaattgagtctattatagttatcgagatttcatatcagagcacaaccggtgttaagtatatagagcagtcaatcgtcgatatgtcagagcttaaaggcgcatatcagctaggaacaccaaacctctattcaatggcaaaaagtctcgaaaaaatccagaaagatatatctcacatcgtcagcggacacaagaagatcagtgctcaaatttacactgcagaagaccgtcaaaaagaggcagaagacctaaaagcgtttatcgaaaagaaccaaaataaacacaatacatga

SEQ ID NO: 203965 - DNA, 186 bp, Klebsiella oxytoca
atgaaaacaatacggctgacaattactgaactggccgacgtcaccgggattcaccgacagacggtctcaaagcgtctgcaggatattccgcctgagtcgggcagcagctgtaagagaaagtattacgatctgaaattagcattggcggcaatttactctaacggagaaatatataatgcaaagtaa

SEQ ID NO: 203966 - DNA, 1815 bp, Klebsiella oxytoca
atgaaaagcgctccgaacctgaaacacctgcctaaggaaaaattcacagaggcggttatttttgccggtgctgatgcctacgcccacgctaagggatgggaagagggactcggtaagcaaattgccgaagatacaacgccgcctatctatctggggccaaaacagctggctgagctggataacctgcaaattatcgacaaagggcgccgtagtgctcgtgtttatctggcagggagtattgagccgatactgattaatgctattggtgagaagctggcgcgggcaggagtgcaggatgccaggctgtataagggaatccccgaccgggagccggaggactggcgagactatctgaaccggctgcgggaacaatccaaggatgaagccagcaacattcgccaactgccaatcacgaaaagagagcgggtttcggagtttgtagaggtgagtccagctcttaaccagatgggggccagccagcgcggtgaggtgctactggctcattatgatggcgatctggctattcacgccgactctgacacggttcatcactataacggcgtggtgtggaacccgctgccggataaagagctgcagcgtgaaatggcgcaaatttatatcgatgccgaggtggcttattcacagaacgccattaaatcagcggtggaaaccatgaagctgagcctgccggtgatgggcgtgacggcccgaaacctggttgggtttagcaatggggtatttgatacccgaacggggcaattccggccgcacagcaaaaccgactggctgctgatcgccagtgaggtgcctttcagtccaccagccgaaggggaaacgctggccagccacgcgccgaacttctggaaatggcttcgccgttccgtggccaataacgaccgcaagacagatcgtgtactggcagcgctgtttatggtgctggcgaaccggtacgactggcagttattcctggaggttacagggccgggtggtagcggtaagagcgtgatggcggaaatctgcaccatgctggcgggcaaggccaatacagtgtctgccagcatgaaggcactggaagatgccagggacagggcgctagtggtcggctactcgctgatcattatgccggatatgacccgatacgctggcgacggtgccgggataaaggctattaccggcggtgataaggtttctatcgaccccaaacacaaagcaccgtattcaacccggatacaggctgtcgtgctggccgtcaataacaacgccatgacgttcagcgaccgaagcggcggtatctcgcgccggcgggtgatcttcaacttcactgaagtggtgccagaaaacgaacgcgacacactactggccgagaagatagagggtgagctggccgtggtgattcgccatctgctgacgcgttttgcggatcaggacgatgcccggcgtttactgcacgaacagcagaaatcagaggaagcgctggcgattaaacgtgaaggtgattcgctggtggacttctgcggctatctgatggcgtccgtagtgtgcgatgggatgtttatcggcaatgccgagatagtgccgttcagcccgcgaaagtacctgtatcacgcttacctggcatatatgcgagctaatggcctgaataagccagtttcactgatgcggttcggcactgatatgcctggcgcaatggctgagtacgggaagaaatacgataagcggaaaaccaagcacggtatcaggtcaaacgtaaccctgcatgatgactctggcgactggatgccatcatgtgcagctactactgagaatgaagggtag

SEQ ID NO: 203967 - DNA, 369 bp, Klebsiella oxytoca
atgatcagcaatatcgaatttaacgagctggaaaagcgcgttgatctgctggtggataaggtgctttcccttgaactgcggatcaaatcgctgactgatagccagggtggggagattccgccgggcatggctccggtttcttctctggcagccgagtatggcatttccactaagaaggccgaagaactggcgaagaacacgggcgtgatgctggtgaagattaaatctggcggtttcgtcgccccggctgaaaaattcagggaagaggccagaatggtgcttagagctgccaaacgcaaatacggatcggcgtactggtatcacccattactgggtaagtttcagatgagcggggggatcccgaaatga

SEQ ID NO: 203968 - DNA, 309 bp, Klebsiella oxytoca
atgcgtgatatctaccatcaggttgtaatgcatgcgccggatttcagaaggcattctgatgaggctctagctgaggtttctgacgtttgcggtgaagctgctcgcgcaatcagtaacacactggctcttattggcaatctgacgcttgaggcttcacagagtgaggaatatagcgatcagaatgcgcgccgcgacctgatgttgcttggggagactttgcggaatcttccccggctagcggaggcgctggatcagaaccggtgtacagcaaactatgtgcttaagcagcgtcgggaggtttccaaatga

SEQ ID NO: 203969 - DNA, 189 bp, Klebsiella oxytoca
atgcataacatgtcgagtcagccgatcacttctctcgcttgtgaactagctgctttattgatggttgttgaagaatgcgaagttgattcagttgggcgtgaaaatctcattagcttggctcggaggatttcggacaatctggcggcaaatatggtcgaaaagaccattaaaggtggcgaaaatgcgtga

SEQ ID NO: 203970 - DNA, 912 bp, Klebsiella oxytoca
atgccgggccgccaatgcaataacactaaacatattcaggataccaggcttgctgctggtggtcaaagcttaggcgctcctgagattacaggaactgcgccattggcgcggttagggggtatgtccaataatggctacaccccctttgggtcaacgaacttttccgcacacctacaaactacccataaattgggctgtttagggtatacggcattggcgcataccccatttccccaaatctggggagaacaggatcagcctgccgggtgtactgcaatgcagcataccccgggaaaatcccgtagtttcgagcgttacccagattttgggtatcagcccttctgctcaatgcttctttgttgtaactctttgcggatgatgcgcttgatccaggccgccagagattcatcaccatcttgctgctgggcctgttccattagctcacgtaactcaggatctagtctgaactggaatgggggattaccacgtctttcatttttgtgtgttgacacgtcaattacacccgatgtaatgtgtttatgtgtagtgacacattacatacatatgttgcaaatagcaacgccccggagtgcgggaacactgccgaggcgtctaaccaaaacgttatcagaggtaacgactatggctgaattacagaatacccaaactcgccctgaatttacatggctattcctggctacccctaagcattatccagaatgcgccccggtagtcctccgctttgacgcagacactgaagcctgcgcccgcgatgcttttcccggttggaatttggtctttgccgcgaagatccgcgcacaggccccatgtcgtgtttcgttcttcgattactccactcgccgcggttgggagtttgatagcgccgcctctcaggaggtacgtcatgcataa

SEQ ID NO: 203971 - DNA, 801 bp, Klebsiella oxytoca
atgaaatttataccagcagacaaggccattgatgtaatgttagaaaatatgagccatgatgaaaaaaaagagtattttaagatgctgatggagagtaactataagaaattggactctattcatcgccatcatggttttttgcttcctattcctatcgatggattaatgagtgatagtgaggccaaaaaagtttccgaggagatgcttaattcatctataaccaataatgatattgttgaaatgttatttgatgattttaccccaaggaagattagcgaagtttcctctgataaccctgatatgatattgaaagccttgcgcgaaatagataataaatcagttaaatcaaatcctgtaaatgaatttctttcacaatcaatgggtgatgaagcgcttacagttatgaaggcttgcatttgcgctgatattgcagggtgtgagaatctaaaaaaagatttaatgaaggtatatactaatataataattaactcatataatcttaaagcatcaataattactgagagaaaaaaggttatcagcgaagatagaagtaaggcaaagaaaggtaaaactaataagcaccaatctgctgcactagcgatagcaagaaaaacatgggagcaatatcctactgctagcttagccgggttatctgaggagatatattcatatttgcgcaataaatataatggtgttcctgttgctggcactgtaaaaatctggctaaaagagtccgggttaaatccaaatgtaaagccaaaaaacagagagtttaaactcgttattcctgagggggtgtaa

SEQ ID NO: 203972 - DNA, 1458 bp, Klebsiella oxytoca
atgcaggatacccggatcgcttggtatggggtgtttgtggaaacattcaaatttacgaaagctaagcttgaaagcctgccaccggccgagcgtggtcaggttgagtacggcgacaccattgttaatggcctgcgcatccgtgtcggtatcagtggcgtgaaaagcttctgtatatcacgtaagcggaacggcaaatttatccgcgccacccttgggcgattcccggatctcaccattgataatgcaagggcaaaagctcttgaactgctgggcggtgttgcgacgacaggtaagaacccgaacgaagtaaagcgtatcaacgaaaaggccgctgtgacgcttcatgacgcgctggagacatacatcaaaagccgcgctcatcgtctgagcgatgattcagccaaacagtatcgttctatcttggctaatttctccggcgactggatgaagcagcctattagctcaatttcccgagaacgtgttgagcagcggcataaggccgttacggatggtgttgtgtggttcggtgccgataaatctactctccgtgctggtgttggctcaggcagtaaggcccaggctgatttatgggctcgtgtgctgcgggctatataccgttttgctcatgaccattaccgtgatgaagagggaaaaactcttctgccggatcccccgactcaggtactgagtacaaaacgacagtggcatggaacagtcaggaaaaccgatcgcatccgtaccaatgagcttgctcgctggttcaatgcgctggtcgccgtcaggagtaaagcggaagaggggcgggatgatatcgctgcggctgtttgtgatgctgtagaaatggatctttttaccgggctgcgtaaatctgaaatcttgggattaacgtgggatcgagtgaatttaggcgctcgttacttctggatcgataccacgaagaatggcgatccgcttgagctgccaataactgaaactctgctcgagctgttccgccggcgccttaaaatgaaggctggggatgaggtttttgtgttccccggcgtacatggtgagataaaagaatatcgccatattatcgaccgtatcagcgcggccacggttcctgatcctaatccagatatgataaagccaattcctttcaagtggcatgatggccgccgtacattcggtacggtcgcagagctggtgggcgttggtaactacatcctgaaacgtctgctaaaccatagaacgatgagaagcgcagacgttacacagggctatctgcatttcagcgccgatgagctgatggaaccagcttcaagaatagaacgggaaatacttgagcatgcagggttggtggaaagcaaaaagggattggacaagcagcttgtatctgcgctgggtggtctcagtgatgaagataagcgagaattattattttcattgttacaaaattctgaggtatctaataaatga

SEQ ID NO: 203973 - DNA, 534 bp, Klebsiella oxytoca
ttgcggctggcgccttacccgggctaccggcccgcagacgggggtgaacccgtagcccgggcaaggcgcgttaagcgaagcccccgggagcagagcccagagtggccgattttcccggaggcgatgctgcgcatctgtccgggctaccggcccgcagacgagggggaacccgtagcccgggcaaggcgcgttaagcgccgcccccgggagcagagcgcagagtggccgattttcccggaggcgatgctgcgcatctgtccgggctaccggcccgcaggcggtggtgaacccgtagcccgggcaaggcgcgttaagcgccgcccccgggagcagagcgcagagtggccgattttcccggaggcgatgctgcgcatctgcccgggcgaccggcccgcaggcggtggtgaacccgtagcccgggcaaggcgcgttaagcgccgcccccgggagcagcgcgcagagtggctgattttcccggaagcgatgctgcgcatctgtccgggctaccggcccgcagacgagggtgacctgtag

SEQ ID NO: 203974 - DNA, 609 bp, Klebsiella oxytoca
gtggcgagtatagccctcacctttttcgcgttgccaccgggaaattcagccacgcagcctctgctcccgggggcggcgcttgacgcgcctttcccgggctacaggttcaccgccgtctgtgggccagtagcccggacagatgcgcagcatcgcctccggggaattcagccacgttgcgttctgctcccgggggcggcgcttaacgcgccttgcccggactacaggttcaccgccgtctgtgggccagtagcccggacagatgcgcagcatcgcctccggggaattcagccacgttgcgttctgctcccgggggcggcgcttaacgcgccttgcccggactacaggttcaccgccgtctgtgggccagtagcccggacagatgcgcagcatcgcctccggggaattcagccacgttgcgttctgctcccgggggcggcgcttaacgcgccttgcccggactacaggttcaccgccgtctgtgggccagtagcccggacagatgcgcagcatcgcctccgggaaattcagccacgcagcctctgctcccgggggcggcgcttaacgcgccttgcccgggctacaggttcaccgccgtctgcgggccggtag

SEQ ID NO: 203975 - DNA, 177 bp, Klebsiella oxytoca
gtgaacagtgtgaacagtgtgaacagtgtgaacagtgtgaacagtgtgaacagtgtgaacagtgtgaacagtgtgaacagtgtgaacagtttttccagaaaaaaagtttttaccatcaaaagctatctggccgctgagctccaaaagctgaaagtacttgtatgttggctacgttaa

SEQ ID NO: 203976 - DNA, 327 bp, Klebsiella oxytoca
atggcaacgaatcgtagccgtcgtctgcgtaaaaaaatgcatatcgacgagtttcaggaagtgggtttttccgtcgcgtggcgtttcgcggatggaaccagcgaagagcagatcgaccagaccgttaacgatctgattgatgaagtgattgagcctaataagctggcctttgacggcagcggttatctttccagggaaggcctgatctgcctgcaggaaatcggcaaatgcaccgaggaacaccaggccatcgtacgtaaatggctggaagaccgcgggcttgccgatgtacgcaccagcgaactttttgatatctggtgggactaa

SEQ ID NO: 203977 - DNA, 570 bp, Klebsiella oxytoca
gtggctatacatgacaccgggatgttcaccgtgaaagaaatcaaccgcctcaaaatccttcaggatgtcatcgaccgcaaccgtcagtccgggccactgggcatgaataaccagagtcgtggtcgcaccggaaatcgcctgcttcccgcatcattgactgatcaggccctgaatatcatccgtgaacgctatgccgattttggtcccacactggcgcgggaaaagctcgctgaaaatcacggtattgttcttggtaaggaaacactcagacggcttatgataaaaaccgggctctgggttccccgcaagcaacgtgcgccaaaaattcagcagccacgctatcgccgggcttgctgcggcgaactgatccagattgatggttgcgaccatcactggttcgagaaccgtgcgcctgcctgtactgccctggtctacgttgatgatgcgacgagccgcctgatgcaactccgtttcgtgaaatcggaatcgactttcacctattttaaagccacgcggggctatctggagaagcatggcaaccccctggcgctgtacagcgataaccagtga

SEQ ID NO: 203978 - DNA, 1413 bp, Klebsiella oxytoca
atgacggtctcgattaaaaacagccagatcgatgtgaatagctggtatcagaaaatcacgttaaccatcaccaatgaaaataaccgtgccgtggatatgaatcatgcggtcattagctttaccgggtccggccatcaggatccgtggggaaattttggcggtaccctcaaaggggacatgcctcttacgttaagcggtaaatcacaggggaccgttgacgtcaatgaaatcattattaataacagccggcagctgttactgcagccgggcgaaagcggtacgttattcttcagttttgtcgccactcaggttccggtaaaactctcgaccttcacattaacgctggcctcttcggcacaagacgagacaacggatgacgctgcagatgaggttgagccagaacctgaagttcccgccgatgatgatactgatagcctgaagcccgaacctgaagaccatatccctgctgatgaggaaacggatgaggttgctccggaacctcaagagcagggtgatgatgcggttgaggaagaggaagggatagttattgcggcaagccagctgagtacgaccagctggtatcagcgcgtcaccctgacgctgaccaatctctattcccactctatcgatcttaatcaacttaagctggagtttaccgccagcgggcatcccgatccttacagcccgttcagcggttctttgctcggcaataagcccgtgacgctgggcagcgacggcggttggcccatcgagaaaaatacgattaccattcatcatgatggcgagttctggctgacggccggggccagcgccgagctgcagttctttctttccgctacccaaactccggtcacgatgagcggcttaaccgcaaccctggcgcacgatcctggccgtcaggggacgattgaaattgagtttccaccgttggcggaaagcacaaccctcaagccgaccatcgatctgcgctatccagacgcaacatcacaacgctttgccggcgagtggggacaggctttagtcatcggcgatcttagcgccggcgattacgctatcaccgtgctggagctgtgcaatgatgatatgcggatcgcgcctgttgaatcgacgtattcgcttaagcttgtttccggtcatgacgcccaaacctgccgggttgcgtatcaatcgccagtaccgttggcttcggtacgcctgactgtcgatgcccctgagttcatcggcgcggaaatggtggttgagctgtggacggaatctggcgtctgcgaaagaaccctgacaatgcccgtcaatcaaatgcagctggtgacccggcttaccgcggggcaccgctatcagatgggtttgcaacctgcggttatcaataaccagatggtgacgactcccgccctgccgactatttttaccccttaa

SEQ ID NO: 203979 - DNA, 2058 bp, Klebsiella oxytoca; identical to SEQ ID NO: 32296

SEQ ID NO: 203980 - DNA, 285 bp, Klebsiella oxytoca
atggcaaaatttactgtacgggtggaactgtgcgattcagaagatgcagactacgatgcgctgcataaaaaaatggaagcagaaggtttttccagagaaataacgactagttcaggaaacacatacgatcttcccagcgctgaatatatctatgagagtgaagccaaaacgaccgaagatgtaggtctgcttgcaaaacaaatagccagtaaaatcaaaccacgtccgcgtattttagctaccaaatcggacgggcgttgggtctctggcttagataagccctaa

SEQ ID NO: 203981 - DNA, 150 bp, Klebsiella oxytoca
atggacgaacgtgaattaatgcatgtaattactctgcttcttgaggatgtgcagagattgcagagtattgagccaaatacaggcacagaagcccgcatttggcttgcaaaaggagcgctagaatccggcgatcatgaagataatgagtag

SEQ ID NO: 203982 - DNA, 258 bp, Klebsiella oxytoca
atgaaaaaagtaatttgctcattatgccatgggcgtggtggtgatgtaattattacgtgcagtaactgcaatggttcaggttatgacccacaagatgataatccgttcgcgcagtgccatacttgttacggagaaggtgaagaaaacgctgacgtttgtcctcgttgtggtggtgatggttattactacgtagatgaagatgaagatgaagatgaagaagaagatgaggatgaggatgaggatgaagaagggctatag

SEQ ID NO: 203983 - DNA, 468 bp, Klebsiella oxytoca
atgaaatgtgggcggtgcgccgtggctgagctgcaggaagttgacgcctggttggatgcgctgctggcggggctggagccttcagcacgtaagcgcatgatgcgggagctggcgcagcagctgcgccgcagccagcagaaaaatatccggatgcagcgtaacccggacgggacagcatacgaaccacggcgggtaacagcccgaacgaagcagggccgcatccggcggcagatgtttgcaaaactccgcaccacaaaatacctgaaagctatcgccagcccggactctgccagtgtcgaatttgagggcagagtgcagcgcatcgcgtgtgttcaccattacgggttgcgtgaccgggtaaggtctaatggaccgctagtgcgttatgagaagcgcagattattaggagtaaataaaaaaataaatggaatgatttctgaaatgctttttgaatggctaactaaataa

SEQ ID NO: 203984 - DNA, 906 bp, Klebsiella oxytoca
atgtcggaccttagtgatatgtctaaggaaacgcgtgtttcagtggaagctttgcgtttgttaatctaccgtgctgattatcgttaccatatctatacccttgacaaaaaagggccgggcaataaaaagagaacgatatatcaaccgtccagggagctcaaagctttacagggatgggttcttcgtaatatccttgataagttatcttcttcgccattctctatggggtttgaaaaaaaacaatctattttaaataatgcgaccccacatgtaggtgcaaactttattcttaatattgaccttgaggatttttttccaagtcttactgcacataaagtttttggagtatttcattctcttgggtacaacagagctattgcttcttctttaactaggttgtgctgttataaaaatctgctacctcaaggggctccttcatctcctaaactagcaaacttaatatgttcaagacttgattatcgcattcaaggttatgcgggcaggagaggtttgatttatacacggtatgcagatgatttaactatatccgctcagtctatgaaaaaagttgttaaagctaaggattttcttttctcaataataccttctgaaggactggcaattaacaaggaaaaaacatgtataagtggccctagagggcaaaaaaaggttacaggattagttgtatcccaagataaagtcggtgtgggaaaaagaaaaagtaaagaaattagagctaaaatacatcacatttttgttaggcgttctaatgaggttgaacaagttaaaggatggttggcttatattttaagcgtggacgtaagaaaccacaaacgtttggtggcgtatataaataaattagaaaaaaaatacaattggaacccttttaaaaaagaagaccactag

SEQ ID NO: 203985 - DNA, 924 bp, Klebsiella oxytoca
atgaaaaaaaacttaactgaagatcaacaaaaacagcttattggccacctcacgaagaaaggcttttaccgtggtgcgaatgtaaaattaacaatctttctttgtggcggagatatagaagatcatttttccggaagacatctattctcacagtttttagacaaagctaaaaacgtggatgtattttatccagaagatttgtttgatgatcttttagccgggcagggacaacatagtttacttagtcttgaaaatatattggccgaggccgttgatgtaataatactatttcctgagagtccaggttcatttactgagttaggtgcgttcactaataatgatagattaagaaagaaattagtttgtgtgcaagatataaaatttaaagctaagagaagttttattaattacggtcctataaggttgctgagagctaaaaacccaagctcagtagttcgctttaattcacaagagctgaatgagctgagtagtaagccgctgggagagttgaaaagttcacctttatataaaagcattactaaatcaattaataggatcttaagggagaataaggttaataagggtataggaaacttattgtatgttgatagatttatactcccttgcatttatctattggaggacattgatttcagaacactcaccgaattaacatctcaagctattaaacaagatgaggtattgtctaagataatcgtcagatctactctgacaagattgataaatgagcgaaagatacttcgtactatcgaaggatataacgttacaaccttaggtgcgagttatgtcaggggcgtttttgacaggaaaagtcttgatggcttacgtttagaaataatgaatttcgaaaatcgtagcaagtcaaccttcaactatgataaagtcccctatgcgcacccttag

SEQ ID NO: 203986 - DNA, 135 bp, Klebsiella oxytoca
atgggtcggggccgccagaactggcgcgctttccggcccgtcatgcatctgcatgaaaaccactacacaaagcgggtaggcgtggcggggatacgagcgcgcgctaaatgcaatgatgatgattggcatacctaa

SEQ ID NO: 203987 - DNA, 201 bp, Klebsiella oxytoca
atgctgaacaataaaccctcatttgcgtcgcttctcgttaagaaaagtccggcaatgcactacggccacggctggattatcgggaaggatggtaagcgctggcatccgagccgctcgcaggatgcgcttttggccgacctgtccactatccaacagaggaaaccatggctattgaaggtcctgcagcgactgttccactaa

SEQ ID NO: 203988 - DNA, 573 bp, Klebsiella oxytoca
atgaatctggagaaaggtggccgtggagccatcgaacgtatggttgaagcgtatggcttcaagacaagacaagccttgtgcgatcatctgggcatttcgaaaagcacactggctacgcgctatatgcgtgattcattccctgctgagtgggtgattcaatgtgctcttgaaactggtgtctctttaaagtggcttactgatgggcaaggaaccaaaaatagttcacataatgaaaactcaagcctattggaaaagcaggttcttatcgatggtacacttgagatagaaggcttttacgcctttgacgctgcattgttgcctgattctatcaaagctccgatgctggtttcagatgagggtaaaacatacatcgttgataagagtttcgatgatgtaagcgatggtacctggcttgtgaaaattgaaggaaaaatcagcgtccgtgaactaataaggatacctgttggaaaggtaagagttacaagttccaatacgaatataacttttgattgtgcacttgaggaactaaagcctgtagcaaaatgtcattattatctaatgaccgcaatatga

SEQ ID NO: 203989 - DNA, 840 bp, Klebsiella oxytoca; identical to SEQ ID NO: 6027

SEQ ID NO: 203990 - DNA, 651 bp, Klebsiella oxytoca; identical to SEQ ID NO: 153351

SEQ ID NO: 203991 - DNA, 129 bp, Klebsiella oxytoca
atgcacattatcaatgctgaagagcagcacattcccgccatacgccgtatttacgcccatcatgtcctgcacggcacaggcagcttcgagacggccccccgaacacgcaggaaatgcttgcccgggtga

SEQ ID NO: 203992 - DNA, 795 bp, Klebsiella oxytoca; identical to SEQ ID NO: 148807

SEQ ID NO: 203993 - DNA, 753 bp, Klebsiella oxytoca; identical to SEQ ID NO: 148808

SEQ ID NO: 203994 - DNA, 672 bp, Klebsiella oxytoca; identical to SEQ ID NO: 148809

SEQ ID NO: 203995 - DNA, 774 bp, Klebsiella oxytoca; identical to SEQ ID NO: 148810

SEQ ID NO: 203996 - DNA, 1386 bp, Klebsiella oxytoca; identical to SEQ ID NO: 148811

SEQ ID NO: 203997 - DNA, 801 bp, Klebsiella oxytoca; identical to SEQ ID NO: 148812

SEQ ID NO: 203998 - DNA, 681 bp, Klebsiella oxytoca; identical to SEQ ID NO: 30073

SEQ ID NO: 203999 - DNA, 1119 bp, Klebsiella oxytoca
atgcgcagcgccttccgggttatccggacagtacgtgaaaagcatgcctgtactcagtgcgatgccatcgtgcaggcccccgcgccttcacggcccatcgagcggggtatcgcaggaccggggctgctggcccgcgtgctgagttcaaagtatgcagagcacaccccgctgtaccgccagtctgaaatatacggccgccagggtgtggagctgagccgctcactgctgtcgggctgggtggatgcgtgttgccggctactgtcaccgctggaaggggcgcttcaggactatgtgctgactgacggtaagctccatgctgatgacacgcctgtcccggtgctgttgccaggtaataagaaaacgaagaccgggcggttgtggacgtacgttcgtgacgaccgtaacgccgggtcagagctggcgccggcagtgtggttcgcttacagcccggacagaaaaggtatccacccgcagacccatcttgcggggttcagcggagtgctgcaggcggatgcgtacgccgggttcaacgaactgtaccgcaatggacagataacggaagctgcctgctgggctcatgcccgccgcaagatccacgatgtgcacgttcgcaccccgtcagcgctgacggaggaagccctgaaacggatcggtgagttatatgccatcgaggcggaaataagggggatgccggcgaagcgacgccttgcagaacgtcagcaaaaagctaaaccgcggctgaaatccctggaaagctggctgcgtgaaaaggtgaaaacgctgtcgcgacactcagaactggcgaaagcgttcacgtacgtactgaaccagtggccggcgctggcttactatactgacgacggctgggccgaggcagataacaacatagctgagaatgcgctacggatggtcagcctgggccgcaaaaactacctgttcttcggttcggatcatggaggagagcggggagcgctgctgtacagcctgatcgggacatgcaaactgaacggagtggagccagaaagctacctccgttatgtccttgacgtcattgctgactggccgataaaccgggtcagcgaactactcccctggcgcgtagcactgccaactgaataa

SEQ ID NO: 204000 - DNA, 603 bp, Klebsiella oxytoca; identical to SEQ ID NO: 148813

SEQ ID NO: 204001 - DNA, 234 bp, Klebsiella oxytoca; identical to SEQ ID NO: 148814

SEQ ID NO: 204002 - DNA, 729 bp, Klebsiella oxytoca
atgacggacactgccggtgccagcgacattatttttggcctgttctggttgctgggatatcagttttccccccgtctggctgatgccggggaagccgtattctggcgggtggataaatcggcaaattacggtgcactggatgagctggcgcggggatgtgccgatctgtcgaaagcggaggatcagtgggatgagatgttgcgaaccgccggttcgctgaaactgggcaccattcatgcttcagaactcattcgctctttgctgaaaagctcgcgcccatcagggctggcacaggcgatcatggaagtgggacgcgtcaataagacgctgtaccttcttaattatattgatgatgaagattatcgtcgtcggatcctgacgcaactcaaccggggagaaggccgccatgcggtggcgcgggcgatctgctatgggcagcgcggtgagatcagaaagcgctatcgtgaagggcaggaagatcaactgggtgctctgggtctggtcactaacgcagtggtgctgtggaacacgctttatatgcaggaagccctgagctggatgcgcagtaatggagaagaaaccggggatgaagatatcgcccggttatccccactgatgcacgggcatatcaatatgctggggcattatacgttcacgctaccggaggatattttgaagggagaactgagaacattaaattttaatataaacaatgaattatcttactaa

SEQ ID NO: 204003 - DNA, 231 bp, Klebsiella oxytoca; identical to SEQ ID NO: 185380

SEQ ID NO: 204004 - DNA, 357 bp, Klebsiella oxytoca; identical to SEQ ID NO: 182584

SEQ ID NO: 204005 - DNA, 705 bp, Klebsiella oxytoca
atgcacgctaagggccgttgcataaccctccgctatccacaggcgtttcccggcctgttttttcccttcgatagtgttgctcgctccttttaccgcgccgcctttcagggtgcgcttgagcccctcagcgttaatgaactggaggttaaccagcgcgccagactcgtcataaagcggcaccaccacatcaccggcgcggtaggccacgccgccggttttgtgagacgcggtcagcgtcagacactcacgaccggcaaagcccttgcgggtcaggtaagcgttgccggtggccgggcgggttttctccagcagtctgacggccagcgcggctgctgctttgcggtcggcttcagtctcagcctctgcggctgctgtcacctccggggccaccggtggcaggtggccggtgacggcgttcaccttcccggcagcctcggatgccgacacgccgaacaccttctcaaccagtttcaggccgtcaccggcgccgcactggttacagaaccatgtgccgcgcccctctttatcgtcaaagcggaaccggtcagcgccgccacacaccaggcaggcctgatggcggttttttatcactttcattcccagcgccgggagaatgcgcggccagtggccgcacgcctgttttacggtatccgttacgttcattttcatggttttttctccctcagtgcagtacaggcgatgtga

SEQ ID NO: 204006 - DNA, 321 bp, Klebsiella oxytoca
atgaaaacgcctctgccgcccgtattgcgtgccgccctgtatcgccgcgccgtggcctgtgcctggctgaccctgtgcgaacgtcagcaccgctatccccacctcaccctcgacgcgctggaaagcgccatcgccgccgagctggagggcttctacctgcgccagcacggcgaggaaaaaggccgtctgattgcctgtgcattactggaagatttgatggaggccgggccgctgaaagccgccccgtcgctgtccttcctcgggctcgccgtgatggatgagctctgcgcccgccatatcacatcgcctgtactgcactga

SEQ ID NO: 204007 - DNA, 228 bp, Klebsiella oxytoca
atgaaacagcccgccatcaccgtcaaagacctcgaatgcctggagcacctgcgtaatgtcggccagttcgtcggcgagctgatgcaggtgcaggactgcacctcgctgcgtcgtgacccgactcagcagttacagctcacctccgtgatttacctcatgaccgcccagctcgacggcgtggtcgagcgctgtaatcaccgctggttcaccggggagggcaacgtatga

SEQ ID NO: 204008 - DNA, 2232 bp, Klebsiella oxytoca
atgaactggtcagacttggaaaatagagtaaaacaattctcaagattaatttacaacagggactcaagctcaataagtataagtgggatgcaattcgattgttttactaagattgaggaagatcactatgtttgcattgaagtaactaaaaatcacacgctcgaaaaggtaaggatggatataaacaaactcatcactttaagaatgagaaaagcctctgaaggtgcatttgtcaaatgcattttgattttagaaagagaacctacagatttaatgaaaggaactgctttcgattccaaaatagagctattgactttggatgaatttgaacgaaaatttttagattacaaaaattatattttcactcgcaaacagaaaaatattggcagcgcaattgacccatggacaggtgaattagataacaacccctacgtccctgttaaatatgtagaaacaaaaacagacaaagagtttaaaataagtgacattaaatcgcttttagataaaggagcaaaggtaatattgacaggtagttttggttcagggaaaagcaggtgtttaagcgaactttttgacaattattcagagcaacctgatccatcatactgttttgttataaatttaagagaaaactggagcctcaagagagctaatgaaattgttagaaggcattttgaagatttatcgttccctcctgaaatagtaaataactctgtaaaactattaaccttcaaaaaatcagtatttatgcttgatggttttgacgaaattggttctcaaaactggagtaacgaaccaagcaaactaagtaaagctaaacaagatgctttaactggggtgagagatctaataactaatgttcaaggaggattactgataacaggaagagaaaactatttcaatagcgattcagagatgttctcatttctgggcttaaatgagaaagatacgatatatataaaatgtaaagatgcatttagcgaagatgaaatgaaagaatacatgttaaacattggatgcccagatttaattatacccccatgggctccgtggaaacctctcatatttcaaatgatcgcaagtatatcagagagattagcattattatccgaagataatgaatacgagttttgggatagattattagactttatttgccatagagaagcaaatatcaataaagcaattctagattcaaccataattaagcaggtattaatagagctagcaaatcttaccaggacaaaaaataatgattttggaccaataagcaataatgagcttagtgttatttttaataatataacaggaagaacggttactgatgagtcagcaattatgctatcccggttaccatcttttggacgcgtaggtaatgatagctctgattatcaatttatagatatgtacatgctcgatggtttgagagcagagtatatggtcgcacattatgactccgattcaataataaaaaaatcaaactggataaatccgcttagagaatttggtcaaagattgtttttttataagattgatattaatgaagcaactaaaatagtgagcaaaatatcttattggtcaaactctaactcccaagcagcagctgatttactttgtgcattcctctcagaagaagagagcgacaaattagtcgactttcgcaatattcaaattaaagattgcttcatcgaaaaaatagatttaagtagtattcctttgggtaacttgagtattaattcttgcattatcgaatccatagatattagtgactgttttatcgagcctaaaaatagtttactcattgatgactgcgatataaacattgtatcaggggtatcagatgcttcggcacttcctaattacttcactaactgcaaggttagccaatttagctcagttaacaccacttcaaaaataaaatcgctaggttttggcactcatcaaatggcacttctttcatgcattaggcgagtttatcttcagcatggccgggggagaaaggagcgttccttcattaaaggattcaaaaatcagcaagaaaagaaagcaattacattgatagttgatctgatgctcaaaagtaatgttatcgaaaggattaacggggatgagggatatatttataaacctgtgaattcagaaagacatcggatgaccctaattatgaaagaaatgaacacatctaaagacaaattatggcaggaagtcagcaggttagattctctatattga

SEQ ID NO: 204009 - DNA, 1080 bp, Klebsiella oxytoca
atgaatatagggcatctcaattttttcaaggttaataagtgcggtttatacaaagtaaatgataacaatacctatggtttagaacttagcgaaacctttgacctcatacaggattgggtaggaacgaagtcacttgcacttacgataccatgggacccaaaagaaaagccaaacagatcaaagtgttactgcaaagatatctataaagatgaaaatactggtgatttcttaatcatgctttggaaatctgatactgatagtaccggttctttattaggtgcgagtgaagatggtgagattggaagctcatcagtagttaaatatacaaatagctacagagggaaaaaagttatctggggtcgaccatgcttttattgggttatccctgagcttgaaactatagtgtcgattaaatttgatcattcaatttgtgattctgaactatttcaagactatgtacattcatctattacaaatagagttaaacatagcaaaagagttaagaacaaaaccgagaaaggttatataagattatctaatactgatgacgatgatttatataaatatatgtacagatttgatatgaagctccgaagcttagaaaccacgcatactgagttaggcaaattgataccaaaaatcacgcacatagttcgtagagaaactattatcataaacccaaatgatgcacgagctgattggctaaagacctttagtactctcgtcccatttgtctccggaaagaaaaacaccagaacaagacagattgaaattaaggcagaagcgaaaccgtccttgaatgaagttaaagaaatcatcgaaaagtattcttctgaggatagagagaaacgactttgggacaatgtcgggtttgctacggataagggaataacttgggtagataaatatagaatgcgtgatattctcaatgttccttccgaagattattcaacgtattcagccgcatatatttacgaacaaatatcacacaaaagaaaagaattcatttctcctatattgaaagaatcaaaagctttacaatctcaatcaagaataaataaagcatctggagaggattga

SEQ ID NO: 204010 - DNA, 396 bp, Klebsiella oxytoca
atgcgcctggcggaatgcacgcgcggtgctgttgcaggtggctttcagctggtcacgctcaaaggccagcacttcggtcaggttgtcacattcctgcgccagctcccggcgggccacgcgttcgatatggccacttttcagctcatcggtcagcatggcccccccggcgcggaaagcggcgcgccaggtgcgggtgtcgctgccgttgtcctgctccagctctgctttctgctcctccgcgcgggtgatggccgtcagggtgtcctccatccggcgggcctgttcaagatgggcctctcgggctgcggccagtcgctccagcgccggtttcaggtaatcagggataaagggggtgtcggtcatggcaggtttcctcgtggtttcaacatgaggtga

SEQ ID NO: 204011 - DNA, 267 bp, Klebsiella oxytoca
atgcacaccgctttttcttccccgtcttctgcccctgccgcgccgctgatgccggtctctgacaccgttcaggagcgctttattcgcctgcccgaagtgatgcatctgtgcgggctgtcccgctccacgatttacgacctcatcagccgggaggctttcccgaaacaaatctccctcggcggaaaaaatgtggcgtgggctcagtcggaaatcaccgggtggatggccgaccgtatcgccgaacgcaaccggggctatgacgcatga

SEQ ID NO: 204012 - DNA, 396 bp, Klebsiella oxytoca
atgcgcctggcggaatgcacgcgcggtgctgttgcaggtggctttcagctggtcacgctcaaaggccagcacttcggtcaggttgtcacattcctgcgccagctcccggcgggccacgcgttcgatatggccacttttcagctcatcggtcagcatggcccccccggcgcggaaagcggcgcgccaggtgcgggtgtcgctgccgttgtcctgttccagctctgctttctgctcctccgcgcgggtgatggccgtcagggtgtcctccatccggcgggcctgttcaagatgggcctctctggctgcggccagccgctccagcgccggtttcaggtaatcagggataaaggtgttgtcggtcatggcaggtttcctcgtggtttcaacatgaggtga

SEQ ID NO: 204013 - DNA, 267 bp, Klebsiella oxytoca
atgcacaccgctttttcttccccgtcttctgcccctgccgcgccgctgatgccggtttctgatgccgttcaggagcgctttattcgcctgcccgaagtgatgcatctgtgcgggctgtcccgctccacgatttacgacctcatcagccgggaggctttcccgaaacaaatctcgctcggcggaaaaaacgtggcgtgggcgcagtcggaaatcaccgggtggatggccgaccgtatcgctgaacgcaaccggggctatgacgcatga

SEQ ID NO: 204014 - DNA, 195 bp, Klebsiella oxytoca
atggctacaaccctcaccccgtcacacccgcagtttgtctttgtgtttgccgccgttcgtcgcgcagaccgtcagccccgtatctgtatgctccgcgccgtcgccggggatgaacacgccgcacgcctttccctcgttcgcgactacgtcctctcgtttgccggtcgcctgccggtggcggaggtgcgcgcatga

SEQ ID NO: 204015 - DNA, 372 bp, Klebsiella oxytoca; identical to SEQ ID NO: 15273

SEQ ID NO: 204016 - DNA, 171 bp, Klebsiella oxytoca
atggtcttttctgaagaagagcagaaaacccctctctcccgcaatatgttattaattattgtggctgtacaattcatttgtccaactagattttttaattcgtcgccagatggaataaagtcaattttatttctcatttttgatattcctgaagttagaattataagatga

SEQ ID NO: 204017 - DNA, 396 bp, Klebsiella oxytoca
atgcgcctggcggaatgcacgcgcggtgctgttgcaggtggctttcagctggtcacgctcaaaggccagcacttcggtcaggttgtcacattcctgcgccagctcccggcgggccacgcgttcgatatggccacttttcagctcatcggtcagcatggcccccccggcgcggaaagcggcgcgccaggtgcgggtgtcgctgccgttgtcctgctccagctctgctttctgctcctccgcgcgggtgatggccgtcagggtgtcctccatccggcgggcctgttcaagatgggcctctcgggctgcggccagtcgctccagcgccggtttcaggtaatcagggataaaggtggtgtcggtcatggcaggtttcctcgtggtttcaacatgaggtga

SEQ ID NO: 204018 - DNA, 432 bp, Klebsiella oxytoca
ttgcgcaggcaggttagtgccggtgttgacctctttatacatatccagcggcgcattctgcgaatagcgcaggttgtcctcggtataggtgttatagacgccgcgggcgagggccgcttcatcgccgccgccggtccacacgcgctggcctttcttgcccataataatcgccgtgccggtatcctggcaggtgggcagcacgcctttggcggcgatgtcagaattgcgcaggaactgcagcgccacatacttatcgttatcgctggcttcagggtcgagaaggatctgcgcgacctgtttctggtgggacacgcgcagcataaacgccgcatcgtggaaagcctgctgcgccagcagggtaagggcctgagggtctactttgaggatctcctggccttcgaattcggcgatggagacgtgctctttgcttag

SEQ ID NO: 204019 - DNA, 720 bp, Klebsiella oxytoca
atgaaagaacatggaatgatttttaacggggaaatggtgcgggcgctgctcgacggccggaagacgcagacccggcggcctatcaaatggaaacagactcggttcactgaaattggtgagcgcgaagacggtagcaaatggctgtggagcgaagatgcagagcatgcttgcgacttctggcacccatgcccgttcggcgccgtcggcgaccgtatctgggtacgcgagacgtttcaggggccgctgttcgactacgacctaatggatagctattgcaaagaccccactccgtttgagaagcccgaattctgcgtttacaaggctgatggagtgccagcgccagagttttacgatgcagatgatgaactgcattgcagctggcgaccatctattcacatgccgcgctgggcctgccgcattctgctggaaatcaccgacgtacgggtcgagagactgaacgctatcagcgaagaggacgcacaaagcgagggcgttcataccgaggtatgggaccagacagtagtcgcaaggaattacgcggcaattgatgagtttttccaattttggaccgaggacatgccccactacgtagaaatgaatcaactgtatcggtcctcattcagaagcctgtgggaatccatctatggcgccgaaaactggcaagccaacccctgggtttgggttatcgagttcaagcgcgttcaaggtggtgcagcatga

SEQ ID NO: 204020 - DNA, 159 bp, Klebsiella oxytoca
atgaaacattaccgcgacgccataaccgtaggaaaagtgaagtgcatgtactccgtccttcatcgtggctggctaatgccatcaggtgaagtggtaagaaaccctttaaaggctcagcgcctggctgagctgatgaacagcaagaaggtggtggcatga

SEQ ID NO: 204021 - DNA, 609 bp, Klebsiella oxytoca
atgaacattgaaacggtaaacgagctcatcacctccctggagagtgcaggagagctgtcgatcaaagagcagaagtatctggacgttatgcgctgggcgattcgtgtggctggcgagcgtgatgcggcgctgaatgcagagcgtgtatgggaaaagaccatgatggaagcttgcggcgaggatggccctgcatcggtagccaacgaaattcgctcgttgcgggctctacgggatacggcaattcaggcgcttaagtctcaggttgagcagttggcggcggagaatgtggcgctgaaggatggtgtaaaaaaggctattgaggatatccagtgtttttatgattcttatgggtggcacgtatcggaagatggagagagcgaaacagcggtagttgcacttgatgatgcaaaaggcagcattgagcattttgcgttgagcgtaaaaacccccgccaccgatcgcatctatgccgggattaaggctgaaggggtggagcagtatgcagcgctatttgctgacactgtgaacatggagcgggagcataaccagcaattccacaaaggtaccctgtggttcgccaagcagctgcgcgaggggggcgacaaatga

SEQ ID NO: 204022 - DNA, 1929 bp, Klebsiella oxytoca
atgaatgaaattaccacagataatgatatacatataagcatgagcactaccttccccgataacattgagggattacgtgatatcatagctaatgacagaacacaaactcacattaaaggagcattatcagctggtgatggagggggaggcctatgggtgtttaacgcgtccgatttatcatatgaagttacaaattaccctcatctattcatagcaccaaacactgataaaacaggtaaatcaggcgcgtggagtcttgatattgcagatcgcatcaatgctatacagcttggtgtcggcttaaaaggactagatacttcagtagacatttctgacatgattaagccaaaaaaaccaagaaatccaaatgatataaatgaagttattgcatataacttagaattaggtaaatatagttctgccattttcgcacggcaagcagtagaagcagcagtttttaacaaatctgtattggacgaaatagtattctgggcaaacagtaaatattacattcaactccccccgcgacctatatatattacatatttaaaatatgagggagttgtacctaaattcaaaggaacttttgcaacaaacagacaacaaggtacaatgtttgttacctctgatgctcttagtaccgaacccgttttcaaagtaacctccaggatggacatacctgaaaatagagtgactggtttattcatggaggatatatccactgtttctatggatttcttttcagttccaaactacaacacctttacagataatcgttcaataagaacatgttatgatttcaatttcgccggaacacaggtacatttaaacagactttacgctggtgggtttaaacgagggttgattgctaatgagctctgggatggattcattggagaaatacggattctttattgttccgacccaataggctctgtaccagctgttttctttggttcgaaaaacaatgacaacactaataatcttcaaattgatcacttacacgtcgagttctccccttggtcgcttgagttgggtttttgcgaacacgtaacatttaacgtagtaaaatgtgagagttatcgtattattgatgcaactaattacatagtaaaaataaacgcagaagcaaccaagctaaaaataaattcacttcatgtcaccactcaaaatgcaactaaaacacatgcaatatatgatgctggacagtttactgaaattaatacattgtggtgttctggtggacaaagcttagaattcccctactcaggcattcattggtattatggcgcatctttaaccaattcaaagaaagttataaagaacgcccatatgaatcaaatatatgcggctgatggcaccgatccgtccgactaccccattattttagcaaattatcaacgtttcgatggaactttgcgtgtatctgattcatatagttcatcaaagggtacatttgctaatatcaatacagggctaatagcagtgggtacacagtgtgaaatatcagacatacatttaatagtgggctccggtgcaaaatatgctggacctgtattattttttaagggagatgggtctaatgtggtacggataacacagactgcaggcaataaaatcttcagacttgccggcggaaatagctttaataattatattggtatgtttggttcacaatttcaatcctccagcgatgaagtgatatatacttatggtaaacgtatcgttttcattacttcaccaactaaagtatcccaattttatggtatggttggagacttagtgactatcatttcaaatgtcgaaggaagctttctagtatatagtccagataaaatcatcactatcaatggttccaccttagcaatgatgaaaggagtgccttatacatttattatgactgcaaatggaacgtcagcacaaaaataa

SEQ ID NO: 204023 - DNA, 1752 bp, Klebsiella oxytoca
atgagtgatttatctactgatgaaaatttacgtgaagatttaagttcaagcgaagaaggcaaaggaacttctttggtggcccatcgcattagaacaatacgggagggacttgatgatgaagtgagtgtactagacttcgggccggcgaatcaatttggtacagccatgatggctgccattgatttcgtaatgtcacatggaggtggaactatttttgttccaggtcgttcttacattcttgacactactattgaaaagactcttacagctgatatccatattaggatgtcgaatggagcgaatgttaatatcaataaagctatggatatgtactcaattacaagtggtaataatcaattcataattgaaaatgggaaaacaactatcgctatatttgaaacggaccacactcatgcagtagtgagactttcaggtaagactctacagcaaaacataaagataataggtcacacttttcggcgagtaaataatttcaatttaggttatttcgtttatggcgtaggattaaatgctgcagagttccttcaaaaccatataagtgccgcagttgtaccataccatcttgaatcctcggcagaaaatagcagctcaagacttattgcaaatgcaatggaagcagaaataacaggcaataaaatatataatgcctttaacgttattgagattataaacaagggttactacggctgcgaaggagtgaggattaagaataatattctggtttgttccaataatgccattactgttatagccgattcatctcttcggtcagcatatatgcctccggtgcttcagattataggcaatcatattaatgcatatcgagctttatatgcagaaaaaatatcgcgcctttttttcatccaaaatgacatacaagctaaattcaaggcaaacgatgcaatacttggtgttattgaaatctactccactcaaggatgggctataactaacaatgtattttctgctgtttcacaagatgcttccgccaagtcaaacattaaccctccaatatacttaggcaaatttgacccagccctcccaaatgcttatggaacgatcgatacgaatacattttggcttgacggcatggtcgaaaaagtaattaactttgattcactagatgcatatgtaggtcagagtataaaatacggcgtaaacaccgcccaaacattgggtgcaataattcccagagcatatagaagtaaaattagtatagcagaaatgaatagccttactgcatatgatgccgcagaaggtctggcatattcctcgtcagattcaaattataactatgatgtctatcaaggaatcctttacatcaaaggaaaatctcctgcacgaaacatccatatcattagtacggacgttttacctgatggttctgtcattaatcagataatagctgaaaatacttatggcaaacaattagtaataaggctaacagccgctgaagttaccatagttcatggagaaaacttaattgtgccagatcagagaaccactaaattttggttacccacatatattatcgcggaatttttaaacaaccaacaatgccaaataattgctacaagtggggtttccgctcgacatattgtatcttcaaatcctacagttggtgccagaggttcagtgggggatgaattttatgacgcacagtcaggtttatggaaaagatattttcctggagttggctggcgtgtgattcccaccatggaaaacaaataa

SEQ ID NO: 204024 - DNA, 369 bp, Klebsiella oxytoca
atggacgcgctgcttatagatgcgctcgtcaatctggaacagcacgtcaccggctttaacctgattaaaatcctgaaccttcacctcggtgatataaccgttgacctgcgggctgataaacgtggtttgcccgcgaacgtaggcgttatcggtaaactggctttcacgggtaaacggcggcagctgccaggcgtagagaataaccagtacgccaacgatgccaatggcggcggcggtgaaaatcgagacgatgcgaatattatttcgggtgttggcctgctgtttggccgcatcctgctgactcataatgactccagagtaaattttatttgctacccgtcgcgcgtttcagcgcgatgcgggcggtaa

SEQ ID NO: 204025 - DNA, 576 bp, Klebsiella oxytoca; identical to SEQ ID NO: 113387

SEQ ID NO: 204026 - DNA, 480 bp, Klebsiella oxytoca
atggattcactggtcgttccgggtcttgatacattacgtcaatggctcgacgaattgggcatcagcttttttgagtgtgattcctgccaggcactgcacctgccgcatatgcaaaatttcgaaggcatttttgatgccaaacttgacctggtggataacgtggtgcttttctccgcgctggctgaggtcaaaccctccgcgctgttgccgctttccgccgatctttctgcgattaacgccagttcgttgacggtcaaagctttcctcgatattcaggacgataatctgccgaaactggtggtgtgtcaggcattgaccatcggcgtcggcgtgaccctcgaccagttcgcgtggtttttccgccagagcgaagaacagatttctatggttatccttgaggccagcgccaatcaggtgctgtataagtccgaggaagaagagccggtggctgagaatattcagtaccattttcttcactaa

SEQ ID NO: 204027 - DNA, 183 bp, Klebsiella oxytoca
atgaccttaaatgcaaaacaagtggttaacggcggctataaatgcgggttcctgaaactgttcacctgcgatgccggcttactgagcggcaataaactggtcctgaatacttctcagcgatatgcttctgaagtgggtggcgaacagtatttcaagttaacggaagttaacaccaccaaataa

SEQ ID NO: 204028 - DNA, 231 bp, Klebsiella oxytoca
atgcctaaaattaaatcacttgttgtgagctctaagattgaggttgcgtccagaaaaacatgctgtaaacacaataagcaacatgtgatttctaaaggagagtttcgtcttagtgtgaaaaaccccactcaaggtgaatcatactattgtatcccttgcgctaaagatatggttgaacagagtaaagctaagctcgaagacttagagcagcaacttagtgcttttgactaa

SEQ ID NO: 204029 - DNA, 1779 bp, Klebsiella oxytoca
atgtcatttgaaaataaagatatttcagcaaatgaaaaactaagaaggcctcaggttgaagcatttaataaaataagagaacattacagtaatcaaggggggagtgagattggtctaatacttcctgttggttgtggaaaatcgggattaatatctatcactccatatgcaactacctccagccgtgtgttgataatagcgccaggtagaaagataagagatcagctggcaaaagatatgaaatttagcgaacctgataacttctatctcaaatgcgatttttttaatgcgatcgatgaatatcctgaagtatcaattattgaaggtggaggtaagacgaatattcatgatatcatggccagtgatattgttgtttcaaatattcaacagatagcaggcgatgataataagtggcttgaacaacttggtgaagatttttttgatctaattattgttgatgaggctcatcataataaggcaagcacgtgggttaaggttaaggagaaattccctctagctaaagttataaattacagcgcaactcccatgagaagtgatggtcagttaatgagtggtgaggttatatatagtttccctgttgttgaggctatcagagaaggatatataaaacgcctacatgcaaagatgataagcccttcgaagttagtttatatagataataaaggcaatgaaataacgcttacaagtgctgaagatattaagcggctgggtgaggaagaggcatcttttcggcgcggagttttaatgtctgatgaaactctcagtacattggttgagctttctattaaagaactttaccgattgaggctagagtctggagaaagccgattaaagataattgcttcagcgcttaactattctcattgcatacaaattaaagaagcattcctagctagaggattaagagctgattatgttcactcaaatgaagatggaactgtaaatgagagggtattcgcgaaactcgaaaaccacgagcttgatgttattatccaatctaaaatgcttggagagggctttgaccataaatttctttctgtggctatggttggtagcatctttgctaatcttagcccatttgttcagtttgttgggcgagtgatgcgagtagtcaaacaaaacgcccctaacgatttagttaataggggggtagttgtatttcatgttggtgctaatattgcaaatagatggagtgactttagaaactttagtcaagccgatcaggaattctttgcggacttgttaccagaaatagacgatgtagaatttggcccggatgggactagtgatagagatccagatggaactggtggggagcataagcttgttcctgtaaaaattacaagttccgatggtgtaattgcatcggaattagatccgattggcgatgtgcaagagttaaagaaagagcttctagctttgggtattactactactgaagctatagatatcttacgaaaatctcgtttgagtaaacaagaccaaagacgtgcaggaaggcaagcgattaatgatttagtcaatcatcatgcaggtttattgcttggccagttgggctttaaagctaaaggaagaaatttcaatagatctcaagacaactattcatggcttgtgaaaacgcttcatacaaaaattaatgttcatataggatgtgaaagtggagacagagaaaatcttaatttagagcaggttgaagaagctaagagaattattcccattattacggatgaattgctgaaggagttgggcaatgcctaa

SEQ ID NO: 204030 - DNA, 1059 bp, Klebsiella oxytoca
atgctattcgacgaagataaaggtcctcggctaagtcaagatactgaggcactcatcagcaacggactagattttttgaacaaggcgcgtgaggaacttcaggcgggacaggctaaattctcggttgtgagcttctgggctgctgttgaaatcctaatgaaagtacctctggtgaacgagcactggactttggcctgctctggcaaaaaaatggagcgtcgaaaatatctggcaggcgactttcagtcagtaacatatgatgaggcctgtgcccgtttgggtgacgttctggaaaaaccgcttaataaaaagaccgtagctctcttcaacaaggtcaaaaatcaccgtaatagggttgtccatttctatcacaacgagctcagtgaaggggatcagttgcaagtactggctgagcaagctgacgcttggtttgcgctgaaccgtcttatgcgtgaagactggtcttccctttttggccgggaaatgagaagaaaacttgcagaagatgagacgagaatgctgcgtatcagtgaattttatgcaggagcaaagttccgccatgaatctgtgcagcaagaactagctgccgagatcaaggttggaaattctgttagtgagtgttctgtctgtggatatgttgctgtattgaagcagatgctgataccagaaatccgtctttatgacacaacctgccttgtatgtgataatcaggatttatatttggacttggattgtccggattgtggtaaagcagttgtgatgaaaaccggcgacgatgattttaaatgcgacagttgcggttatgaatctaggcgttatgaagcgttcaatccaattcctgccgatgaacgaaatgaattcgattcggcatgttgctcaaactgtttacgcattaactctatatgttacttcaagtccctgtatgacaactttatctgcacgggttgttttaatacttatgaagttgtggagcaatgtgaacgctgcttacgctggagcacggatgtacctgcatgcagtttaaatgaggggtgcatattctgtggtactagcaaatag

SEQ ID NO: 204031 - DNA, 1425 bp, Klebsiella oxytoca
atggcaaaaaaaaagattttaactatcggtttcgaattatgtgatgaagaatcagaatatagcccatttgacaatgacatatctctgttagattgggatatcattcttttgagacctgacatccacgattacatttatcgacagcaatcaacttttaaaggaaatccatgtctttcagataacgaatctttcaaactcaaatcccaatctgagcattggcgtcgggagataaaatcagccattcagcatggtaaattagtcattgtttttttatgcgacttcaataaattatatatagcgactggaaataagaccacttcaggcacaggacgaaatcaaaaagtcactagaattgtcgatgaatacgataattataaatgcatacctgtcgcacttaacccaattaatgggaaagggaaggagatgaaattatcaaataaaaactctgaaataatcctttcttattggaatgagttttctgataaatcaaaattcaacgtcacattgaatatcgatacatccattcccctaatccttacaaaaagcggagatatggaagtggggtcgttagttaggaatgaaaaaaatgcaggcgcgataatgtttttgcctgatatggatttttatgaagagagcttcataaatgatgaagatgaatggactgaaaatgcattgacattttccgccaggctcatcaaggaaatagttaaaatttcaaaagtggttcattcgtcaagtgagataacacctccgccagaatggacaaacgctactgaattcaaattacaaaaagaaaaaaccatcaacgatgagcttataaaaatagagcaaaaacttagtgcgattcagcttcaaaaagaagagcttcttgataaaataaaaggaacaagtgaattgcgtaatttattattcgaaaaaggaaaacccctagagaaagcaattcatttggcactaaagacaattggctttcaagttagtaactttgataatggcgagtcggaatttgatgcagttttcatatcagaggaaggacgttttattggagaggccgaaggaaaggataataagccaataaacatagaaaaacttcgacaaattgctttaaatatccatgaagaccttaaaagagatgaagttacagaacctgccaaatcggtattatttggaaatccttatagagttcttcccctagaggatagagatgaaccattctctagtaagtgtatttcatctgccaaagcaagttctacagcattagttttcacaccagatctattcatggttgctaaatatctgagtgacaatcataataaatcatttgctaagcgctgtagaaacgcaattttaaaaaccactggtcgagtagtttttcccgccctccctaagaaaaatgaacctataataatcgaaaatgctgtagagtag

SEQ ID NO: 204032 - DNA, 156 bp, Klebsiella oxytoca
atgagactttatctaaaattatttaccatccctctcctctacgaaatagatgtagaagagaagggggggcaacaactactctacagcattttcgattattataggttcatttttcttagggagggcgggaaaaactactcgaccagtggtttttaa

SEQ ID NO: 204033 - DNA, 1218 bp, Klebsiella oxytoca
atgaatgccacccattccgaggtcaaattcgacagcaaaatgatgtacgtggacgcgtacgtcaataaagcgaccggaatgctggtgggtccttatagcagctacggtccgggctatgattacgtcggcggtaccggctggaacagcggcaagcgtaaggtcgacgccgttgacctgttcgccgacggcggctacgacctgtttggtcgccagcacaacctgatgatcggcgccagctacagcaagcaaaataaccgctatttcagcgcctgggccaacgtgttccccgatgagattggcagcttcaataactttaatagcagtagtttccctgagaccagttggggcccgcagagcctggcacaggacgataccacgcgaatgaaatcggtatatgccgcgacgcgtttttccctgcttgacacgctgcatctgatcgttggcgtccgctataacaactggagtatcgagacgctgacctacaacatggagaaaaaccataccaccccctacgccgggctggtttacgacatcaacgacaactggtcggcctacaccagctatacctccgtgttccagccgcagaacaagcgcgatagttccggtaaatacctgaccccgattaccggaaacaactatgaagtgggcctgaagtccgactggatggacagccgtttaacgacgactctcgccctcttccgtattgagcaggataatcttggccaggcgaccggcgggcaaatcccgggcagcaacggcgaagccgcctataaaaccgtcgacggtaccgtgagcaaaggggtggagtttgaaatcaacggcgcgctcaccgataactggcagatgaccttcggggcgacgcgttttgtcgctgaagacaatgaaggcaatgcggtgaaccctaacctgccgcgtaccagcgtcaagctgtttacccgctaccgtctgccggtaatgcctgagctgaccatcggcggcggcgtaaactggcagaaccgggtatataaagacaccgctacgccgtacggcaccttccgtgcggaacagggcagctatgcgctggttgatttgttcactcgctaccaggtcactaaaaattttgctgtgcagggtaacgtcaataacctgttcgacaaaacctacgacaccaacatcgatggttcaattgtctacggcgaaccgcgcaacttcagcataacggccagctatcaattctga

SEQ ID NO: 204034 - DNA, 543 bp, Klebsiella oxytoca
atgcgctggtatgtccaggcttcgctgaatcaggtgaacgccgcgcgcgccctgttctacccgagctttgatatcaaggcgttcttcggcgtcgattccattcacctggataaactgttcgaaaaccgcagcaagcagatcaactttattcctggcctgacgctgccgctgtttgatggcggacgcctgaatgcgaacctcgagagcacccgcgcctccagcaacatgctgattgagcgctataaccagtcggtgctcgacgccgtgcgcgatgtcgctatcaacggcacgcgcctgcaaacgctgaacgatgagcgcacaatgcaggctgagcgggtcagcgctttccgctacacccaggccgccgccgaagcggcctataaacgcgggcttagcagccgtttgctggcgaccgaagccagactgccggtgctggcggaagagatgtcgttactgatactcgattcccggcgtgtagttcagagtattcagctgatcaaaacgctaggcggcggctaccaggcgccggtagccaaaaaataa

SEQ ID NO: 204035 - DNA, 690 bp, Klebsiella oxytoca
atgaaagtccgatttatcgacattatgatgatctttgatatagaaccttgtgattgtaacgattggcctgcaccaggaatgaccttaaaggaagatggtatatgggtaacacctccttcagaaataaacaaagagataagagattcgttaacaaaagaggagcttcatgatttaattgatcatccaacaggagattacacaaaaccggccatttctattccatgcgaacgagatgatttagttgattttcttgttgatattgattttttcggatttggattaatcacgaagatagaaaaagaatgtgaagatatcgaaagactcgaaattaacgaaagcggcaatataaaaaaagcgaaagaaaggtatgcggggcattataaaaaggaaatggataagcttcgggaatcgactagaatagaattaaaaaaacagataaatgactattttccctccgcaagtaaaaatggagaagataaaaaaaccagcatggctcaatatcacgaaatacttattcttaaaaccattacagatttaggacatgaaccattgaagatctaccaagaaaacggcaagcagggaatcaaaaacgaagtatggaacatactatccagtgagttcagccgcaaggaaacttttgaatatcgatggaaaaacatgagaagcaaagggaaaatcaaaaatcaataa

SEQ ID NO: 204036 - DNA, 888 bp, Klebsiella oxytoca
gtgttggattttaaagaactatctaaagatggccaagatttagagttacttacccgagaaatattgtttagtctaggtcacagagtttattggagcggaagaggccctgacagtggaaaagacttggtttttatagaagaatataaaagtatttttgcgccatcatcaaaaaaatggttagttcagtgcaaacataaagctgagagttctaatgctgtaggtactggtgagttagatgggattttagacagttgcgctcaacatgaatgtgaaggatacttgctcgtgacatcaacgtacccttcatcaactgttgcgggtcgactggaggatattactaattctccaaataatcgcattaccgctacctactgggattctgtaaaaattgaacaaatattatcaacaccggatttatgggtaattgcgcagcgttttttcccaatcagcacacaaggttggaaaatttatgcaacagaacgtccgaataattgggtagctaactacaaagggttctatttccatattagcaatcgcattggctcggatcacatgtatcaactagaatatatagaagaaaaagttgaaaaaattataaaatcatcagacacattaccagacaaacacttcttcagattaagaagcgtatactttgatgataaacatggaacttatacttggtatattgattacatgcacccacatggaactccacctgtaaaatcaccaacaggggattatgatttcttcttctctgaagaatggaatgaaaattatgacttcaagacgacaacttatttagagcatagtgatcattatgataaagatcattatgattattatgatccacatgttggtcaattcattcttggcatgaaaagattttga

SEQ ID NO: 204037 - DNA, 570 bp, Klebsiella oxytoca
atggtgaatcaagtgacgaacaataaaatacaagagataagtgagaaattaatagcttcatattggtggaataattccactcataaggggaacctcggagaaatgattgcaattcatcatttcgaaatcacaaaacaagcttttattcatgtaaatcaagattcatggtcttatcctcctgcaatggaagcactgggggctaaaagaccagattttttcctgctaaatagattcaacatttgcaaaatcattgatgttaaaatgcatgctttagatgataattttaatttcactctacctaacgatgaaatagtgcaatatattcaactccacgaacacttgatgtcggttttgaattgtcaatatttagacattaattttgaattctttgtaatacctttaaactctcaggaagaaagttttgcaacagtatcctttcaagaaatgattgattcacagaaagaagtaactttatcctctggtcaaggtgaaataaggtcattcaattattccgtatcaattaaaaatcggttaaaaccactttttaaatcggttaaaaccactttttaa

SEQ ID NO: 204038 - DNA, 252 bp, Klebsiella oxytoca
atggctggaacacagcatacccaaacttaccccaaatttacatggttgttcctagcaacccccaaatgtcatgcggatgtttgtccggtagttgtccgttttaatgcggatacagaagaaaaagctcgcggcgcgttccctggttggaatcttgttttcgctgcgaagatccgttctgaatgctcactctatcaatatgacaacgggacatttgagttgaatattgctggtctggaggtgctacatgcatag

SEQ ID NO: 204039 - DNA, 1707 bp, Klebsiella oxytoca
atggcggtggaaaaactgattgttgaccatatcgacacctggaccacagcgcggcaaacccgctccacggcggggcgcggcagctcgggtaagattgacctgtacggcattaagaagctgcgcgagctgattctggagctggcggtgcgcggcaagctggtgccgcaggatccgaacgatgaaccggcgtccgagctgctgaaacgcattgcagcggaaaaagccgagctggtgaagcaggggaaaattaaaaagcccaagccgctgccggagattagcgaggaggagaaaccgtttgagctgccggaggggtgggagtgggcaagattaccacaaatatacatccctcagtcagaatcatcacataaagttaagtcatctgatattatagatgaaggccgtcaccctgttattgaacaaaatgctgagtttatatctggttactctaacaactcagagctattaattaatattaacaatcccgttataatatttggcgatcataccagaaatataaaatatattgattttgattttatcgtgggtgctgatggtgtgaaaatactttcccccgtcattattaacgaaaaatatttttactggcagcttaagtcttttaaaattgaatcaagagggtattctagacattataaaatgttaaatgagaaattattttctctaccacctttatgtgaacaaatccgaatagtaactaaggtcgaagagctaatgtccctctgcgaccaactggagcagcactccctgaccagtctggacgcccaccaacagctggttgaaaccctgctaaccacgctaaccgacagccagaacgccgatgaactgaccgaaaactgggcgcgtatcagcgaacatttcgacacgctgtttatcaccgaagccagcattgacgccttaaaacagaccattctgcaactggcggtaatgggcaaactggtaccgcaggatcccaacgatgaaccggcctctgaactgctcaaacgtattgcgcaggagaaagcgcaactggtgaaagacgggaacatcaaaaagaaaaagccgttgccaccgattagtagcgaggaaaaactgttcaaattaccgaaaggttgggagtggtgcaaacttgagtacattgcaaaaaatgaagagaattctttaaaagcaggaccattcggttccgctctaaagaaatcaatgtatgttgagaatggattcaaaatttatggacaagaacaagttatttctggagacgaagattatggtgattattttatcaatgaagataagtataactcattaatctcttgcaaagttcaacctaaagatatgcttataagtcttgtcggaactattggaaaggttctgattttatcagaaaaatgcaaaccaggaataataaaccctcgattagtaaaacttagcctttatgacgatatatctcgagattatgtcaaatatttgctttccagcccattaatacaaaaaatgctttttgaagatagtcatggctccactatgaatgttcttaacttagggttgctaaaaaaattagcacttccattacctccgattaaagagcaatttgagattgtcaaacgaatccatttattaaatactataattgataatttaaaatcacatattaaatccgcccaacaaacccagctccacctggccgacgccctcaccgacgccgccataaattaa

SEQ ID NO: 204040 - DNA, 222 bp, Klebsiella oxytoca
gtggagaaagaatcgagaaaagtcctgatcagcaagaaacagttgctggcaatgatcccgttgtgcgagcgcacgatctacaactttgaaaagcagggaaaattccctcggcgtattgctcttagcagccgtaaggtggtctgggatttgggggaagtggaggaatggattgatgcgtgcaaggggaccggcccggctccccggcccggaatgggggcctga

SEQ ID NO: 204041 - DNA, 744 bp, Klebsiella oxytoca
atgtccgttgcctgtggcgcaaccgttgaaagcagagcggccggtggtgacttggtagggcttgcacctgcgaaagctggtcgcgtcgtctatttcgctggagaagacccggaagtcgcactggtgcgccgtatccatgccatcggtcagcatctgaaccagcagtcacgggaagtcatcgcgcagaacctcacccttgagccgatcatgggtaagcgcttgaatgtgatggatgagcggcaccttgcccgcgtcattgagttttgcgccggtgcccggttgatcgtgctggataccctgagccgcattcacgacagggacgagaacagcaacggcgacatggcacgacttgtttctacgctggagcacattgcggcgtgtaccggggcctcagttctgtacctgcaccacgttagcaaaggtagcgcccgagaggggcagacggatcaacagcaggcagcacgaggcgcatccgctctaatcgacaatgcccgctggtgcggcttcgtcgcaaagatgaccgaggacgaggccaagagcctgagcgaccgctcctatgaccgtcagcccatcgacaacgaccggcgcggcttctttgtccgttttggtgtcagcaaacagaattacgacgctactccgcacgaccaatggtatcaacgccgcgacggcggcgttttgctgccggtggagttgttggacgttaagcaggacagcggaaaggtgcgtcaacgtgagcaagcatga

SEQ ID NO: 204042 - DNA, 900 bp, Klebsiella oxytoca
gtgagcaagcatgacttgactcacgcccggcacgacccggtgcattgtctggcacccggcctgttccgtagcctcaaacgtggcgaacgcaagcgcagcaaactggacgttgtctatgactacggcaatggcaagcgtatcgagttcagtgggccggaaccgctgggggccgacgatctgcgtattctgcaaggactggttgctatggctggaccttgcggtcttgtgctttcttccgatcctcagacagaagcaggtcggcagctccggctatttctcgaacctaagtgggaagcggtccagcaggatgcgatggtagtcaagggtagctatcggtcgctggcccgtgaggttggctatgcggacatcgacaatactaggccagtacgcgattgcattgagaggctctggaaggtctctatcattgcgcaaaatggaaggaagcggcagggcttccgtttgctatccgagtacgcaagtgatgagcaggaaggcaagctgtatgtggcattgaacccccttattgctcgcgcaatcatgggtgggcagcacatccgcatagatatggccgaagtaagaaagctacagaccgaccccgcccgcctgattcatcaacgtctatgcggctggatcgacctcggcaagtcggggcgggtagagctggacacgctatgcggctatgtctggccggatgaaccggcgaacccgaataccatcaaaaaacgtcgccagacggcacgcaaagcgctggccgagcttgctgccgtgggttggaggctggacgagtatgctaagggaaaatgggaaatcaggcgacccaatgcatccgagtgtaatgccgcgcccccctgtttaacggcacctaaccccctgtttaacagtacccaaacccctgtttaa

SEQ ID NO: 204043 - DNA, 189 bp, Klebsiella oxytoca
atgactatttcgaaatggctaatcgcgttgatgtgcgccgggtccgcactgaccggttacatggttgccgtggtggttcaaagcaacatcgaatgtactgcgatggctgagcaacaacggcaacagcgtgacgctgatgcgtcgtttgaggcgcgccccaacactcgcggcggcgtgaaggggtactag

SEQ ID NO: 204044 - DNA, 795 bp, Klebsiella oxytoca
atggaaatggaatcgcgaaaaacgtcagcttatgtcgctcgggtatttggccgtggcgcagcgctagctgtggcaatggcaaccacaggccttggtgtaggcctctacatcacacctgcaccggcttacgccatctactgctctaactgctcgacgttctatcaacagatgttcgagtacgccgaacaggtcaacacggcgctgaacaccgccgagcaactgcaaacgcagattcagcagtaccaaaacatggtcactcagggcacgggcctgcccgattcgatgtttggcagcattgcggctgacttgaaaagcgtggtcaacatctacaaccgttcgcaggccttgggccgtcaaatccagaacatggattcgcagttcaacacggctttccccggcttcgattcctacctgaatcaagcagcgaactcggcagaggtcccggcgcaggatcgctatcaaaagtggtcgcaacagggccgcgacaacgtgaaaacggcgatggaagcggcaaatctcaataccagcacgttcgagcctgaagacgcccagcttgctcgcatggtggcccgttcgcagtcagccgtaggccgcatgcaagctattcaggcgggcaacgaaatcgcctcgcagaacgtgcagcaactgcaaaaactgcgggatctgatggccacccaaatcaacatgcagggcaactacatggcccagcaaggcgaccgacaggccgttagcgaagcggctgaacagcagtttgaagcgcggaaaaacacacgcggcggcgtgaaggagtactga

SEQ ID NO: 204045 - DNA, 366 bp, Klebsiella oxytoca
atggagaaaaaggagaagcacacccctcgacggaagttgccgcccatcaaggtgtgggtgtcggaggacgagcgcgcagagatcgaggacaaggccaggcaaactaacatgtcattgtccgcctatctgtccgctgtaggccgcaacaggcccattcgatccgcacttgacctgaaggcggttgcggagcttgggaaagtaaacggcgaccttgggcgggtggcaggcttgctgaaaatgtggttggcagagaaacgcgggcatggtgccccggcagcggacgttgatgcattgatgagggagtttcgtgagctacaagggaaagttttggctgttatgagcaatgttgtttatgaacggagatag

SEQ ID NO: 204046 - DNA, 864 bp, Klebsiella oxytoca
atggaagataaagatttccctgccctctatcggtctgctaatgaactttcgttaaagtcgcagtcgcaatttttcttagctttaaggtgccatcttattaccttggttctcgccgcattattatcaatagtaagctttccacactggactgtagcagccttgcaggtctttgctcttttaggagctttggcgtgctctatctatttgtttagtgttaggccagaaaagctttggtacggtggcagagcggtcgcagaatctataaagacgataacttggcgctatgtgtgtcgagctgaaccgttccagggagacgatgaaagcgctcggaaagattttcgtctgacacttaaagcaataattgaacaaaatcgagaggtttgccgggcgctcactgaccaccttgaaggtatccaagtttctcctaagatggagcagatccggtgcgaaacattaagtaaacgcaaagaaatatatgtgaaaagcaggattggagatcaacatgcatggtatgccaacaaagctaaattcaatcgtaggagagctcggtattttttttgggttctgataacggtcaataccttcgctgttgtttgtgctgtggtgcgggttgctaacgtagaggtgcctttttggccaactgatgttttcgtagcagcggctgcaagtattttaagttggatgcaagcaaagcgattttctgaattagcggcctcgtactctttaacgtctcacgagatagggttggtaaaagaagaagcgaagcagccaaatacagatgaaaagttttctgtatttgtgggggatgcggaaaatgctttttcccgagaacatacgcaatgggttgcaaggaaagatgcgtag

SEQ ID NO: 204047 - DNA, 840 bp, Klebsiella oxytoca
atgtttaatcttattatgagatcggttgagtgggactctgggcaagaatcgatggagattggccgggtttttgaatatacggatagccacatatctcaaatttttagagaaaataatattccatcgctggatagacttatagcccttccgtgtctgtttatgcaagaaggaacgcgggatgaggttgcttacgttggtcaaataaatagagcaagaatagtaggtggtgatatatcttttgagtattcattagacagtgaggtgccagttattcataactcatttatatacaaaaatagaatggcacttgatatgccaaaggattttgagttctctaggaatcattgggctgttaaggatattgatctttatcgatttttgcttagaacggttaggccgagacgccaacggcctacggtatttcagatttcagaacatgagagcattgaagcgatgctggtctctgtaatgatgccatttgatgctgcttttaatccggtctacaacggtattcagttggccgcagaaggggctggccttcgttgtcgtcgtgccgatgatatttgggagaatccagccgtaattcaggatgtagttgctttaatagatagagcgcgtgttgtggtgtgtgattgcacaggtagaaaccctaacgtcttttatgaggctgggattgcgcatactctgggtagagaagtcatactaatagctcaagctgagcacgacataccgtttgatctacggcatctacgatttattcgttatcatgcgaacgcgcaaggaatagccgaattgtccgtggctttgcaggcacgaattcaaaccattgtcggtcactaa

SEQ ID NO: 204048 - DNA, 195 bp, Klebsiella oxytoca
atgaaagacagatcacatgacaaggccatggtggagtatttccatgctattccttcctacgcagcggagttgcttgccgaagttcgcctagacggcgacccggctgaactggctattttgctgcgtcagacggctgaggcgttcggccaggacggattgcgggtagtttctcagacgaggaaggagcgcgaatga

SEQ ID NO: 204049 - DNA, 1038 bp, Klebsiella oxytoca
atgaccctgaaattgttaatagatacgtgtgtatggctcgacctcacaaaagatccccgccaccttccgctgttggatgccctatccgcgatgagcgaggcagacgaagtagtactcgttgtgccgcagattgttatcgatgaatttgcacggaatcgcgaccgagtgatggccgcgagtagagccagcctttcgagtcacttcaagagggttcgagaggcaattatgcagttcgcacctgaagatggccgtgaggctacgatccggcagctaaacgaagtggatcaccgcgtggcgactggcggcgaggcagtaaacgaggcggtagacctcattgaaaaactctttgccgactctcagcctgtgcccgtaagtgacagtattaagctgcgtgcagctgaccgagctatcgccaagattgcccctttccaccgtcagatgaatggcatgggagatgcaatcatcatcgagacctacattgatgctctggctgcgcgtcagagtgacgacgtgttcgcgttcgtgactcataacatccacgactttagccgtcagggagcagatacacgtttgccacacccggatttagaagcccttttcgatggcgtgagatcgagatattcaaccaacctaagcacactgctcagcgaattcgccagcgaattgatcgaagaaaccaggtttgagcgcgaatacagtcaagctcctagacagctatccgagttgctcgaagcagagcagaaactgactactcaagtttggtacaacaggaagtggaacatcatcgctaacgtcgaggatggggaagaaagggtggtggctaaggaggagtgggacagagctgcgccggaagagcggcggaagcttgtggtcgattcgatttgggagggaatgctagctgctatgaggagcgcggaggaggaactcggcgcggaggcgctggggccgtggactgacttcgagtgggggatgatcaacggcaagctgtctgctatacgctggatgctcggtgacgagtgggatatgctcgatacgtaa

SEQ ID NO: 204050 - DNA, 189 bp, Klebsiella oxytoca
atgaaagacagattacatagtgaggctatggctgagcttttccgtgccagcccagactacgcatctgaactgctggtcgaggttcgccgcggcggtgacccggcagagctttccattctgctgcgacaggtagtcgaggcgtttggggaagactttgcaactctgacttttgcgacgaggcaaccatga

SEQ ID NO: 204051 - DNA, 699 bp, Klebsiella oxytoca
atgacgcaagtggcttggaggcgcgacggcgtgccggtagatgccgcttccattccgggcattgagtgggaggccttgaaacaggtggcacagctaggtgacttcatgatgccttgctgcaaggcgccagcggtcctcaagacaagcattaacggcttggccttcttcgcccatctttcggatgagtgcgataccgcaccggaaacgaagtggcacaaggcaggcaaggcagcagtgatggccgctttaacaagcatgggcatcgagagtcgtgacgaggtgccgggccgatctacgagcggggacaagtgggaggccgatgttctcttctcggtttcgggtcgcaccatcgtgatcgagttgcaacgctcttaccagcatctgcgcgacttcactcgtcggcaggagcgatatgctgcctcgggtgttgaatcttactggctggtccgcaaagagacatttctgaccttgggaaaggccacatcgcgacttctgctaaagcgtgacttcggcaacgtgtttccgcctggtggaatcggtacaggtatgctgcctgagttaccggtagcgatgttggagaccgagggcgagcaggtggttcagttcggtgggttcaagactgcgactgtggcggtgtggctggctggcatcatagatggcgcattccagtatcgtggcggatcttggaatcttggttga

SEQ ID NO: 204052 - DNA, 414 bp, Klebsiella oxytoca
atgacaactgatatcaccgaactggcgcagagcctgaaagcggcggcagagagcgttattaaacattacgacagtgaatggtttgaggcaggacatcagatttgcaccgttcacaagtcaaagataaatcttattagtctggcaaaccctgccaacgttctcgcgctggtagaggcgctggagaaggcgcaggagacagaaaaaacacttgaaagccgaaatcgtaggcttgatgggattatcactgctgcagagaagcgcatcgccgagctggagtcacgcaccgtgaagctgccagacttaaggcagattgtatctggggacagatatgtctggtctgatggcgtttataactacagccaggacgtaaaggtagtgctggccgccgctgacatcaaggtggaggctgagtga

SEQ ID NO: 204053 - DNA, 612 bp, Klebsiella oxytoca
atgatcgatgcggggtttttgcgtgcaaaattaggcacaaaggataaaccaatcgatgcggaagtaatcaaagcatttgtagaaaaattaacaaaaagacctgagctggaaggtatgattttgcatcgtgtttattattacgatgcagaaccgcttaccggaatacagacgcatcccattagcggggagaaaattgacttctctgaaacagatgtttcaaaaagaaataaagttatgcttgatgagctgaaaagaacacctttttttgctgtaagacttggggagacaaactttcgaggttggaaagttgacccatgggctttaaagagcagtgactccaaaaaatcatccattaatgcctacaatgttaagcctaatgttcagcagaaaggcgttgatatgcgcattgcattagatatgtcatcaatgtcattaaaaaaacaggccgatatatatgctttggtgactggtgattccgattttgtaccaattataaaatttgcaagaaaagaaggccgacagatctttttatacactctgggacatggcgtcaagcagacgatgtatgaacattccgatttgttagtgccaaattccatggataaattgtga

SEQ ID NO: 204054 - DNA, 1434 bp, Klebsiella oxytoca
atgatatcgatattggaaaaaatcggtaaggctatatgccactcacgacatttatctgaccttgtgatcacagaggaccagcaggtgtctatccataagctttttatttccgccacaatggatagtgaatcccttgatttatggggagaaatagtggatgtacatgcggaagatctcaagatcgtttttatcgatgagagcagagatgttattcatccgagagagggggtcccagggcagaagcactacattaccatcacttataatgaaattccggggatactgaggctttttaccttagaaggatggcgcacttttttacttcaagatagcaaactctgtcggtacaaacatatttatgggctgtttattactgaaggctttcagacaataagttggtatgtgcatccatggaaggagatacagccggtgagtgctggtgatgcaacagctatcactaagccttcagtaacaaaaagtatcatcaaatgttattcaacaacttttcttcctccagatgccattgccccttggatacttgaaacttgtagtgagaagattgatgaagcaatcaagatatggaaattgctaggatgccgagagttgctgaaatgttttgcaaatgaacttttttttgctgacgaaatgatggtggggcttgcggaaaagcctcccagaaaaatagcattcggcgatgagacggcagcgttacctgcttttgatattatccaggaagcggcaaagtggatttttctagaggggaatgaaactgagctgaaacatacgtttttgtccagcgagctggctagagagtggccttcagacctgaacttttgtgagggagtgatgcttcgactctcatcagctttggagtctgcacggttaatgtataaggcccatatcaggactggtggtaaagatactatgaaatccttaggtgatttgcggaaaacgctggctgaagatacacaaaagatcattcagcaatcccgagatttgtcctcttccttatggaaagatatggctcttgtaattagtgtcttggttattcgctacagtctggatgcagtaaaatcagttggtttgcaaaatatttatgctttggttttttgtgctatcgcggtttatatagttatttcctatggaatgtctgtctatattaataggcaaacaatttcattgcttgaaagagttagaaccacctggagaactaaattatacggatttctggatgagcaggattatcaggaactggctagacaacctgtaaaagatgcgatgggatcatactgccgtgtggaaagaatgacttctactgtagtgatcctcttagtggtcattctgttaattgctgcatgcagtgagttttggtcaatcagcacattttacagatcagttcacgcttggttctctgagctagcatcgcccctgtag

SEQ ID NO: 204055 - DNA, 789 bp, Klebsiella oxytoca
atgaaaaagattaataagctagatgagccaaatcgacttggtgtgttcaaggctactcatcctaatgctttgtgggagagggataaaaactcaattgaagaggctttccgttgttgcattgccagatatcaagaaactctacaacaattacgtacggaccaaggtaatttatgtgcatattgtgaacaggatttaatgtctggaactaatggggcattagatgactgccgtattgagcattttcatccgaaatctaaacgtgaacagggagaacctaattgggctttggaatggagcaatttgttagttgtttgctgtggcggaaatcaaagtaaagttgttaatcctgggcaaagatttgatgctgatcccaaaaattactcttgcgatgtaccaaagagtgacaaaattttagataccattatattaaatccacttaatttacctgaattaaatatctggaagtttcatcgttcttcggggcaaatttccgtaaatgaagattcctgtttagaatttggtataagtgttgaaatggcacaccaaacaattaaagaattgaatttaaattcccctcgattaattagatttcgaaaggctattctaaataatctcaacactttaatcacagaaaggctgaagaagggacaaacggtagagcaagctgttagatttattgccatatcactctttagaaaaaatggagcaggtgattggccctctttttttagtgcaacacgatattatttaggtcagcaggctgagcttgttttagcccaacctatttaa

SEQ ID NO: 204056 - DNA, 2538 bp, Klebsiella oxytoca
atgataaatgaccatgaagaactagaacttgctaaagctcaggcaaaagaaatatggaagatccttgattatgttcgaggagcatcacctatatctaattatcgctcattagcgtattcaatcttcttcgtacgctatcttcaatccaatacaggtcagcattttgaggcagaaaggttcgactcttttaatgtcatcgcccagtattcctacgatcttgtaaactatgccgttcaacttggattgattcatagcgacgtatctaaattcttaattgattatttagaaaacacactccgttcatttgtcaatattgatgagtcttttgttcgttatgcaattagagatggtctactcaataaaacccctgcaatagcgtcgctttctttatcagaactggatttactttttgccgagaatgaaggtaagtcaggaggtgagttttatacccctagagacgtcaacttattggttaaaatattaggattgagttatcaaccaaagtcaatatgtgacccatttgcaggtgctggaaacacagcatttccttttgccaatactggtattgaaaaagttaggattgatactcaagaaattaatagagatgcttactttaaactagtaataagtagagtcatcaggaaaatagaaggtcgagactatttcggcgattccctatcacaaccattatatcaagaaaataaatatgatctgatagtttctttcccaccttttggcatgaaaattcctaaagccactcgaaataatatttactataaaacaagtaataagtggctggatattactgaaatcttgccagaaagtagaagtgattggtttataacattatcaatgcttccagccctttctgaggggggtaagatactagtaggtatgtcacttggggctttgacaagagcaggctctgaggcaaaggttcgtgagtatttagtctctcgcggaattatcgaacaagtaattcttttacctaaaaatatttattactctacggctatctcaactgtacttcttgtcctcaactcaggaacaagtaacataaataacagaagtattaaatttgtagatgcttcactgttttacgagcctgcccgtggtcgaaacaccctcacaacaaaaaatataaatgagatcgtagaggcttgtcataaagatggccgatttagtattagttcatctcatacccaaatagcaaacagagactttaatttagatccgtctctttatgtacgtaaagatctcaaaatcagtgaggtttctttaaaaaattttagaggatactctggctttaaagtttcgatacatccttctttaaatgtattggttggtgagaacggcgtcgggaaaacttcgatattagaagcattagcatgtggccttggtcctttccttactgctatgcctgatgctaaaggaaaactgattaaaaaatcagatatccatataagttcaaaaggaatcgcaaattatgctcgaatatcgattgaaacaacatcaagtttaagttgggatcttgtggcaaagggggttgatgtttccgagccccctaagataggaacatcagcattaactagctacgctactcatcttgtagatagtcagtctgaatatccactcattgcttattatgggactaaccgtgctcttacttctaccagttctaaagttgcaataaatccattcgagaaagaaaatcgtggggaaggttatgactttgctttagatgctaaagttaactacggcatcttaaagaactggttttcaaaaatagaggttgatgagcttcgaaaacgtgatgaactaaaagaccataaattcattcatccggctaagagacttgtttcagaggctgtttaccagattgttgatcgagctacatgcttggagttcgacaaaaatagtaacgatgttatggttcattggaaaaatgagcagggagagtgcgtaaagcttacattggaacaactaagtgaagggtatagaaatatggtatccctgaccattgacctagtgaggcgtgcttatttacttaatcctaccaaaccgaaaccgctaacagttaatgggatcgttttaattgatgaaattgaacttcacttgcaccctagatggcagcaaaagattttaaatgatcttactaagctgtttaagaatattcagtttattgtcacgacacatagtcctcaagtcttaacaacaatcaaagccgattgtatccgtattgtttccgtcaatgctaacgaagcaaaattagtgacaggaactactacttacggttctgaaagctcaagaatgttggaagatgttttaggtggtaacaatcgcgcccaacatcttgatattgttaaaaaactaaaccgttatacggagttagtagaggccgacaaatgggataccgatgaggcattagaactcaaaaaagagttatataaatggggtggtcagacagaagacgagcttcaaaaattagaaactgatattcgaattcgcgagttcgagcgtggcaatgaaaaagattaa

SEQ ID NO: 204057 - DNA, 204 bp, Klebsiella oxytoca
atgttttctcacattatgcttggaaccaacaacctgccacgcgccattgcattctacgatccgttgatggatatgctggggtatccccgcggcggcaggaagaggagatcgcatggtggggcgttttcaacggtaataacactacggcactgggtatcagtagaccatttgataaacaggttgccacgacccgaaatggagtga

SEQ ID NO: 204058 - DNA, 3063 bp, Klebsiella oxytoca
atggatatctcccgccagtttattaacaacccgatccgcgtctggctgactattttgctgctgggcatcggggggatcttcgccctgctgaatattggccgtctggaagacccggcgtttaccatcaaaaccgccgtggtgatcacccattatcccggcgcgtcggcacagcaggttgaagaagaagtcaccctgccgctcgaaaacgcgctgcagcagctgccgtatctcgacaacgtcagttcgatctcctccaacggcctgtcgcaaatcaccgtcaatatcgcctcgcactaccactccagcgagctgccgcaaatctgggatgaactgcgccgccgggtgggcgacgccgcccgtcaatttcctcccggcgtcgcctccccgtttgtaaatgatgattttggcgatgtctttggcttcttctttgctatctctggcgatagctttaccaatcctgaactggttcgctacgccgagcagctgcgccgcgaactggtgctggttcccggcgtcggcaaagtcgccatcggcggggcgatccctcagcaaatcaacatcgatatctcgctggcgaaaatggccgcccgcggcatcacgctcaaccagctggcggctatcctcagccggttgaatgtggtatctaacgccggcgagattaaatccggcagcgagtcgatccgcctgcacccgacgggggaattcgccaacctcgatgagctcggcgacctgttaatcagcccgcacggttcgggaacggcgacgcggctgcgcgatatcgccacgctatcgcgcgggctgagcgaaacgcccgccagcatctaccatgccaacggccgccaggcagtcaccatgggggtatcgtttattcccggggttaacgtgattgatgttggccgcgcgctggagagcaagctggagcagatgtcggcggaaaaaccggccgggatcagcattgacctgttctacgatcaggcggcggaagtcgcccactcggtcaacggttttatcactaacttcctgatggcgctggcgattgtcgttggggtcctgctgatctttatgggcgtgcgcagcggcattattatcgccctgtcgctggcgctcaacgtgctcggcacgctgctgatcatgtatttgtggggcatcgagctgcagcgcatttcgctgggggcactgattatcgccctcagtatgctggtcgataacgccatcgtcatcgtcgaaggggtgctgatcgcccgccagcaggggtctacgctgcttacggcgataaattatgtgatccgccgttcggcgctgccgctgctgggggccacggtaattgccattctcgcctttgcgccgattggcctgtcgcaggactcgaccggggaatattgtaaatcgctgttccaggtgctgctgatttcgctcatgctgagctggttctcggcgctgaccattaccccggtgctgattaaatggtggctatttaaaaatcaatcgcagccggtagcgcaggccaacgccaacccgtacggcgggcgcttttaccgcctgtatcagcaggctctgcaagcccttctgctgcgcaaaaccctcaccctgaccataatggcggcgctattggccgccgctatctgggggttcggatcggtgcggcaaaactttttcccctcgtcaaatacgccgattttctttgtcgatctctggctcccgtacggtaccgatatcgcgaccaccgaaaagatgaccagcgatattgagaccaccattaacggccagcccggggtggtcaccaccgtagccaccgtcggtcagggcagcatgcggtttatcctcacctacagcggtcagcggcagtacagcaactatgcgcagatcatggtgcgtatggacgaccagcgcaatattaacgcgctgacgcagcatgttgatcgctatattgcgcgcaactacccgcaggtcaacgccagcacgaaacgcgtgatgttcggcccttccggcgacagcgccattgaggtgcagattaaaggtccggacccagaccgcctgcgcctgctcgccagccaggttggcgatattctctccgcagatccggctaccgatggcgtgcggaacgactggcaaaaccgcagcaaagttatccgcccgcagtactccaccgcgcttggccgcgagctgggggtagataaacaggatattgataacgcgcttgagatgaacttctccggcagccgcgcgggcttgtaccgcgagggagccgacctgctgccggtggtcgtccgccccccggccgctgagcgccaggacgcgaatcacctgaataacgtgctggtctggagccagagccgccagcagtatattccgctcagtaacgtggtcagcggctttcacctcgaatgggaagatccgctaatcctgcgccgcgaccgcagccgcgtgctgacggtgcagaccgatcccgatccgctgagcaaccagacgtcgggggatatcctgtcccgcgtgaagccgcagattgatgcgatcgcgttgccgcacggctacagcatcgagtggggcggcgatgcggagaactccagcgaggcgcagcagggtctgttcactaccctgccgctgggctacctggtgatgtttgtgattaccgtgctgatgttcagttcgctgaaaaacgcggtggctatctggctgaccgtaccgctggcgctgattggcgtaacgccaggcttcttgcttaccggcatcccctttggctttatggcgttaatcggcttgctaagcctgagcggcatgctgatccgtaacggcatcgtgctggtagaagagattgaacagcagaagcaggagaaaggacaacaggaggccattatctatgccgccacgtcgcgtctgcgcccgatcctgctgacggcgtttaccaccgtgctcggcctggcgccgctcttactggacgttttcttccagagcatggcggttgttatcatgtttggtctgggttttgctactattctgacgctgctggttctgccggtaatctacgcctgtttccacaataaggacatgaagcgacaaccatga

SEQ ID NO: 204059 - DNA, 123 bp, Klebsiella oxytoca
atggtgatgtcgacgattttaccgggtttgcagtcgaattgtctggctgtgcctggctctgtgatatttttcaatatattaattggctgcttaataatgttaaccgtggtgtgctacgtttaa

SEQ ID NO: 204060 - DNA, 129 bp, Klebsiella oxytoca
atgttgcagccattcagtttaaatagtgatgtattaatcatcgtggtgcaggtcacatcccgcttaatagggggccgcttggaaaacggaaaatatcctacgttaagcctgttttttgagctggcatga

SEQ ID NO: 204061 - DNA, 852 bp, Klebsiella oxytoca
ttgtccggcggcggcatctactgccggagccgcctgctgttcggctttacgcgctttcgctcgggcgatagcggcctcaacggcggctttgcgcggatcggcggctgccggttgtccggcggcggcatctaccgcgggagccgtctgctgttcagctttacgcgctttcgctcgggcgatcgcggcttcaacggcggctttgcgcgcccgcgcctcggccttgcgggcttcgcgggcggcaatggcttcgctgttatccggtttggcgccggagagcacgataatcggctgcgccgcgtcacgctgtttttcacgcacccgggcaagggcggcgttaatggcgtcctgatctttcgccgcaggctggaccgcggcctgcttatgacgttccagacgcgccgctttatcgcgctccaggcgagcctgacgcgcctcaaagcgaattttggcctccgcggcgcgtttctcttcttgcgcgatcgcggagatctcggctttctcctggcggaagtactgcaccagcggaatattgcttgggcaaacccaggcgcaggcgccgcactcaatgcaatctgcgagattatggctggtggctttgtcgtgctgctggcctttgctgaaccaataaagctgctgcggcagaagatcggccgggcaggcgtccgcacaggcgctgcagcggatgcagcctttttcctcttccggctcgcccatttcgctcgccgacggcgccagcaggcagttggtaattttcacgaccggcacgtcgagccacggcagggtgaagcccatcaacgggccgcccataatcaccatcgggtcagcgctcgggcagaaaccggcatcctttag

SEQ ID NO: 204062 - DNA, 237 bp, Klebsiella oxytoca; identical to SEQ ID NO: 100949

SEQ ID NO: 204063 - DNA, 459 bp, Klebsiella oxytoca; identical to SEQ ID NO: 100948

SEQ ID NO: 204064 - DNA, 414 bp, Klebsiella oxytoca; identical to SEQ ID NO: 101011

SEQ ID NO: 204065 - DNA, 261 bp, Klebsiella oxytoca; identical to SEQ ID NO: 101017

SEQ ID NO: 204066 - DNA, 273 bp, Klebsiella oxytoca
gtgcatggccagctgagcaatcagcttagagacatgctgcggggtaaagaactcaccgccggacttacccgcattggcggcataattggatatcagaaactcataggcatcaccgaacaggtcaatctgatgggcatcaaaatccccgagagccagcccctcaacccctttcagtaccgcagcaagccggatatttttctctttaacggtactgcccagccggttactggtcgtatcaaaatcagcaaacagtcccttaatgtcggcttctga

SEQ ID NO: 204067 - DNA, 1137 bp, Klebsiella oxytoca
atgaatttctattcagaccctgggcaagcgctgagtttgattcaagcgcttttcaaacaagagaaatccccattctcaggtcaggatctagatgcattcatgtctgcgacactcgaagaacctgatttgtcagaaaagggtgatcacactcgttggaagcgccatctttctgtttttcaatgtattttatcgcgagcaggttatcctgttccttcaggactaaaggtagaagtacctatcccacaagcccttattaagcagatgaatacgttccaacgctcgcaagaaaaccctgaggttgttcctcctgcgtctgacaaaatatctccagctgaagcttcagcatggtttgagcagattcgaatgatcaacctcagtttgcgggaacagcaggcagaaaaaggaatggctacaataggattacaatcctccacaccaggaaattcttgggttgatccactacttgagtcaatgctgaatatgctggcccgtgaaacaagcaggaaacaatcatttggtggctggcgtgcaatacaaaaatatcgctcttaccactctcctcgtcgtgttcaagatgtcacgacagaaattgtgcagtatctcgattctggcaaaattgtaattctcgatttgtcagctggcccagtagaaatacgaaaggtcttgtctgagaggattgctagacaaatttttgaacgccaaatggaagctctaaatcatggaaaaataccgcaaaatatagtgctttatgttgaagaagctcataatttagttgggaagcaagctaatcttgattcgacatggcctcgtattgccaaagagggcgcaaaagcgagaatagcctttgtgtatgcaactcaggagccatcatctgttcatcctaatatcttagccaacacagaaaattggttcgtcactcatctaaacaatgatgacgagctgaaaacattaggaaaattctatgattttaaggatttcctaccatctcttaaaagtgcccaagatgtaggattcgcgcgtataaaaacactatcagccccatttgttattccaactcaaattaaaagattcactccggatgacatcaaggcgcagatatcacagatagtcggacataaagataaggtaggtttctaa

SEQ ID NO: 204068 - DNA, 489 bp, Klebsiella oxytoca
gtgtttagtgggatcattatcgccagtgcgatcgtagcgaattttatcaaagacccgacttcaccgcgttttatctggggtactgtcccgatacagcttgctggcttgctgactttgctggtcggcaacctgctatggccacacgtctggctatggtcagtactgggaacgagcttttatgccctgggtattggactgctctatccggtgctgtttcgcttcacactcttttctcataacctgccaaaaggcaccgtttctgccacgctgaatattctggcgctcggcataattgcccttagcattgaaataacccgctgggtttacttccatgccggcggaaggattgctttccatggcgcggcgctgctggccggtatagccgtcatcatatcagttgcccgcctgcttaaactgcgtgagcagcatcagagccagtcagaatcactggattggcccctatatttccagacactttttatcgcttaa

SEQ ID NO: 204069 - DNA, 747 bp, Klebsiella oxytoca; identical to SEQ ID NO: 101006

SEQ ID NO: 204070 - DNA, 516 bp, Klebsiella oxytoca; identical to SEQ ID NO: 101005

SEQ ID NO: 204071 - DNA, 2493 bp, Klebsiella oxytoca
atgattttcgccctgccggacagtgtgacttacagcaaaacggggatgttatttggcgggaacctggttgccaaaagcacagactttatctcgcagaacccggaaatcaccaccctgttctcagactatgtgcagaactgcgtgatgggcgatatttttctcaatcataagtattcccttgaggaactgctgaactcggaagacccctacacgattattttttctaaccccagcccgcttcgcggcgtttttgacaaaaacaatcagtttaaaacctgccaggaagcctcccgtgatttgaaatcagccctggcgctggatacccagaccggcgggaagacctggagctactatgtgcgccagttgtttgggggtaaacctaacccggacctgctgttcagccagatgatcggtgacagctacagcttcttctacagttcggggcagaatgcggggcagattatccgccagaacgtgacgatgaatgccctgcgcagcggtatccagagctacgcagcccgcagtggcgatacggccagcctggtgaacatcgccaatacttcgtcgctggaaaaacaacgtctggcccaggcgacaatgggacatcaggcgctgcgttctctgcccatgatgcagacggtgatactgggtattatgtttggcctgttcccgataatggtcatggcggcgatgttcaacatgatgaccatgcaggtgctgaagggctacgtctttgccctgatgtggctgcagtcgtggcctctgctgtacgctatcctgaacagcgcgatggcttactatgcgaagcaaaatggggtgccggtggtcctctctgagctctctcagctgcagctgaaaaactcggatattgccaccaccgcgggctatatctcgatgatgatccccccgctcagctgggcgatgattaaaagtatgggggcaggtttctccagcgcctacagccactttgcttcgtccggcctcagctccacgtcgcaggcctcctccagcgtggtggacgggaattattcgttctcaaatatgcagacggacaatgtcagcgggaacagctggagcaccaacagttccaccgcgtttgggcagatgtcccggcagctggcgaatgggggcatgcagacacagacaggtgacgggacgacgatctgggattcgcgctcctctaagctgccagtagaaattaacgtcagccggcaactggccagcgccaatcaacagatggcccgggaatccgatgttcaggcggaaagcgcactgcatggctataacagcagtgtgacgagtgcctggaacagcctgaaacagtttggcacaaatatgggtaccagtgcatcgacgacgagtggggccgacaatactgagtcttcacaggattcaatggccagaagtaaaatgtggagtgctgttgtttctaatgcaaaagccaacaacatcagcaatgaagagtcattccagcagttgatggatgactcctctaaaagaactcaatcctttgatatgcatgcatctggtaaatggagttccggggaccagttgtttggcaagcttggtaagtggggcacgggattatctgctgaagttggtggtaaaggaagcgctggatggggtcacagctcaggtaatactgataatgttagctcttccggtcgggaatcacatgacagccggcatgacacgagcagtcaggcggcgaaagacttcaaggaagcttccgattactttaccagccgtaaaacgaccaactctggcaatattaccgataacaatgccagctctcgcgtggatcagtttgccgcatcactttccagtgcgaaaaacagctacgaccagtatacaaacagccgtacacgcagccatgaatacagtgaaatggcttcacgtactgaaagtatgagcggtcagatgaacgagaatctgacgcaacagtttgcgacttttgttcagcaacgtgcgccacaggatgctgaagccattttgaccaacaccagttctccggaagtcgctgcgcaacgtgaagccctggcacgtgaattcgtcaaagagcaggttgagccaaagattgatggtgcataccaacaggggcgagaggccattggccagaatatgtctggtgtatcaggcggtggcgatcgtgccacggtgatggcggattacgggcataattctggaaatattgagacgatgacccaggatgcggcaattaataataatgtgaaacagacagtaggttcgatgatacacaataacaatcaggctcatcaacaaactcaacatgaaattcaggggcagggaggtgaagttaaaaagcagcattctgatcttgaaaaaagccataatttggaaggaaataaattcgaaaatgaatataatgaaagaaagagtgaagtcaaatcgctggcaggggctgactctccacgcgagttagaggaaaaggcagttaaccttcaaaaggattatcttgacgggaaaaggtga

SEQ ID NO: 204072 - DNA, 237 bp, Klebsiella oxytoca; identical to SEQ ID NO: 148995

SEQ ID NO: 204073 - DNA, 513 bp, Klebsiella oxytoca
atgactaaagtaactgtcgattatccttcttctatctcccgccgtaagctttcaaatctgttcaatcactctccgtttatgctgtctcttatccatgacatgtgtgactctcaagctattgttcttgcggccatgtgtgaaggtaagtgcgttacaagtgcggggaatcggattgaggcagactacgaagtaactaagctagcggctgtcattgatgttctagaaaataagttttacctgcctgtatcgcgcgtgaaaattcctaccgcgtcggatactggaggtggaaccatccaagctaaatatcttattacggaaaatgatatgcagctgttgttggaagacccggaatcagtggttttgatgagggagcgattggctctttctaaacttaagagtcgagatgaacgctgcttgaagcgtttggtgtccgttcatggttatgatgaagtctttcgaacgctccaggcattagatgtagctaatgattcttttggtcgagattgcgggtaa

SEQ ID NO: 204074 - DNA, 627 bp, Klebsiella oxytoca
atgaggcggttttgtactgtactggttttgttaagcatggcttatttcattataggtggtttatttgcgtatttaaataaattggaactgccaatttatttaaatgggatggctgttgtaggttttgtaatgactattgtttgcatctattcattgtcgaagcctgctattacacagtcagatttagaacagcttgaggccacttcattagagtccataactaagactattagtgagttaaaatccctaaaaacgaataaaaactcaactcaagaagaaatcttagatcttgagaaaaaaagaaaggaaatggagcttttagtaaagaaagccagtatggcattgtttttccgtgagcaacttaattaccatgaaagacgtatactttcagaaataaagggaagtgaaaccctcaaccatagtttgtcagagataaaagaaataaaaggcaaacttaaggcattggatgaagaaattgcatgtgatccagaagttgagtttctgcgttcaatacttttggaagcaagcaggcgaacgccaacactcgatgagctaacagagggtatgccatttatatttagaattatggctcgctcaacacagttaatacttgggaataagatataa

SEQ ID NO: 204075 - DNA, 675 bp, Klebsiella oxytoca
atgagagcatataaatttaggtcggcttctcaaatagcatttaccctagatataatttttaatcgtaggcttttttgctctgactggaaaatgttgaatgacccaatggaagggatgtttgttttctctcatcaaacatctgatggttacgactataaaaaagaaattcagcagataatagaagaaaagaaacggcttaaggtttgttctctttcagctacatatgagtctcatttactttgggctcactatgctggggggtttgatggttgcgctatcgaaattgaaatcccagacaatcatcacagtattaaacaaattgaatatagaggtgtatttgcaaatttagcaatgcccaatatttctagtcctgatgaacttgctaaccaagttttatcctctaaatatcgagaatgggaatacgaacaggaagttaggattttgcaaacgaatgagtggttttacttagataaaccagttcgacgagtaatagcagggcatagaatgccttcggcattatttgaagccatgaatataatatgcaactcgatggggattgaattttgccgtactggaattggtgatgaggggattgatgccgattatgttgagccctcaaaaattctaacgccgaataatcatcttgactggaatgtactaaaaaatgaccgatga

SEQ ID NO: 204076 - DNA, 516 bp, Klebsiella oxytoca
atgtttagcgacaacagcctctccgtcaacagggttttattttcccggatcaccgaaattgctttcagcaacagcgatgtggtgattgtggagtcagagctgaaaacctgcgatgccgggcgtctcaaacacctgcacatttcaccagtcaatatcatctttttattaaaaccgcggtcaggaatgaggggggcagatcgcgaagcggtattcattgataccgaattaacaggtaatgaatatctcatgataaggcaggtttttaaaaaaatgcggattcatctgaagagggaaaagttggcgtttaccaaaagagaagcgcatatcatccatctgattttaaatggctactcgctggtggaaatttcccgccgcctgctaatctccataaaaacggttcagtcttatgtcaatattattttgcataaactgaatgccacaaaaataagtgaaatataccgttgcaaaagcctcatcattgacagctttgtcaggaaaaatttgcatcttcaatga

SEQ ID NO: 204077 - DNA, 432 bp, Klebsiella oxytoca; identical to SEQ ID NO: 144880

SEQ ID NO: 204078 - DNA, 753 bp, Klebsiella oxytoca
atgcgaacaatacatgccgccatgctggcggggtgcctttgctgcgccctgatgccagcctgggcgaaagacgcgggctggcagtggtacaacgaaaagctgaaaaaaccggagccggatacgccgcccgcgcctgcggctccgccggcccgaatggacattatggcaaaactcgccgaactgcagagcgccaccaaacgttcactgtatgaagccattctgtatccgtcgtctgacaatttcgtgaagtatttccgtctgcagaactactggacgcagcaggccggtctgttctcgatgagcgcgaagaaggccatgctggaaaacccggagctcgattacaacctgcagtacagccactacaacggcaccgtgaaaaaccagcttgcggccgactacgccgagcaacgcaaggcaatctcctccctggcgcagcactatggtgtgatgtttttctaccgcggccgggaggccattgacgggcaactggtccaggtcatcaaaaacttccgagagacctacggcctgagcgtgataccggtctctgttgacggcgtggtgaatcccctgctccctgacagccggatggaccagggccaggcagagcagcttggcgtgaagttcttccctgcgatgatgctggttaacccgaaaagcggccaggtgaagcctctcagttacggctttattagccaggacgacctggcgaaacagttcctctacgtctccagcgactttaaacccaatttttaa

SEQ ID NO: 204079 - DNA, 138 bp, Klebsiella oxytoca
atggcccggctgagcgggtcgacgaacagacgatgccaggagcagttcgcttccacctgcagcatgaaagaactgaaccactgctcttttgcagagccgaaactgttaatcatgtcctgctccatctttgagaactga

SEQ ID NO: 204080 - DNA, 495 bp, Klebsiella oxytoca
atgccggcgcgcggtccggtaccctttctcaataaactgccccactttttcgtttttgaaatcgagcagtttccagccttcgtcaatgacgttgagctttttcaggctccggggggactggtacatccggttctcgatatagataatcagcgagaacatgacggcaatcagcagagacgggcgcgattcaagtccccccagttccagcaccaccatccgggcgtcatcgcgcagggtgggtttgtccgagttaaagtactccccgtaaatcccgttcaccgtgtactgatcgaggagaataatcatctcgtccaggcggctgcggatggtcggagagtcggcatattcctcactgtctttggcgctctgcaggaacgccaccacatcatcgatgcgggcatgcgtccctttgctcagccaggccgcctgcacagcctgcaacagcaggccttcgtggacctcatccaggttaccgttcggactggccatcactga

SEQ ID NO: 204081 - DNA, 612 bp, Klebsiella oxytoca
atgaacagactggtcaggtccaccatttttttgttttttattctaataatgccattttcaaacgccgcaagcagagaggaactcgagaagctgtattcaatgcagatgcccggcactgtcattcagtgtaagagaacagatgaaacgttttttacaaaaataagaatgatttcccggtatacggttacggagcaaagtgaaaataaaacaaaaatggatgggcgggttgccatgtacgccaccggtctgaaaacgttacgatttgaagctgaatttaaagctacccggacaatgctggatactcgtgatatgtgggaggtcgaccccgactcgctggttatgaaagtatcaggtgaggatgcaaaacgctttaaaaataagggaggggttgattttttcagggataatagcaggttaaactatgacgatcactctgatattcgatttactacctaccccgattatattatcggggaggatgaccccggattctttacatcaaaaggcgcagaggaatgtaccactcgctttgctgacagttttcccgcggggaaaaccgggctgaaggtgaaggaggataacagtaataaggaacacaaccatgaaaattaa

SEQ ID NO: 204082 - DNA, 216 bp, Klebsiella oxytoca
atggccaccaccacggcaaccgacctgatgaaatccggggattctaccgttaaaggcacgttcggtaagtcttccagcgtcgtcaagtgggtggttctggctgaagtcgtagcaggcggcatcatgtacatgatgaccaaaaatgtgaagttcctgttcggcttcgccatcatttcgacctttattaccatcggtatgtcggtcgccggttactga

SEQ ID NO: 204083 - DNA, 315 bp, Klebsiella oxytoca
atgccctgcgggtcccagagtgatttcacgtcatccagcgtgccagcgtgggtaacggaagaccgtgaaaatgccagtaacagcagcgtcgcgacgccagcgttaattatcttcaggttgcttttcacgggctttctcctgtttttcagcgtcagcaatgagagcattgagaatgcggtaccctccgaacacgaccatgcccagcccgaatatttccccggcctggacggccagctcaggctgcttccttaccagccgggcgataaggtggaaaaatacgcccacggccagcacccacatcccggtaatgtctaa

SEQ ID NO: 204084 - DNA, 159 bp, Klebsiella oxytoca
atggcgccactactatcccagaccatagacccatcccgggtctgggtacccatccccccattcgccagctgtcgggtcatctgcccaaacgcggtggtgctgttggtattccagctgttcccgctgacattatccgtctgcatatttgagaacgaatag

SEQ ID NO: 204085 - DNA, 273 bp, Klebsiella oxytoca
atgaaagtatcaggtgaggatgcaaaacgctttaaaaataagggaggggttgattttttcagggataatagcaggttaaactatgacgatcactctgatattcgatttactacctaccccgattatattatcggggaggatgaccccggattctttacatcaaaaggcgcagaggaatgtaccactcgctttgctgacagttttcccgcggggaaagccgggctgaaggtgaaggaggataacagtaataaggaacacaaccatgaaaattaa

SEQ ID NO: 204086 - DNA, 213 bp, Klebsiella oxytoca
atggacagtgtcagtcagaaacagctgtcagaggcgcagtccaaagcgctgtcggagcggtttaacagtgcgctggagcagagcctggcggattaccagctacaacatcatgtcctcatcctggtctcgccggcggtggttcagggcgctcccgatgtgacccggacaatccagacggacatcgcccgccggatgaaaggaggccgcgaatga

SEQ ID NO: 204087 - DNA, 978 bp, Klebsiella oxytoca
atgttgactgagttccattttgatgaagagcttttatcaagtgatgaaataacatccgaagtatcacatgctctgaatatatcatttttagagttttggtttgaaagaggatgttttgtttatccttattccaatcttgtgaattacaaagagtggattcagtatattcatccgaaatatattcagaaatggcaggcagcgttcacggtaaatttaactagtgatatgttaactggttataagataattaatgaacatgatgagttttccgcattaaaaaaatcatgcttggataatggaattgatttggttcttgtttcaaacggttttggtaaatttggaatcaatgcaagcgtcgactttattagtaatgtaattgatattgcaaaggtgagctcatttttatcaactccaattgttcaacgtaataaatccctacttaataaagggattcttcccggtgaaaatattgaagatgtatggagagatcaatttttaaaagtcgcaaaacactcaaaaaaaataacgataatagataggtatttcggtaagaatttatgcgaggatatacaaaatcaaaatgcgtcaaaattaacttgcttacacaaattcattgaccttttgtctattgcaaataaaaaattcaatattaatattattactgctggggatgttaaggactcgcaaatgcatctggaaatagagaattattcaagacgtttattacaaaaggcagctattaaaaaaatagtggcatcattaagtatatcatcttgtgatgacgcggtatttagagataactcccatgaaagatatatatgttttgagtcttttgtatataaggttgatagaggtatgaaaatattttcaccttatccgcaagtagcaacctcaattactatgagcagaaatgttgcaggctccaccttcaatcatgcgttgcaagcattaatgaaaaaacgtttgtgggtgttttaa

SEQ ID NO: 204088 - DNA, 1404 bp, Klebsiella oxytoca
atgttcacacaattgaagattgaaaattttaaagcattctcatgtaagcaagaaatagagtttgctccaataactttgatatttgggcagaattcatcaggtaaaagttctattattcaatcaattctggctttaaaacaaactttattgaattctactagtaatgctagcctcattacatgtggtacttgcatagatttgggggggtatttatcagctgttaactcgcacgatccagcaaaagagattcaattagagttctcttttgttaataatctgccgtcaaaagaatataatgatgaatttttagaatatcctgtttttgctgttacagatatacgcaatgtaggtctgagttatagctattctaaagattttggcactagagatagtttccttaataaattttcttattttgtgcagaccccggggactaggcataaaaaaatagagttaaatatcaaaaaaggagtttcaggttacacaaaaacactagatgagacatattatggcgatcatgaaacttttaagtctttctattcgtttattacaagggtgaataataaggccattggaaaggatttggagccaattaatagagttatatatgaggcattagagactggtgtatataaggtaaggaaggatatagctattccattgatgctaagtggcaatgtaatggttaatatccctaatggctatcttcagcgcatttcagaggaaataaaatatgaatttaatcaagttaaatacttaggccctttgcgaacgcatcctaaaagattttatcaagcaggaaaagatattgtttctaagactaaaggtgaaaccaatttagggggggagttgtttgaagcgggtgaagaggtaattactgaaattaataagtggttagattcttttgaaatatcatatgatataaatgttgaaaaccttggtaatgaaacaacaggagatgtaatctctgtcattttaaatgacaaaagatcaaatactttggtaactcctgctgatgtcggatttggcattggtcaggttatgcctattataacagaagctattgcatctaaaaatacaacaatatgtgttgaacaacctgaaatacatttgcacccaagattgcaagcccatcttgcggatttatttatcgactcagtgaaccctaatggtaaaaataatcagtggattatagagacccatagtgaatctttaatgctcagaatacaaaaaagaattcgtgaaaaaaagattgattatcgtatggttaaggtattttatgtaattccggattgcgatggttctcagataatggagttgcctctagacagtgatggagattttaccgtccattggccagaaggcttttttgatgaaaggcttaatgatatttttggagcttaa

SEQ ID NO: 204089 - DNA, 1470 bp, Klebsiella oxytoca
atgtctgtttctaaagaggaagtcggtttacgttctttgctgaaagagctggtttcattgccgaaagagactgagtgggcagaatttaagcataatgcaataaaaccagaagaactcggagagtatatctcggcactggcaaattcggctgctttgcttggaaagccaacagcctatatggtgtggggtattgatgatgagactcattctataattggtacggattttaaaccctctttcgctaagcataaacagcaggagctggaaagctggctgttgcagggtctggaaccaaagattgattttacatttcatgaattttcgtcacctgagaatgatgctgttgtcattctggagataaatgcaaattgccatactcctgtgcgtttttcgggaacagaatttattcgtattggctcttataaaaaaccgctgggtaaacatccagaaaaagagcgtgccctctggcgtgtttttgatcggaaaccctgggaataccgcgtagcacgggacaagtgctctattgatgaggtgttgcagttaatcgactacccatcgttcttctcgctcttatctcaaccgttaccagaaaacaaagattctataatggattaccttgcaaaggattttgttgttgagagaaatgatgcggggtcctgggatattaccaatcttggtgcaatactttttgcacgagaattagatgtctttaaaaatttgtcccgcaaagccattcgtttaatccagtacgatgcaaataatcgttttaaaacggtaaaggaattacaaggccataaaggttatgccgtcggttttgaaggcttgattgattatattaataaccttttgccatcaaatgaggtgattgggaaggctttccgcagcgaagtaagaatgtatcctgagctgtctatacgagaagttgttgccaactcgttgattcaccaggatttcaacattggtgggacggggccaatgcttgagttgttcgccgaacgcatggaaatttcaaacccaggtatacctttagtggcgattgatcgccttcttgattctcccccgcgtagtcgtaatgaaagaatagcttctctaatgcgcaggatggggatctgtgaagaacggggaagtggcatcgataaggttgttattgaaacggagatttatcagcttccagctcctcagtttgaagtttaccaagagcatacgaaagtcactttgtttgctcatcgcgattttaaggatatggataatgaggaaaaagttagagcgacttaccttcattgtgtattgaagtaccttgaaaaggttccgatgaacaacactacgctgcgggaaagatttggtgttgatgaaaaaaacagcgcaatgattagccgtatcatcaaggaagcaatgaaagaaggtcgtatcaaacaatacgattcatcagtaggaaccaaggcaatgcgctacatcccattctgggcgtag

SEQ ID NO: 204090 - DNA, 174 bp, Klebsiella oxytoca
atgatgaccggcttagtttcatcccggcttgcgctgcgcttagccgggctacgggttcatcggcgtccgtcattttgtagcccgggtaagacgccccgcgtcgcgacccggggaacccgcaaagaagccttaaaccggctgctggtgttgatgaaagcgcgacgccagcggtag

SEQ ID NO: 204091 - DNA, 588 bp, Klebsiella oxytoca
atgaggcagactaaaccgttacccatctttaaatatcatcccgcccccctggaaacaggggcattcgcgcaggacaaaaccgtggtttgccaatgctgcgaacaacagacttcggtttattacatctcgccgttctactgtgtggaagacgtggagcacctctgtccgtggtgtatagccgacggctctgcggcggaaaaatttaaaggctgctttcaggacgaatgcagcattgaaggcatccagggacagtttgatgaagagggtgaatttaacggtagctttataagcccttatagtgaagagcaggaacttgagctaaaaagccgcacgcccggctatcgaggctggcaacaggagttctggctcgctcactgtggcgatttctgcgcctttcttggctatgtcggctgggaagagataaaagatcgtctcagcgaatttgccgatcttgcggacgattgcgcgcagtttggtatgaagtatgaagatctggcgaaatatttgcgtaatgacggcgattgccagggatatctgttccgctgcctgagctgcggtaaattgcgcctctgggcagatttttcataa

SEQ ID NO: 204092 - DNA, 261 bp, Klebsiella oxytoca
atgacacacccgattattgaggcattacaggttaacgaggcgcagtttgtcgcgcttcgccgccgtttccatcagcagccggaaattggttttgaagagcataaaaccagcgaagaggttgcccgcctgctcggcgaatggggctatcaggttcaccgcggtctggcgggcaccggcgtggtcggtactttacgcgtcggcgagggtaaaaacggttggggctacgggcggatatggacgccctgccgatgcaggagatga

SEQ ID NO: 204093 - DNA, 468 bp, Klebsiella oxytoca
gtgtttagtgcgcacggcgctgatgtgccgggctggtatgccatccatgtggcgggcgagctggtgaaagactttgccgcgcggcacagtcttaaggttgctataggcatggatattgcagtgatggcgcaggatcacctagaccagaccaacgaaagcgacgccagctttttgatgaagctggcgcggcagtatggcgcgattgcttcggttaaggatagtaacctgctgtttatccggcaggggcaggggaaaacggccagcggtaaagcactgccggtcatcactattacccgccgggacggtgacagtcaccgattcagcctggcggacaggggagcgtacaccggggtaattgctcactggttgcatacgcgcgaaccggagaaaaaagaaaccaccaaagtgaagcgccgccggaaaacgacaaaaccaaagagccagaagcaaagcagggggattacctga

SEQ ID NO: 204094 - DNA, 606 bp, Klebsiella oxytoca
atggctctcactgatatcaaggttaagtcaattaagcccacagacaaatctgtgaaggtcacagatggtcaagggatgttccttctcgttaaacctagcggtgcgaaatactggcggtttcagtatcgctttagcggcaagcaaaaagtattagcattaggggtttatcctacgatttctctcgctgatgctcgcagaaagcgtgatgaagccaggaagctcatttccaatggtatcgatccctctgagaaaaagaaggaagacaagattgagcaaagtggggcactgactttcgaagctgtagccagaaactggcacgcaaacaataaaaaatggtcagaagatcatagtaaacgtgtacttaaaagtttggaagataacctttttcccttcattggcaaacgcaacattgctgatctgaagactcgtgatcttttggctccggttaggactgttgagatgtctgggcgcattgaggttgcttctcgtcttcagcagcgtacaactgcaattatgcgctacgctgttcaaagtggcttgctcgactacaatccggcacaagagatggctggagctgtagcgacggctaaacgcattcatcattaa

SEQ ID NO: 204095 - DNA, 219 bp, Klebsiella oxytoca
atgcgcctgtccgggctacaaaacccgcaggcggcgcgggccggtagccccggtaagcacagcgcgaccggggaacattcccgggtggcggctgacgccttacccgggctacaaaattgcccggcctacacgttcacagccgccatcgggacgctttcccggaggcggcgcaatgcgcctgtccgggctacaaaatccgcaggcggcgcgggccggtag

SEQ ID NO: 204096 - DNA, 2139 bp, Klebsiella oxytoca
atggcctatttacctgaacaaccggaatggaccgatggcgtctatcaactggaaaagagcgatcctgttcgcggtggcgttgatggcccggcgaaccgccctctaattgaccttctgaagcggacagcatggcttaaacagcgttatgaagaggcattcagtggtctgggctgggctgaactgggggaatgggctgtggggctggaggtcacaacaccctcacaaatcgttcactaccagggctactggtatcgttatggcgggtctctgcctcacactattaccggggcctctccatcactcgacgataacgacaactggtttaacttaggcaatgatgtatcccttcgcgcaaacctgggttcaggcgacgggctaaaactgattggtcgctgtgcaaatatatcagcccttcgcgccacagaaccgacgcaaagcagccagcttattcggactatttcctactccacagggctggcaccagaaatgccccgaggtggtggtgattatgaatatgaccctgacgacacaatcacaccagatgacgggatacttacgattgttaccagtgacggcgcacgctggaagaaaatacttaacaaccttgcgctgacctgcgctgatgcgggggtcttcccctctggcgatgatgataccgatgcccttaatgccttgtttaccgtcgtggcgtcgttctggtggacgcgcgggcgtttccggctggacatgatgggactgaaattccgttcagccagaggaaatacggtcgagttcgacccgaacagaattgagttatgcaacttttatatcaacaacgtctattacacatcggccacgccattcgcgattgtatgcgcccggtcaacgttgccatttcaggacggtgttaatcgcgttcaagggaacgttgaaaacctgaaaatagaggattcgacccgtcatacaacatcgccggtgacatccctgtatctggtatctgatgttaacggcgcatcgtcaagcgtggtctttaataatctggtagcacatggttccagaaatggtattgcttacggcagtcactgttatctgacgacgttcaacggggggtccgtctctgccggaaataacaatgttgatgccgttactgccgggcttgaaacctcccttgtggacatgggggaaaatttccgtttcaacgggatgacgttcatggggacccgaattttcaactgggggacactgggtgctgaatttaacttcacagatgtgagtatggattttgtcgcgctgggcgtgaacaacgccagcggctttgtgctggatgtgaaaggcggtcacgcagaatttaataacaactatgaacgctggttcagctcatcgaaaccggcttatgtcagctttaaacctgcctgggtggtctgtgatggcacgaatgccactaccgaccatatgttttacgatgataccggtgcgaatcaactttccgttgacagtgatataacatactggtcagggacagcggtcaaatccatgattaacacccggttgctgtcagataaatccaactccctgcaggggcttcagccagcggtacgtggcgacctgaataaatacctggtggatggcaccttcacccgcagtacgctcgttgaccgctggtacgcagacatgaacgcctcgcgtactgacagactgacgacagacaccacaacgctgacacgtggaaccacaaatgatgccagtggcaatacgtttggctgcctgacgatagtcaaaaaatccacagtcggtgagggctattcatctggagcgcaactggtcgtcaaagtccctcgcggcaccacacccgcgcacattaagtttaaatacaaggcgacgacggagggtgtgccagtggtcatcactgcccgcctggtgactgtcctgacgttcgacagcaacggcattcctgtctttggagaccgtgtaattacttccgctgctacaacggtaacagcaggaacaacggaatcggaatatcgctcatcaacgggcctgaacgtcgttcaggattacatcacatatgactatgttcagttgagcatttccctgttcaacgtcccaaccggtggtgcggaagtgaaaatctacgatgtactgattaacaagattgggtga

SEQ ID NO: 204097 - DNA, 195 bp, Klebsiella oxytoca
atggctactaaaaaatttattgaactggaggtcggggacgtcatcgtccccgttcagggaatggaaatcacagtgactgaagcaccagttctgaccagaacagatgatggggaaaattacactctgaaagggatgcggaatggtaaggaagttggtctggctggattccttgactcgttaatacaaattaaatga

SEQ ID NO: 204098 - DNA, 963 bp, Klebsiella oxytoca
atgaattatcaaaatcaaaccacatcaaagattaagcacctgatatacaaatttttttgtattttatccttagtggcaggctcctccacgactgcttacgcttttacctgctatgacgctacgggcgcgaccctggaaagcgtatacggcgatcagtccacaaatgtctatgttaatttacagccgtccctgggggttggccaaaatctggtggtagacttatcccaatccatatactgtaagaatgacaatccaggagaacgttacgattggacaagcatacgccagggctcagcctacagcggcgtgcttgctaactttaccggttcgctgaagtattatggttcaagctataacttcccgctgacttcgagtacggcaagttacaatttgcgttcaggtgattttgtgccctggaatgcgatactttatcttaccccggtcacagccgcttctggagtcgtcgtcaagtcaggctcattaattgccagtttggttatgcttcatgttggtatcaacattaatagtggtagcaacgaatatcaggcacgtttcacatggaatatttatgctaataatgacgttattgtgcctaccggcggctgcgatgtctcatcccgtagcgtcacggttaatcttcccaactaccccgcctcaacggcgattccattgacggtacactgcgcgaaaaatcaggcactgggttattacctctctggcaccaccgcggacgcagccaattccatttttaccaacaccgcgtcatcttcggcggcgcaaggtatcggcattcagctaacccgaaatagcagcgttgttgcagccaataaagaggtttctttaggaacggtaggcacctcaccggtcaatctagggctgatcgctaattatgcccgaaccagcggccaggtgaccgccggcaacgtgcaatcgattattggggtaacatttgtctatcagtaa

SEQ ID NO: 204099 - DNA, 1329 bp, Klebsiella oxytoca
atgcacattggacaggctcttgatctggtatcccgttacgattctctgcgtaaccctctggcttctctgggcgattatcttgacccggaactgatttcccgctgccttgaagagtccggcactgtcacgttacgcaaacggcgccttcctctggaaatgatggtctggtgcattgtcggtatggcacttgagcgcaaggagccgcttcatcagatcgttaaccggctggatatcatgttacccggcaatcgtccgttcgttgcacccagcgccgtgatccaggcccgccagcggctgggaagcgaggccgtacgccgcgtgttcacgcaaacagcgcagctctggcataacgccacgccgcatccgcactggtgcggtctgaccctgctggccattgatggtgttttctggcgaacaccggacacgccagaaaatgataaagctttcccccgccagacgcatggcggaaacccggcactttatcctcaggtaaaaatggtctgtcagatggagctgaccagccatctgctgacggcagcggccttcggcacgatgaaaaacagcgaaaatgagctcgcggagcaactgatagagcagaccggcgataacaccctgacgttaatggataaaggttattactccctggggctgctgaatgcatggagccaggcgggagagcaccgccactggatgatcccgctcagaaagggtgcgcagtacgaagaggtcagaaagctgggtaagggcgaccatctggtgaagctgaaaaccagtccacaggcacgaaaaaaatggccgggtctgggagatgagatgacagcccggctgttgagcgtgacgcgcaaaggtaaagtctgccatctgctgacgtcaatgacggatgccatgcgttaccccggtggggaaatggcagatctgtacagccatcgctgggaaattgaactgggataccgggagataaaacagacgatgcaactgagcaggctgacgctaagaagtaaaaagccggagcttgtggagcaggaactgtggggcgtcttactggcttataatctggtgagatatcagatgattaaaatggccgggcatctgaaaggatactggccgaatcagctgagcttctcagaatcatgtggcatggtcatgagaatgttgatgactcttcagggcgcttcaccagggcgtctcccggagctgatgcgcgatcttgaaagcatggggcaactggtaaaattaccgacaagaagagaaagggccttcccgagagtggtaaaggaaaggccatggagataccccacggccccgaaaaagggccagtcagttgcttaa

SEQ ID NO: 204100 - DNA, 285 bp, Klebsiella oxytoca
atgtcagatgaaaaagaactttcagctcttgaagttcagcaaaaagcatatgacgcattgaagtcatatcgtgatgaatggaaacaaatagatgttgataagcttgtcagcgatggagtactaaagccagtgcgagggggttatcaagtactggatcatcaacgactacctgaagttgcaaagaagcatacaaaatcaattaagcaaactgccaagggtatcgtactgattatctctaaaccagatcataaactcttaaaaaaaattgatgatttctttggttaa

SEQ ID NO: 204101 - DNA, 291 bp, Klebsiella oxytoca
atgaaaatagaacttaatacgatagagcagtttatcagtgaagcaacggattcgtataaccgttatatgaataagcgactgcgaaaccagcccgtgcatttctaccacttgctgaagaataaggaggatatgaatgaagtgattgaaaatattatcgagaaaacaaagaaaagtttttatgggactgaaggcgagcaaaaaaaggaacggatcttcgggagtgttaactatgcgaaagtaaagcaatatcttcgtgagctttggattgtctataagagtgtatatcgctga

SEQ ID NO: 204102 - DNA, 210 bp, Klebsiella oxytoca
atgaaaaacgacataacgaatagatttatccgcgtcccggaagtattaagacgagtgggctttggtcgaaccaagctgtatgaacttatccggcagggccgctttcctgagcaggtgaagatagggccgaggacggtcgcttttgttgaaagtgaaatcgatgaatggattgaagccactattcggaactcacgccagaacgcagcataa

SEQ ID NO: 204103 - DNA, 861 bp, Klebsiella oxytoca
atgaaagcaagtgaagtgatggtgtcggtaaaacgatggttcagcctgagcaattatgatgttttacaggagatcacggctggcgacctgagcgatgaaatcaaccggcgagcttcactgctacggtatgatttcgattacgggaatgatacccgtcgcctgcgatgtctggagtatgaagcccggatactggcgggcaatccccttctggtcagttccacgacaaaagcaccaacggcccggaaaatcaatcctctcactgacgccagccttcatgtccggcatatcacggtcgcggatattggtcgttatgaagcccggctgcgtgaactggatttactccggcgcggtgatggctcgtcaggactcgtatcgaaagaggatggcagacgcaggctgacagatattgatgagctgaacgccgatcacccgctgtatctgtggctgaatatcgccttgctgactgatgaggaagtggtggagcatgtgaaaagaatgcttccccggtggcgaaaggagtatggcactggcgaaccggcgattaacacgtcccggtttggcctcagtacggtgaaaaagctgatccactacaggattatcccgatgctggatctgatgctgtgggaaaaacgcaatggtgcccggatctcgtatgaacagatgtcgagactgctctatcccgatgactcgaacgtgatcagaggaggcgctcagattaaggataccgacaggccgcttgctgaaagggcactggcgcgtgaatttgaccgtctgtttaacctctggctgagcaaaaatgactaccttatggacacaaaaatcgctgatgtgatgaagatggacgaggaggagacagtctga

SEQ ID NO: 204104 - DNA, 1242 bp, Klebsiella oxytoca
atgccaaagaaagccagagaactgtccgccttagctgtttccagacttaaagcggaaggtcgctatgctgtgggtggtgttgacggattgtatctgcggatcgccggacgctcacgcgcatgggtcctttgcgttgcgatgggaacccgaatcaacagggcaggtaaggccgttccccggcgactgaatatgggtcttggcccttatcaggaagtttcactggcagaagcgcgtgataaggcgcgtgaactgcgcaggcagatccgtaatggcattgatccgctcaaagaaaaacatgcccaaaaagcacatcaggaaaaaacagcccgtaaacagaagacgttccacgaatgtgcggaagccgtactggaaattaaggggcgcgaactgaagagcaaaaagcatgtcgcacagtggcgttcttcactggagacatatgcttatccggttattggtcagaaaagagtgggtgagattaccaagaccgatctgctggcgatactggaacccatctggttaaccaaaaacgaaaccgccagccgcgtgcgtggtcgtattgaaactgtgctggattacgctaaagcgaaagaataccttgaaggggataaccccgcggcgtggaaggggatgctgaagccgctgctgccaatgccaagtaaggtgcagaacaaaaaacatcatgctgcgttgccgtatggtgaacttggtacgtttatgactgaacttcgcacccggacaggtatatctgccagagcactggaattttctgttctgaccgtggcccgttccggtgaaattcgtggtgctgtgtgggatgaaatcgatctggcggcaaaaacatggactattccggcagaaaggatgaaggccagtaaagaacatcgtgttccgttgtctgatgcggcggtggcattgctcagaatgctgccccggtttaaggacaataaccttgttttccctgctccgcgcggcgggcaactgtcggatatgtcattaacagcggtattaaaacgcatgggccgcagcgatttaacccagcatggttttcgctccacgttcagggaatgggccggggagaccacatcctatcagcgggaagtgattgaacatgcgctggcccaacagttagcggataaagcagaagcagcctaccagcgcggcaccctgtggcccaaacgcgttgcgctgatggatgactggaccgattattgcggatatgagcctgtcgataaggcagcataa

SEQ ID NO: 204105 - DNA, 876 bp, Klebsiella oxytoca
atgagtattagagtttttttaagccataatcataatgacaagccatttgtcagaaagttagcaagagaccttgaaaatcacggtgtacgttattggcttgatgaggcagaaatgaaaattggcgactctctgattcaaaaaatcagggagggtattgatagtgttgattattttgctgttgttctatcgcctgattcaataaatgcgccttgggtagtcaatgaacttgatgtggcaatgaattatcaaataagcggtaaaaaaataaaagtattacctattatgctgaaagaatgtgagcctccgggttttctcattgggaaactgtatgcagattttagaaatgaagataactatgttgaagcctttaaaagattaattcaaagcatagggatggtttttaataaaaacgtcatgagcgacgagaaaatatttgataatcttggcaccgctttagataaagcatctcatgccaatatccctataatgtgtaaaccatttcacagaccgtttcaatacatgggaatgcaagttccacaagcagaaaaaatctttgagtgtaaaggcaatgaagttggcagcatctttgtagaagatgatgattgccggatgcacctttgttctgaaggtaattatattagctttgtagaagttgattttaaaaaaacaattccacattacagaaatcaagaattcgattctgaaattttcctcggagcattaagtataggcttatcagaacttgagttagttggtaaaaaaacgcatagccacacatattatgatcatcgacggaaattaaaaataactgtaagttgtttatacgatgaagccccaataaccgtatcgtttagttctaaatattacgggatgtag

SEQ ID NO: 204106 - DNA, 351 bp, Klebsiella oxytoca
atgataaaggaaaaaggattccgagggctggattcgggaagaggacttgactcaggaagaactattaattcttatcaggatgatcagattcaaaacattacaggccatatggcggctgatatatcgcagagtggaaacatcggtaaatatgcgggtggtgctttcgcggatagtggtgcgttaggtgatggtgatgaaggtcataaaagcaatgaagtgaggaaatatacgtttgatgcttcaagagttgttcgagcaggtaatgaaacaagacctaagaatgttgccatgaattatatcgacttattgagcgaaatagtatatgtaagcaaaaattcgctgaaaatataa

SEQ ID NO: 204107 - DNA, 834 bp, Klebsiella oxytoca
atggcaggcacaaccaaaccccgtaagaaattccgcgttgccgtctccggtaataccgttgatggccgcgaaattcagccgcaacaccttcgcgatgcggcggcgaactacagccaggaagtgtacggcgcgcgcgtcaacatcgagcactatctctccccgtatccaggcagcgactttggcgcgatgggcgatgtggcagcactcagcaccgaggatattaccgaagggcctctggccggtcgtacggcgctgtatgcggaaattgaaccgtctgatcgcatggtgcagatgaccaataagggggagaaggtctactccagcattgagctgcacccgcaattcgcccttaacggcaaggcctatatcgtggggctggcgatgaccgatacgccggcaagcctcggcaccgaacgcctgaagtttgccacccagcagcgcgcatcggtgatggccttcaacaaccagcaggcagagccgccgatgttctccgaagccattgaagccgaggtcattgagctgaccgctcagcgcagcgacgaaggggcgaagtggtatagccgtgtgatgggcattatcagcaaaggccagaaaactgacgatcagcgcttcagccagatgcatcaggtcgttgaagccgtggcgcaatcacaatctgaacaaattgaccagttcaacgccgctgaactggagcgccagcaggacaaagccgccatccagaagctgaccaccgaccttgccgcgctgcgtcagcagctggaaggcactgacggcaatttcagccagcgccagccagcgaacggcggcgcgaacgcgcagctcgctgactactga

SEQ ID NO: 204108 - DNA, 501 bp, Klebsiella oxytoca
atgagccactttgacgatctgtgtcagttaagttttgcggttgaagaaaagaagaaagatgtagagcgcctcattaaacgtgaggcgacacgcctggtatcattttacaagggctggctgggcctaccagctgagcactggatcgatgaacgcggcgagcgtcgtccgtatgttgatgttggttttattgggagtggcggcacctttcagcccgctcgcattaatgagatgccaatgcaaaccgatggtaccctgcaaatggtgctgcgtactgcgacaggtagcgacagggatttgcctgcggttaccgttccagtcaagctgcaggtgatgtctgcgggaggcgatgggattgatgtcgcgatcagtgtggatggcgataagcctattccggtttttgttatgggtactgatgaatactcttattcagaggtggcattgaagattaaaagccacatccagaaagccattcaaaagcagtaccccgcctcacttaagtaa

SEQ ID NO: 204109 - DNA, 459 bp, Klebsiella oxytoca
atgagaaagacatgcataaacataaatggaaatagaattcaagatgttacaccggactcattttccttctctgatgaggatttcggtgcttacgccgcctatgacactgttaaagcatctgattattacaacgttgtaacattagtccacaatggagctgctattggatactgctcctacatgtttgggggagataatgccaacccggatgatatagtgatttcgatgactattgactccgtttttatctctcagactcaccgcggcaacggatattctaattgttttgcaacctatgtcgcatatgactttactaactacgtcaaagctatgactggaggtgataaaccttttcattatgttgatttaagtcattatatcggcgatgagggagagaattttcatgatcgcgtctgtcagatggttcgtggggaaaggccacactactggcaaaaataa

SEQ ID NO: 204110 - DNA, 144 bp, Klebsiella oxytoca
atgaaccaagaaaccaattgccgccggttctggcgaaaccttgttatctgctgcgtgctctgcttgctgtttttctggactccgtcagccatcgccaccttctacatcctgagaatgatttttgggggtgaggtatgcctgtaa

SEQ ID NO: 204111 - DNA, 396 bp, Klebsiella oxytoca
atgaaaagagaatacgcagacaaaatcaattcgctgctgcaatgcttccatttcaataaagagtttctggaatggaaccatgattattcacatcaacttttacgccacggcgtttcccacctttatcacttcgctatgcttcagggcgagaacgatgaagccacgctggaagagctgcgcaacatcattattgcgatcaccaacggtgatatcccgaagccatacgacctgctgtcaatcgacgcagagccgcacgatgtcaaaaccaaaacactgatgtttgctaagcctcttgcggtgtctattgaggtgacaccggagatgatgcagcagctgaaacaggcaatggcaaatatcccggcaaaactaaagagctcacccctctacagccgataa

SEQ ID NO: 204112 - DNA, 420 bp, Klebsiella oxytoca
atgagtagtgttagggagttcccccgctccaatggcacaaatgatgtactatggaagaaagatggggatggaggcgatggcatgtatggcaatcttgaaaaacgagtggaaaaacttgaagacggcatttcctctgtcaagctagaccttgtacgactgacggagcgttcggagcagtttgccacgaaggctggtttgctggagcttaaaggtgaattgaaatctgaaatatccaatacgaagaatgagcttaaattaggcattgttaatgtcaaaagcgagctcatcgaagcgatggataagcgttttgataagcttgaggaaaaagctcgttggaaatggggtagtgtcgtggttcccgttgctgtcggcattctttcagcactcatcacctttttagtggcagaatttggctcctga

SEQ ID NO: 204113 - DNA, 261 bp, Klebsiella oxytoca
atgcgagattttaattccggcaatatcaatggtgatgtcactattaacgatcattcgaatcagcatgcatctaagttgttgatttattgtgataacgatgagttgatttcagaggagcaacatcgactaaaagttttgcgaaaagagagaaaaagaaaatcaactattttcttgaagattctggccggatgcggcctgctaatgctatttgctggggatggtattttattcatggtcaatgggatcttgtctctggtttga

SEQ ID NO: 204114 - DNA, 330 bp, Klebsiella oxytoca
atgcccgccggctatacgccgaaaacgatcaccgtaccgatcaaatgtaacgggatggatgctaacgccagcttaaccctgcgcttccaggcggaagcctcggctgatgaaccgtcggcgattaaaaccagcaacgacgatgtcggcgtgcagatcaccgatagcagcggcaaggtgattgagccgaacagcggcctgctcccgttccagctggacgataacctgcaggcgacggtgaccttccacgccgcgccgattagcaccaccggaaatgccccggcagaggggaccttttcggcgacagcctatattcgcgttgactttgcctga

SEQ ID NO: 204115 - DNA, 1308 bp, Klebsiella oxytoca
atgacgacgggccgcgcgtcggccctttttgaggaatacaccatgaacccgaccgtctgtacccataaaaacaaccccaatttctggattttcgggctgttcttctttctctattttttcatcatggccacctgttttccgtttctgccgatctggctatcggacgtcatcggcctgaataaaaccgagaccggtattgttttctccagcctgtcgctgtttgccatctgttttcagccgatactgggtgtgatctccgataagctggggctgaaaaagcatctgatgtggatcgtgacggtgctgctggtgctgatcgcgcccttttttctctacgtttttgcgccgctgctgaaaaccaatatctggctcggcgcgctgagcggtggggcctacatcggctttgtgttctccgccggcgccggggcgatggaagcctatatcgaacgcgtgagccgcaatagcgggtttgagtacggcaaagcgcggacttttggctgcctcggctgggcgctgtgcgccaccacggcggggatgctgttcagcgttaaccccgagtgggtgttctggatggggtcggccgccgcgctggtactggtcgtgttggtggccatcgcgaaaccgcaggccagccagaccgcgcaggtaatggactcgctgggggctaaccgctcatcggtggatttaaaaaccgccgtacgcatgttccgtcagcgcaaaatgtggatgtttattctgtatgtcatcggcgtcgcctgcgtctatgacgttttcgatcagcagttcgccaccttctttaaatccttctttgccaccccggagtcgggaactcgcgcctttggttttgcgaccaccgccggggaaatatgcaacgcgattattatgttcagctcgccgtggattattaaccgcatcggcgcgaagaataccctgctgattgccggcatggtgatggcggcaaggatgatcggatcatcgttcgccacgacggccgctgaagtggtggcgctgaaaatgctccatgcgctggaagtcccgttcctgctggtaggcgcgtttaaatatattaccggcgtgtttgacgtccgcctgtcggcgacgatttacctggttggcttccagttttccaaacaggtggcggcgatctttctctccgcttttgccgggaatatgtatgaccgtatcggtttccaggatacctatatgatccttggcggcattgcgctgagcgtcacgttaatctccgcctttaccttatcgggtaaggccacgtcggaaaagatgagcgatagcgcgatgacggtttag

SEQ ID NO: 204116 - DNA, 291 bp, Klebsiella oxytoca
atggcctcaccggggggacaggatgcacacacccgacacgtcggaacggcgtggcgccataaaagtgacggcagctttatcgccggcacggtgaaagcggcgcatcctgacaaggatgcagcaagcgtgaatttgaatttgcgtcaggatggaagcccgcagggcagagacagcctgctggctctgttcacgacagccgtgtccctaaagggacgacgcccgggtcagtatttatttaatctctcaccagggataaataccggaagggataaaaagcagcatgccggatga

SEQ ID NO: 204117 - DNA, 135 bp, Klebsiella oxytoca; identical to SEQ ID NO: 97399

SEQ ID NO: 204118 - DNA, 189 bp, Klebsiella oxytoca; identical to SEQ ID NO: 154364

SEQ ID NO: 204119 - DNA, 294 bp, Klebsiella oxytoca; identical to SEQ ID NO: 154365

SEQ ID NO: 204120 - DNA, 852 bp, Klebsiella oxytoca; identical to SEQ ID NO: 154366

SEQ ID NO: 204121 - DNA, 201 bp, Klebsiella oxytoca
atggacagagaaatgctggctgagtggctgcgggatattgcccaacatatagaagaggaaagcccactgattcgtgatgtcagtgtggatgatgccctttccgatgaggggctggccagaaaaatcatcaccatcacattcaatgcaccaggtcgtgcctcacagcctgaagagaacatcagcgatatttcccggcattga

SEQ ID NO: 204122 - DNA, 678 bp, Klebsiella oxytoca
atgtcccgtctgattttgggtgactgtgtgcaggtaatggctggctttcctgagaaggccgtcgatttcatactgactgacccgccatacctcgttggttttcgtgaccgtcagggccgcaccattgccggtgataaaacggatgaatggctgcaacctgcctgtcatgagatgtaccgcgtgctgaaaaaagacgcgctgatggtgagcttctacggctggaaccgcgtcgatcgctttatggccgcctggaaacatgccggattcagcgttgttggccacctggtgtgtaccaaaacctacacatcgaagtccgcctatgtgggctaccgccatgaatgtgcctatctgctggcaaaaggccgtccgacccttccgcaaaatccgctcccggacgtgctgcactggaagtacaccggcaacaaacatcacccaacggagaagcctgtatcgagccttcagccgctcatcgagtccttcacgcgccctgatgccattgtgctcgacccctttgctggcagtggatcaacgtgcgtggcagcactacaggcaggccgtcgctacatcggtatcgaactgctggagcagtaccaccggaccgggcagcagcggctggcagcggttcaccgtgccatgcagtacccggccgctaacgacgacctgccggaggcagcatga

SEQ ID NO: 204123 - DNA, 225 bp, Klebsiella oxytoca; identical to SEQ ID NO: 154367

SEQ ID NO: 204124 - DNA, 417 bp, Klebsiella oxytoca; identical to SEQ ID NO: 154368

SEQ ID NO: 204125 - DNA, 231 bp, Klebsiella oxytoca
atgagcgaggcgctggcggttttacccgacaacacctttacccgtgaacaggctgaggccgttgcggcgcagtacaccaacgtggcgatagaggacgatcagggttcgcattttcgtctggtcgttcgtcaggacggcgagatggtctggcgcacgtggaacttcgagccgggcggcacgtactggctcaaccgttataccgcggactacggcatccgtaagccgcagtaa

SEQ ID NO: 204126 - DNA, 2010 bp, Klebsiella oxytoca
atgtcagtaaccgatgttaaagcaaaagcccccaaaaaagcgagcagcaaaaaaatcacgaaggcgcaggaagaagccctgaaggccgcccttgaggccgctgtcatcgagtatgttccgctgtccagtctcactaaatccccgctgaacgtgcgcaccatcccgtattccgtggacagcgttcgcggtcttgccgactccatcgaggcgctaggactgctgcagaacctgattgttcacacccttgcggacgggcaatccggggtggccgcaggtggccgccgactgactgccctgaatctgctggcgcaggaagaccgtcttgcggccgatcataccgtcatggtgaaacgcgtctcagacgacattgctgcccttgcctccatcgctgagaacgagcagcgcgccgccatgcatcccgccgagcagatcgcaggtttccgtacgctggcagagcagggcaaaacccccgcgcagattggcgatgcgctcggcttcggctcccgccacgtgcagcgcatgctgaagctggcaaacctcgccccgtccctgatggataagctcgcgcaggacgaactgaccgttgagcagtgtcaggcgctctgtctcgaggacgatcctgcccgtcaggttgaggtatttgaaagcgtgaaggccagctggtcgaacgcgcccgcacacctgattaaacgcgccattaccgaaaccgagatgcgcaccgacaacaccaaattccggtttatcgggcgcgaagcgtatgaggcggcagggggttacgttcgtgaagatctgttcagccaggacgagggcgacggcacggcagacagcgtgctggttgagcgtctggtgcaggagaagctggagcgtatcgctctggacattcagcagcgtgagggctgggcatggagtcgcggacgcgcagcccgcatctggtaccacggtgaagacggtaaagagttcgttcagcctgctgaacccgatccggtgtacacccctgaacaacagcagcgtcttgatgcgctgcgggagcagtacgacacatatgacagcgtttgcgacgagtcagatgcgatcgaagcggacatcctcgccattcaggaggcggcagaggccagcgcgtggactgacgacatgaagtcaggcgcgggagtgatggtcagcctgtacgaagggcaggtgtacgtgcagcgcggtgtgcgcctgaaagcggatatgccggaagaaaccgtaaccagcagcgtaacggtgccattcacctcacgccagcccgacgccgcagaggggatcagcgttccgctgctcacgaaaatgacctccgagcgtacgctggcagtccaggcggcgctgatgcagcagcccgaaaaggcagtggcgctgatggtctggcgcatgtgtacctgcgtcttttcaggctgtctgaccacgacgcacccgttccgaatcagcctgactgtttcccacagcagtctgacggagaacgccccgtccggtaaggatggcgcagcgtttaacatcctgatgaccgaacaggcaaggctgaaagccctgctgccggaagggtgggagaaggacttcaccaccttcttttcccttgacggcggggtgttgatgtcgctgatggccttctgcacggcctgttccgttgacggggtacagacccgcgatatggggcacacctcgcgcagtaccctcgatacggtcgaggcggcaatcggcttccacctgcgcgactggtggcagccgacgaaggacaactacttcggcagcctgaaacatcctcagattgtggcctcccttaaagaggcggggctgacgggcgcggcgggtgacgcggagaagatgaagaagggcgatgcagcagcgcatgcggagcactttatgcagcacacccgctgggttccggcatggctgaaaggaccagagccagcggctgaatccggtgctgacgacgcggtttccgataccgatagcactgacaacgacaccaccaacacggcacatgccgcctga

SEQ ID NO: 204127 - DNA, 432 bp, Klebsiella oxytoca
atgcgcactattctgacccccgatgtactgaaaacgatgtcctgtgatgagtttgaggactggcgggacagcggcgaagacttccgccgcgaactgacccacgccgtcatgcgtgacctgtcctgccctgaaaactgggatgtgaacggcgagtaccgcagcgagttcggcggcttcttccccgtgcaggtgcgctttacgcccccgcacggcaactaccatattgccgtgtgcagtccgggtgccatcagtccggcgtggatggtggtgtttgtgcccgccagcggtcgtccgttctccgtcattcgtaccctgaacagctaccagccggagcttgtcagccacaccgtcagcctgacggcgcgtcttgatgcggacggatacagtcaggccagcatcatcagtatcctggcagcggagggcgcggcatga

SEQ ID NO: 204128 - DNA, 729 bp, Klebsiella oxytoca
atgatacctgcaaacctgtcactggttcccttcagcccagagcgacgcgccgcgatggaggccatcgctgaggttgaacgccggcggtcgcgcggcgcggtgtccacggcgtatccgtatgccagcgcctttttccggcggctcatgggcagcacgcgcatctcactcagggaaatccatcattttgcgccggtgctgacggcgcgggagctgcgaggcagcagggacagctggctcagtgccatcgatgccctgattgaaagtcgcgggacgcgttgctggcttccacttcctgtcggtgccggacagcgcctctttccggaggtggcctttcagcagaccgagcgggttcgctgtcaggacgccctgcgggatgaaaaatacacccgccagcggcacaaagaacggtgtcagcgtgagcgggcgtaccaggcgctggcggggcaggcggagattgagctggcattccatacgccggaaacggtcagcagctggagcgcgcgctggtcggggactgagctgcgccagtacgacctggaggagatgttctggcgctggagcgagcgtttcccgtcactggagccaatggagcgctggacgatggagagtcagcctttctggacggtgatggccgaaacggatgcgctggcaagggaaagtccgggatctgtcaggcagctggagcgctggatggtacccaacaagctgacaatgcggagccgggtatga

SEQ ID NO: 204129 - DNA, 324 bp, Klebsiella oxytoca
atgaagtggcgttactcgctgcgctggaagcgtcccggtccctgtcccggtgaacctgaactggcgtcagaagtggtggaagcggggaaacccgcccctgagtccgtgatgtcactgtgggtggcaggagccggatatgccgtctgcgtggattttctgtgtgacagacagatcaggcgctggaccgacgagcgtaaggcggccacccgccgacggaatctggcgcgtcgtgttaacaggatcgcgcccctgtttgctgatgagctgattgagcgggaactgacggcacggcctgaatattttcggggaaagtcgcctcactga

SEQ ID NO: 204130 - DNA, 375 bp, Klebsiella oxytoca
atgagatactggatactggtcgcgctgttaaatggcctgtttacgctggtcatacattacgcggcgccggagatgttcggaagtacggcgtactatgccggggtggcaatctgttccctgattgcgctggttatcacctggcgcgatccgcctggtatgctggacaacgtgctcttgtttctctttaagtggggaattgtggcttctggactggcgttttctgtctggggcatcggatacaagctggaattctggggggaacataaccccgatgaagttttcagcagtgcattcgacaccatcttgccgaatctggcggtgctgagcggtgctttgattctggtcagtggctgggtgttctggaggcgaaggtaa

SEQ ID NO: 204131 - DNA, 375 bp, Klebsiella oxytoca
atgaacacacagaacgtcaacgtcaaaaccgccaccaaagaatcttccgaaagatgggtgaaaacctcgtccctgcgtactgatggctttgtgcgcaatatccattcccgcaacccgttcgatgttattcgcgcggacgtggtgctggcccgtatggaaatacaggctaaccggggatgtggcctgcactacgagatttatgagtcccgtctgctggggatggctatgcattacctggcagaactgccactgaaagaccgtccggcgtttatgggggcggcagcgaaacggggttacatgctgacgactgcggaagaagaacgtgccgatggtgaatgtgctgacctgatgagcgagctggcggcggattactga

SEQ ID NO: 204132 - DNA, 288 bp, Klebsiella oxytoca
atgagcaacagcaacacgaacagcacattcagcttcgacgcatgggagaaaagcgcgctcagcgagcttgataccctgcaaaaccacgtcagtaaagccctgatgaagtaccagagcaacacggacaaaacggcgctgggcgagtctgcaaaccgctatatgggcgaactcaggaccgctgtcacgagcatcctgaaagccacgccagccattcagcagaaagtcgacgagattgccgacatgctgcacctgatggcgcatttttccggtatcacgttcgacgaataa

SEQ ID NO: 204133 - DNA, 345 bp, Klebsiella oxytoca
atgcacttaaatctgaccgaatcctgcgccgaagcgggtatttacgcaaccagtgaggccgagcgcgaatactggctgagccgcgaaaagtcatatctgaccgcgcccgtcgaaatcgacgttcacgccttccatgatgcgctggggctgatgtacccgatgaactggcgcagcagtgagaacggcgagtgtgaaaccttcatgctggcggaaatggtctgcggcaatgtgaccgaaatctacgcgcggatcggtatccgttattaccggatgcgcgactacagcaaccttgaccacgcggagattctggcacgcgttaaggagggagtgcagcgccagaaatga

SEQ ID NO: 204134 - DNA, 264 bp, Klebsiella oxytoca
atgcaattcagtgaagtttcgattgttacaccgaccgcccggtatgtccagatgcttgaggcggaaaacgcacccgtaaaaaaacaggtgcgtattaaacgcagtgatatcgaccgtgacgacatcagcgccgaaatgcgggcgctgggccgtcacatagcgcactgccggaagaaggggcgcgccgttcgtattcctgccatgcgcgggagtgagtgggggcaggtgttacgcacgcttgaactgaagcgggcatttaactga

SEQ ID NO: 204135 - DNA, 831 bp, Klebsiella oxytoca
atgtctcaactcagttttgccagcttctttgaccaggcgaaagaggccgcgccagtaacacccgctaaacccgtattgcccaacgtgaacgcgcagccgataccgcaccggatgatgacaatcgaccagtcccgccgccagtttatcagcgtgttcagggataccgcccgcagcctgcgccgctgggaggtgttcagcgactttatcacgctggccgccagcgagctggatatggcgcggataagaacgccggagaatattgagcagagccgcaaaatctgcgcgaagtacagcgagagcgatatcagcaacctgcatacgcttttctgcctgatggtctgcgcgctggaggcgaaatttcacgactttctcggcgcgatcttcatggagcttgaactgggcgacgaccggaacgggcagtatttcacgccgtatcacgtccagtcactgctggcgaggctgctgatgccggacgtcgacgaaacgatacgccgtgagggattcgtgaccgtcagcgatccggcaagcggtgcggcgggaatgattgtggcgtatgcagaatatctgctggaggcgggctataacccttctgagcatatgttcggtagctgcatcgatatcgatcctgttgcggccgatatggcgtttattcagctttcccttctgggtattcctgcggaggtggtgacgggcaatacgctcacaatgcagcttaacagggttcgctacacgcccgtgtactatatcaacaactttgaaaaacgcctggaagaccagcgccgggtgagtgccatgcgtgaatttttgcgcgggctgaataaagccgcatag

SEQ ID NO: 204136 - DNA, 531 bp, Klebsiella oxytoca
atgcacacattaaacgtcaaaaccgccactcgtgaatcagccgaacaatttaaagtcgatgaacgacagcgctattgtgttacagatggcgatgaacgtcttgattttattcctgcgctcttttttacgccttctgctgataatatgattgccagctggttacgtcagcattcagattatgatggtggtttctggagttactggattattccgcagggcaccggcggaaatgtggctccgaactgtgtcagattcaccacgacgcaaaccggatatatcgcaccggaaggtgaacagcgctataacatggttattcctggtaattactttgaagcagaggtcagtgctgatgctgccggaattattgccacgctgatgataatgaactggttgtcatggcaggtcgcagatatgggtcctgaatactcgaaagtctgtaagcacctcgtcgctcgtcaggatgcactgaaagactacatcagtatcataaaacaccctgaagcacatttaatttatcgggctattgattga

SEQ ID NO: 204137 - DNA, 477 bp, Klebsiella oxytoca
atgaaacggattgctcttacgtttttaatgttggctttttctggaatgttgaacgctgctgattgttttgatctggcaggaagggattatcatatagatccggatctgcttcgggcaatttcctggaatgaatcgaacttccgcacagacgttaaaggctacaatcctgtttcgggttttggctccggacttatgcaggtggattcccagcactttaacgaactggctcgttatggaataaaaccggagcaccttatttccgacccgtgtatgaatatctacaccggggcttactatcttgcaattgcattcaaaaagtggggagtcagctggcaggccgtgggggcgtataatgcaggcttccggaaaacagaagaacaggcgcagagaagatatgtctatgccagaaaaatcgaggcaacataccgggagataaagaaaaataaaaatgcagagcagtttctcccgaaacaataa

SEQ ID NO: 204138 - DNA, 393 bp, Klebsiella oxytoca
atggccagagttcaggtctatgtaagcgatgaagtgtcagagaaaataagagtaatcgctgaaaaacgtcgcgcagaaggagcgagagataaagatgtaagtttttcgagtattgcatcaatgctgctcgaacttggtcttcgggtctatgaagcgcaaatggaaagaaaagagtctgcctttaatcaggcgctctataataaaaccatacttgaaaatgtaatgaaaactcaatttattgtcagcaagcttctggcgatggagtcgctgagtccgcatctcgcaggaaatgaaaaatttgatttcagggagatggttacgtgtatacgtgaggacgtgcaacagattgttggaaacttctttccgcaggaggaagattctcaagataattag

SEQ ID NO: 204139 - DNA, 690 bp, Klebsiella oxytoca
atgcacccgcgcgatcctagagatctctccgaaccaagtcaatcactagatgatattgttaagcgttttgatgcgctctataagtactcacctttgcctttttgcattcgagatcaatccagaaaccccatatataaaaatgatgcatatttagatttttttcatccattatcaaagtgtttttcaggtgtcagttttgatcctgatgaagttgagcttgatttgtcgacaattgagttggaggcctttgttatggggccagatacagctatttgtagaacttttaattttaacggtgagttttatcagttacgtgttgaaattcgtatggtaaataatgaattatatgctttctggtttattaattacttcccggattatcaagctttattcagtacaacgaataggctaaaaagtgatgagtttgattttgatgtttttttatcagggttgactaataaaaagatgattacattgtgtttttcaattcttggttttcaacttcatacgatggcgcaatatttaggtgtctctgaaaaagcaatttcaagcaggctttctagtgtgaagaatgagcttgcgaaatattttactgattatgatgacttcagattctactgcatgagaatggacgtatacagaaaggtgagaatggttgttcttaaagttttgaatgttaaatttatgtaa

SEQ ID NO: 204140 - DNA, 225 bp, Klebsiella oxytoca
atgattagacgtcacaggcttcgtggcccaaccgtaactatgtcgatctaccttgacccacaaaccgatcttcttattttgaaggcgaaagacagaagtggtcgttctaaatcagctgaagcgctgattcggttacgtgaccacctggaaaaattccctgatttctataactctgaaatggcggaggtgatcccaaacaatcttgaacccaagtcacaaaactag

SEQ ID NO: 204141 - DNA, 351 bp, Klebsiella oxytoca
atgactgatgtgtctgttattaacgctgtacccgctacccctgcaaagaaaaaattcagcaaagtcgcgttactcaaagcgctgaagtttgccctgcctgtcgcagcccttgctgcgtttttccctgaaacggttctggcctcgactgcgggtaaagatctgatgtccagcggcgatgcaaccgttaagggaacatttggtaaagattccagcgtggttaagtgggttattcttgccgaagtcctggtaggggccgtgatgtatatgacgaccaagaacctcaagttcctggcgggctttgcgatcctgtccgtattcgtcacggtaggtatgtctgtcgcaggatactga

SEQ ID NO: 204142 - DNA, 306 bp, Klebsiella oxytoca
atggcagatgaatctctcaaaaaatatcgttttcccgaaaccctgacgaatcagagccgctggtttggccttcctgtggatgaacttattccggccattgtctgcctggggtggggattctggacccagcattatatccccggaattatcgctgccgtactggcctatctcggaataaaaaagctcaagaaagggcggggcagctcatggctgcgggacctggtctactggtatatgccgacctcactgctgagggggattttccatgatgtacccgactcatgctaccgccagtggattaaatag

SEQ ID NO: 204143 - DNA, 567 bp, Klebsiella oxytoca
atggaacacggagcacgattaagtacacagcgggttattgccatcggctttattgccatgggggtggttattctggggagtatcaccaccaacgttattcaggccgtcaacaactaccgccttcagaatgagcagaagtctatcgtcacgccaatgcttttcaacgcgccatttgccgtgtcgcagaatcaggcggatgcctcctacctgcagcagatggccctgtcgcttatcgcccttcgcctgaatgtcaccccggaaaccgttgatgcctctcatgagcagctgctggcgtatgtcaagccggcggcgcagaacgagctgaaaatcaggcttgccgaggatgcgaagcgcattaaggacaacaacgtcaactcgtctttctatatgaccagcgtgaaggtttatccggcaagcagccgcgtggacgtgcgcggtcagctgaaaacctggataggcgactcgaaaccgtatcccgagctgaaacagtacgttcttaaatttgagcgcgaggacggcatcagctggctcagccacttcggagaaatcaccgatgaacaaaaatag

SEQ ID NO: 204144 - DNA, 744 bp, Klebsiella oxytoca
atgaacaaaaatagtcgccgtgcgctgcttgcgttgatgatgctcgcgtccggtcagacggtcgccgcacccgctgcgctttccgccacgattgttccgctgacgaacggcgggcaggccagcatcgcggtcagcaacaccgacccgaacctctttacggtcgcaggtgaccgcgtgacggccctgaccagcctcgacggtgagctgacgcggcaggagcagacggcaagcggcggtgtgattgtcagcaccctcaacaaaaagcccttcacgtttattctggaaaccgaacgcggcctcaacttctcggtacaggccgtgccacgtgcgggcgcggggcgaaccatccggctggtcagcgagctgtccggtacgggcgaagcggcgcgcacctgggaggagtcttctccctatgaggccacgctggtttccctgagccagcatctgcttggcgggaagctgccttccggctggcaggctattcccgtcacgcatgaagccctcaccgcgcccgccggactgtctgcagtcccggagcgcgtctgggtgggtaatcaccttaaggtggtgcgctttcgcgtcaccaacaataccgggatggcccgtaacatcgcggaaagcgacttctggcagagcggtattcgcggggtgctgttcggtgaagcctcgcgtcagctgatggcgggcggcgccctgcaggtcttcattatcagcagcggaggtgcggctgatggccagcattaa

SEQ ID NO: 204145 - DNA, 1395 bp, Klebsiella oxytoca
atggccagcattaattcagtggtgaagcgcaagcagtttatctggctgggtattgtgctggcgaccgtgggtgtggtgggcggcggcggctggtatctggcggatgcgcgttacgaggggagcagcgatgcagcagcagccgacgagcctgcgcccgatatgaccggtgtggtggacagcacctttgaccagaaggtacagcagcatgccacgaccgagatgcaggctaccgcctccgaaatgcagaagcagtatgccgaaatgcgccgcgagcttgagctgctcagtaaggggcaggcaggctaccagcaccagatagacaagcttaaccaggacaacgcggcgctttccgctcaggttagcgcgctgggggcaaaacccgtcaccgcatcgggtgagccggtaccgcagccgccgtctcctgcaccgggtcctgagggtgagccgcagccgaccggtttcccgccgcagacgggggccgtcccgccgccgaccgcgttctacccgggtaacggcgtcacgccgccggcgcaggtgcagtaccagcccatccccgtgcccaaccagctgcgccggcagtcttttgcccgcagcgacgagagcaaaggtccgtccctgccgtacatcccgtcaggcagcttcgccaaatcgatgctgattgagggggctgacgccaacgcttccgtaaccggtaatgagtccacggtgccgatgcagctgcgcattacgggcagggtggaaatgcccaacagcaaaagctacgacctcaccggctgcttcatcgggcttgaagcctggggcgacgtgtccagcgagcgcgccatcgtgcgtacccgcaacatcagctgcctgaagcacggcgttaccatcgaccagcccattgccggacacgtcagcttccgggggaaaaacggcatcaagggcgaggtggtgatgcgaaacggcaaaatcctcggctgggcatggggcgcgggttttgttgacggcatcggtcagggcgtgcagaccgcgtcccagccctcggtcggactcggcgctacggcatccctcggcgcgggtgacgtgatgaagatggggattggcggcggtgcctccaaagccgcccagaccctcagcgactactacatcaagcgcgcagagcagtaccaccccgtcatcccgattggggcgggtaacgaagtgaccgttgtctttcaggacggttttcagctgaaaaccattgaagagctggcgcacgagaatgacagaagcaaggcggagggcgacgaacgcagtccggttccaccaccgtcagtcccgcagggcggcatgaacgggttcagtaccgaccagatgctcaaccagctgggcaggcttaaccagagccagtttatgccgaaggccgactcacagtaa

SEQ ID NO: 204146 - DNA, 540 bp, Klebsiella oxytoca
atgaacaagacagtgcctgttgcgctcacgctggccagtctcctgacgctgtcgggatgtgccggtacaacgagcgattttgagtgtaacgcgacgacatccgatacctgcatgaccatcgagcaggccaatgagaaagccaaacgactggaggaggccagcgcggtaaagccgggtgcgacatcgctgccacgcctggctgagggtgatttccggacccggtccgtgcagccccttacactgccggctgaaccggtgcatgccgtcgcatccagaaatacgccgctgacgggtgcgccgactctcccccgcccgcagccgcactcggcctcgcgggtgccgctctccacggtcacgccggttgttgcgcagccgccagggcgcgagtccatcgtagacccgaggccgcttcgcgtcggtgaaaagacggccgggctgtggatcgcgccctatatcgatacgcaggacgtttatcaccagccgacgcgggtgttttttgttgtgaaaccgtcagcgtggggaaccccgcgcgttaactga

SEQ ID NO: 204147 - DNA, 225 bp, Klebsiella oxytoca
atggcagacgaactcgatctcctgcaggagcaggacgaattgctgaaccagcttcatatacaggccgcgaggcagcggtcctgcctgcagggaaaaagccgcaaccggtgcgaatgctgtggtaatcgcatccccctcaggcggcagcaggccatcccgggcgtgcggacctgtacggaatgccagcgggcttttgaaatacgacaaaaacagtatctgaggtga

SEQ ID NO: 204148 - DNA, 183 bp, Klebsiella oxytoca; identical to SEQ ID NO: 154343

SEQ ID NO: 204149 - DNA, 405 bp, Klebsiella oxytoca
atgacaaccagggataacggtggtccggggaaaacccgtcaccttaacgatatcgcggccagctgcgaggcgctggggatgcgtgtcatctgtgttaatgctgcagagcgcgacttctggctttcagcgtctcagcagagcgctcccgccctcgacgggaaggctgggatttctcaacatataatgcaacggcagcgtgggcactgtctgttcctgggtaaagcaggctcaggtatgagcgtaacaaaacagcagatgacccggattttcctggcgaagtctgacgtcagccagattaaagcactgtatagcggtgaggacggggaaaggctggcggcggcaatcagagacaactgcagcgtctggtttccgctgaatcccggaggtaacgggaatgatgcttaa

SEQ ID NO: 204150 - DNA, 567 bp, Klebsiella oxytoca
atgatgcttaagcttttgtccgttctgctgtattgccttcgatggcttgcctgggcttttcactatctgattgtctggcctgccgccacgctgatgctgctggttgccatgcttttgtggatggagaacaccacgcccggagaagcgatggcgcaggaaattatggccgtcacgcacaacgtcagcagtggcgagtttcgtattgcggcctgccgcgatgaacctttagacccctttatacctccagccccgcagggcaagtcctccggcctcacgttgcatgacgctccctcagccgtctgccatgaccggggcagcgtcgtcaccgatgctaaaggatatgccggtcatgttgacggggcgctgagtgcgtttaagttgctgtggattgtgatggccattgtgttttcaggggcggcgctgcttatgggatgccgtccgtatttctgcctgcacggtcagatgcgctcagcgtgttttcgctacggtatccccgccagtcgcccggcccctgcgacggaagcggtaaaaacggccgacagtaaaaaggagggggatcatgagtaa

SEQ ID NO: 204151 - DNA, 2631 bp, Klebsiella oxytoca
atgagtaatccgctggactccgtcacccgcacggtcaactcgctgctgacggcgctgaagatgcccgatgcgtcctctgaggcgaacgatgtcctcgggcagatgcgcttcccgcagttcagccgcgtgctgccgtaccgcgactacgatgcggaaaccggcctcttcatgaacgagaagacgatgggctttatgctggaggcgcagcccatcaacggcgccaacgaaactatcgtgtcgtcgctggaaaacctgatgcgtaccaagctgccccgcgaagtgccggtggccgttcacctggtgtccagccatctggtgggacaggatatcgagtatggcctgcgcgagctttcctggacgggagaaaaggctgatacgttcaacgccatcacccgcgcctactatctcagggccgcagaagaagggttcccgctgcccgaacacctcaacctgccgctgaccctgcgtaactaccgggtgtacatctcctgctgcgtcccccgcaagcgcggaagtaaggccagcgtgatggagatggaaaaccaggtcaaaatcatccgcgcctcgctgcagggggcgcagatagccacccgcagcgtggacgcggatgcctttatccgcattgcgggtgaaatgattaaccacaacccggatgcgctgtatcccaccgaacgggagctggacccgctcaaggatctgaactaccagtgcgtggacgatacctttgacctgaaggtgaaggccgaccacatgacgctgggactgcgcggtaacggtcgcaacagcaccgcgcgcatcatgaactttcagctgaccaaaaatccggagctggccttcctctggaatatggccgacaactacagcaaccttctcaacccggaactgtccgtttcgtgcccgtttatcctgacgctcgtcctcagcgtggaagaccaggtgaaggcgcagaacgaggccaacctgaagttcatggatcttgagaagaagtccaagaccagctacgccaagttcttcccgggcgtggcgcaggaggcgaaagagtggggcgatctgcgccagcgcctgtcgtccgggcagtcctcgctggtgagctattttctgaacgtgaccctcttctgccgcgatgaccaggaaaccgcgctgaaggtcgagcaggacgtgctgaacagcttccgtaaaaatggcttcgagctgatttccccgcgctttaaccatatgcgcaactttctcgtgaacctgccgtttatggcgggcggcggcctctttaaacagctgcgcgagtccggcgtggtacagcgtgccgagagctttaacgtcgccaatctgatgccggtggtggcggacagcccgctggccacttccggcctgctggctccgacctaccgcaaccagctggcgtttatcgacctgttcagccgcggcatgggtaacaccaacttcaatatggcggtctgcgggacctccggtgccgggaaaaccgggcttatccagcccctgatacgcagcgtcatcgactccggcggcttcgccgtggtgttcgacatgggagacggctacaagtccctgtgcgagaacatgggcggggtctacctcgacggcgagacgctgaagtttaacccgttcgctaacgttactgacgataccatcgatgagatggccgaacgcctgcgggaccagctgtccgtgatggccagccccaacggcaacctggacgaggtgcacgaaggtctgctgcttaaggcggtgaaggccacctggcttacgaagaaaaaccaggcgcgcattgacgacgtggtggactacctgatgatggcccgcgacagcgaagaatacagcggatcgccgaccatccgcagccgcctcgatgagatggtggtgctgctgactcagtacacccgcgacggggtgtacggcagctacttcaactccgacgagccgtccctgaaggacgaagcccggatggtggtgcttgagctcggcggactggaggacaggccgtccctcctggtggcggtgatgttctcgctcattctctacattgagaaccgcatgtaccgcacgccgcgcagcctgaagaagcttaacgtgatagacgaaggctggcgcctgctggacttcaagaacaacaaggtcggggcgtttatcgagaagggctaccgtaccgcccgccgccataccggttcgtacatcaccattacgcagaacatcgtcgactttgactcggaaacagcttccagcgccgcccgcgcggcatggggtaactcgtcctacaaaattatcctcaagcagtcggctaaagagttcgccaagtacaaccagctgtacccggaccagtattcgcagctgcagcgcgacatgattaaaggtttcggcagcgcgaaggacaactggttcagcagctttatgctgtcggttgagcacctgacgtcctggcatcgcctgttcgtcgatccgctcagccgggcaatgtactcctcggacggtccagactttgagtttctgcagcagcgacgccgggaagggctgagtattcacgaggccgtctgggagctggcgtggaaaaagtccgggccggaaatggccgcgctggagcgctggcttcacgagcatgaagggaagaccatctcatga

SEQ ID NO: 204152 - DNA, 348 bp, Klebsiella oxytoca
atgaaaaaacacgtactcattaacgccgcactgattgccggcacgctggctgcgggcgcgggcgtcagctggctggtttgccagcttaaccgtcctgtggttgtggccttcaacatgaaatccacggtggatgccttctttgacagcgccggtcgccgttcgctggacgaggcgcagacaaaagcactctcagaccgctttaacgcgtcactggaggccagcctccgggactggcagatccgccatcgtgccctcatccttgtcgcacctgccgtggtgcagggggcaccggatatcacgcgtgaaatccagactgacgtggcccgccggatgaaggagggggcgtga

SEQ ID NO: 204153 - DNA, 648 bp, Klebsiella oxytoca
atgcgcgcccttgccctgggcctgacgctgctgaccggcagcgtgacggccgctgacctcgggacgtggggcgatctctggccggtggcggagccggatatgctgactgttatcgaaagccggctgcagacgctggcgcagtccggcgagatggacaaaaagatggcggagtttaaggcgcgcgtggtgcgcaacagccagcgcccgcctgccgttgagggtataacacgcgcggtgcgctacgagcggcgctggtttgatccgagcgtgcgggtggacaaggcgcttgccgacgacaggggcaacgtgtttgctcaggcggggcagatctttaatccgcttgatgtggtgccgttcaacgaaacgctgctgtttatcaacggcgacgatgcggatcagctcgcgtgggtacagcgacagaagcctgacaccctgatcacccgcattattctggtgcagggcaatattccgcagacgtcagagaagctcgacagccgcattttcttcgaccagaacggggtgctgaccgcacgatttggcataagccaggtgccggcacgggtaacggcggcacccagcggaaagcgcctgcaggtggaaatcattccgcccgatatggcgcagcatgacgcaggaggtgaccggtga

SEQ ID NO: 204154 - DNA, 993 bp, Klebsiella oxytoca
gtgaaaatgctgaccgtctctctgttcgggctgcttctgtggggtaacagccacatggcggcggcggacgccgcctgcgaagggcgtttcgtcaatccgatcaccgatatctgctggcgctgcatgttccccctgtcgctaggcagcacaaaagtcacgggcggtgatttaccggacacgtctaatcccgggagcccgatacagttttgtcccatgccacccccggtatttcagcgcatcggcctggcaataggttactgggagccgatggccatgaccgatgtggcgcgttccccgggctgtatggtgaacctcggcggattcaccattaatctcggaaaaatggggatgggcaccgccaaaaaagatgacaaacaggtcaatggcgcgttctaccacgtgcactggtacaaatatccgctgacgtactggctcaacatcatcacctccctcgggtgcctgcagggcggcgacctggatatcgggtacctgtctgaaattgacccgacatggggtgacagcgccctgacctccattctgaatccggaggcggtcatttttgccaaccccatcgcgcagggcgcatgtgcggccgacgcggtggccagtgctgcaaaaacgtcggttgacgcgctgttctggtgtgccgggtcgcaggggtcaatgtatccctttaacggctgggtgagcaatgagtccagccccctgcagtcctcggtgctggtcagcgagcgcatggcgttcaagctgcaccgtcaggggcagataatggagagtatcggggaggacaagaaggtctgcttcgagtatccgtcacccattattcccaaaacgcgctggcgctatcagatggtgaatatgtatccggatgtggcgcaatgtcaccccttcggccgcacggtcatgcgctgggaaacggggcgtaacccgccgaatacgaagaaaaactacggctatctgctctggcgcaaacgtaactgcgtcttcctctga

SEQ ID NO: 204155 - DNA, 630 bp, Klebsiella oxytoca
atgaaaactctgtccggtctgacggcggcgctgctgctgtcagcatattgttgtactgcgctggcgtcagaggctgatgaggcgaaccgcgagtttattcgtcagcaggagtctttcagccagcagctgagggggcaggacaacgcgccgctgcgccagatgctggagcagcaggtgcgccagaaccctctttcggcagacgacacgcgctttatcggggagctgaaacagcgccagaaggaggctcagcaggataagcccacgcacggcgcgctgtatttcatctcctttgccatcccgcaggcggggcttaagcgcatgctgaccgaggcccgccgatacgacattcccgccaccctgcggggcatggtgaacaacgacatgaaaacgacggcaaccgccgtgatggcgcttgttcaggatggttcagccagcggcgtcgccatcgacccgacccgctttcgcgagtacgggatcaccagcgtgccgtcactggtggtgtactgcgaacgtggccatgacgttatccgtggcaatcttcatctgaagcaggcgctggaaaaggtggtggagaagggcgagtgcagggatgaggcgcaacagctgcttaataaaggagaggcccgatga

SEQ ID NO: 204156 - DNA, 1854 bp, Klebsiella oxytoca
atgaaaagagcaatactgatgccggtgctggccattgccaccacgatggtgagcgtgagtgcatttgccgatgctgacgcgcagtacagggcgggggctgattttgcccgtcaggtacaggggcagggggagagcagcctgaaaaactttaacccctcagcgtccatccccaactataccgcctcacccggtgagaaaaagtactatggcggcgtgacggcgaccggtgatggtgcgctgaaagcggacggtaccacaggctggactactaatgaggccacaaaagccgtcaccgactcgtttgttaacaacccgaaggagcccatttcacccgatgcgccgtttattaaggccagccaggatgtccagtcccgcgccgataccatcatcggaaaaacggggcagacgcagtgcgaagcgcagaatatcagccgcagtgagttcaccaactatacctgtgagcgcgacctgctggttgagcaggcctgtacgcgcacggccagcattaccggccactatgaagatacatctgaaacaaaacagattgttatccagtctcagaatatttcgtttgcttcctccgaagcaggatacacaggaacatggactgcaccggtgacagggaaggttgttgctgcaacagctacctattcctggaataaacgtctggcgttcagtaatcctaactggtttatgcgggtaaccacgcctttcgggttgatttccatggataacgatactggtagcctggcgctgagtggtggcatgcagctgaagaaaggcgccgggatggtgttttccattcgtaccaggagaaacaaccccactacagattcaatctggaagcacagcaatatgcgctacagcttcaccgttacgctccagattgaaattcccgccaaaaaatgggtgccggacgttgtctggaacgaatcctgcccgttcagcaagagcgaaggtacgctcaagaagacggaatgtattgagccggggagcacgaaaacggtggtggttgacggcgtgtcatacccggtcacgcaggcatgctggaagtacaaagacacgtatatgactcaggctgctgacaatggcacctgcaaaacctacatgaacaatccggcctgtacgcttgcctcacgcacctgcgccttcacggcagaagacggcagcggctgcctgcatgaatacgcgacgtactcctgtgaaactcgtacttccggccaggtgatgatatgcggcggcgacaccttctgtcttgatggtgactgtgagcgggcgcagaacggtaaaaataacgattttgcacctgtcgtttcggcactcgccgcgctggccgctgcgggcaaggacgtggccgccattaacagcgttaacgtgcgcgcctttaccggcagcgcgaagttctgcaagaagtttgcggcaggattcagcaactgctgtaaggacggcggctggggccaggacgtcgggcttgccaggtgcagcagcgaggagaaagcgctgggcaaggccaaagagaataagctcacggtcagtatcggtgagttctgttcaaaaaaagtgctcggcgtctgtctcgagaagaagcgcagctactgtcagtttgactctaagcttgcccagattgtgcagcagcaggggcgtaacggtcagcttcacatcggctttggcaaggccagcagcccggactgtcgcggcatcacccagaccgagctgcaacaaattaattttgaagcgctcgacttctcgaactttttcgacgatctgcagaagaacaagaaaatcccggataacgacaccctgacgaagcgcgtccgcgaggaaatcgccgcgcagctgaagaacaaacagtaa

SEQ ID NO: 204157 - DNA, 189 bp, Klebsiella oxytoca
atgaaaattaaaggatttatcgtccgccttatcatcagcctgattgtcgcctcgccggtgctttactggtgcggaaatatagttgatgaaacaacccgcatcgatgtgttttttatggcactgatggttgtgcttttcgtggcgggagttctgctggcgtggctgttaaacccgcttttcaaacgataa

SEQ ID NO: 204158 - DNA, 750 bp, Klebsiella oxytoca
gtgaaaaagagaaagacagcgttagcgctgctgcttcttggaagcgttttttccgccacaggaaaagatgccggctggcagtggtacaacgaaacgcgcagaacgccggaggacgacaaatcctcttcaacacagcctcagcaggcctcgccggacatcatggagaagcttgccacgctccagcaggccacgaagcgcgccatgtacgaggccattctgtatccgggcgtagagaactttacccgctacttccgcctgcagaactactggacgcagcaggccgggttgttctcgatgagcgccaaaaaggcgatgctcgagcatcccgagctggactacaacctgcagcacagccactacaacggtaccgtgcgcaaccagctggcggcggactttgctgaccagcgccgcgccattgaaacgctgtctcagcactatggcgtgatgttcttctaccgcggacaggacccgatcgacggccagctggttcaggtcattaaaaacttccgcgaaacgtatcacctcagcgtcattccggtctccgtggacggtatcgtgaatccactcctgccggatacccgaatggatggtggacaggccaaccggctgggtatccgttacttcccggcactgatgctggccgaccctaaaagcgggacggtcaaacccgtctcgtatggctttatcagtcaggatgacctggcgaagcagttcctcaacgtttccacagattttgcccccaacttttaa

SEQ ID NO: 204159 - DNA, 249 bp, Klebsiella oxytoca
atgcgcaaattccgttttcgcctgcctgagttcgacgtgcccggattatgggtgctgagcctcgggatatggtttcacattatttcccgcctggtccggcgcgagccggagatggccattcttctggcgcagataatcggcgtatcgatggtgctctgggggggctaccgcattatcaaccgctggattgatgctgcccgtgaggccgaaaaggcccgtgatgccggaggatgccgacatgaaccttag

SEQ ID NO: 204160 - DNA, 555 bp, Klebsiella oxytoca
atgaaccttagacataccgtgtttaccgtggcgctcatgaccctcagtctggccacacaggcttccacaatggacgagatcaaatcgttatggcatccacagggggcgcgagcgtcgggatctctgccaacatccccgaaagaccctgaagctaagccacttccggcgaagcagccggtctggtaccgcctcagcaatggccgccaggtcaatctggccgactggaaggtcgtgctgtttatgcagggacactgcccgtactgccaccagtttgatccggtcctgaagtcgctgtcggcacgggtggggtttggggtgatggcctacaccatcgacggtcagggggatgcgtcctttcccgatgcgcttcccgcgccgccggaggtgatgaaaacctttttccctaacctgcccgtggccacgccaaccacctttctcgtcaacgtaaacacccttgaagccctgcctctgctgcagggcgcgaccgacgaacagggctttatggcccgcatggatacggtccttcagatgcgcggagtgggtaacaatggctga

SEQ ID NO: 204161 - DNA, 429 bp, Klebsiella oxytoca
atggctgatcagaacaatgcaaaggaacacgacatgatgtcttccgggatgcttcagagagctacgacgccagagttaatcacgctcagggcacagaaaaatgacgcacggttcggcgtttatgctgagtgggcgggcatattgctcattgctggcgtgctgtcgcgcgtctttatgacatacgttttcgatgcctgcgtcggcgactggatcaagaacggtcacctgcaactgaaagatttgtggaacgtgttgatgtacgccattccactgatatttatcgcgctgagcggtgggcttgccgttgcaggcggcgtttatgcaatcctgaactcgctttatacgaaatggcaaatgttcatactaaaacgaaaaacgggaaaactcgcccagcaggcgagccgggagggtgccgatgttcgtccgtaa

SEQ ID NO: 204162 - DNA, 1371 bp, Klebsiella oxytoca
atgttcgtccgtaaacctctctccatgctgtgtggcatccttcttacgtgttcagcgagcgtgagtgccgacgtgaacagcgacatgaacaccttctttaataagctgggctttgcgtccaacaccagccagcctcaggtctggcaggggcaggccgcgggctacgccacgggcggctcactctacgcgcgcacgcaggtgaaaaccgtccagcttatctccatgacgctgcccgacataaacgccggctgcggcggcatcgatgcctatctgggatccttcagctttattaacagcgatcagctgcagcgtttcgccaagcagattatgtccaacgcggcgggctacttcttcgatctggcgctgcagaccaccgtaccggaaatcaagaccgcaaaggacttcctgcagaagatggccagcgacattaacagcatgaacctcagctcctgccaggcggcgcaggggattgtcggcggtctgtttccgcgcacccaggtttcccagcagaaggtctgccaggacattgccggtgagagcaacatgtttgcggactgggcggcatcccgccagggctgcacggtggggggaagcatggataaggtccgtgataaggccagtgataaggataaagagcgcataacgaagaatatcaatgtcatctggaacgcgctcggaaagaaccgcatgtttgacgggaataaagagcttaaggagttcatcatgaccctgaccggaacaatggtctttgatgagaagggtaatataaccccgcttccggcaagaacgaccgatcgcgaccttattcgggccatgatggagggggggactgcacgggtgtatcactgtaatgacagcgataaatgtctgaaggtggttgccgatgctaatgtcacgatcagccagaaaaatgcactgaaaaatcagataaaagacatcctttccagcattcagaataaagccgttgccgatcttaagttaaccgagaaagagaagggatttatcacaagtactaccatcccggtcttcaagtacctggttgatccccagatgctgggggtttctaacagcctcgtttatcagctaaccgattacatcggctacgacattctgctccagtacatccaggagctggtccagcaggcccgtgcaatggtggcaacgggaaactatgaccaggcggttatcgacagcatcaataataaccttaacgaagccacgcggcagatagcctccttccaggcacaggtgcaggtacagcaggatgcgcttctggttgttgaccgccagatgagctacatgcgccagcaggtctcggcacgcatgctgcagcgctaccagaacaactatcatttcgggggggcgcgctga

SEQ ID NO: 204163 - DNA, 2823 bp, Klebsiella oxytoca
atgcaggaaatctatgtcatcgcgggcggcgactggctgacgcagacgctgaatgccatcgtcacgttcatgtcgacggagaactgggttgttattcggcgtattgcgacggctttctctgtgctggttgtggccatttcgtggatacgacggcacaacatcatggatatgctgggctgggcaggcgttatcgtgttgatgtcgctgctggtcagtgttcgcacctccgtacaaataatcgatatcagtaatcagacaaaggtctataaagtcgataacgtgcccgtcgggctggcactgccggcatcgctgaccaccaaaatcggatatgcccttgttcaggggtatgaaatggtcttttcacagcccgacagcatcacctacagcaaaaccggcatgatatttggggcgaatctggtttcacgcagtacggactttttatcacagaacccagagataacgacgatattcacggactatgtgcagaactgcgtgatgggcgatattttcctgaatggaaaatataccatggaagagctgatgaacagcgcagacccgtatacgctgattttctcaaagccgagtccgctgagagggatattcaacaacaataatcagtttttaacctgtgaagaagccgctgcggtaattaagccaaagcttgccctagatactcagaccggaggaaaaacatggagttactacgtgcgtcagctttttggcggacgtccgaatcctgacattttgttcagccaaatgatcggggacagctataactatttctatggtgccggtcagagcgctgcgtcgattgtccgtcagaatgtgacgatgaacgcgctgcgaaacggcatcatgagctatgccgcccgcaacggtgatacctcaagcctgctgaatatcgccactacgtcatcgatggagaagcagcggctggcgcatgcgacggtcgggcaggtggctttacgctcacttcctatgtctcagacgttgattgttggtctgactatcggaatattccccctgatggtgctgggcgggatgtttaacgccgtcacccttaacgtgctgaaggggtacgtgctggctatcatgtgggtgcagagctggccgctgctttacgccatcctcaacagctgcatgaccttctatgcaaaggccaacggttcaccagtggttctctcggagttgtcacaggtgcagataaaatactcagacctcgctaccacggcaggctatctgtccatgctaatcccaccgcttgcatggggaatgctgaagggactgggagcggggttctcaaatctctacagccatctggcctcttccgctatcagccctgcagccactgctgcctctggtgctgttgatggtaactattcttatgccaatatgcagacagaaaatgtgagtggttttaactggaacactaacagctcaacgatgtttggtcagatgagtcagcaactggctaatggggcaacctcaacacagatgcgtgatggtagtacggtgactgattccacacaggctgctagcaaaacaccgctaaatattaacttttcacgtcagatcgcgtccgctcaacaagcaatggcacgtgaagcgcaggctcaatcggaaagtgcgttgcatggttatagtagtagcttaagcagtgcatggaatacgctcagccagtttggctcaaaccgtggtagcagtgattctatgactaatggtgcggacagtaccatgagtgctcaggattctatgatggccagccggatgcgtagcgcggtggaaagctatgcgaagggacacaacattagtaacgagcaagcgactcaagaattggcttctcgtagtactcgcgcttccactggcctttatggtgacgttaacgcaaatggaggcattggtatcaaggcgttcggaaccggtggcggtatcaactttaaagctggtgcgagggtcggtgttgatggtgaagatcttgattcgcatcaggcatccagtagctcccgatccagccaagatgctcgtcacgatgtggatgccagagctaccaaagacttcaaagaggcaagtgattatttcaccagccgtaaactcaatgagtctggaagccacactgataataatgcaacttcccgtgctgaccaactttccatagctctgaattctgcaaaacaaagttacgaccagtatacaaccagtcaagctcgtagccatgagtatgcagaaatggcgtcacgaacagaaactatgagtggtcaagttaatgaagatcttaaccagcagtttgcacaatatgtacgcaaaaactccccgcaggatgctgatatgatacttaccaacactagttcacccgaagtagctgcgcagcggcgagaaatggcttggtcatttgttaaggagcaggtacaaccagaggttgataatgcctattctgaggcaaaaagtacgttgggtcaggggatgacaaatatttctgctggcggtggtaggcaggatgtaatgtcggactttgcgacacataaagcaactgttgagaaagtgaccagcgagtcgggtataaaagacaatgttaagggaaatgttgatggaatgctggatcaaactcgtaatagtatttcagggaaacaaagtgatattcagaatgcatccacagtaattaataatcaatattctgaactggaaagtaatcacaggtctcaaaataaaaaacaggataatatgtataataatgagaagtctgctcaaaaatcaattccaggagcggacagcccagaagaacttctggcaaaagcaagagagttggagaataatcagaagaaataa

SEQ ID NO: 204164 - DNA, 477 bp, Klebsiella oxytoca
atgaaagaagttatgcgtgtcctgtgggtggtgtctgtccaatacattgcatgctggttttcaggctgggatgctgcctctacgttctttatgctggtcgtattgtttttgtggcagataatctttacttacatcaatcatcatctttccagaaggaaagaaggtgatagtagggatgtttcatctttgatatatctattgtgctcttttcctgctctgttttcaccgttgatctcaatgctgatttttatcggtcttacggtttttagagtatgtacaattggtggcgttacagtaggagctaagtcactgaaggaacagtttacctttgatggcgcatacataggccagtccgatactgattgttctgagcctatgcgttcaaatcctgccactggtttaccgatgtgcggagttgttgactcttctggtaacgcttatgggagttccataagagtagatagtcattaccattaa

SEQ ID NO: 204165 - DNA, 801 bp, Klebsiella oxytoca
atggttcaacaaaatggaatgaaagtagcaacgttgttggctctttttaccctctcagggtgtagcagtatcagggatgttgagtatatagatccgaaaggatattcggatgtggcaagttatttaagtgaaacttttgaaaaatcgaattgtataggcacaactttctcgtctcaagggcggaaattcataaattcagatggcttaaactatcaattgggcgggaaaaacctaagttgctatgtagcctcaattgaagagtcgatagatagatattgtgttgctaaacaaggggaaatggtacagggaggaacatggtgtgtagtgaataaaatgccattgtttcatgtgaattatagccctgatacctcgttaactaaaatagggcttggatctagggttttctctacagtagagccacctagttctcaggcgaaacagcaatggttgagttcggcggagagacttggatatattagcgagcgggttcagcgacggattgatatggataaggaagttgacttggccaatgagaatgctgaaaaaaagagaaaagctatagagatgaatgctgaagttgatgccagtgttggcgatttgatatgtcgagaggattacgaggcgaaaccttatcaatatccaggggttgcatactacaaggcatacgtggaaaaaaaagagaaaaataaactacagttgcggttggtttggcacggtggtgatgggtttgtagttaacgatataaccaatgtgaataacataatctggttaagccctaaagggtggcgtcattgcaattga

SEQ ID NO: 204166 - DNA, 2295 bp, Klebsiella oxytoca
atgagttttaatgctaaggatatgacccaggggggtcagatcgcgagcatgcgcatccgtatgttcagtcaaattgccaatattatcgtttactgtctcgttattctcttcggcgtaattgttgctctgactctgtctattaaactgacctggcagacgtttgttaatggcatggtttattactggtgtcagacgctggcccccatgcgcgatattttcaaatcccagcctgtctataccatccgttattacggccatgagctgaagtacaacgcgcagcaaatactgcaggacaaatatatccagtggtgcgcagaccaggtctggacggcctttattcttgccgccatcatcgcggccgtggtgtgcgttattaccttctttgtcaccacctggattctgggccatcagggtaaacagcagagtgaggacgagataacgggggggcgccagctgactgacgacccgaaagcggtggcgaaaatgctcaggcgcgacggtctcgcatccgacatcaaaatcggtgagctgccgcttatcaaggactcggagatccagaacttctgtctgcacggcaccgtcggggccggtaaatcggaagttatccgccgtctgatgaactacgcccgccagcgtggcgatatggtcatcgtgtatgaccgttcctgtgagttcgttaaaagctactatgatccggccacagataaaatccttaacccgctggatgcgcgctgcgctgcatgggacctgtggcgggagtgcctgacgcagcctgacttcgacaacgtgtccaatacgcttattcctatgggcacgaaggaagaccccttctggcaggggtcgggacgtaccatctttgccgaagccgcttatctgatgcgcaacgataaggaccgcagctacagcaagctggtcgacacgctgctttccatcaagattgagaagctgcgctcgtacctgaaaaactctccggcggcgaacctggtggaagagaaaatcgagaaaacggccatctccatccgcgccgtgctgaccaactacgtcaaggccatccgctacctgcagggcatcgaaaataacggcgagtcgttcaccatacgcgactggatgcgcggcgtgcgtgaggatggtaaaaacggctggctgtttatctcttccaatgccgacacccacgcttccctcaagccggttatctccatgtggctgtccattgccattcgcgggctgctggcgatgggggaaaaccgtaaccgccgcgtgtggatcttcgccgacgagctgccgaccctgcacaagctgccggacctggttgagatcctgccggaggcgcgtaagttcggtggctgctacgtcattggcatccagtcctacgcccagctggaagatatttacgggcagaaaccggcggaaacgctgttcgacgtgctgaacacccgtgcctttttccgctcgccgtcgcgcaatatcgccgagttcgccgccggtgaaatcggtgaaaaagaaatcctcaaggcatccgagcagtattcctacggcgtggacccggtacgcgacggtacctcagtcgggaaggacatggagcgcgtcaccctggtgagctactccgatgttcagacgctgccggatctctcctgttacgtcacgcttcccggcccatatcctgccgtgaagatggcgctgaagtatcagcagcgtccgaaggtggcgccggaatttattccacgcaccatcgacggtaaagcggaagaacgcctgaatgccgcgctggctgcacgtgaacatgaatcccgcagcatcgccatgctctttgaaccggatgcagacgttatcgccccagagggcagtgcgaagaatgctggacagccacagcagccacagcagccacagcagccacagcagccacagcagccacagcagccacagcagccacagcagccacagcagccacagcagccacagcagccacagcagccacagcagccacagcagccacagcagccacagcagctggcgccagcgctccgcgctgcagatgcggcatccgcttcggcatccgtggcaggtaccgtcggcacaggcggcgtggagcctgagctgaagacaaaggcggaggaggctgagcagctgccgcccggcatcgatgaaagcggtgaggtggtggatatggcggcatgggaggcgtggcaggcggagcaggacgaactgtctcctcaggagaggcagcgccgtgaagaggtgaacatcaacgttcaccgtgcgccagaaaaggatcttgaaccgggaggatacatctga

SEQ ID NO: 204167 - DNA, 5241 bp, Klebsiella oxytoca
atgatgagtatcggatcggtaaaatccgccggcagcgcgggcaattattacaccgacaaggacaactactacgttatcggcagtatgggcgagcgctgggccggaaaaggggctgaagcgctgggactgagcggcggggtggaccagaaggtctttacgaaggttctcgaggggcgcctgccggacggcagcgacctcagccggacccaggacggggcgaacaaacaccgtccgggctacgacttcaccttctctgcgcccaaaagtgtctccgtgatggccatgctcggtggcgacaagcgccttattgaggcccacaaccgcgcggtggagaccgccattaagcagatagaggcgatggcctccacgcgggttatgacggagggcaggagcgagacgcaactgaccggcaacctggtgatggcgctgtttaaccacgataccagccgcgaccaggagccgcagctgcacacccacgccgtggtggccaatgccactcagcatggcgatgagtggcgcacgctcagcagcgacaaagtgggtaaaaccgggtttattgagaatatctacgcgaaccagattgcctttggccgcctgtaccgtgccgcgctgaaggatgacgtcgcggcgatgggctatgagactgagacggtcggcaaacacggcatgtgggagctgaagggcgtaccgacggagccgtattccagccgcagcaggaccatcagcgaggcggtcggggatgacgcgtccctgaagtcccgcgacgtggcggcgctcgatacccgccagtcgaagcagaaggttgaccccgaacagcgcatggccgagtggatgcagaccctgaaagcgacgggattcgacatccaggcctaccgcgaggcggcggaccagcgggttatgcaggggaatattcccgcaacgacgcctgaagccattgatattaacagcagcgtcggacagtccattgcgatgctgagcgaccggcgggcgcggttcacgtattccgaactgctggccaccactctcgggcagctgcccgcgcggtcgggcatggtggagatggcgcgtgacggcatcgatgcggcgataaaaaacgagcagcttatcccgctggataaagagaaggggctgtttacctcgaacatccacgtactggacgagctgtcggtgtcggcgatgacccgggatttacagcgggcgggtcaggcggacatttttccggataagggcgtgccccgcagccggtcatacagcgatgccgtcagcgtcctggcccaggaccgtccgccggtggccatcatttcgggtcagggcggggcggccggtcagcgtgagcgcgtggcggagctgacgatgatggcgcgcgagcaggggcgtgacgtgcagattatcgccgccgacaggcgttcgcgcagcgcccttatgcaggatgagcgcctcagcggcgagcatatcaccgacagacgggggctgacggaggggatgacctttacgcccggcagcacgctgattgtggaccagggggagaagctgaccctgaaagaaacgctcacgctgctcgacggtgcgctgcgccataacgtccagctgctgattgccgacagcggccagcgcaccggaaccggcagcgccctcaccgtcatgaaggaggcgggggtgagcacgttcgcgtggcagggcggtgagaagacgcgggtctcggttatcagcgagcctgaccagcggcagcggtatgaccgcctggccgctgactttgcccgaagcgtccgcgcaggcgagcacagcgtggcgcaggtctccggtccgcgcgagcaggcggtgctcgcaggtgctgtccgcgaggcgctgaaggcggaaaaggtgctgggcgagcgggaggtcagcatcaccacgctggagccggtctggctcgacagccgccatcagcaggtgcgcgaccactaccgggagggcatggtcatggagcgctggaatgcagaggagcgcagccgggagcgctttgtcattgaccgcgtgacgggccgcaacaacagtctgacgctgcgcaacgcgcagggggagacgcgggtgacccgcctgtctgaactcaacagcagctggtcgctgtaccgcaccggcacgctgcaggtggccgaaggcgaccgcctggcggtgctgggtcaggcgcagggggcgcggctcaagggaggcgatacggtgaccgttaaggcgctcggggaggcggggctcgtcgtcagcctgccggggcgtaaggcggacgtggtcctgcccgccggtgacagcccgtttaccgccgcgaaggtgggtcagggctgggtggagtcgccgggccgctcggtgagcgacagcgccacggtctttgcctcgctgtcgcagcgcgagctggataacaccacgctgaacaagctggcgctcagcggtgcggcgatacaactctactccgcgcagacggcgcagaaaacgacggagaagctgtcgcgtcagtctgcatggagcgtcgtgtctgaacagattaaggatgcggcggggcatgacaggctcgatgatgctctggcgcaccagaaggccgggctgcacacgccggagcagcaggctatccatctggccattccggtgctggagggtaacggcctggcgttcacgaagccgcagctgatggccgccgcgaaagaatttgagcagggcagcctcagcctgcaggccatcgaaaaggaggcggaccggcaggtgcgcagcggggcactgctgtcggtgccggtatcgccgggaaacggcctgcagctgctggtctcacgccagtcgtacaacgctgaaaaaagcattatccgccacgtgctggagggcaaggaggccgtcaccccgctgatggataaggttccggacgcacagctggcgggcctgaccgacgggcagcaaaacgccacgcgcatgatactggaatcccccgaccgctttaccctggtgcagggttacgccggggtgggtaagaccacccagtttaaggcggtcatgtcggccatcggcacgctgccggaacgggagcagccgcgcgttatcggcgtggcccccacccacagggctgtgagcgagatgcgcgatgcgggcgtgcccgaaacgcagacgctggcggcctttattcacgacacgcagcagcagctgcgcggcggcgagcggccggacttcagcaacgtgctgtttctcgtggatgaaagctcgatggtcggtaacgccgacatggcgaaggcgtacagccttattgccgggggcgggggacgcgcggtctccagcggcgataccgaccagctgcagtccattgccccgggccagcccttccgcctgctgcagaagcgcagcgccattgacgtggcggtgatgcaggagattgtccgccagacgccggaactaaaacctgccgtctacagcctgattaaccgcgatatcggcagcgccctgacgaccattgagagcgtggcgccggcacaggtgccgcgcagggtggatgcctggcagccggacagctccgtcatggagttcagccgcgagcgggaggaggccatcgcgaaggccgtggcggccggcgacctgatgcccggcgggcagcccgcgacgctgctggaggctatcgtgaaggactacacggggcgcacgcaggaggcgcaggcgcagaccatcgttatcaccgccctgaacgccgaccgccgccaggtaaacgccatgattcatgacgcccgtcaggatgccggcgaggtgggcgaaaaagaggtcacgctgccggtcctcacgcctgccaatatccgcgacggggaactgcggcgcatgacaacgtgggaggcatcccgcgacagcctggtcctgctggacagcacctattacaggattgagtcgctggacggggacgcgcacctggtgacgctgaaggatgcgcagggcaacacccgcagcctgtcgcccgcgcaggcggcgacagagggcgtcacgctctaccgtcaggacaccatcaccgtgtcggaaggcgaccggatgcgcttttcgaaaagcgacaacgagcggggtttcgtggccaacagcgtctggacggtcagtgagataaaaggtgacagtgtcacgctgtcggacgggaaacagacccgtacgctcacgccgtcagcggagcaggcagaacagcacatcgacctggcctatgccgtgaccgttgaaggctcacagggggcgagcgaacccttctccatctccctgcagggcacggacggcgggcgtaagcggatggtgagcttcgaatcggcctacgtggcgctgagccgcatgaagcagcacgcccaggtctataccgacaaccgggataagtgggtggccgcgatggaaaaatcgcaggcgaaaagtacggcgcatgacattctcgagccgcgcggcgaccgtgccgtcgcgaatgccgcccgcctgacggcgacggcaaaatcgctgggtgaggtgccggccggccgcgccgccctgcgccaggccgggctgcagcctgatggctcgatggcgaaatttatctcgccgggacgtaaatatccgcagccgcacgtggcgctcccggcattcgaccgcaacggcaggcaggcgggcgtctggctgagtgccctgacctccggagacgggcagttgaaggggctcggcggcgaaggtcgcgtgatgggcagcggggacgctgcgtttgcgggcctgcaggccagccgtaacggcgagtcgctgctggcgcggaatatggaagagggcgtgcggctggcgcgggagaatccgcagagcggcgtggtggtgcggctcgggggcgaggcgcgaccgtggaaccccggcgccattaccggcgggcgcatctgggccgacagcctgccagacggcaccggtacgcagcccgcagaaacggtttcgccggaagtgctggcgcagcaggcgcaggaagcacggcagcagaaagagcttgaaaagcgggctgaagaggcggtccgcgagatggcccgcagcggcgaccggccgtccgggggcgctgacgtcgccgtccaggatgtggtgcgggatatggagcgggtgaaagaaacgccggtatctcccctcacgcttccggatgcgccggaagaacgccgccgtgatgaggcggtgtctcaggtggtgcgcgagaacgtgcagcgggaccgcctgcagcagatggagcgcgaaacggtgcgcgaccttgaacgtgaaaagaccctgggaggcgactga

SEQ ID NO: 204168 - DNA, 738 bp, Klebsiella oxytoca
atgcgcgctgaaaaccatccgctgttcccccttgtggtagtggccgactgctggctgcagcgtctgcttgtgtggacgccgggccagaccgaccttatcaaaaccgtggcgctgctcctgatggttgccgaccacatcagcatgctgtgcggactggataatgactggctgcgtcttgccggtcggggagcgtttccgctctttggcctggtctgggccatgaacctcgcccgccatccgcagattcagcagcgcgccctgaaccggctctggatatgggccggggtggcgcagggcggctggatactggccgggctgcgcccggacctgggcaatatcctgtttgcctttgcggtcagcggacaggcgctggcgctgatgcagcggcacgggccgcgcgcgtggccgctgtccctgatgctggttctggcctggctgccgttttcggcgggaagttacggtctggcgggagtagtcatgctgatgctggcctgcggcgtctgtatgacgggccggcgcaccacacgcacggggctggcgctgtgtctggcgctggcgatactcgcgctgaatgctgcggacagccccgcctttgccatcgcggggctggtgatacccggaataaccctgacggtgctgagccggacctgcactctggtgccccgcttctggccacgcgaatttttcccgctgttctacgcggtgcacctggccgtcatcggactgatggtgatgtga

SEQ ID NO: 204169 - DNA, 690 bp, Klebsiella oxytoca
atgaaagagcaggggcgacccacgctgacgctgcgccgtaagacagagccagaaggtcagcgtaccgtaaacaacggcagtgaaccggacggtgcgggaccgggccgggtcacgcgtaaaaagaccgtggtggtgaatgcgacacccgcctggaaggtcaggaagcaggcggtggatgagagcgcgaaaaaggcgcaggcggatgagaaggccgcccgaaaagccgaaaaagcccggctgtgggccgaacgacaggcgcaggagcgggaggccatgcgtgcggccaggcgtaaacctgccccggagccggtttaccggaaggtcatgccgcttacggacgcgctcgcgctcctggaacgttgctggccagccctggttacggacggccagccgcagctcctggcggtcaatatccgggaggcgatggtcagtgacattcgccagcgcaggctggatgtctccgtgaagacgctgaagcgctgccttgctgccgtcacccgctcggatgcgtatctgggtgccatgacggtgggcgcgtggcgtaaaaaccttgccggtgaaccggtcgcaccggtgagtgcggaggaggcggcgtatgccgtggcgcgcagggctcaggagcatgctaaacaacagcgcagggcgatcagggaagcacccgcgcccgcgcccgcacacgatacgaactga

SEQ ID NO: 204170 - DNA, 792 bp, Klebsiella oxytoca
atgaataaaaccctttcagtcatgcttgccgctggccttctggtctgcggcgtggcgggggcggcagagaaacctgccgctgcctttaccccggagcaggaagcccgcattggggaaatcgcgaaggactacctgctggcccatccggaggtgctggttgaggtcagccagaagctgcaggcccaacagcaggagaagcagcagcaggcgatgacggccgccgtgattcagaatcaggcagcgctgctgaacgataaaggcacaccatcatatggtcctgctgatgctaaagtgacggtcgttgaattctttgattaccagtgcatctactgtgcccgcctggcgccggagctggagaaggtgataaaggctaacccgaacgtgcgctttgtgttcaaggaattcccgatattcggccagcgctggccggcgtcgctgagtgcggcgaaaaccgggctccaggtctggaagcagaagggggccgatgcttacctcaactatcacaacgcgatttacgccaccggccacaacgagggcaagctgaccgatgctgatatcagcgcggccgcaaaagccgtgaagttcgatgcgaaaacagcccctaacgttcagggaaccctggatggcataaacacgcttgcgcagcagctgggcttcagcggcacgccagccctggtagtcctcccgtcaaccggcgccagcgctgataacgtgaccgttatcccgggatacaccagtgcggaggtactgcagcaggccatccgtcatgcagccggcgatacaaaaaaataa

SEQ ID NO: 204171 - DNA, 546 bp, Klebsiella oxytoca
atgcgtaagttcacctttctccagctggccgtgtccggtctggtctgcctttcgctgagctgtattcagcccgcagttgctgctccctccgttcaggtcggtttttcacctgaaggcagcgcgttgcagctggtccttaagactattgagtcagcacagcacgacattcggctgatgggctactcatttacgtctccggaggtggttagcgcactggtcagagcaaaacaccgtggtgtggatgtgaaaatcgtgcttgatgagaagggaaacagaagcaaaaccagccaggcggcgatgaacgttgtggtaaatgccggtattccactgcgtaccaacggccactacgccatcatgcacgataaagtcattattgttgataatcatacagttgaggctggtagctttaactacactcgctctgctgcatcgaggaatagcgagaatgtgctggttattaatgaggtgccggaagtggcacaaacctaccttcagcactggcagtcgcgctgggacggaggaactgagtggcattcttcatactaa

SEQ ID NO: 204172 - DNA, 252 bp, Klebsiella oxytoca; identical to SEQ ID NO: 154348

SEQ ID NO: 204173 - DNA, 723 bp, Klebsiella oxytoca
atggaaaaggaaagtaaacaatttgccgtactgattgatgcggataatgctcaggcatcagtccttgagtccatccttaatgaaatttccctcatgggagatgcaaccgtcaaaaggatttacggcgattttaccaacccacagagctcatgctggaaacatcttcttcagaaaaatgctataaaaccgatacagcagttcgcatatacaactggtaaaaatgccactgacagtatgcttattattgatgcaatggatctgttgtatactcaggcatttgatggcttttgtctcgtttccagtgacagtgactttactggtttggccattcgaatcagagaagcaggtcttgaggttatcggttttggtgaaaagaaaacacctcaggcattcaggagcgcatgtaataaatttattaccactgaagtttatcgtgaagaaagagatagtgcagctcaacctgaacaggccgggattcgaacagaagaagaaagttacagcatgctgactgaaattattgaaagttttgctgaacaagaatggatacatctcggacaactcggagatatcatgaataaacgaaatcctgattttgatgccaggaattatggatatcgtaacttgtcagcgatgttacaaagcaaacaagatacattcgaattggtcagaggcaataatataggcatgtctcataatctgccctatgtgcggctgaagtcttaa

SEQ ID NO: 204174 - DNA, 597 bp, Klebsiella oxytoca; identical to SEQ ID NO: 154349

SEQ ID NO: 204175 - DNA, 291 bp, Klebsiella oxytoca; identical to SEQ ID NO: 154350

SEQ ID NO: 204176 - DNA, 255 bp, Klebsiella oxytoca; identical to SEQ ID NO: 154351

SEQ ID NO: 204177 - DNA, 711 bp, Klebsiella oxytoca; identical to SEQ ID NO: 154352

SEQ ID NO: 204178 - DNA, 591 bp, Klebsiella oxytoca; identical to SEQ ID NO: 154353

SEQ ID NO: 204179 - DNA, 222 bp, Klebsiella oxytoca
atgactgatttcaccgaactgacacagtcagaaataaacggtgctttatctcagctaaagcaactcagcgagtaccccacgcccgtcactcaaattcgcacggatttttcccaatatattttaaatatggtgggggcaaagaagaaggctaattcagtaatgagtgcggtcgtaaccgcaactcgcatccggagagtcagacccttcgatggagatgagtaa

SEQ ID NO: 204180 - DNA, 348 bp, Klebsiella oxytoca; identical to SEQ ID NO: 127406

SEQ ID NO: 204181 - DNA, 1416 bp, Klebsiella oxytoca
atggggagtaagtggaaacaaacaaccttaggtgatctggcgctgggctttgatggtgcggtagatggaccttttggttcaaatttaccagcttcggcttatacagaaagtggatatccaattattcgaggaagtaatttatccatcggattagatgatttcaaagatagtgactttgtatttgtaccggaacccatattccaaaaactttcacgtagcgagtgtagggcaggcgacattatattcacaaaaaaagggacattagggcaaacggggcttattagcactaaacatcgtttcaaaaaatatttgctatcatcaaatcaaatgcgtcttcgtgtagatcctgaaaaggcattacctgaatatgtttattattatgtttcttcacaaaaagcaattaacaaactaattcaagattcagagtgtaccggtgtccctaaaataaatcttgcttacttgaaaagcttccctatttcgttacctattttaagcaaacagaaagatataatttatattttagggagccttaatagaaaaatcacactcaatcgccaaatcaaccaaaccctggaacaaatgtcccaaaccctgttcaaatcctggtttgtggatttcgacccggtgattgacaacgcgctggatgcgggacacccaatcccggaagcgctgcaatctcgcgccgaactgcgtcaaaaagtccgcaatagtgcagatttcaaaccacttccggcgggtattcgtgcactgttcccggctgaatttgaagaaacagagttgggctgggtaccgaaaggttggataacaacatctttcaacgatttgatagaactaattggtggtggcacacctaaaacctctgtagaagagtactggaatggagatattccgtggttctctgtcgtcgatgcacctaatgaatccgacgtatacgtattaactacagagaaaaacattaccactggagggctcaacaattcctcagcaaaattattaagaaaaggaacaacaataatcagcgccagaggaactgttgggaaatgcgctatggttgctgtaccgatggcaatgaatcagtcatgctatggcgttaatggtaaaaataatatttctgatgagtatgtttatttccaattaaaaaatgcggtccagattcttcaacaaatggggcacggctcagttttcaacacaataacaagagatacattcaaaaatattaaagtccccttttgcaatgaagaattaacaaatagttattctttgcttgttaaaaattacttttcacaaatactgaataataattatcaaaatattgcattaaccgccctccgcgacaccctgctccccaaacttatctccggcgagctgtccctggaggatctcccggatttagtaacccaaaccgaacccgcataa

SEQ ID NO: 204182 - DNA, 1050 bp, Klebsiella oxytoca
atgagatggaatcagtcagacagaaaagtgcttacaattatagccattgtcggtgtgctcctgtatgccatttataagggcctgcagttcctggcaggtgccagtatgggggccagttttggagtgggcctgggaggaatgagtggctctcaaaaggttgaagagtcgcggaaagttgaaacggatgctccgccacaaattatttatcgcatagataaaaatcgatacctgacgctggaaaactacatatcctgtgataagggtggacaggtatattacaatgactctcagcggggaataaaaacacacctgggatgggatatcgatttttatgatttctcctatcgccgagggaataatttagcagcttataaaggttctgttattaatggggcagataatggttatcttgcattccctggcgcatctaccagacaatattgtggtagtggaaggtcagaaacaggttgccctgtgtttttcttcttttcagcagatcatgggaactcatttatatataaaattgtagctatggaatacagcaccccagaacgttttagtcagcttaaagtagtagtggctaatgatggtgtttatctaagggatgaatctaaaacggaggatagctattctcgccctacaggtctcaatgaccttagctcagtgaataaattaaggttttctgacggcaatttaatcagtgtttatgatgactggcagaaaaaaattgatgagttagtgaaagaagaactgataagaaaaaaaattccctatgcaaacgagtatggacctagatttcgtatattcgactatctcagaacattaacgccaccgaaaacacatgaggaaaggaatttaatggcaaacgaattgtctgaaatccagattaggattgaagatgaagtttataaagatggaattaaatttccgaagttttcaacgtcaagtattgatgttaaatatcaatgcaataaaaacattaaagctaaaatcatcacatataccaatgagtcaaatgggaaaaaggaggtggtgaaaaatgaacaataa

SEQ ID NO: 204183 - DNA, 1935 bp, Klebsiella oxytoca
atgaacaataattatgagcctgttcgggaacttgaatgtaagtttgatgataatgggcatccttcctggcgttcatttccctctcataaaaattgccaaatcagaggtgggtgtaatttacctccacatttgcctggggttattattcttgtacatggtgttaactcgacaggagaatggttttcaattgctgaggacaaaatttgtgaaggcctgaataagagacttggattaaaagggactgattataaactagtggctaataaatatttttctgatgaaaaaatagagattgaacctcttatagaaagagatttgcctgcgcctaagaaggaaacctctccagtcattcgcttttactgggggtatgcttcacctaaaggtaatgaagataaatatgttataccgttagccaatagaaaaggcgttgattatcatcagttgaaaatgcaaggtgtttctcatgaaagtattatggctcagggcccatttttctggggcggtgggccattccagaatggtacaaataatcttcattctttatggagcgagaaggggtttaaagagagagtcgcaggtatcaaagtccagtggtttaatgacgacaaagatcgccttttaaccaatgccccaccgcgaaaatactatgcccatgcagcaaaacgccttgcagacctggttgacagtattcgtaataaatatcccaaagatacagtaaccattatttctcacagccagggcactatggttgcaatggctgcggtagcgatagcgaagaatgcacctgatgcattatttgtacttaactcaccttatgcactggatcataatgaccttaatggcgcctcgcttccagcagaggaatgcatctctcctgaagggcgacagagcacattatctgcgatcgttgacaaggttgcctccagaaaaaatcacctgtcatcacttggatatgaaggactttgcgtaggtcagacagcggataaaaagaactggcgacctgatgtcactcctgccggtgaaagtggcagcagtgttgccgaacgagataaccacgggcgtacctatatttacttttgtcctcatgaccgggtaatggggtcacgcccgctacgctcaattggttggcagggattacccaataattctcgagggcagcctcatcctttgctgaaaaagcatcagggacatttatttcagcgtatgcttgcccgcagcacttcatgtggtgatactccgaatcccgtaacgccttttgcaaaactgccggatggaaaacctttctgggatgataaaggcgacaggtatcaaagcagtagtttcacttatccggatcctccagaatggcaaacggtttttattaatgccgaaaaggtacctgaacctgtagatgcttcaaatttggctgattttgatgtatcacgcgttggagcggagcatgatgacaggcagatagatggttggggggaatttaatccggataaaaaccataaaaacgataatacttatgacaactatatcaacctatatcctaatcaggatattgttactggatttaaaaatgtgggtactgaatctgagccccgattggtacctgtgagccgtaaggagacatttgaagaaaaggatcttcggctgagaacttatgtttctcagccgacggatcatagtactcttccgatgcgtgctgatttcatgtcacaggtagtggcatatgatttaccgattggctattgcgatgcaacctgggataaagaatttatggctgatttacggcgaaaagctgattggacgcagggtgaggatccttatctcttcagcggaatacctgacaacgtgcctgagcctgatttaattagtcgggacactgttattgataaatttgataaagagcaaagtaagctgccagcatatagatctgtaaataaagcataa

SEQ ID NO: 204184 - DNA, 264 bp, Klebsiella oxytoca
gtggggaaatttgctgttgttttaggggatgccacctcgcatggtggcaaagtcatatcagtttcatccagtttcgatatatccggtaaaaatgccgcacttttgaatgataccgtcagttgcccggaacacggtataaataaaattattgaatgcgatgtttctgcgtatgaagaaaacgggcgtggaattgtattgcatggctgtaaaactcagtgcggcgcgaatgttatcgcgagtatgcaggatatggaggttggctga

SEQ ID NO: 204185 - DNA, 1431 bp, Klebsiella oxytoca
atgggatggtctctgccggaggtgcctgaaaaagagcaggcaccatcctggtcaccgtggatctgtctgttcattataattctcggacttttcactgggctgcttgttgctgtactgaaatcaccggcgacagggttaccttcattgagcagtggcgcctggttaccactgacgacctggacatttgcgggcatttcggcagccatcgcggtctacactttcagccatgaaatgctggcaattcgtgtctggaactggaatgagtggtgccggaacatgcgtctgaagtggcgcttacgtgcacaacagcatcttgtcattctcagccatgttttcatcactgccgatacgggactgttagctcgtcttgcacatacgcaggaaggagaaagtgcagacacatcgcctctcacgatgttgccagacgaaccacttacgcccggtatttcacgttttgagcagctgcttcgtcatctcattgctcagataatgccctcggttcggtggcgatatccttccggcccactccagattattgttcagaccaacggtagcgacaaaggccgtgaatctcagttattccatcgtatctggtcagcaggttcccctccctggaaagctgagattcattttcaggacgcagactcatactttgatgactggaatcagtttatgggaccaataaagcggcccgtcctcatattggtgatgcactatcgtctacccgatgatgttgtgtctgaatttgccagcgcgttatttttgatgccaccatcgatgctgaatccgggtgaacaaaaaaatgcgttacggatttttcgtgcgatgccgctcaacacccgtatgcttacaacggaactcagtgaattacgggatatggccctcacgcctgccaacaagaaacaccttgtctggcacagcggtctgtcagatgcgccacgacagtcaatgagtcgggtgctgaatgacctatcggtccctctgtatgatggcattggcactggcgggatcattgattacgacagcgtatgcgtccggtatggcggtctcgctgactgggcaatgattggcgctgctgctgagatggcggcatatggacctaactgccaatggcttcttctcgaaggtgaagatgatgcctgggcagtgacgctcggaaactccacccccgcagtcgggcatgatcatttcgttattcagccaccctttcccggggggtctgttctgatggcattactgctcaatgctgggctgtacagcctgatgatccgctatttcccttcaaccgcactctccttgtcagggatctctcttcttctgctgtcattgatagtgacattgcctgggctgaccattttgctgagacgaattacagcccgtcttcagcgcccggaatttatccgggttgcacgacactccggaaaggaataa

SEQ ID NO: 204186 - DNA, 225 bp, Klebsiella oxytoca
gtggaaataccggagcaggcgaccgtatcttttcgcgtggcgctaaccctcacgcagtgggtgccggcactgctgtttgaagtgaaatcgcgcctcctcagactgctgcgcgtgaaagccgcacgtagtgaaaccgataaaacgcggttacagccagagatggaccagcttctggccggtctgattgcgctcgatccggcaggcagtgcggtgctttgcggttga

SEQ ID NO: 204187 - DNA, 504 bp, Klebsiella oxytoca
atgccgggcaaccgcccgcattatgggcgttggcctcaacacgattttacgtcacttaaaaaactcaggccgcagtcggtaacctcgcgcatacagccgggcagtgacgtcatcgtctgcgcggaaatggacgaacagtggggatacgtcggggctaaatcgcgccagcgctggctgttttacgcgaatgacaggctccggaagacggttgttgcgcacgtattcggtgaacgcactatggcgacgctggggcgtcttctgggcctgctgtcaccctttgacgtggtgatatggatgacggatggctggccactgtatgaatcccgcctgaagggaaagctgcacgtaatcagcaagcgatatacgcagcgaattgagcggcataacctgaatctgaggcagcacctggcacggctgggacggaagtcgctgtcgttctcaaaatcggtggagctgcatgacatagtcatcgggcattatctgaacataaaacactatcaataa

SEQ ID NO: 204188 - DNA, 1050 bp, Klebsiella oxytoca
atggttaaggcatacatatacactcgcgtatcatcattgcaacaaagcgatggttttgggattgagcggcaagtccatactcttatggattttcttgaagatgcggagttgcccaaggagttgggatatcagttagatccccatgattatgaggttttagaacaggacgccggtttgagtggctttaaagggcacaactttactaagggatctattggtaagtttaagaatcgtgtagcaagcggtgaaattacttctggatgcttactaatcgagagtgtggataggttcagtcgcaagcaagggtatgatgcaattgatgaatttacgtttctaatcaagcgtaacattgacattattgaagtagagacaggccaaatatttagctacaagctggatcataaactaacacagttatctacaagcattgaacgtgcttaccaagaaagtaaacgcaaatcacgaatggcagtgaaatcttgggccaacataaaacggaaagcagtagaagaggggattgctataagccgtaatgtcccatattggctagaagttaaaaacaacgaatatttaacacgtacagaacatgtcaataaaataaaacgtgtatttgatatgtatattaatggtgttggtgtgacgtcaattgtacgagagttgaataaagagggaggtaagcatgacggaggcgtatatagtactaattttataaatatgatgctacgagataggcggttacttgggtggcaacgtggaaagaaaaaagcaaacgaaacacaggaaggaagagaaaaaagggcgataaaaatatacccagttataattggaactgatatatttgacttagtgcaaagaaaaattgatgcaaataaagtaaccaaaagtgttagaacttcatcaaaacaaaaatcattatttaatggattggttcgttgtgaaatatgtggggaagcattagttggtcacttttctgaaagaggtaattatttacgttgtataggtactgtctcttatacacatctgacgctgccgacgatatgcagtgtgtag

SEQ ID NO: 204189 - DNA, 1101 bp, Klebsiella oxytoca
atgaagaaatattttttacttgttctctttttgatttctccgggctatgtgtgggcctgtctctacggcttaaattatggtgacgtgtccatcagtaatttaccagccaaaatattgcttagcgctggaagctacacttctggaaccgttatttatgactccgggaaaatatatcaccaaaaaaccaatgttctcaactgtgcaggtgatttacatgcccgttttacctggtcatctggaatagcgactacgcttatcggtaataacatttatgcaacctcggtgccgggcattggtatcagagttaaagtatggttaaatactacgggggaatatgatggtgaatcaacgtcatttaaggtcgataacagtgaacatcatataggtgatgctgattttcctctcggaataccgggttttgttgctttcaataccagcacgaattattctcccgtatatcagctacagcttgttgctacagggggtaacattgacactaatcgttctctaagctttaccgatccggtatcaaccgttgcaattaaagacagtaacggcgaattggttatttctcagttgcatatcagtggaacaactaatattcagctcgttcccatgggatgtaccgccagcacggccgcacttaatttccaaatgggttcagttaaaacaagtgagtttagtttttctaacaaagtcggttcagttcagcaaacgtttaccctaacctgtgagccaggtaccaacgtggcgatacgcgttacggcggcagaagcggaaggtgataatcccgatcattccgtaattgcgttaacacctggtgaaaacgtagcgaccggcgttggggtgcaactgagtattgatggcataccactagccgtgaataacgctacttaccaggtatttgccgattcgaaaagaaccacgataacaaatcctgaagcggaggctagctattcgatattcaccgaacctgataatccaggcggggcggcggcaacgaattcgttgacgtttactgcgaactattacaaatacggatccgaagtgactccgggtgaagccaatgcgagcggaacgctgacttttatctacaactaa

SEQ ID NO: 204190 - DNA, 177 bp, Klebsiella oxytoca
atgatgaaatgcagataccaaaagtattttagtggactgattgggggatttggtgcgaaggccggactcgaacatcgcaactatccttatgatcttaagaaattaaaaattatcacattggacatgataccaacattgataccatcagtcccgattggtgataatcgaacaaattga

SEQ ID NO: 204191 - DNA, 924 bp, Klebsiella oxytoca
atgatttctatatttttgggggccggtttttctaaatgggctttcgatttgccactggtaagtcagctttttgattttaatatttcttaccttactgcctcagaagagaaaaagctcgatctaattaaggaggattggtctgtctggatacaaaaaaatccggaagcaacatacgaaaattttgtttattggtgtattaataaatcctctcaccgtaggagcagagttgtttggtatgttaatagaaggttaactgaaccattcattactaggattcgtggtggatattctgctgctatgttcgatgaaaaaattgtgaaacaaaatgaaaggatagtttatttacgtaatttatttaatgagctagagggggctggtttaaaaaatatcattacttgtaattatgataatattgtcgagtataccctaggttgctctgggtttaattatggtataaaaaatgaaattttagtgggaagaggaagaaatccacaatttccttggcaaaatgcagatgtgagagttactggtgagatcctactggctaaattacatggctctttatcgtgggacaaatataataaatacaccagcggcaaacctggcaggacagggaaagctttaattgttccccctgctcctgaaaaagaacctccgcttgaattactagatgtttggacatttgctaggaatgccttagtcaatagcaaaatcttaattgtttttggcttttcttttaatgcgtatgataatgctttgctgaatctattgagggaaagtggctcaaatttgaaaaaggtaattttgatagatccctatccgaaagttgatgaggccaaatgtctttggccttcggcatcaatagagactatcaaccccttaaatgatattgtttttccggaaaagtggttcgaaatattatga

SEQ ID NO: 204192 - DNA, 498 bp, Klebsiella oxytoca; identical to SEQ ID NO: 156315

SEQ ID NO: 204193 - DNA, 795 bp, Klebsiella oxytoca
atgaaaataaagggtgccattccgttgcctgctgcccactttactgttttggcgtttagcacggttttgttgacagcctgccatgctggcaatcgccagtcacaaaagccgcccactcaggtggtttaccgttttgacgatcaccgttatctggagctggtgggtttcaactgtgaaggcgcgctctggtacaacgacacgcagaggcagatccgcgccgaagtggtggcgcgtgatactcctgttttcaggatttcattctttaaatatgttcacccatcggagaagtatattgccgttccctgggacgatttatcgggttttttaatttcccgcgattatggtcagacctggggacaggcgcgattctctccggtaggaggagcaaaacgatatggtaactggagaccagataaagatgatgttgaatccttcacagtggtcaacgaccagagtttcctgctgaccagacagggtgatttgtatatcagttcaaaaccttttgacgatccacgtcttcaaccaggtggcgagggtattctttattcatggcgtaattcgcggggagaactggaacatgatcgtttaatgcccggaagctcagggatggactggggatgggaatatacttcctggaatgcagttgctggcccagaccactggagtatttttgctcataaacccaactggcagggcatccccaataaagtcccggaggttaaaaattacaccggctgggaccatatgcgctgcgacccggatttagggctgactgcatcggaacagggaaaataa

SEQ ID NO: 204194 - DNA, 1497 bp, Klebsiella oxytoca
atgtcagggaggccatcagccggacggcaaatccacaccgactgggtgctggatgataccggacgaacctccccggtgttaagtgaagaggcactgcgtacccgtctggcggaacgttactttaccgactacagcaacgcctggctggaattcctcaacagtctgcgctggcgtcaggcagactcgctctcttcggccattgaccagcttaccctgctgggggacgtacaacgctccccgctggtcgcgctcggtaaaaccctgcgctggcaggcaggtatcgggcaggaagagacgacgatgggcacttcgctgctggaatcggtaaaacaacgggtttccggtcaggaaagtacggatgcgcgcacggcaaaaactgccgatccggcctccgtggtgacgcaaacttttgcgccgctgctggcggttttaccccctgacgagaatcaacctggtcagacgaaaaacagcgcaacgcccgtcagcgggctgacattacaggattatctgattcaggtgacgcaggcgcgtctttcgctccggcaggtcagtacctcaccggatccgcaggccatgacgctggcactggcacaggacgccttttcccggcgcgacaacccgctggcggtggcgcgcagccagggtgagctgctggcggccagtctcggccaggactggagcggcttcgctgatgcagcgtttgtacagccgcttgcgcaggcatggcagtcggtactggccccggcgcagcaggcgatgaatgaagcctggcgcacacagattgttcagccctggcaggatgcattctccgggcgctacccctttgcctcttccgaaaatgatgcctccccggcgctgctggctcattttatagcaccgcagcaaggcgtgacggagcagtttcttcgtcagcaactgggcggcctgctggataaacagggcgatgtctgggtgccttccgcactgaacagccaggggatgaaattcagtccggcgtttctggatgcggttaatctgctgacacaactggggcaggcgttttttatgcagggcgaactgcatacggaatttgatattcagatgtacccgatgcgcaatgtggtggagacggatttgcagatagacagcgcgatgatgaagtattttaaccagcaggcggaatggcagacattcacctggccggataaacagagcgcgcagccacaggccgtgcttagttattcccgcaatcagggggagaacatcggaccggtgcgtactgcttttcaggccgacggcccctgggcgctgttgcgtctgctggagaaagcgcagcgcgagaagactgacagcggccgctggcgcttaagctggcctgctgaggacggcgtcggcctgtcgctgaacctgcgcgcccagcgctacaacgggccgctggatttgctgaaactgcgccgttttaaattgcctgagcaggtgtttattcaggatgacgggggtaatgatgatgtccgctag

SEQ ID NO: 204195 - DNA, 1185 bp, Klebsiella oxytoca
gtgacggacgacaacaaacccggacttcctccattctggctggacgcgcagggacgcgaccgcacgccggagtttaatttttatcgtttctgccagcttgtcgaacggctgagcgaaaccaggctgggcgcgggctgctcacccgcagacgacccggtgcgttttcgcccacatccggggatgggctttccgacgggagaacttaagcttaccgaaactgacccggaacagccggatgcgccgcccacggtcaggacaaatttcctcgggctgtatggcgtggattcgccgctgccgacgacgtttatcgacgacattacccgtggccgggaaggtcatgaggcgatgatggcgtttctcgatatcttcagtcaccgcatcatgacgcagttttaccgtatctggcgtaaataccgctatccggagacctttgagccgggcggcacggacgccacatcacagtatctgatggcgctgaccggcatcgccagcccgcgcgaacaaccggcttatcacgggctggcgatactgccgtcgctgctgcatcccacccacaccgcagagggcattgccgccgttatccgctcgcaggcgcctttcacgcaggtgacggtgaagccgcattacccggtgctgatgccggtcgatgagcgcgcgcagctgtcgatggataaccacaggacgctgggagagcatctggtactaggcgatgaaatcagcgacgtgaattactgtgcggcggtggagctgtacaccgaagacccggatgaggccaggggctggatgccgggcggtcagttgagaaaggacgtactggcgctgctgcgggtttacctggggtgcgatgacgacgtgcgactgtgggtgactatacccactgaactcctgccgcgtccgcgcctgggtgatgatgggttattctccggttacaatattatgctggggctggatgaggggacgcccgcggaggatttgccgcagactgccagaatacatatagggcggttaagggagcgcaacgatgcttgtaaaactcatgaccagagaatgcttgtgttgaaagcagactcattccgtcatcctgcttttctggagcaatatcatcaattgcaatggcccgtgcaggtgaaagcgctgacacaacgatcgcatagcgttaatgctgaagcaggatccccgccctga

SEQ ID NO: 204196 - DNA, 177 bp, Klebsiella oxytoca
atgaggtatagaacgctgttcgatggagagtcactatacatcggcgacagtatcaagatcatcattgaccgatgcgtcgatgacgggaacaaaactagactgggtatagatgccccgaaggacgttaccgtggttcgaaaagagctgatctcgcgcgagtcacgatccaagacgtga

SEQ ID NO: 204197 - DNA, 1161 bp, Klebsiella oxytoca
atgcaacaggaaggttacgcccgaccaatacgtctgggcatggtgggcggtggtatcgacgcctttatcggcgccgtgcaccgattcgctgccaggcttgacggccagtatgagctggttgccggggccctgtcgtcgtccccggacaaggcgcgtctctctggcgagagactggggctagcagaggaccggatctatgccgattttctggagatggcccagcgcgaggtggaacggccggatggcatcgaagctgttgccatcgtgacgcccaatcatatgcactttccggtagcccgggcctttctcagtgtcgggattcatgtgatctgcgacaagccgatgacggcctcgctggcagacgcccgcgagctggtgagccttgccgggcgcagtaaggcgctgtttgcgctgacccacaactacaccgcttatccgctggtgcgtgaggcccgccagatgattgctgaaggtcggctgggagcgctgcgggttgtgcaggttgaatatgcccaggattggctgaccgaatcgatcgagaatgaagggcagaagcaagccaggtggcggaatgatccggcccaggccggggccggcggttgcattagcgatatcggtacccatgcctttaatctgctctcatttatcaccggtcttgaaacggagcgcctctgtgcggatctgagctccttcggccccggtcgccaactcgacgacaatgtccatatgatgctgcgcttcaaaggcggggcccgcgggatgctctgggccagccaggtggcgtccggcaacgaaaaccatctcgcgatccgtatctacggcgagaaggggggactggagtggcagcaggaaaatccgaaccaactctggtattgcccgttcggtgaaccgcgccgactgctgacccgcggtggagccaccctgtcgtctgcagcgagtgcggtgacacgcacacccgccggacatcccgagggttatctggaagccttcgccagcctctacagcgatatcgctactgcgatccgcgcacggcaactggatgacgacagtcacgctcagggaggtcttgtaccctccgttcaaagcggaattgaggggctgctgtttatcgatgcggccgtcaggtctcggggtagctgggtaagcctgacgcaggactga

SEQ ID NO: 204198 - DNA, 1059 bp, Klebsiella oxytoca
atgaaaacgattaaaggtcctgcaatttttctggcgcaattcgccggtgatgaggcgccattcaacagcttcgcgtcgatctgccgctgggcggctgatctgggtttcaaaggggttcaggtcccgagttgggacagccgcctgattgacctgaggctggcagccgagtccctcgattactgcgatgagttgaacggcgtggccgccgagcagggcgtgcagataaccgaactgtcgacgcacctgcaggggcaactggtggccgtacatccggcttatgacgaggccttcgacggctttgccgcgcccgaggtgcgcggcaatcccaaggcccgtgccaactgggccgccgaccagttgctgctggcggccaaggcgtcccgcaacttagggctgagctcccatgcgaccttttccggcgcgctggcctggccctatatctatccctggccgcagcgtccggcgggcctgatcgagaccgccttcgatgaactggcaaaacgctggcggccaattctcgatgccttcgacaatgctggtgtcgatctgtgttacgagattcatccgggggaggatctgcacgacggcgccagcttcgagatgttcttggacagggttgagcagcacccgcgttgtaatattctgttcgaccccagccatttcgtgttgcagtccatcgactacctggcattcatggatatctatcatgatcggatcaaaatggttcatgtcaaggatgctgaattcaatcccaatggacgcatgggggcctacggtggctaccagtcttgggtcgagcgcgccggccgcttccgttctctgggcgatggccaggtcgactttaaggggatattcgccaagctggcggccatggatttcgacggctgggcggtgctggagtgggaatgctgtctcaagcacccggaagtcggggcccgcgagggcgcagcgtttatcggcgaccatatcattcaggtcaccgatcgagcgtttgacgactttgccgatgccagcagcgacgaggcgatgaaccgcaagatgcttggaataggaggctga

SEQ ID NO: 204199 - DNA, 981 bp, Klebsiella oxytoca
atgcaatccaaggctaatactctgccggccagcacgcgcttttcgcagcgtggtttcgactggcgtcgttacatcgtttatgtcgccttcgtggcggtgttcttctatttctccgtgaccctttacgacgaaggctttctgtcgactaacaacctgctgaatatcgcccggcagactgcgatgatcgcgattatggccgtggccatgacctttgtaatcggggccgctcagatcgacctttcggttggctcggtcgccgcattgtctgcattgatatctgcgctggcgatgcaggcagggctcggcatgttcggtgggataatcgcgggcctcggcactggcgctctgattggtctgatcaatggtctgctgattactcagattgcgataccagcgtttctggtaacgctgggcatgatgatcatcactaagggcctggcaatgtgggtcactgatactgcaccggtcccgattctgaatgagagctttaccttcctgttcggttcgggcgatttgggtcccattccggtgttgctggtctggatggtcgtgatcggcatcatcggccatgtgctgctgcgcaaaaccgcgtacggcagacgcacgctggcggtgggcggaaatgagaaggccgcggaattctccggcgttcacgtcaagcgtatcaaactgctggttatggtgggctcaggtatgctcgcggggcttgccggcatgctatacgccggacgcatgtactcggcgcgctttaccttcggcgaaggggacgagctgtcggttattgctgctgtcatcctcggtggcaccagcctgtttggcggcactgcaaccgtcattggtaccattttcggtgcgttgatgatcggcatgatcaacaacggtttgatcatcatggggctggatgtcagccagcagatggtggttaagggtctgatcatcattctggccgtggctttcggtaaaaaagccgcacaacgctga

SEQ ID NO: 204200 - DNA, 1500 bp, Klebsiella oxytoca
atggatacccaagttcatttgaaaatgtccaacatctgcaagactttcaacggcataccggttctcgaaaaagtcgacttcgagctgaggaagggcgaagtgcatgccctgatgggcggcaacggtgctggcaagtccacgcttatgaagatcctgaccggcgtgtatcgggctgatgagggtgcggtactgctggacggacagccaatcgagatccagaacaccgaggatgcggaagcccatggcatagccatgatctttcaggagttcagcctggtaccgtcgctgacggtcgcgcagaatatttttctgaaccgcgaacccaggactgctatggggcttattgacgaccgggcctgtgtgcgcaagacccgggagttgttgcaggaactcaacgttgatatcgatcccaatacgccggttgaacaactcggcgtgggatactggcagatgacggaaattaccaaggctctttccaagaacgccaggattctgatcatggatgagccgacctcctcgttaacggaaaacgagaccgaagtcctgttcaggtttattaaaaagctcaaggaaaaggggatttccgtaatctatatctcgcaccgtatggacgagatattcgagatctgcgatcgcaccaccattctacgagacggtaaatgggtgctgacggaaagtcatgacagcctgaccattgagcggatgatagagcacattattggcggcaatatggagcaggcgttcgtctggtccgagcgccagtacgaccgcacgggcgagccactgctccgagtgagcgatctccattccggtagccgtgttcgcggcgtcagtttcgatcttcaccgaggtgaaattctgggtattgccgggctgatgggcagcggccgctctgaagcaatgcgtgcacttttcggaatcgatccgatcgaccggggggaggtttttatcaatggttcgaaaacgacaattcgccgcccgggcgatgcgattgcggcgggtcttgcgctggtgcctgaagaccggcgggtacagggtttggtgctggatcaggatgtcaaaagcaatatgttgctgccgatcctcaaccggataaagaagggcctgttcgttgatgatcccgccggagaggcaatcgttcaggactatgttcgcaagctgaacatcaagaccgacaatattttcaaggccgccaatctgctgtcaggcggtaatcaacagaagatcgtgctggctaaatggctggtcaatgcgcctgacatactgcttctcgatgagccaaccatcggcgtcgatatcggtgccaaaaccgaaatcatggaaatcatccggcagttcgccgatgggggcaaggcggtgctggtggtgtcgtcggaacttaccgagctgctggccctggctgaccgtgtcatcgttttccatcagggaagcgtggcgcaacaatttgatcgtaaaaacatcgcatccgaggaggtattgcaacatgcaatccaaggctaa

SEQ ID NO: 204201 - DNA, 1170 bp, Klebsiella oxytoca
atgaaaacactgaatgtaggtatgatcggcgccggttttatgggaaaagcccatgcgatggcgtatgcagcgatgccgatgtttttctggccggcgccagcaatcacggtacgtaagatggtcgccgacgtgaccgaagaggccgctaaggacgctgcactgcgtctgggcttcgagagctatacggctgactggcgtgacattatcaacaacccggagatcgatattgtcgatatcgtgacgccgaatgactctcatgccgagattgcgattgccgcggcccgggctggtaagcacattatctgcgagaagccgctggcgcgtggtgccgaagagtccaagaccatgctcgacgcggttcaggcggcaggtgtcaagcacatggtggccttcaactaccgccgcaccccggccgtcgcgctggcgaaaaagtatatcgacgaaggtgccatcggcaaggtgctgaatttccgcggtacctatctgcaggactggtcggctgatccgaattcgccactgtcctggcgcttccagaagtctattgcaggttctggcaccctgggcgatatcggcacccatgtgctcgatttcgctcgctacctggtcggtgatatcgccgaagtcatggcgactaccaagacctggatcaacgagcgtccggtgcatgccggcggtgtcgacaagctcggcacggtcaagagcagtggcgatgttgaaaagcgcccggtcgatgtcgacgatgaggtgctgtcgatgttgcgcttcgaaaacggtgctatcggcagcatcgaggcaacccgcaacggttatggtcgcaataacttcctgaccttcgaggtgcacggtgaaaaagggtctatctcttttaactacgagcgtcgcgacgagttgaaggtgttcttcaaggatgatcctgaagaccgacgtggtttccgtaccgtttataccggtccggcacatccgtacggtgacggcctctggccgattcctgcactgggcatcggctatggcgagaccaagatcatcgaaacctatgatctggtcaagtcgatagtcgaagacacggacgtatcgcctaactttgctgacgggtaccgtatcgagcagattgccgatgcgattctgaagtcggcgcaggaaggtcgttgggtttcggttgacgaaatctga

SEQ ID NO: 204202 - DNA, 1152 bp, Klebsiella oxytoca
atgcataacaataacagaagtaccctctcctcaactgtgcgctcgctgctgatcgccggtggactgataactgcaagcctggccttctcgactggcgtcagcgctgcagatctgaccatcaaccagtctctgccggatagcgctattctcagcaagggacccggcggtgagagcgcagtgtcagccaagaccctgtcgctaagcgaaaccgaactgcaacagattcgggatggcggttatacggctgccatcgcgatgcactatgccggcaacgactggtcccaggcacagattaacgggctgaaagccgccttcgatagaatgggtatcgacgtggttgccgtgactgatgcccagttcaagtcggaaaagcaggcggccgatatcgaaacgctgctggctcgccatcctgacgtgatcgtcagtatcccggtcgatgcagtctcgactgcccatgccttcaagcgggccgcggaggccggcgtcaagctggtgttcatggataacaagccgaatgggctggaggcaccggctgattacatcagcgtggtgtccgccgacaactacggcaatggcatcgaagccgcgcatatcctggccaaatcactgaatggcaagggcaaaatcggcgtgatctatcacgcggctgactttttcgtgactaagcagcgcaccgatgccttcgaagccactatcaagagcgagtaccctggaatcgagatcgtcgcccgtggcggtatttccggcccgaacgatggtgaaaaagtcgcctcagccatgctgaccaagaatccgacgctcgacggcatcttcgtagtctgggatgtgccggcagagggagcactgtccgcggcccgtgcggctggccgcagtgatctagcgattaccaccatagatctgggtatcaacgtagcgctcgatatcgcacgcggcggtccgattaaagggctcggcgcacagctgccttatgagcagggtactgctgaagcgatcctggccggctacgcactgctgggtaagaaagcaccgagctatgtcgccgtgccggcgctgagcgtcacccaggacaacgtactggatgcctggcaactggtctataaccagccggctccctcaatgattcaagatgtcgccaagcgaaaccgaaagtaa

SEQ ID NO: 204203 - DNA, 816 bp, Klebsiella oxytoca
atgaaactaggttatgaaacaaatacttggggtggagttgtcggacatccgggcggtgtgacctcaatcaaggatgcctactatttggccaatggttccagcgaacaggccattcgcgatatagcagcggttggctataacggcttcgagatgttcgatggcaacctgatgcagtttcgagatgacaagcaggcgttccgtgacttgctgcagctaacatcgcagaccttcatcggtgtatataccggggccaatttcatttatccagatattctcgaagaagagctgctgaagttccgcaatgttgccgaattaactgccgaactgggaggtgagcattttgtcatcggtggaggagcaattcgaggtaccggtatccgacccgatgatcacaaattgctggccgacggcctgaatcaggctatgcagattgcagagcaagcgggacttgtcgccagttaccacccccatttgggcagtctggtcgaatcaccggagcaacttgatcagattatgactctgaccgatatccatctgtgcccggataccgcccatatcgaggcgggcggtggagaccccgccgacgtagtacgtcgttatggtaagcgtattaagtatatacatttcaaagacttgaaaaataatgagtttctgccgctgggtagcggcgtgcagaacttcgatgccattgtcagtgcgctgaaggagcacgattacgatggctggatcactgtagagctcgacagttatgcggatcccagggcgggtgcgcagatcagcaaagatttccttaagaagcacttcgacttcgtgtaa

SEQ ID NO: 204204 - DNA, 315 bp, Klebsiella oxytoca
atggataggttccttgcgctggaggtgggttcaactgccgttttcgcagcaagtgatgagatggctattcgcgccatcaagccggctcgcaaggctggtcttgatgtgcttaaagatcttgcggtcgtgggtacggataacatcaagttcgcttccatttttgagccgtcgatcacgataattgcgcaacttatgtgcgagagtggttgtaccgcaatggagttgctgttgaaggtcattaataaagaagtaattccgcagaaaaaagttgtattgaaggacgaactaatcgtaagggaatcctgtggtgggtaa

SEQ ID NO: 204205 - DNA, 996 bp, Klebsiella oxytoca
atgaccacaatcagtgatgtcgctaagaaggctggggtttcgacggctaccgtatcaagggtgctggctaataccgattcagtgaccccaaaaactcgcgaacgggtaatggcggcggccgaggccctgaattacaagcccaacgctctggctcgtaacctaagggtgtcatcgacccgcgctatccttgtggtcgtgccagatatctccaatccgtttttttccgagatccttcgtggtattgagcttgtagcgaataagagcggctaccagatcctgttgggtgactccgataacacgctggaacgagaggttgagtatctggattttctcagacaacgacaagccgacggcatgattatgctgactgcacggatggaccagagcctgctcgaaagcatcgctgcgcagtatcctgtgatattgggctgtgaatattttgatgagggttcagctataaatacggtttcggtcgataacataagggccggatacaaggccgccgaacacctgatcaagttgggccataaacgtatcggatatatctccggaccggagggtatcgttcttagtcgggatcgcctcagggggttccagaaggcgatgtccgactatggtctgcaaccggatgaactgctgatcgaagtgggctctttcagctatgactccggttggaccgccatggataggttccttgcgctggaagtgggtccgaccgccgttttcgcagcaagtgatgagatggctattggcgccatcaaggcggctcgcaaggctggtcttgatgtgcctaaagatcttgcggtcgtgggtatggataacatcaagttcgcttccatttttgagccttcgatcacgacaattgcgcaacctatgtgcgagattggttgtaccgcaatggagttgctgttgaaggtcattaataaagaagcaattccgcagaaaaaagttgtattgaaggacgaactaatcgtaagggaatcctgtggtgggtaa

SEQ ID NO: 204206 - DNA, 1095 bp, Klebsiella oxytoca
atgacggcatacggaacggagtttttctcgatgaacgatgtaaaccgactcaggatcctgcaggacgttatcgaccggcgtcttaccacgcgtcttgcagcaacccgacttgagatctctgacaggcactgccgccggctactcgagcgctatcgtgaacacggaccgctatcgcgggttaaccgccgacgtggtcagcctagtaaccgacagttgatgcctggcctcgctgagcgtgcgctgcgcatcattcgcgaacgttacgccgactttggcccgacattggcctgcgagaagcttgctgagattcatgacctttatcttgctaaagagactgtacgtaagcttatgacccgggatggtttatggatccctcgtaagttacggccacctcgtgtgcatcagccacgcccacgtcgggcctgcaccggcgaactcatccagattgatggcagtgaacatcgctggttcgaggaccgtggtccggcctgcacgctgctcgtttacgttgatgatgcaacaagtcggttgatgcagcttctgttcgtcagttcggagtccacgttcacctattttgaagccacccggggatatctggagcgctacggtaagcctctggcattctacagcgacaaagccagcgtcttcaggatcaacaacaagcaggccaccggcggagatggccagactcagtttggtcgtgccatgaacgagctgaatatcactggtatctgtgccaacaccagttcagccaaggggcgtgttgaacgggctcatctgacattacaggaccgcctggtcaaggaactgcggctccgcggtatcagcacacctgaggctgcaaacgcctttgctgatgagttcatggaagattacaaccgtcggtttgcaaagccgccacgtcacgattttgacgtacatcgccagctggataatggcgaaaacctgcaggcgacattcacctggcgcgagcagcgtaaggtctcgaaaaacctgacattacagtatgataaaaagctttatcgtaagcgtctagccactgccgcctgtgaatctggttacgggatcgttagcttagagctccatctaatttag

SEQ ID NO: 204207 - DNA, 189 bp, Klebsiella oxytoca
atgataaagctggttcaggacaaacgggacaacacccgctcacaggccctgccatcactggacggccagacctcacgcagaaagaaacaacccggcaagaaatcacaacgaagtctggaccataacgacatgctggaagccctgcagcaacttcagacccggagtaaagacatcttcggcaaaggctga

SEQ ID NO: 204208 - DNA, 333 bp, Klebsiella oxytoca
ttgaaaatattagagatactgcaatacaccttacgcaaaggcagcggtgccacttttcacgccatcatgcaggaaatcagcgttccccttcaccaacgccacgggatcgatgttgtttcgtttggcaactcgcttcatgacccggattactactacctcattcgcacctttgacagcgctgaaaaaatggctgcggtgctcaatgctttttatgcaagtgatgactggcgcagcggcccacgcgaagacattattcgcagcatcgaaaccagcgttaaaacagtgatgaatctaccatcagaaagcgtggaaggtctgcggttgcaatcatag

SEQ ID NO: 204209 - DNA, 264 bp, Klebsiella oxytoca; identical to SEQ ID NO: 156312

SEQ ID NO: 204210 - DNA, 162 bp, Klebsiella oxytoca; identical to SEQ ID NO: 76539

SEQ ID NO: 204211 - DNA, 519 bp, Klebsiella oxytoca
atgatacgttttttgtctttttgtttttgtttttgttttttatttttattttgtgttggtgaagcatctgctgatgttaaggtttattttgctccgaaatctacggtgtatgaaactgatacgtcagctgagattaggaagtatttagagagttttggtaaggggggggggggatatgaaaacgacaaccctaaagctgtaattgaagccatgataaaatatcaaaataaaattcagaagaaggtttctgggttttttaatggtaatgatatgattaaatatgatggggctgtttgtaaaatatcaataacaactgggaataccgctccatcagatcctatattaactcaggtgtttgcgcttgaacagttggctgataatggtctgaaaccttgtcgtgagcttaataataagttggtgtcagtaattgacaaggatgataattttaaatacccagcggtggttaagaattatgggttgttatctatggatatgatattttattttaataataattaa

SEQ ID NO: 204212 - DNA, 282 bp, Klebsiella oxytoca
atgttagatattggttcaaccattaaactatgccgagaagcacgtaagctcaccttacaagaactatcagatagaacggatttaacgaaatcttatctatctcgtatagagaacaatcaaagagatcctactatttcagcactagaaaaaatatcattagcgctgcatatccctctaaatctcatcatccttctttctgaaagtgaagagacaaatgatgagttttctgacatcaataacatgctcaaaaaaactataatggattcattagttaatgtataa

SEQ ID NO: 204213 - DNA, 372 bp, Klebsiella oxytoca; identical to SEQ ID NO: 191071

SEQ ID NO: 204214 - DNA, 393 bp, Klebsiella oxytoca; identical to SEQ ID NO: 191070

SEQ ID NO: 204215 - DNA, 276 bp, Klebsiella oxytoca; identical to SEQ ID NO: 177817

SEQ ID NO: 204216 - DNA, 306 bp, Klebsiella oxytoca; identical to SEQ ID NO: 177818

SEQ ID NO: 204217 - DNA, 141 bp, Klebsiella oxytoca
atgtggtttaaaaagaaaaaagaatcagtagaaataccaaaaactattactcgcgtaaaagaaccgctaatgagaaataacccaatgaagcgttcaattcaaagtactctagcattggttaatcaactgcctaatatttga

SEQ ID NO: 204218 - DNA, 1536 bp, Klebsiella oxytoca
atgagtacgaaaatgaaattaatgaagctgttgaagaagacagtgaagataatattaccaccaaagaaacagaatccggcagagtgggtagagaataaccttgtgtttccagatggtcaattacaagggcaaaaagtaaagctattcgaatttcaaaagaaaccaattaacgatattacaaatccaagggtacgtaagattgtactcatgagtagtgcacagttattaaaaacaacagtactacaaaactcgatgtattactttctcgcaaatgatccaagtaaccaaatctttgcaggtgcaacagccggtactacttcaaagtttagaacaggtaaatggcaatcagtcattgaagcgtgtccagtacttaaaaatctagttagtaataagaatgataagaactttacgaataacgataagacacaacaaaacattgatggaacatttacgtacttcctaacattgggtagtagtgtacagctacgtggtctaacagctcctagagtgtttttagatgaggtttcaaacgtagatgcagagggtgatgagggtaatccattaaagcttgcagaacagcgtacaaaggcttttagtaaccctctcattatggtttgtagtaccccacttgatgagaatgacttaatcactcaacagtatgagcaaagtaataaacagaagttttatgtaccttgtccacactgcaatcattcgcatgaattagtttttgataatgtcaagttcgattggaagattattgatggtggtcgccgtcgtattccagatgcagagactgcaaggttagtctgtccagactgtaataaagaaatcagtgaagcagaacgtgtacgtatgattaagaagggagtatgggtagtaacaaatccagaagtagaagatattatgggttatcacatctcccgtctatattctccaattaactcaatcaaatctatagtacaagactttgcagaagcacattacacatttgatcttgcctcattctataacaacgtactaggtcttccgtgggtagataaagagaatacagatcatgatttagtattacttgagaatttacgagatagtactttagatattgagaacataccagatgatgtacttggtttagtaatcggtgtagaccaacagttagacagactagaattaactacacttggtatcagtgaaaaaaatctctacgttattgaccatcgcagtatatatagtatcgactgtacaaaaattgaagcacctgcatggaatcaattaactgcattctctcagatcaactttaagacagtatctggtaaacctcttaaagtactagccggttttgtagactcaagtaatggtaacgcaactaatacagtatatcgctattgttcttcttcaaagattttcaaaccaatcaaaggtggtgcatctgcaacaaatccattattcaaagagtctcgtactgctggtcatagtctaattaacttgaacgttaacttaggtaaatcaaatattaggcagttgattaaccaatgctag

SEQ ID NO: 204219 - DNA, 411 bp, Klebsiella oxytoca
ttgctgcgacctgctctcgggttgttcaggttgtgcctggttctgcgcctgctgttgcccgttcttttccgcttccagctcttcaatggttttcagctggaaaccgtcctggaacaccaccgtgacttcgttaccggcaccaatcgggatgatcgggtgatactgttcagcgcgtttgatgtaatactcactcagggtctgtgcggctttggatgccccgccgccaatccccattttcagcacgtcaccggcgccaacggatgccgttgcacccaggccaacagcaggttgcgaagcccgctccatgccctgaccaatcccgtcaacaaagcctgcgccccaggcccagccgaggattttgccgttacgcatcaccacctcgcctttcacaccgttcttgcccataaatga

SEQ ID NO: 204220 - DNA, 1032 bp, Klebsiella oxytoca
ttggcgaatattagaccagattttagtattccagaagtaaagaacattactgaatggcgactatttttatcattatacgattcaggcattaagtgggacgataaacaatcaggttggaatgttaaatttagtcgtgaagttgatatgacgaaagataaaataaatttccaaaaaacgtttacatctaatcatatacctgtaatcgaaggaagaatggtttcacaatatcgttttggttgtaaaggatatatttcaggctctgggagaagtgctctttgggaaagttaccctattggtaattcagtaattagcccacaattctggattgctaaaagtaagctatcttcatcaacctatgaaagaattaaatcgaaaagagttgggttttgtgatatttcaggtcaaactaatgaaagaaccttcatggccgctttaatacccgaagatgtagtttgtggtaataaagtgccaacaattcttttttatgatgataacaataatgaatgtttatatgtttggttagccataacaaatagttttgtatttgactgggcaatacgcagaatcttgaccactacggtgaactatttcttattacaaagcatacctttcccccgtataatcagagggggcttaccatggcatagtcttcttgaaaaagcaaaagaactctcatcgttagacaatgttggatactcatatgaaaatttgatgagaatatcccatttaagagcggaaatagatgcagaaatagctattgcttatgggctttgtattgaagatatggaagtcattatgtctgattttcctttattagatagaggtcaaacgccactaagaggcgaaaaaaaatctacgataactcgtgatttgatattagcaacattagcgagaaaacttggatttaattcaacaacatggcaggtcagaaaggatgaagcaacatctggtggtgcggttgcttatatatcttctcaggccatttttaaagaaggtagtatcgttactaaaaaggttgtcaataatgactaa

SEQ ID NO: 204221 - DNA, 594 bp, Klebsiella oxytoca
atgactaatacagcaagtagtgtttcacgaattctttttaaagagattgtggatggcgatgtaagaaaaatacatgcagattccaatgacagcgatacaggcggaggtgctcgcgactttcgttttggctcctatactgatttacaacatatttttcacgcaatgtttcctaatcaaataacagaacctcgccgacggggtggcgtaatgtgtccagtaacaatttattcaggtcgattttattggcgtgacccagtatctcaggttgttaatagtcaagattcattctttgaacctccgaccgatgcacgaccacaagaaggaagaataacaagagtgcatgagcagccatgtttatctactgaattaatgcctgtagccagccctaataatcgtgtttttcttttgctaactcaaatgagcgatgggacggtatggccagcttatgtagaagaaagaactttaagatctgttggtgtttgggcattcgaaattactcaaaaaatgctcaattgcattgatgctcctcgccgagcgggccaatcggttatagggttttatgattttacaacaaatgatagatattgtaattga

SEQ ID NO: 204222 - DNA, 705 bp, Klebsiella oxytoca
atgaatatgcaaaagatacaaaaaccatatgcaggtaaaatcattgcagtagcgattaaaaaaggtggaacgggtaaatcggtattcagtatgaacatcgccccggaagtcgagccagacgttttctatgacactgacgatactccggcagtatcaacatttaaccagttcaggccggaagataagcaatggaatgtaattcgattaaccgacaaaataatgatgtcctccggtagtaccattcagcaatttgccagtgatctcattgatgccagagaacagggtaaaaccgtgctcgttgactgtgggggatttgactcagcgttaacccgtacagctgttgcgctggcagatattattatttcgccagtaaatgacgacccatcagatattttaggattgcaggagttcagcaccgtactaaatgaaatatccgctgaaatgggtattaaaaaagttgctcatgtagttttgaataaagtacatcctacacgcacaaactttaaagctattgatacacacttagagcgattcgataatcttattcgagttgatactgctattccacgggacaatattatccctgaaaaatttggcgaggggttgggtattgttgaacatatcactacccgacatggccgcgccggtaatgctatgcgctccctgtatctggatatgcgtaagatcctagacgaaatgcaataa

SEQ ID NO: 204223 - DNA, 294 bp, Klebsiella oxytoca; identical to SEQ ID NO: 154415

SEQ ID NO: 204224 - DNA, 723 bp, Klebsiella oxytoca
atgaacagaaaacaatttatccagtcgcacggggctacttgcagcaactggacttggagttggtcatttgttaatcatgaaaaaaagatggtgatattcggggcgtgggatgttgaggtcgagcaggaacgttccgtgattcttagagagagttgggagttcaactcaaaaaatagaaagcaacctggctacactcaggcacttgagcatattaacttagcacatgaaggttatgaactttacacttttagtatggtcttcgctgaacatccagaaaatccagaagtagctgtgataagggattttgagcggaaacttaataaatgctatctgagaaaagaaggtaatgtctggtacgcagacttcttacctaacccttacccagatgaaattcctgcacctgagagctacaccgagggtgcaaagaaattggtaacagtgaattcttatgaacgtgatcccaaggctagacaagcctgtattgaccattacggtacaagctgtaaatgctgtggcatcgactttgagaaagtttacggtgaacatggtaaaggcttcattcatgtacaccatataaaaccattacatgaaattggtgaggaatatgaagttaatcccattactgacatgattccactatgtccaaactgtcatgcaatggtacatcgcggtagtaaagtactgagtattgaaaaactaaaaagtttattaactaaatgctaa

SEQ ID NO: 204225 - DNA, 237 bp, Klebsiella oxytoca
atggtgcagtacttcacggatgtaatttcacatttgtttatcatagatggtaaggatggtacattactttcccgttcacatatatctaatgatttagtattcgaatcagacatgatgaccatagatatgcttaaaggtgaatgggagctcaagaaaaataatatgagtcaatgggatgagcttgcattggatatatggcagtcagtagttgaaagtgcggtcaaatcaatcaaatag

SEQ ID NO: 204226 - DNA, 156 bp, Klebsiella oxytoca
atgtttgattggattgctacggcgttagtactatcagttggttttttagttatggttactggtttgattgagtacgttttcattgggtttatgatttatctattcatatcagtaattgcaaacattattttgtactacttaggaagtacaaaatga

SEQ ID NO: 204227 - DNA, 510 bp, Klebsiella oxytoca
gtgggcatcatcgagaatattggcgaacgggttaaacttcagcgaatcaccatcgaggtagaccccgcccatgttttcgcacagggacttatagccatcccccatatcgaacacccaggcaaaaccgccggagtccagcacgctgcggatcagcggctgtatcagccccgttttacctgccccggaggtgccgcagaccgccatattgaagttggtgttatccatgccttcataaaaaaggtcgatatacgccagctggttgcggtaggtcggcgccagcagaccggccggggccagcgggctgtcggccaccacgggcagaagattggcgacctggaacgtttcggcccgtttgaccaccccggccgcctgcagctctctgaacagtccctcaccggatttgaagggcaacatggccagaaagttacgcaggtgatggtagcgggcagggatcagctggaaaccgcctttacgaaaactgttcagcacctgctgttcggtggtgagtga

SEQ ID NO: 204228 - DNA, 246 bp, Klebsiella oxytoca
atggaatggattgttacgggaattgtagtaccatgtgtgggttatatctttaaggtttggatggatcgtcgtaaaatgatgtttactcgtattgagcaacttgaatccaaagtaagtacagcagaaatgcgtatcagcgagttacgtgatgatgttgaagaaattaaagaaattcgtgaagtacttaccgacgttaaactagacattagagagattaaaacactattaaataataagggggcataa

SEQ ID NO: 204229 - DNA, 393 bp, Klebsiella oxytoca; identical to SEQ ID NO: 100994

SEQ ID NO: 204230 - DNA, 606 bp, Klebsiella oxytoca
atggcgaaaaaagaaaggacagtagttgaacttgatggtgatgtcagtggtttgaataaagctattggtgaagcagaaaaaaaactggatggttttagtaaacatgcaggtggtaagcttggcggtcttgcaagtgacttatcgggtggtttagggacactatctaaaggtttagtaggtgtagctgcattaagtttaagtgcagcaactgctataggtggactagtacttaaagttaattcagtagtgcgtgaattaaatcaactatcaaaacaaactggtttaactgtagaagacttacagaaacttgaaaaacagtttagaagtactggtttaggttccgaaaaattagcagatataaaccaagatacgttagataaacttggtgatgcatatagaaatggtggcggtattgctgatgatatgatttcagttggattagacccaacgaaatatgagaagtttcttaatgacccaagaggtggtatcaaagcagttatacaagcatactatgatctcaaaaacgcaggggcaagtgttgcagatcagaagtttttattagaatcttttgcatctgatgcaagtctgtctcttatacacatctga

SEQ ID NO: 204231 - DNA, 483 bp, Klebsiella oxytoca
atggcaagaaaagcaatcaaccatgacaatctacgtgtacggaacgaattagataaaatctcattaaccgtactatgttcagaagcaaaaacagtaatgcgtaaactcattcaagatagtacttttttaggtataaacagagtaccagaagatgatgtatactacatcgtacaaaatgccacggaaattagtgaagaatcagtactattacatctaaagttataccgccaaataaaaggtaaggactatccagaagggaaatcctcagcagaaaagtataagcgtatctgtactgaagtatctaaggcatttgaagagattttaaatgatggtactaccatgaatggtttacgtaagtatgtgaagaaaaatccacttaccgaagaccaagtaaaggcagtacaggcactattagaacagggtgtagatgcacaatcggttattgatttgttgtcactccattggcttaagctgggtaagtaa

SEQ ID NO: 204232 - DNA, 381 bp, Klebsiella oxytoca; identical to SEQ ID NO: 202486

SEQ ID NO: 204233 - DNA, 405 bp, Klebsiella oxytoca
atggtacagaccgcaaccctgctgcatgccaaagctgaacgcctgctgggcatcggcttcgatttccgtcagtctgaaaactctggcgtggtggcgatggccacggctgacgatttcgtcagcgatattgttaatgtccagcaacgccgactgaccgcgaatttcggcgacaaaagtaccgaccccctgcattcgcaccagcaagccctccgcggtcagttctcgcaacgcgcggttaatcgtcatcctgctataaccaaacagcgtaaccagttcgctttcagagggaacacggtaattcgcgggccatgccccgctgtggatcttggttttgatcatgacctttaccctttcataaaagggggcgggatgttcaagtatctcatccacggaatccgaatttga

SEQ ID NO: 204234 - DNA, 213 bp, Klebsiella oxytoca
atggacagtgtcagtcagaaacagctgtcagaggcgcagtccaaagcgctgtcagagcggtttaacagtgcgctggagcagagcctggcggattaccagcaacaacatcatgtcctcatcctggtgtcgccggcggtggttcagggggcccccgatgtgacccgtaaaattcagacggacattgcccggcgaatgaaaggaggccaggaatga

SEQ ID NO: 204235 - DNA, 723 bp, Klebsiella oxytoca
atgacaaatgaaacggaaaagtacctggctaaaatcaaaaaactcctgaatctggcccgtcgcagttcgaattctcatgaagcggccaccgcgcttaatcaggcgcaggcattgatgcgcaaacataagctgagccagagtgatgtcgatctgatggatatcaccagcaaagccagtaaaggcgcaccgtcccatgcccggagtattcctcagtatatgactatgctcggtcagttaatttgtgaagcgatgggaacccgctgctattattcattccggcgtaatttccgcaccggcaaactacagaatagtgtcattttttacgggcccgacgagcgtcctgaaattgccgcttatgcttttgatgtactttcccgtcagatggtgaaagcccgacgtacatttattgggtcactgcgcaaaaacatcaaacccatcaccaaaacggcccgtgcagatcagttctgtgaaggctgggtaaacggggcctatcaggctgtagagccattcgttgtcacgagtaccgaaaaaacgttgatggcagcgttcctggcgaagctgaagaaagagcaaggcgcaactgaccttgaatcccgcgaagctaagaagtgtcgtggcggtgaagatgcagcggaagccggttttaatgagggattaaaagcgcgtttaaatcacggcgtatccggtaaagattcggccctttctctggagtacaagtcatga

SEQ ID NO: 204236 - DNA, 369 bp, Klebsiella oxytoca
atgtgtatatctgagcggctaaaagaggttcttattgagagaaaaatcaactcaattaaggagtttgcggagttgacggaacttccatacagaacggcacagagttatctaaatggtgatcgagaacctaatgtggttggattaaccaaattgtgcacacaattgggtataaaccttaattggctcttaactggcgttggtacacgatttgtatcagaggataagatctttcctcctgccgaggttatgtcctcagagaagcaagaactgctcgatgcttttgacgggatgactcctgagcaacggagggcgattcttgaggttggcaaagggctcgcacagcctaaaccaaacaagttcgcaggttaa

SEQ ID NO: 204237 - DNA, 510 bp, Klebsiella oxytoca
atgaagcatcataccgagaaagggtactcaaaaatcatcaagatcgtaacggctaccagtcgtgaatctgactctggctaccggcgttgtttgggctccaaggttacagacggggcacttccagtacccctcgccattaccagtgaggacaaccttcttaccggcatcgaagcaaggctggcagaggaagtgagcgacctcgccagtgccctgaggaagttcggaatcaggacgcaaagcataagcgaagaactcccgctgagttccgagtttggtaagttgataacgagctttttcagcgctggtagcctccagctcgcgaatgcgctcctccagggtaaggataaaccgctgctgctcgatgacggtgctatgcaactgcatgaactgggactgagcctcaatgattttattcgagaggtcacccttgagggtcgccagtttttggctgtcgcgctcatcaagaagcgctttcccgatagcaccgatggaagtgaggctggagagtaa

SEQ ID NO: 204238 - DNA, 318 bp, Klebsiella oxytoca
atgattaatacagcgggtggtaatgctttcgatatccacgaaaaattaaaaaaacatgacgctaaatggctgtatatgcatgaggcgaatagtcatcaaataaatacaaattatgagttctgtacgacctttattggtgagactgaatttgcgatttatgaacgtcatggaaattattttatcttagtagatttttttaaatcctacgatgaagcatgtagcgaggcaaggaaaattctagacgattacccagatgttaagagcaggctattaaatatcccttcactttttaatggtgaacataatgaaaatacctag

SEQ ID NO: 204239 - DNA, 252 bp, Klebsiella oxytoca
atgtcacccgaagaattcattcgaaaacacattactgcggcgctggaagccgatttgctgccatctgattccgtcagggggggggtagagcgtgctcttgattactaccgccggatgtcgcaggcgagccgtaagggggccgcttttgatgattgtctgcaccttgcgagaaagtgggctttggggcagacgccagttgctgaacgcaaagcgcggaagcggtccagcagcaaccagcgcggactgttttaa

SEQ ID NO: 204240 - DNA, 2238 bp, Klebsiella oxytoca
atggctttatataaaacgggcaaccctgttccgtcttctgctatgcctgacatttgggatgacaaccaagttcaggatattatgattaatagcgatgaattggaggttgaaacacggacaggggaaattaagcctacttgggcgggaattgtaaaaaataacgccgatgcgattgaatatacccgccagaacctgatccctctcagtcgccagtatatgacactggctgatgctcaggctgatatcgcaaacatcccggagggctcaacaacctatgtacgcagccctgatggcggcacactggcggatgagtacatcaataacggcggtacgctggaggctaccgggcggaatgtgccatctcaggctggtgttgagtcatctgtcaatctgaccgttggcgaccttattcagcatgaaaatgcggaaaatttaattttccagttggtggatattctcggatatcgacagttttacgcactggaaagcggggagttcggtactataaaaagtcgcatcacgcctgacggcgttgaactggaaaacctgtcagtaaccgtaacggaagaacctggtgtctacgtacaaaatcttattggtcagagaatcatgattgtagatgggagcggcgtcgtcgccccccgcagcctgcgcgccaataatgacggaggatttgggacctccgcagcatcgctaacgtcaagcggaatctcatttgattcaggcgggtctggcgttgatataacaggacctgaattcttgaagatccgagacgttctcggcagagagcgggttgtcatcgacgctcagggtaatcttgttgttactggaggcgacatttctctccaggacaggatcgatattctcaatgccgagaacctcaactattacaaccaggttcgcagtcgttataacgctgatattcagcgactcgtattcgcgttaacgatgattgtgtggtacgggcagtcactatccaccagccaggaggggtggccggcgctcagtaaggaggcgtatgcgagactgggcaacctgatgcttggaaatagtgtccggccaaacagcagaaccgcagccaactttacacctcttggcgtgtcatcattgacgccgttaaaagctgtcgtccagtcaataacgggctcttctatatcaaccgatgccgaggtcgcggcgctttcaccaggttcagggaatgagggcgagggtgccgtcgcagcggtaaatatgctccgaacccttttcctccagcaaatgtctttgctggaagacccagacagggccctggtggtatcaagttgcggtgtaaacgggcgaacaatagaggcgctctccaaaggcgcggatccggagctatataacagaattacacaggccgtatcccaggttaaagcaatcgcggagggggacagcagaacatttggtataggagcattttgctttctccagggggagtggaattacaacgccagttacggcggagcaggaacacgggagggatataaagccctgcagcggcaattatattctgattttgtttctgatttctgctctcaacaacaaccgccggcaatgttcacgtatcaaacctcaggcggttataccagcgattcttacgagctcggcattggcatggctcagttagatttagcaactgagggcggaaatatatatggcgtttgcccgtcatatccgtttcctgacaagggcggccacctgacaagcaatggttatcgctggatggatatgttttttggaaaggtgatgtttagggtgcttgtactgggcgaaggatgggaaccgttgcactgcacttccgcaacaataaccgataactacgcactactaaattacgctgttccgtacccgccattacagtgggggacgccctatgtgggccgcaccgcgacaacttatgcagataaggggtaccgtgccaccgatgaaaccggggcccttcctattactgcggctgaaatcgctgcggatacggtcgttaaattaacgttcagccgtaccgcagtcggtactgttaaaatctggtatgccgacaaaacttctcatagcgggaatggctgcctgaaagattcagatccgttcattgcaacagaaaactacgtttatatagaaggcagtgggcagtatgcggacgaaaatatccccgaactagtggggaaaccatacccgcttaataactgggcatgggctcaggttataactatcaacgcagaatag

SEQ ID NO: 204241 - DNA, 390 bp, Klebsiella oxytoca
atggtgaatgaatttggagctctgcagtttggcctggggtatcacaacaccagttccggtgcgtatgcagtgacatttgtgactctcgacggctttgatttcagcaagccggcattgttgtgtgtcacgctgaacggaacgacagcaacgattcaggacctctctcacgggttaacggcaacggtgacgctgagctcgggaagggaaagggcatcaaatggcattcgcgtggggaaaggcgcagtcagcctgtggggctcaaatgcggccaccagtaaaattgcggcctacctgattttcgacaggatactggcaagcgatgagaaggagcaggtacgaaattatctgcagaagtgcattcaggctaaattcccggaagaagttctttaa

SEQ ID NO: 204242 - DNA, 1116 bp, Klebsiella oxytoca
atgaagtttgattgcgccatcatcggcggcggcctcgccggactgctctgcgggctggcgctcaaccagcgcggcctgcgcagcgtgattatcagccgcggccaaagcgccctgcacttctcttccgcctcgctggatttacttaccacgctgccgaatggcgacaccgtcaccgatgtcgctcacggcatcggccaactggcccgccagcttcccgaacatccctatgccaggctcggcgccgaacgggtgatggattacgcccgccagagtcaggcgttgtttgccgactgcggtatcgccatgcaaggtgacgccagccagccgcatctgcgcgtgacgccgctgggaaccttacgcgcggcctggctatcgccgcaggaaatcgccaccgcgccgctgcccgccagcggcgtcggcgtagtcggcatcagcggattcggcgacttccagccgcatcttgccgccgcctctttgaaccagcacggcgtgaccgccgaagcccatgagatagatttacctctcctcgatgtgctgcgcgatagcccatccgaatttcgtgccgccaatattgcccgccggctggacgatgaagcgcactggccggccctgctggcggcgctgcgcccgctggcgcagcagcataatttactgattatgcccgcctgctttggcctcgccgacgatcgtctgatcgatatcagccaccgcaacggtagcgttaacgcgatctggacgcgcaatcacggcgatatcccgctgcgcccgcgcttcgcggtgctggccagcggcagctttttcagcaacgggctggtcgccgagcgcagcggcgtgcgcgagccgatcctcggccttgacctgcagcagacgctgccgcgcgagcgctggtatcagcaggacttttttgcctctcagccctggcagcgtttcggcctgaaaaccgatgcggatctgcgcccgcagcttcaggggcagacgctggagaatctgttcgccgtaggcgcgatcctcggcggttttgacgccatcgcgctgggatgcggcggcggcgtttgcgcggtgaccgcgctgcatgccgctgggttaatcggcgagcttgccggaggtgaatcatga

SEQ ID NO: 204243 - DNA, 2673 bp, Klebsiella oxytoca
atgtcgtcaaccctacgagcagccagtaaggatacgctccaggttaaagataaaacctggcattactacagcttaccgctggccgctaaacaactgggcgatctctcgcgcttgcccaaatcgctcaaagtgctactggaaaacctgctgcgctggcaggacggcgattccgtgaccgccgaagatattcatgccctggccggatggctgaagcatgcccatgccgacagggagattgcctaccgtccggcgcgcgtcctgatgcaggactttaccggggttcctgccgtggtggacctggcggcgatgcgcgaagcggtcaaacgcctgggcggcgataccgccaaagtgaacccgctttcgcccgtcgacctggtgattgaccactcggtcaccgtagaccgttttggtgacgatgatgcttttgaagagaacgtccggcttgagatggagcgcaaccatgagcgctacgtctttttgcgctgggggcagcaggcattcagccgcttcagcgtagtaccgccgggtaccggtatttgccaccaggtaaacctcgaataccttggccgggcggtgtggagcgaacagcaaaacggcgagtgggtggctttccccgacaccctggtcggcaccgattcccataccacgatgattaacggtttaggcgttctgggctggggcgtcggcggtatcgaagcggaagccgccatgctcggtcagccggtttccatgctgatcccggacgttgttggcttcaagctgagcggcaagctgcgtgaaggcattaccgcgacggacctggtcctgacggtcacccaaatgctgcgtaaacacggcgttgtgggtaagtttgttgaattctacggcgatggcctcgattctctgccgctggcggaccgcgcgacgattgccaatatgtccccggagtatggcgcgacctgcggctttttcccgatcgatgcggtaacgcttgactatatgcgcctgaccggccgcagcgaagagcaggtggcattggtagaagcctatgcgaaagcgcagggcatgtggcgtcagcccggagatgaaccggtattcaccagcacgctggcgctggatatgggaaccgttgaagccagcctggccgggccgaaacgcccgcaggaccgcgtagcgctcggcgatgtgccccaggcctttgccgccagcaccgagctggaagttaatcacgcgcagaaagataaacggccaattgactacacgctgaacggacagcagtattcgctgcctgacggtgcggtggtgattgccgccattacctcctgtactaacacgtcgaaccccagcgtcctgatggccgccggcttgctggccaaaaaagccgttgagcgagggctgaagccgcagccgtgggttaaagcgtcgctggctcccgggtcgaaggtcgtttccgactatctggcccacgcaaagctgacgccgtatcttgatgaactgggcttcaacctggtcggctatggctgtaccacctgtatcggtaactccggaccgctgccggacccgatcgagcgcgcaatcaagcagggcgatctgaccgtcggggctgtgctctccgggaaccgcaactttgaaggacgtattcatccgctagtaaaaaccaactggctggcgtcgccgccgctggtggtcgcctacgccctggcggggaatatgaatctcgatctgacccgtgagccgttagggacgggtaaagatggtcagccggtatatctgaaggatatctggccgagcggaatcgaagtcgcgcaggcggttgagcaagtctcaacggagatgttccgtaaagagtacgccgaagtgtttgaagggacagccgagtggaaggcgattaaagtggatcgctctgatacctacgactggcaggatgattccacctacattcgcctgtcgccgttctttgatgagatgggcgttgagcctaaaccggtagaggatattcacggcgcgcgcattctggccatgttgggcgactcggttaccaccgaccatatctccccggcgggcagcattaaagccgatagccccgcgggccgttatctgcaaaatcacggcgtcgaacgcattgattttaactcctacggctcccgtcgcggcaaccatgaggtgatgatgcgcgggacgtttgccaatattcgtattcgtaacgaaatggtccccggcgtggaaggggggatgacccgtcatcttccggatagtcaacctatcgctatttacgatgccgctatgctctacaaagcggagggcacgccgctggcggtgatcgcaggcaaagagtacggttccggctccagccgcgactgggcggctaaaggaccgcgtttgctcggcgtcagggtggtgattgccgagtctttcgagcgtatccaccgctccaacctgattggaatggggattttaccgctggaattcccgcagggggtgacgcgtaaaacgctgggactgagcggcgaggagcggatagatatcagcaacctgcaggctctgcagcccggtatgacggtgccggtcacgctgacgcgtgcggatggccggcaggaagtgattgaatgccgctgccgcatcgataccgcgactgagctgacctactatcagaacgacggtattttgcactatgtgatccgcaatatgctgtaa

SEQ ID NO: 204244 - DNA, 2604 bp, Klebsiella oxytoca
atggaatacacgtttgaaaagtctacactctggcagtcaactttgggaaaaaccaatgacaagggcattgaaaaattaagaagcagcttccttgactttagaaataaagttgaagcgttagtcaaaaatatcgaaacagaattaccaggactaactattcatgacatcacccacattgattctttgtgggaggtttccgatcaaataattggcgaaagaacatatttaaatccgatggaagcttatgtactaggaggtgcgttcctgttacatgatgctgctcatgtaagtgtcgcttatgaaggtggatttgaagcacttaaagaaaaagatgagtggaaggatctaatatcattaaagtttaataacatcgagccggagcaaggttcttctgaagaaaaaaaagccatatttgaaattgtgagacaattacacgcaaatcaagctcgaacacttataaaacgctcatggaaatctgaggcttcaaatagttattattttttaatatctgatgaagaaataagaaactattacagtgagttaatcggtgaaatagcagagagtcatcactggagttcaaaaaaagtctatgatacttttttagagagaagagttaatgcccctgcattttttgataataaaacatgggaagtagatgctttaaaagtagcatttatattaagaacagctgatgcagcgcatatagattctcgcagggcaccaatatactcatacagccttctttcccctgaaggaatatctagggaacattggcactttcaaaataagttgggtcgtgcaaccttaacaaacaataattttttaagaatatcttcaggctcatctttcactgaaagtgaaagaaattcttggtggcttgcttttgacactgcaaaaatgataaatatcgagttgcatgatgcttataattacttatctgaggcggggcgagaaccattcgaagcaagaaaagttttagcagcagatactcctagtaaattttctaaatatgttaaggctgaaggttgggagcctgaggatatatctattcatgtaagtaacttaccaaaattgattactaccttaggtggtaaagctttgtatggggaaaagaaacatgtagggataagggagctaattcagaacggactggatgcgatttttgctgcaagaaaacttggatatctagaagacaatgaaggtgcaataaatattaatttgcaaaaagttgaaaatggaaactggtcaataacaatttccgacaatggcttaggcatgagcagatatgtcttatcggatattcttcttgattttggtaaatccttatggagttgcgatgacgtaaggtacgaacatccaaaattaccccaaactggattcagctcaataggacaatttggcatagggttctattctgtatttatgttatcgaacaaagtaagtgttataactaatcgttacagatcaaaaacagatgaaagtggaactcactggaagcttactttcctcaatggacttaatgaaagaccatttatttctaaaccaactgaagatgaaagcctcaagaggcatggcacaaacgtatcttttacaatagataatgaaaatttccaaaaattattaattgtgaaaaaaaagcacaaatataattttttagatgatgtattcgaaactcctccaagcccattagacgaggatggcggatcaaatgaagaatatatacacaaggggttctcaaatcttataaaatggctcttcccttcatgcgaaataaatattagcctaagttatagtgggattaaagaaaccatcttaacagcggatgactggaaaataatatcagatgaagagctactttcccggatacataatagtaatgaaacaaagagactttaccccttaaagtataatggagatattgttggccgattaagaatcatagagacaccatactattatgtgacagaaagaccttcggcagtagtctcatttaaaggggcccgtgcgggccaaatttacggcctccagggaatatgcagatctctttcaaataatgaaaaagctgaaagaaatgatgctttaccggattaccctatggaatgttggcaagattgggcatatcaaatagtaaaatctgaacctctgttgctgacaacatatttagtacgtttacatacacttattccagatgaggacttgagagtatggtatattggccatgagcgctgtaatcttttcgacataaaatctcttttacgggaacaagatgaaataatcgttgtaaatggttcaattaactatgaagatgatgacgatatcaaaccatcagagtttgaaggaagcttaattttaaatgacaatgttattttagcgccagtaaagcagtcacattactcacaaagcaataacattaccctagatgatataatatcaaaattcagcatacctgaaataaaatactataaacttttagaagacacaatgcgagatgtttggggtgagttcacggaagatgatgaggattatagagttgtcggttatgtcaatgaaacagcgataacacgacacactagcatatataaaaaaatgaaaaaaatggattag

SEQ ID NO: 204245 - DNA, 606 bp, Klebsiella oxytoca
atgcatttagaaaattgcctggaagatatgaatgtcattagcaatgctcttgctaccgtgacttctaacgcttcacgcttttctacttcaaaagttacctctaagcgtgaaggcgcaatgccgagcatctatcgacatactggctatggtcttaagccggtgcggcctggttttgccggggctaatgacttcaaaatgcctcaaactgaaggcattccggttcaagagagtagcatggctgctcaattggctgaaattgaacaaagacttgaagagctgacgacgaaacatgttcggttaacgcatcacatttcagggtacagcgcagaacaaatccgcgatatgttcggtgaaagccggtatgaagatctgaaaaacattgatctgaccatccgcggattagagggctttgttaacaagttcatccgtgacgtcgatcagccgcatccctacatgaaacgcttgagtgatgctatcactgagtaccgtctggcagtttctgacctcctgatgattctaaatcagtgctttaacgaggtagaagttatcgaatcgcagacaggtctcattgatgaggacgtcttcgcaaacttctccttccattaa

SEQ ID NO: 204246 - DNA, 1461 bp, Klebsiella oxytoca
atgcaccaacatattacggataaatcttttcaagctttttttacagacgcagatgaccttagaaatacaatgattagcttgttgggggacgtgtctaatcaaaatgttattgaaccttgtttcggtgagggggcatttataaaaaacctaatcggaaagcctaaaaatatcgatgctattgacattgacgaaaatcattttttaagcgacttgaaaataaagaactgtaattattttcacgccgattttatcgattattttgttcagccaaataatcgtaaagtgctactccctaataccgagtatgatgcaactatttgcaacccgccttacggtctgaagttcacacaagaatatagaaaaataataaaaaaagcattccctaatgtgtatgctaaggaatcttacgccttatttttctattttacattgaagaccttaaaaaaaggagggcgttatgttttcattatccctgataccttccttacgagtacgaatttgaggtatatgaggcatttcatacttcaatcagctaaaccaagtcatatcattcagtttaaaagtagacgatttggctctgttaacttcggttatagcaatatgtgcattattgctggtaatgtggggtctcttggtactgattgcgaagttaattggatcgatgccgttgactcaaatcaacctctcttacaactattggaaaccgataacacaattgttcgtggtgattattttattaataatgtggacaaagcctggattagtccaaaattgtttgaatcaattaagatatctcgagaaactgtaactctgggtgagattgcagaatgtaaaacaggtatttatacaggtgataatcaaagattttgtggatatgactccgaaaatgcgcctaaaagaattaatggtcacccagttgattggagtctagtaaatctaactcccactgatcttgagaaggagtatggtatagattcaaatatagcttatgtaccttttgtccgagggggacatagaaatgtctttgaagctacaaatagctgtattcgatgggataaagaagctgtcgcatattattataatgataagaaagctcggcttcaaaacaaagatttttattttaaaaagggaatcgcaatacctatggttacctctggtaagttaaccgcttcagaaatggataactgcatttttgaccaaggtgttgttggtgtttttgccaaagaggcaagctaccatgattttttattgatttacctaaaccacccatttgcaacagaacaaaagtccttggtatcacctggggctaataactctgcaaactatttgaagcggattaacattcctaagttgaccgaaactgagttgttagaagcaagcaaaatagtcgagttagcgaaagttcaaggatgggaaaaaacagaagacaaaagaaatgattttatttcctccgtcttttaa

SEQ ID NO: 204247 - DNA, 867 bp, Klebsiella oxytoca
atgaattacactcagttaaaacaatttattttttcctattttcactcaaatttaacggatatcgccagagatatacaagctaaaaaccttccagagagagcgaagtcaatacttataaatcaagcggtagaacgtgtaaaaaatgacttaggtaaaatattaatcgttgagtattcacatatcgatcgttcaaagttatttatgcttctccaatattgttattcagtcatgagctttgaatatcggaatgtagtttggccatatgagtacatggctttttcacgaaggaatggagagttgtgggagcgtttttgcaaagctgcatgggatcactctttattgccaaatctatatcgtatttcagcaccaagtttccatgaggttagaaatagctttagagatcgcataataaatcacacccaagggaatcaatatcaacaccacatcgtaaatgacgtagatagtgtttttgaacttgtaggtgagattaatatggttgaagatgaaatgttcaatctaaatggacgaaattatattatagactttaaaagtggctttggttctaacgaaaaagggaatacacttcgtttaattgctgtcggacgagcctacaaacattgggatcctaatgtcaatttattattccttgttagacaaaacgaaaataataactatttagagactattcgcagaaataatatatgggaagttcattgtggcgatgcggcttaccaaaaaatagatgaactgacaaatgcagggatatgcgaaattagacgagaagccattgattttaggaatgacctatcgcctaaattttggagttatttagttaataccaatctagctgattatttaaattggtaa

SEQ ID NO: 204248 - DNA, 795 bp, Klebsiella oxytoca
atgggacaaccagtaaatatagcaggcaaacgttttggaaagttggttgcacttaaatattccggtatttcaaacaaacaggggcgactttgggattgcatctgcgattgcggtaacacctgccaagttagttacgggaagctaaatcacggggcgacaatatcgtgtggctgtgtctacaacgcacatcgtcgtagcataaagcctcatggtatgagtaaaacgccaatttatcgtatatggctgggtatgcgggaacgatgtgaaaaaacaacccatcacgcctataagtggtatggcggccgaggtatcaaagtctgtgagcggtggcaaatctttgaaaatttttatgctgacatgggagagcgaccagaagggatgtctcttgatcgcaaagatgtgaatggtgactacgaacctgaaaattgcagatgggcgacttttgaagagcaggccaataacacgcgttcaaacttaattttggagcatatgggggaaaagctgactctctcacaatgggctaaaagagctgggattcaggcatctactcttcactatcgaatcaagaaggggtggccattagatcgcgcgcttaacgccagcgtcgacacatatgccaaccgagatagtaagcgtctgatcgagtgtcgtggcagaactcagcggattaccgaatgggcaagagaggttggcttgactgcgaccattatctcgcagcgaattttgaggggatgggatgttgaagctgccattttcacaccatccaaacgaccagtaaaaggagataaaaagtga

SEQ ID NO: 204249 - DNA, 549 bp, Klebsiella oxytoca
gtgattgctacaggggtggacatcgaatctacaggtattgattttctctcaggccataagatcattgaaatcgcaatggtgaagtacgaaattgagacccaggcaatggttgatagttttgtaatgcggttcaacccgcgtcgcagtatcgatcctaaagcgcaagctgtacacggtatctgtcttgaagatttagccgctgagccgttactagccgatcacgcttcatctgtcgcttcattcctctcttcttccgatatttggatagcccacaatggcgaagcattcgacattccgtttattaggcatgagctgaaaagttacggtttttcgcttccagacgtcccattgattgacactctattttccctgtgggccacagaagacggcaaacggccgcgactggaggaactcgccttctcattgggttttgtctatgacaaggctaaggcgcacagcgcgctctatgataccgatctgatgatgcactgctttttcaaagcacgggaaaaatacggcttctataagctcccattcgaaagcgcctga

SEQ ID NO: 204250 - DNA, 468 bp, Klebsiella oxytoca
atgaaacaagtaacagatgacacctctacaggacaccctgtaacgctcagccagcatctttgtttttccctttattccacttcgcttgcgataaccaaattatatcagccgtggctgaagccactggggcttacctattcccagtatctggtcatgcttgccctgtgggagcaggaaaatatttccgtttctgatttaggtgatcgggttcagcttgattccggaacgctcagcccgctgctgaaaaggctcgagcagtcaggtaatatttacaagcggcgcgacgtaggtcgcgatgaaagaaaggttattattggtctgacgcaacaggggagtaacctgagaagtaatgcggccggcgtaccttctgaaatgattagggccataggcatttctgcagacgagataaatgaactaaatgcccgtatagcggagttgcgtcaaaaaatcgtttcactgcttccgtga

SEQ ID NO: 204251 - DNA, 624 bp, Klebsiella oxytoca
atgaaaatattacatattgtttcgtcgccacgtggcgatcgctctgttacccagaagattgcttccggttttattgatgcactgaaagtaaatcacccatcggctgaagttgacgaactggacgtatgggagacagagttgctcccgtttgatggccctgctctcaacgctaaatacgctgacctgaccggacaggagatgaccagcgaccagaaggctgtatgggaacaaattagtgaactgggtgaacgttttcatcgcgcggatctcatcatgttcagcgtgcctatgtggaatttcggcataccttatcggcttaaacatcttattgatgtggtgtcccagcgtgggattcttttctcatttgatgcagacggcatgaaaggacttttgtccggcaaaaaagtttttgttgcggcagctcgtggcgtggcgctgggcgatgactacccccgcgaggattatgatcatcagatagcctatctgcgtacatggtcaaaaatggtcggtatttatgatttccaaaccgtacttaatgaaatgacgctgggtggacctgaagtacagaaagccaacctggagcaggctatgcgggaagcgcagagtatcgcagaaaatatctga

SEQ ID NO: 204252 - DNA, 522 bp, Klebsiella oxytoca
atgacgaaaacagacatcacctacggaatacctgctgaggttttgccacgcgattactccaacgtggagaattcgttgatattctggcgtaagtctctcatccctgtaagggttacaatggaagatggtcaggtgttctcgatgtacatacatggcctactttccgcacgaaacaagcttgatctatcgcccaccccctgggataaagagaatcgcataagagtccctcttgagcgagtaagtacaatagagtcaggggcaggtgatgtagatgtttcctttgtcggacggttgacgataagtaatgaagatgaggttaatcggccatcacgccgagacttcttcaaaatttgccgtcaagcccatgaggcggagaagtctataagggtctacatggcggatggccgtgaaatagaaggcgtgtcgttaggcgttgacgcttgtcaggtgacgatgaaaatcagggaacacgcaaaaatgattgttctcttcgattgggtcgaacgcattttaccgttttaa

SEQ ID NO: 204253 - DNA, 591 bp, Klebsiella oxytoca
atgactcgcttagccgtcttaacaatcacttccattctttcattctctgcaaatgcgctatctgatcaaatgatggacatgcaaaaaacttacagcatgttcacctctcaggataatgtagaatatgatgccgcaggtttagttcaaaaagtttggtacagattctcagataatgcagaagtgacaacggcaacggggtcttctgaaaggcttaggctacaaattaatggaacacctgtcaaagtcgataaaactaatatgtcgcaagaagctcttatgccttcagggatgatcattgaggttttagaaggtactctttattgcaatgaaatggcaacatctggttgccaagttaatattaaagtcggaaacgaaaattcaattacaactcatgcaaaagttggcgcaaacacaaacggtaaagttcttacaatcgatagcgaaacaacaaaacgagtgattcaagacatcgaaaaagtatcaaaatccaacattaacaacaagcatatataccttgaagcgccactctttgttgtaggcaataaagaattcagatttgggcttatcgaaacaccgctaagggccaactaa

SEQ ID NO: 204254 - DNA, 537 bp, Klebsiella oxytoca
atgaattacttagctgaactaccattcgttgacatcttcgatgccaaagcaaacaaggcttttttctggcgcgtcgacaacccactcgactataagtgcggcgtgaatagtgcaaagacgttcgtagagtttatcgagaagtatccatttatgaacaacagcaatgttctgtatagaattgcttgtgacatgactgaatcagggcttattaaatccgaatccgcacgaggcttttttaacacgttggataagttattgttgcctagaaactctaaaagccagaacgattcatctatattaaagcggcgacagatgcgtagcattcccgacattgccagtgaaattggtattacaagtattaagcttctgaatttccttgctgtaattggatggatagattgtgtaactgtacagccaacaatcgaatcaattaatgaaggcgtattacgtaaaaacagcagaatgcccttcggatatacaatcacaagaaagggtgaacgtctgattgaaagcaaatacaaggctatgtgcaaataa

SEQ ID NO: 204255 - DNA, 183 bp, Klebsiella oxytoca
atgtgtggcaatgaatatgccgtgattttctccatgcggcgctacgtgaaaaaacaggccgcgacgggaaatttcagagaggatttttgcgattcgctcaggcagagcctgaacattttgacgcgggtaaatactggagacctcatcaccaaaaaggtgagcgacgttatcgccctcacctaa

SEQ ID NO: 204256 - DNA, 513 bp, Klebsiella oxytoca
atgaccaataaccagttaacagacaagcgctcacaactgcgcacctccgctcaaaactaccaaatagcgctggcatggtatcagtcaaatatcgacagtccagcggcgctacaggcgtgggacgctgctacatcggagttcatggccgcaattggcaatcaggaaaccgatatcattgctgaactctttgatgaaattgcagagctacaggaacgccacaaggccgatattgcgccagcaggttactttgcttttgataatgacggcggattcactaatcacgacacagcagaaagcgccagaaaagaagcgcaagaagctatcgactatttccggggtgatgcatgtgacggctggcctgatgatgtgaatagtgtttgctggggcgtcatcatgcagcagtcaacaaagacgggcgaaaggccagtcgaagaggacgataaatgctcatctcacattgagcgcgtttgtgattacgtactgctgccagaattgcaggagaagccagaatga

SEQ ID NO: 204257 - DNA, 390 bp, Klebsiella oxytoca
atgaagttccatcgtgcaacgtacagcctcttaacccgtgatggccgggtaacagttgatgagcaatgggtcttttttgaagccgaaacctactctgacgcgctggaaaaaataccaggattactgatggcaatgtgggattgttgcgagtcccagctcgaaatatggaacctgatgcaagataaccagcttgttgatctcagcatggatatggagattgattctccccgggagtggcgtttatttgaggtcggttattccgctggttctgccgtttatcttgatgttgaacgtgatggctggccgctgtttcttgtctctccgtcttggctggtccggctaaataaagcgttggttgaatgccgtagcgtcggaggccagcatgaataa

SEQ ID NO: 204258 - DNA, 1614 bp, Klebsiella oxytoca
atgacttctaagaaatccagccaactgggtgaaaagctactccagcggggccgtaccccaaacactgaaagctctgccgtggtgttgccggtcaatgaaatgccgatggttctgacgctggagcaactgcgcccgaatcccgataacccccgtacttcccgtaatccaaagtatgaagatatcaaagcgtcgatccgcgcccgggggctggattcggtgccaaaagtcaccagagatccggaaagccctgaagatgtttatatcttcagcgacggcggcaacactcgctattctatcctgaccgaactgtatgcagaaacaggcgatgagcgttttcgccgtgttcagtgcatcgtgaaaccgtggccggggcgtttgcagtgcgttatcggccatctggccgagaatgatgtgcgtggtgagctgtcatttattgagaaagcctttggcatcgagaaggcgcgggctatttatgaggaacaactggggcgagaagtgagtcagcgcgagctggccgatctgctgaaagaggccggttatccggttcaccattcgaatatcagccgtatggtggcgacaatcgaacacctctggccgtggatacccaacttgcttaattcaggtatggggcggcctcagatcgcccagcttatcgcgttgcgaacggcggcggaaaaagcctggcagaccttcagtcagaacgtcgcgttgctgccagaacagaaatttaatgatgtctttggcggtgcctgccgtgcctttgacgacccagagcactactcagccgacatctttaaagaagagctgattgcggccctgctgaaggcaatgcccgatccgcaactgacctatgatagctggctgattgagcttgacccgcaggaacagaaccggcgcaaactgtttggagcgccggagccgcttccccagcatgttctggatgcggacaaaacccatgatgagccttcaccaccaccggctgctgagccgccctccgtcactactgattccggatcaacgaggaaaaagcctgtcactaccgagggcgactcctctgctcatattgatctaccgcccgatgaagaacagctggatctctatgatgggaatataccaggagattcgacatctgaattacctgacgttcctccagatgttgatcaagagcttggtgattgcactggcggccagcgtcaggagtcgccagtaaactccattacttttgctgcgaacgggctggagccggtaactgacatctggcatatcccggcgttacaggatgatgttgagcatctacaggacatcgcgtttcgcctggcgttcgaactggcggaggtgatggggattgaagatgttattcaggaagataaatctctcttgggcgcaggctattctctcccgccaaatgcgaacggtgagctgctggccgcattgtgcggtggcggatcttataccccgttatcaacattaactggatttcttctcggtgcgtccagcccgtttgatgaacccttactcaatgatgtgtatacggtgaaattcctgcgtttaatcagggtagtgcgccggttgcgcgagctgcaacgccagacattcggggagggcgcagcatga

SEQ ID NO: 204259 - DNA, 243 bp, Klebsiella oxytoca
atgaaagctgactgggttgatgaggcgcaggaagtgacccaactgatggtcgatagccatgtagagcgtattcgttcttcgttgatatcaccgatgatatcgtccgctgaatgcgaactctgtggacatgagatcccgaaggcccgtcgaagagctgtcccgggtgtcaggctgtgcgttgaatgccagaccattgccgagtttcggcggcgtgtcggatatggaggatacgatgaaagctga

SEQ ID NO: 204260 - DNA, 2607 bp, Klebsiella oxytoca
atgtctactattccagcaaaaacaatcggtgattcctttgaacaatggttatctgaacgccctaagtggctacaaacagcagcaaatcaaataattaataacaagcggcgtctgactccccaagaactcgacgtactagctgagctttgtctaggcgaagctacttcatcgaaaaatatggctttcgagccatacgtgcctggctcacttaccctagcatcacagaggcttcctttacgtctgctaaaactaactgatgtcattggtgtaaatgctctcacaccgcctgccagtattgattttggtgatacacaactaaccgtcatatatggtccaaatggtgccggaaaatccggctattcaagactcctcaaacaaatttgtggttcacaatataaagaagatatacacggcaatgtgtttgaggctcagacaaattcaatcagtgctacagcacactatcatgatggccaatctgtttgtcagaccacttggtgtccccaaaatggaccaagcaacgcgttaagaaatgtacaaatatttgatactcatgccgctagcatttatatcaaagacaaaaaaccagcaacatacgaaccgggaagaattaagtttgttaaaactctaatttcaacatgcgatgaaattaatacacgactaaaggctaaaagtgctcaactagtagatctacgcccgcagttccctacagagctcactggtagtccacttttttcatggcatcaaaaattaagcgcaaaaacctcaattagcgacattgaaaaaaactgcaattacacgaaagagatggatgaagaaaggattcaagcagaatcagttttattgcaaaaagatatacccagtaggttaaaacagattgaggttgagaaaaaagcacttcaacaaataaacaaattcattacagaattaagctccctttacggtaacgagtcagttaaagaattaatcgacgctcataatgatgctttatccaaaagaaagaatgcaaacgaagcagctcagctaacatttaagaattctcctctagagggtattggacaatccacatggttagcaatgtgggaacaagccaggaatttttcaaccttgcatgcatatccagctaatcacttccctcacacaacagatttagctcgatgtgttttatgtcaacaagaattgttgccagatgcaaaagaaagaatgaacacatttgaatcatttgttaagaatggcttagaaaaagaggcaaaacaggcagagacaacctataaaaccaaacaagagaaatacggtaaactccccgatcttgtagattggaattctcgattaaacatactaaaaatggatgaacaattatcaaaaaaaatattagatgatatatctaatcgcaaatcatcactgggtacagccacgtcaatagaacaactatctacaattgactggaaaccaattaatgatgcatatcataattcattcaatctcttagacactgaagaaaaatcacttcaagcactacaaaaagatggcgggagactagcactactagcaagactaacctttttaaaagcaactcaatggctatatcaaaacaagcaatctctaattgatgaagtaaaaaggctaaataaaatagctgaaataagcaaggcacaaactcttgccaaaacaaatcaactttcaatcatgagtaatgaccttgcaaaagagttaataagcaatggttatcgtgatagatttgcttccgagctaaacaaattaggaaatagacgtatcagagttaaaccaaaagacataaaacaaggaaaaggaaacatttcctttgagttagaattagatggttccacgcagaaaatctcaccatcagttattttaagtgagggtgaagcaagaattgtagcactgtctgcatttattgctgacatgaccggagaacaacaatcaactccgtttgttttcgatgacccaatatcgtctttagatcaagactacgaagagcgagtagttagtaggttaatagatttatctgaaacaaggcaagttattatcttcacccatcgcctttccttagttgccttagtcgaagctgaagcgaaaaacagaaattctggaaacctgggtaaaccagtatctttagaagtgatcacactccaaaattttgcaggaagagttggtcaaacagttcctggaaacatacgcaatcagcaacctaaaaaggcactaaacaccttaaaaaatggacctcttagcttacttaaaaaagcttataaagatggggatcaagatgcttatgatcgtgaagctaaaagcctgtgtagtaatttgcgcattattgttgagcgctgcgtagaaaccattcttttagatgaagtagtattaagatttcgccgaagcgtgatgacaggaaataaactcatgaagctagttaaaataacaccagatgattgtcaactgattgaagatttaatgggtcgttattctgtctatgaacattcccaacccaatgagcttcccgacatacttcctgaactctcggacatcgaaaatgatttagatagattaaccacttggatcgaccaattttcaaccagagctattcctacaaattaa

SEQ ID NO: 204261 - DNA, 753 bp, Klebsiella oxytoca
atgtcagacaagaccgaaaagaaagccggtgcgctgcattctgagctgcgcatcgagctgcacactcaatacgccattaacacctggaccgggcgaccagcctcggatggtaaaccgtcgcttatcgggatgccgctgtttttccggcttatttcccggattaaccgtgattcactggcggataatccgtgggcggattcggccctggtggaagtggaaacattgctggaaacggccagccagcagctccagaaatggctgaacgatatcgatgccctgatgacgctgctgccagcgaacgcttctgtttccggagtcacctctaccgcgccgctgaatatcggtgttcacagccatactccgttggggtaccgctgcgtttacctccttgttggatttgatcagcttattctgcgtgtctttcaggctcatcattacggtctgatgtcgctgaaaaagcgtaaagcctggttacatcgtggtagccatcaaattcgtcgtatcttctcttttgccctgcgttaccgctctcatcccgttacccgccaggatattgcttcagataacgacattgcccggcaggctattgaacaatttggggaactggacagggcgatcctgctgggaacccgccgcacccgcttttctccgccggtaagcgccgaaagtatcaaggcgctgaaagccgccttcaaacgccagtcacgcaaagagaaaatggcaaagcaggaggtgcaggatgatcagcaataa

SEQ ID NO: 204262 - DNA, 564 bp, Klebsiella oxytoca
atgatcagcaataaaaccgcttttaccggattgttcgtcctgagtacctgcctgagtgggtgtgccagtgttgacagtgtcaacagtgcgataaaccagattagcggtgggatcttctcagtcggttccgcaccggcagacagtggtccggtggtgttgtcgaaaggcgtaccgcaggccagccacaaaatcgcgcaggaataccgtgttcccgttgatgttgatacggcagcagcgcgggtaaaacgctactacggctttatctcggctgaagaagtagcgcagctacgtaacaacggtacgcaaagtggaaggtggactgccgcttcagtagccgatggggcgtgggtatgggatgggcaacccggtagctactacaaaatggggcgcgactggggaagcgagaatactaacgacagcgttcaggtcgagctggagaaaaacggttccggtagccgcatgtatatcacctttcgttccgggctggcctctcatgccacggcggcttatacccgcaagctgtttgagaatatgaagagcgtggcggaagggatgattcgatga

SEQ ID NO: 204263 - DNA, 2004 bp, Klebsiella oxytoca
atgaagctctttctctgtgagaagcccagtcaggggcgtgatattgccgccgtgttgggcgcaacaaagaaaatgccgggttatcaaaccggaaacggcgtatgtgttacatggggttttggtcacctgctggaacaggccagcccgggtgcctacggtgaacagttcggcgttccctggcgtactgacgtgttgccggtattgccgacaacgtggcaaatgcgggttaagccggatgcagcggctcagttctccgtcatccagaaactgctgaaacaggctgatacggtagtgattgccaccgatgcggatcgggaaggagaagtgattgcccgtgaaatcctcgattattgccattaccagggaaaggttgagcggttatggctctcagcactggatgaggccagcgttcgtgccgcgctggcggcgataaaacccggaagtgtgacgttaccctactatttagccggtcttggccgcgcccgggctgactggcagatcggcatgaatatgacgcggctatattcggttaaggcccgggagaacggctacggtagtgttttatcggtaggacgtgtgcaaacgccgacgctcaacctgattgtggtacgcgatcgcgatattgcgcagtttgttccgaaaccttactggaatgttgtggtgcaactggcggcaggagggatcgcatttcaggctcagtgggtgccagcagcagcgtattgtgatgaggaaaaacgctgtattaacccgactgcggcccagcaggtggttcagctttgccagaaaaccggacaggcgactgtggcagaggttgagaccaaaagggaaacagaatccgctccgctggcgtttgatcttggtacgctacagcaagcctgctcgcggcattttggctatggcgctcagcaggtgctggatattgcgcaggctttgtatgaaacccacaaagcgacaacgtacccgcgaaccgactgcggctatctgccgacatcaatgcgtggcgagatagggctggtgatggcagcgatacagcaaagcgatcctgctttatctgcgactatttcgcggcttgatgtgcagcatatttcgcgcatctggaatgacaaaaagatcaccgcgcaccacggcattatccccacaaagcagccctgtgatcttgcgaaaatgagtgagcaggagcgcaacgtttaccagcttatccggctgcattatctggcccagttcctgccgaaccatgaagtggatgccacgcgggcttcgctgcattgtggtgggcagctatttaaggctagtggtaaggttgtggtcgttgctggctggaagagtttgtttggtaaagactctgaagaggatacagacgttgccggtgacaaagcccggttaccggcaatggctaaagggagcgtatgccaggtcactggtgccgaagcaaaaccacagcagacaaaaccaccggagcactatacggaagggacattgattgccgcgatgaagaatgcggcgcagtttgttaccgatccgcgtcttaaaaagatcctcaaagagaatgcgggactgggaacggaagcgacccgggctggcgtaattgagacgttactgaagcgtggatttgtggtgaagaaaggcaagcatctgctggcgacacctattgcggctgatttaatggctgtgttaccggcaccgctcaaagatcctgggatgacggcgctctgggagcagtcgctggatgatatcgctgaatgtagaatgtcgctggatgactttatggcgaaacagtccgcctggacaatgcaactggtggcaaaagggcggcagcagacagttaagatcacgttaccgccttctccgccgtgtccgatctgcggtgggacaacgcgccagcgcacagggaaatcaggctcattctggggatgtattaactatcctgactgcaacgggattgtgaacggcggggcgaagaagactgctcgtcggcggaaaagcccggcaaagaaaagtgtctga

SEQ ID NO: 204264 - DNA, 768 bp, Klebsiella oxytoca
atggatagaaaaaaattaacatctagcttttcacttgaagaaaaaatcccttgggagtgtccaacctgtaaaactggagtcttgggaatagttgagtcatcgttacacaaacggattacaccggaatcagatgctatatgtgcgcgttatgaacaatggataccagaagaaattgaatatagatattcttgcctgtttcaatgtgctagttgcaaggaaataatttcaagtagtggaataggacatgtcgatgtaattggctatgagacttttgatgaaggcagttatgatgccatttacggtgattgttttaaaccaaaattctttgaaccacatcttagtttgatttcaatgcccgataattgtccgatttccattcgggaacctttaaatgagtcatttaagctatttttctcgagcttaggagcagccgcgaataatattcgtgtcgcaattgaagcatttcttacagagctgaaggtccctactgagaaaaaaaggaaagatggtggctctacgttcatgtctttgcatgaaagaattgacaagattcctctgacacacactgaatataaagaaatgctcaaggctataaaatggattggtaatgcaggtagccataatagtgatgtgaagcctgacgttgaagacgtaattgatgcttatgagttaattgaacatgtattagaggaggtttacgcctctcgtcgaaaaaggctttctgcaatcgcggcaagaataaataaaaataaaggtcctgggaaatga

SEQ ID NO: 204265 - DNA, 606 bp, Klebsiella oxytoca
atgagcaacgatacatattcttgcttcgcagaattagaaaaggctgaagataagaagtcctataacattacctgcgatatgaaaaaccgcagcagcgtatatgcaatcatggctccacatggtgggaagatcgaactgggcacaactgaagtttcgatggctattgctcgtgacgatctatctctttatatattcgatgccaataaacccaataataataaaactcttcacattacaagttctcgtttcgatgaaccacactgtgaagtgatgctaaaaaatgtagaaactgtgttaggtatacacggtgcagcagatcccgatactgatcccaaagaaagagtctgggttggtggaaaccttagtgatacatttgaaactcatttgaaggagacattacaatctctcggatttttagttgaaattaatcctaagttcacaggcaactctccaaaaaacatttgcaatcgaggtgctagccgacaagggatgcagcttgaaataacaaagtcacttcgcgaaaaattaaaagatgatccagaccttctgagcaaattcagcggtgctgttcgtactgctatgatgctcacatatccaacgccttaa

SEQ ID NO: 204266 - DNA, 537 bp, Klebsiella oxytoca
atgtctacagcatctaaaaccactacagctaagtctaaaaaaggcagcgccagcaagcaagccccggctcccgttcttgctgaatcagcaactccagctcaatcagcagctccggcaccggcacaactgaaaccacaatccagctactttaatttgcatattgatgggctgggttacctgagcaatattcgcgaaattaacaccgctacggggtcattcctgagctgtacgattaacgcgttgcatggctcaactgaaaaaccggattacacgcgttttgatgtcacggtgtcgggtaaacaggctagttctttaatcagacgctgccagaatgcggtgaatgaagagaaaaaggtacttatcggtttcaggctcagtaacctgactgccgatgtgtttactctcaccaaaggcgatcatgcgggtgaatcaagagcgtcactgcgggcgagactgataaaaatcagctttatcaaagtggggcaaaatatggtttataaagctgaaaagcttgagtctaccgattcagcatactga

SEQ ID NO: 204267 - DNA, 597 bp, Klebsiella oxytoca
atgaatcttcatatcccaatggccctctgcttggctgccagcctcctggccggttgtacgcaaaaactccagcaacctgatacgcaaccccatccaacggcgctgaatggcaatatccagccagcccgaacagatgtctatgccgcctctcccgaagttgttcgctatgaccgctatctgctggttgatacttctccgagcgctgcgcaacgtgctccgctggagcaaaccatagatatccgtatccctgcgtcattatcgccgaccgtggcggatgccatgcgctatgccctgcgccagtccgggtactcgttatgcagtacgacaccggcgaaccgggtgctgtacaaccagatgttgcctactgtgcattatcaactggggccaatgcgcctgagtcaggcgctacaaatcctggccggatcggcctggcagcttgaggttgattctgtacaacggatcgtctgccattcattacgcgatggctatcgtttgccgccggaagtggtgaaaacgtcggtcacttcagtctctgtgccgctacctcctcaacccgtcaatatcaccgctccggctccgcagaggatgctgaaatga

SEQ ID NO: 204268 - DNA, 720 bp, Klebsiella oxytoca
atgaacgagtccgttagtttcatggagatacccgaaatgaaagagtctgtcagaccagcacgaagcaaactctgggtgatagttcgttacggattcggtgggctggttttgtttgctctgggtggaagtacatttatcggcctgaagcaggtccagctactttccggggaggttagtcagcttaaaaccgcgttgcagggtagcccggatatagcgccactccaggcacagctgacaacgctgcaacagcattttgaagagtcacgaatgcaactgggagggatggctgacaaaccggcgcttgcggctttgcagcagaaggttgatgcgctggataagcaacagagtgagcaggctgcttcggttgccgcccttaaaaccgggctgtcttctcttcaggagcaggttcgtgttttgaatcagcgtccggccagcgtcgcttccgttgttcctgccgtaacgtctggcgcggtggtagtaaagaagaagcccacacagaaagcgcagcggccagttacagcacccttcgtcctcaccggtatcgaacggcggggagggattgcctttgccgcgataacgccgcaatcggcaacgcaactgacagaaataacgttaatggaaccgggggaaacccgtcagggctggacgctgctggcgatcgccgggcagcaggcgcagtttcgcgtggcggggcaaacccggacgttgacggtgcgataa

SEQ ID NO: 204269 - DNA, 705 bp, Klebsiella oxytoca
atgaaaaagttcaatgtcgtgctgctgtcaggagtgttgacagtgtcaacagtcgcatttgccgtatcgccagtgattcagggaaacagccagacggtgaatacctcgttgcagacgctggaacagcaacaaatgacgcggagcgcacaggagtgggggctaactacggaagagtggcagcgttatgaaacgctgaaaaaaggacggcgcggcgtgctgtctccggggttagatccgctgacgatgctgggcatcgaggcgcgtagtgacgaagaacgtcgtcattttgccgaactgacggtgaagcaggagtttcagcgggttgaagcggagctggcatttcagcgggaagtgaacagcgcatgggtgcgagtctatcccggcgttctgcccgttcaggagctgcggagtgaagtcagtaacgcccgtcaggcgttgtttgtgaaagacaactgtcctgcctgcgatcacaagctgactcaattgatgaaatcaaaccagccgctggatatctatctggttggcagcggtggtaaggatgaggcggtccgaaactgggccaagaaacacaatatccctactgaaaaggtgaaatcccgccaggtaacgctcaatcacgacaacggcatgtggctgaaatatggtaacgggatgatgccggttgtattgcaacagggggggcagggatggcagcgcgtaaactga

SEQ ID NO: 204270 - DNA, 567 bp, Klebsiella oxytoca
atggcagcgcgtaaactgatatggctggcgatgttcatcgcgttgccagaatgtctggcagcgcaatctgtcccggaaggatatcaccgggtcgcgcaggctgaaaatgttcctgctgaagcgctgtatagtctggcgctgacggagtcctcccgcaagctggcgcatggtgtgcgtccgtggccgtggacaattaatgttgccgggaagggatatcgctacgcctcccggaacgaggcatatcaggcgctgttaggctttatgcggcgctatccgctcaagcgtatcgatgtcggtattgcgcagatcaatctgggctggaacggccatcatttcacatccacctgggaagcatttgatccctataccaacctgcacgctgcggcccgtattttgcgagcctgttacgagcgtagccccgggagctggatatcggctgcggggtgctaccaccatccggcaggcggcaaacctgcacaaacctataaggccatcgtgtcacgtcacctcggcacgttgcagccgtccgtacaggcgttggcattcaatcagggaggaacacaatga

SEQ ID NO: 204271 - DNA, 501 bp, Klebsiella oxytoca
atgatgatgcgttttccgctggttctcgcactgctgtttccgggcataagtcaggcagagctgaccgttgtcgccgatctgggcggacagtcaacggctgaatactttgccggtattaacaatcaggaggaagccccatccacctcgcaggtgttgacactgtcaacacctgacaaagcatcggtactacccattcgtaccccggagctttcgcccgggccgctggaagctcgttctctctctatgcccggaatgcggtcgattttcctgattggtgacgacgatctttcccggcgctggctgtctttgcggcgcgatcggcttattcagcttaattccgtgggctatgtggtgaatgtcgccagcaaagcggcatgggatgatttgcagcatcaggctaacggactggagttgcttccggtttccggtagcgatctggccgctcggctggggatttctcactatccggtactgattagcgagaaggggctggagcaatga

SEQ ID NO: 204272 - DNA, 2085 bp, Klebsiella oxytoca
atgagcgaccgctatgttattgaagctatgctgcggcctgcggtggagctgaacaccgccattgttgccgcctgcgccagctatatctgcgtgacggctccgtgggcggtggcgctggcaccttcagtcagctatgtcacggcggcagggtttgccgtgctgtcggtgaaacggactcagcaggggttacgggtattacgttaccggcgtaatatccggcgtttgccccgttatgttgtgacaagtagtgaggtgccggtgagcaatcagcggttatttctgggtaaagggtttatgtgggagcaaaagcacacccaacgtctgctcgataccctgcgtccggaggtggcgggttacgtcaatcctcctgcgttatatcaggcagcacgccgttttgagcagcactatgagcatcgcttccccgcattgtgcaaactgctggcccgtgattcggcgttgaatcccgttcggccattgccgccagtcggtggtcatcccgcattgcatggcatcgaacctgatgaagttaatgtctcaatgagcctgggagagcgtgtcgggcatatgctggttttgggtactacgcgcgtcggcaaaactcgcctcgccgagctgctgatcacccaggatattcgacgtggcaacgtcaccattgtttttgacccgaaaggcgatgccgatttgctgaagcgaatgtatgccgagtcacaccgcgcaggccgtgctggtgaatttcatgttttccatctggggtggccggatatcagcgcccgttacaacgcggtcgggcgctttggccgtatttcggaagtggcttcgcgtgttgccggtcagctcagtagtgaaggtaacagcgccgcatttaaagagttcgcctggcgtttcgtcaatattattgcccgggcgctggtagcattggggcaacgtcctgactttggccttatccagcgctacgtgaacaatatcggcgatctgtttgagacctatgcggaaacctggatggtgaagcacactccgatactgtggcaacaggtggagaatctggcgcaaattctggatgagcgcgatatcccccggcatatggaaggtcgctcgctgcgtgtggtggcgatagaacaggtgctgaacagcgacgaggggaagaaggtttacgatccggtgctcgatggcctgcgttcgtcggtccgttatgaccagaagtattacgataaaattgtggcatcgcttctgccgttgctggagaaactgacctcgggtaagacagcgcaactgatctcaccaaactacaccgatatgtccgatccgcgtcctatctttgactggcaacaggtaatccgtaaaaagggcgtggtttatatcggccttgatgcgttgtccgatccggaagtcgcggcggcggtgggtaattcgatgtttgccgatttggtctccgtggcggggcatatatacaaatttggcgtaaatgatggcctgcccggtgacgagggcaagaagacgccgatcagcctgcactgtgacgagtttaacgagctgatgggggatgaatttattccgctgatcaacaaaggcggtggggcgggcatcgaggtgacggcctatacacagacgctgccggatatcgaagcgcggctgggcaatgcggcgaaagcggcgcaggtagtggggaacttcaacagcctggtgatgctgcgggtgcggcatacggaaacggcagaactgatgacgaagcagttgccggaagtggaggtctataccaaaacgctggtttctggtgtcaccgatatctcgaatccggaaatgggtagcgattttacttcgaacacccaggacagggtcagtacggtacgtacgccattgatcactgccgcgaacgtgatcaatctgccgaaaggacaggcatttgccttgctcgaaggagggcgattgtggaagatccggatgccgttaccttcagccggtgcggatgctctgatgccggacagtatcgggcagatcgcagactatatgcagcgaaattaccggaccagcgatgcctggtggtcgggcagtgcgttaccgggagattacgatgcagccactttttga

SEQ ID NO: 204273 - DNA, 270 bp, Klebsiella oxytoca
atgaaacaacgttatcgggttgaagcggttatggcgtcttcaaagcaaaataagctggaagtcccgcgtgatgtgatggatatcttttgtgagcaggattgctcgtcacttcagatcccggaaattattgagcgtctgacttcgctgggttatcgcccgagatatgaagccaccgctgatacgctccctgatatcgccaccttgtggatttgggtgggtcaggaagagatgttgctgaactgccagatggagtcgctggcggtgcattaa

SEQ ID NO: 204274 - DNA, 765 bp, Klebsiella oxytoca
atgtcgcagatgaacacgtcttcagccccggtacaatccaccacacctccaaagccgcatggtttttttaccgtgctgctatgggatacgccgtggcgcattatcgggatgttactggtctcgctgctgtttagcctgattgtggaatatatcggtatcgcgttcttctggccggatcaaggagcggaacatagtcgtgccgttatgcagacggaaagcggttattttgccgaggggtttacgcagagtttgctgctgtcatctccggtggtgacggtacagagctggatagcgctgggttatcagtggctgtttgtgaacagcgggtttatgggctggttgcagtcaattcagacgccaacagccggaagtggtaatggcgtcacggatgagctaaatgcctggagtgcctgggcggtacaggtcgcatatgaatacctgatggcgacgatgtatgtgtcgctggtctttctgatgcgggtcaccattctggtgctgtcggtgccgttatttatcctggtggccattgtggggattgcggatgggatggtgcgacgcgatctgcgccgctacggtgcggcgtatgagtcgagttttctttatcatcatgccaagcgtgttgtgaagccagcggcatatataccgtgcgtgctgtatctgtctgcaccgttcgcggtatatccgaacttgttgctgttacctgcggcattgctgatggggctggcgatttcggtgacgatgggaagctttaagaaatatttgtag

SEQ ID NO: 204275 - DNA, 156 bp, Klebsiella oxytoca
atgaaacaacgcaccaccctggtattgtgtctgttaatagcgtgtctcacgctattggtattcacgtatctgacccgctcaacgctctgtgagttgcgaatacgggacgggaacagggaggttgctgcatttctggcttacgaatctggtaagtag

SEQ ID NO: 204276 - DNA, 2055 bp, Klebsiella oxytoca
atgtatcatctcgacaacaccagcggtgtcccggagatgccggaaccaaaagagcaacagtctgtttcgccactctggttcggggaaagccaggaacaaggcggtatcagctggcccggtgcagactggttcaataccgtgcaggcagagctacttaatttgctggcagcagctggcttgcagccggataaaaaatcattcgaccagctttcaaaagcgatccccgttcttggggagaagcagattcgtcaggatctggggtcaagaaccgtgggaaaaggggcttcacttagtgctctggtttctggcggaacagtacaggatgctatcaattacgtcacgcctttcgcctataaagacctcgtggttaatggcgactggtcagcagcgctggttgcggcagaccttgccgcccgcgatctgggctgggggctggatggacaggggcaggaatttacgttaggtacagaaattgtcctgcgctgtggggtgtggaaggatatcaaattcacgcccagtactgactttaccggtgcggggcctatctttgttgtcaatatgaatacgggtgaagttattcatgattccgtgtgggtcaaccggtttaaactgacgggcgcaaagatactgcagagcacttacgttggcgatactaaggctatatttaaaggcgactgccgttataactataatggcaatttgatccgcaccacgttgaccgcgaatgtaaacacggccactacctgggtcgttcctgttgcagatgcgtcaattttttctgccgaagactccgtccatatcggggatggccgttataaaatcctctccatatcaggcaataatatcacgctgtataacgatggcactggcgctaccctttttgattcagggacacggtatcagcactataccgggcagtacattactaaaaatcaggggtacgataataacggcctgcgcattggaaaccatactcagggctggaatataaaggtcgcggggaaggtggaggctatcggcaatggctggaccggcttctatcatgacagcggtgcatatggtggctatcttgagattgatggcatccgggcgtcatcgaacggatacataggaatcggtctggggtatgtgaacaaaggctatgttaaaaactgtattgctgagtttaacggcaacaacggcattgatacttttgaggcaaaacagaccttcgcggttgaaaataacctctgtgtagggaatggtgttgataatatttttgttggcggaaacagtgaaactgcccctgtaaaagggaatacctgcataaatgcacaccgcattgggatgttaattttcggtcgcaccaccggtattcaagggatggagctgacggataataaatgccagggtaacaagtatcgctctatcggcctcacgggggttcgtcacggtaaaattaccggtggcaatgttggtggcgctaatgactggtcaatcttcattgaagggagagccgggctgaataacccggacaaaatcaccatcagtaatgtggatatgtatcaatcaaccctgggcgatgtggggggtaatttgatgaataacgccagctacgcggcaggcactgtcgaccttattgacaataacaccttcaccagaatgcctactgtgaatattaccaatgtgaattatttcgggtgcaaattttatccggaatgctatatcgccggaccgagcgggtactccgcagcagcaggcgtcaatattgccgtgtctttaagcatccgtaggccgcataacagcactattaccgatgcggcatcagccaggcagataaccttttccatatcttcacaacccgatggcgccgatcagtcaacggttaactatgcggtaaaaagcctggctaatgccgtagaaatattgaataccgcaaccacgcgcgggaaggttatcgcgatccctgatttgggggttattagctataacttccgactggatgctccggggacgcgttacatacaggtagagtgtgggggattcaggaaggtgttaaccctgacatggacataa

SEQ ID NO: 204277 - DNA, 276 bp, Klebsiella oxytoca
atgtccagacaaaaaccgttacccgctgccgcccgtaaggccgttcgtcaaatagcgaccgcattcgtctgtgccgaagttgaagcgcaggtggtggcgaaactgtttgaagaagaattcggcaaaccctatgaccgcgaagctgccgacagttacctcaatatttttctgaattctgacccggatacacgtcgtgtctggaatctgatgcagaaagatgtgacatcagtccgcaaagattttgccgagaggatgaggagagaccgtgactgctga

SEQ ID NO: 204278 - DNA, 270 bp, Klebsiella oxytoca
atgcctaaaattattattgatatcgcccttgaggatactttcgtcgacgggcaaatgaaaaaagaccacctcagtattaagcctcgtgtcgaaggctgtaacagtgatgcgccgtcatcagcggatcacattgcgaccatcattcataacatgcttcccaccgttattgaggccgctggccagtatttcattcaggggattaatgaatctggcacggtgaagagtaccgctcaggcccggcatcattttcataaaccggtcagccactga

SEQ ID NO: 204279 - DNA, 639 bp, Klebsiella oxytoca
atgccaaacataaaagaaaacagtttttcttttgattgcaacgcgaaagaaagcattcaggataggctgaagtatctcttcaaggggagatccatgcgacaggcatccattgactgggggcttccgtattctactttaaataattatttcgctaagggagcaactccaggtctagatgtagtcataagaatctcagcgtatgaaggcgtatcgattggttggctagcaaccggggagagcgattggggtacaggtatgaatggagataacttcaaaactctggacgcaacagaatccacaaagctctcaatcagctcgaaggagggatttaatgaagatttttcgaagcacttcagtaaaccagaagatgcactgtcactaacgtggggagctatctttgatgccctcaacatcaatgataaggtcaagttgattaatatttttgtaacctttggcgctcaaggtgtaataaaaatgtttaataatatcaatgatgttaactcgacctggtacgagttaaccaacgaggagaaagagcgcctgatccggttaaatatgcaaatgaaaaaagaggcacctgaaagtagtgaaggtgtgaccaagcctagcccatccagttccagcaagaaggccagttaa

SEQ ID NO: 204280 - DNA, 474 bp, Klebsiella oxytoca; identical to SEQ ID NO: 102215

SEQ ID NO: 204281 - DNA, 1362 bp, Klebsiella oxytoca
atgggacacaaaaccattcgtcataccactagacgtaacgggatctactacgttcgctttcgtctgtccggcaaaaaatatttccgtaagtcgctggaaacagacagctacgcccaagcgcactcggtaatgtcttttgcctctcctgtcattcacttagtgcaatgcggggctatcaagcccgatcagttttccgctcgcctttctgcgatcaccagtcgcttgaaacaacaggctgaccactggttagcacaacaattcctcaatgatgagcggcgtgaagtccaaactcagccgataacagcgcatgaatatcaagatgctgtcgctcctgctgtagttgcggagcaaaaagagctaaccgagtcagaaaacgctttaactctggctggtgcatggaacatgtaccgaagcgagaaggggcgaagctggactaaagcaatcgcccaggccaatgagcgttttatggaagtactgctcgtagttttgggtgcatcaacggacgtaaaggcagtcaccaggcaagatattaagcaggtgatggaagttgtagaaaacctgcctaagcgtgttgttcagccgtatcgctcaatgactattcagcaactgatcgaatgtgatgatgttccaccagatgatttggtgggggccgaggcaattcataaacatctcaaaatttataaatcgctgttcaagacctttcttactgatagcaaagagattctggataaatcgccgactgatggcgtagtggcggcaccatcgaaagcacggtttggtgcgtacagcgcgacggagatgagaaaatttgtgggttgggcgctcaagcagcctgacggctggcagaaatggattacgttattattggcttacactggagccaggagaggtgagatagccaagctggaaaaatcgcaaatcaaatatgatgaagatagccagcgtcattaccttttgattgccgaaggtggacagggcaaaactgaaaacgctacacgccaagtagcaattcatcctgacttgatcgagtggggcttcatcgattttgtgaatcgccaatggaaagagaaaatattttctccagtggcgggtaagaatatgccgaagattggcaaggttttagctgatatccgcgatcagcttggtatcccgtaccttgatgattatggacagcggcggctggtgcatagtttccggcacacaatgatctcgacctgtctggcaggatgggttggaaacttggcgcacttgcagcaggttgtcggtcatgagaaaagcgggacggggatcaccagacgctatttgcatacgtttccgctatctgcggtttgctatgtgatcgacggattatgctggtattaa

SEQ ID NO: 204282 - DNA, 255 bp, Klebsiella oxytoca
gtgattaaaatcattgtgttaatcttatttttaagcccattcgccgcgcttgccgctgatggcggtgtgccagtggaagaggccgagaaggttcagagcgaaatccgtcatgcgggttacgagtgtgagcgggtggatagtgtcgaaactagatggttctttggaacaactgcgaatgtcgtatgcgacagggtttttcggttcattttggagtatgaacggggaggggtgagcgttgaagtggtgaacctttaa

SEQ ID NO: 204283 - DNA, 687 bp, Klebsiella oxytoca
atgcttgattttttgatttctcatctcgagaaatggagtacatttataagtgcggttgcagctgtcttaaccgcagtagcaacgtttttcctttggcgagtaacaaaattgcttgccaaggaaacaacacggatggttgaatcatcctcgcagccccatattgttgttactcttgaacctaatgcttgggctgctttttattttgatataaatgtagcgaataccgggaatgcaccggcttataatatagaagttgaatttgatcccccgctgattaatgcagaatatagggaagataaaaaacactctatcccgtttcggaaaatcagtgtattgaaaaacgggcagatgttatcaagtaacctttgcgaatataatcaaataaaagaaaacgtttacaaagtagttatcagctggtcgaagcaagcgaactcgattgaaagagaattcaacgaatacgagtatgacatgtcatcatttgaaggaataaattacttgggtgcacgaaacccaatgacgcaaatagcagaacagatcaaaaagattagagaagactggagacccatcacacaaggctccaaaaaaataaaaactgataactacagttcagatgatagagaaaaagaaagaaaagatcgtgacgagtggtatcaaaaaactatagaatcaagagagaaaaggacataa

SEQ ID NO: 204284 - DNA, 225 bp, Klebsiella oxytoca
atgaaaaaatgtacagtttcagttttaactttgttgggcctgctggcgtgtcagccactggtggcacacgccagccgcattacgatgcagttaaccgaacaggaagagaccgaaagcggcaaaacgctttgccggtatgaaaactccgtttactcattcagctatgtgacgcgaagcaagcgttgtccaagcgtgaaaaccttcgacaccgtggattccgactaa

SEQ ID NO: 204285 - DNA, 156 bp, Klebsiella oxytoca
atgattaatctgcgattcacacctgagctgttcgccatcatccgcaccaacgctgcggctgaggggatcggagtcggcctgtacctggttcggctaattgaaaatacgttaattccaaaaactgggagagaaaatgagtgcagcagcaaaaactaa

SEQ ID NO: 204286 - DNA, 909 bp, Klebsiella oxytoca
atgagtgcagcagcaaaaactaaaaattacgacgtggttcctaccagcgtccgccggatgacgaagttacataccccggcaggggatattaaattcacgcctctgatgaaactgatctactcgtacatatggacattccaggggaatgagaacaggggcaatgatgatccgattcataccaatactaacgtcatcgcctgggaaatgggaatatccgaaagggcgctgatcgacgcgctcaatgcgctggatgctgcgagagtggtgataaagggaaccgtcaaggttcgcggtaacgtcaactccagcaattacgtagcgatcccgcctgcttccgttgttacattgggtgtcactccgccctcacctggcaaacggaaggtgatcaaaaaggacaaaataaccgatgaaaaggccgcagaggctgcaacgcaggcagaaccgcaggcagaacaggcaccatcaactgctacaccgtccactgatgcgcccgcaggcacgcctgctgatcagagtcctgacctggcctctgagtctgccacacctgctgttggacagcgcgatagcgtggtatttgacggcgatgctggcactgatggtaataatgcagtgaagcagccgaagatctttgatgatcgcggcgtcatcactgaggcgtttatcaacaacctaaacagcctgacaggatacgacgaaccacgccgcaacgatgacggcacattgcagagtttccgttacgtctatgggatagcacagcaaacacaggataagcgggacggtgttaccgttcgccctcttgatgggtacatggcagaggcccagccttggcacattccgccgcatctgttatcgacaccgataccgataccgataccagagacggaatacgaagaagatccaaatttttaa

SEQ ID NO: 204287 - DNA, 570 bp, Klebsiella oxytoca
atgacgaatgatgatcgcaacggcgtaagcgccgaaccagaaaagattgacccagaagaacaactcccagaccaacccgacccagaattacctgacctgactcgcctgtataagcagcgttgcagggatgagagcgtgatcaaaaaagcgaaatcgctccttgttcacggtcataccattaacaaagtagccttgctgctacgtcttcctctggagaaggtgcagcaactgcattccgaaggatggaacaatagatgcaggcgcgttaccccgcacaatgcctggacatgtcagaagctggcgatccagtgcttccactctggtgcgatgctggcagagatttgctcaattaccgatatgcctctattcacaattatctcaatgctggaacgtgaaggtataacgtcagctgacctgctaccaaggatgccgtcagagtctgactcattgatgattgagtatcggagaaccgtttcacgccataagaacttgccgtgtagacgtaaatctatccagataaacccagtaagacgcaccagcaaacacgcagggcagaccgcgacggcctga

SEQ ID NO: 204288 - DNA, 360 bp, Klebsiella oxytoca
atgaaaacaacattgcaaaaagtcagagacagcattgccgccgcgcttctggggaaaactccagagcaactggagaaagaacagcggcaggacgctgtaaaaagtgcgattgataactatctgatccgccatccagactggaaaccaacaacagcgcccgccgttgcgccagtaaccagcaaaaaacaaaaagccaaacgtatcatgaaggcgctgggcgctgggacaggtgtctttacacctcacgttgtggatgaagaagcgttacgccgtgcgtgtgaagcagcacgagcattccaggctgctgatcctgagcgttacggcgacatcatcaccgcagcgcctatcaaggcaggataa

SEQ ID NO: 204289 - DNA, 360 bp, Klebsiella oxytoca
atggcttttgaatctgaaagcaagacccccgctgatgttctggtctatacggctgacccgatcatgcataagcgtacagtcatcttaaccctggctgatgatgtcgcctgtggtgatgtgatcaacccaacaacaggcgcggcctatgtcgctgctgatggtgataattgtgctgtcgttctggacaacgttctaaaaggtgatgcccgtagcgtggttgtcagtgataccggatgcatcttcaaccctgcggggttggttattgccggtgctgccacggttgcagccgcagcatacgcggccttagcgaagcagggcaaccgcattgctgctgcaaacatcccacaaacttcaatctaa

SEQ ID NO: 204290 - DNA, 1017 bp, Klebsiella oxytoca
atgaaattatccgattttacgaacctttccggtcaattcgtcaagccgtatggcgatggattcttgttgagttccctcggcatcttcactgcccgtccgagtgatacccagatcatagcgctcgataccctggaagacatacagcgtgaagtcactaaatctcagaatcgctatggttcagacatgagtgcaatcaacttcccgaaagcagccaatgtgacggtgaccagtcccctgcacgtctatagctcaaccgtgacgagtcaggactggcaaggcaagcgtgctccgggcgagaatcgccagttgactgctgaggacgtggtggctacccacgccatgaaacattatctgcaaacccgccgtgatattgagtacgcaatggcacaaagcctgttgcacaacaccgtggaagccactcacttacgtgaaggcccaaccatcgattggacagacttctgggggattgaacagccgtctatcgtagtgaagactggcgtcagtgctaatgtgatcactgagatgcagaatgctgtgaccaagctcaagaaagcacttggcggctggagttcaagtatcgcgcaagtatacttgctggcttcaccttcgctatttaccgcaattcaggggaatagcacggcgtaccaggctgcacttttcggggcaacatcgaaagatatcattttcccagaatcgctcggcgcatatgaccgatttaatctcggacgtgtgaccgtgatccaggtagatgaccccatgtatggcatcgctgatggtgatggctacatgctggcgaccttctcgaacattgttgagggggatttgagtccgtacatgacgtacatgaccccggcctcacgtcacgccgaggtcgcatctggcccggtatatccgagttatcactacgttctgcgtgataaattcatgaactacgaagtggtgagcgaactctctcagattcaaattccgatgcgcccggacttcattttgaaagtgacgatggataattccaagtaa

SEQ ID NO: 204291 - DNA, 282 bp, Klebsiella oxytoca
atgagattgaatctattaggtgttggcaacgcacctttgctgagtgtgagcgtcaagaccctggacgatgccggattattgaacgtatcagcactcgccagggtgttgtccgtccaccggtcaaccttcctgtcgaaggtcgccagcgtgggccttgaagcggcgattctgcatttcactgcgctcaaaaagcagcgggatgtactcgccacactgtcagagaaagacgcagcagcatttctcgcagcctgcaaggcaggcgacagcaacgccaaacattaa

SEQ ID NO: 204292 - DNA, 456 bp, Klebsiella oxytoca
atgttttcaaaattttttggaaaaaaagacaaacctaaactttcccctcaggagttaatggctacatcttacaattcgttagttagtaaattggatatttttgtgcgtaataaaatggaagcaaaagaaattgctacgcatatctataatgatggaataagtagttatcttgagttctactttaatcaaggcattaacaaaacaattgacgatataaaccttgattatctcccagatagaaccggtcagtttatttcgcatataaagcagcaacaaaaggatttattctctggaaaaatcgactttgatgatttgataatagagtccatcagcttggattttgatattattaatcaattcattaaagaatcactttgtgatattgatgatcatgaaattaaactcggtataattctggccgttgttaataaaatcgttaacgactgggatctataa

SEQ ID NO: 204293 - DNA, 645 bp, Klebsiella oxytoca
atgactagtgtttaccgttctttaagtgaaggtgaaaaaacgctcataacatttctttatttcattgagtattgtagaggtaagacagacaaatctgacagtgacagtagagaaccatttgtcataattgatgatccaatatcaagcctctcacaaaattatatatatgacattgcatcaatgattcactttgacatattcgaagaacctttaataaaaaaatcccttatactcactcacaacttatatttctttcacgagttggtaaaactggccccacaaactctttggcaaatattaaaagatgggcaacaaggaaaaataaataagatagtaatcccaaatataatgagaaatattcttgaatattatttttctttcgtgcataagactgatgcacttcagaaagagttgttaaaattagctaatgaagctgagaacgaaagttttagagcattttatcgttttataagcagaggatcacattcagactctataaatatatcggatatggcaaatatttcacctgaaaagtacatggagcaattcaaaataatcttcgataaaacaggtgacaagaaacattattccaagatgatgaaggaagatgaagaaagtcaggaagaaggggttgttaccgcttag

SEQ ID NO: 204294 - DNA, 336 bp, Klebsiella oxytoca
atgccgctggcgctacttgccttaactatcggtgcctttgctattggcacgaccgaatttgtcattgtgggcctggtgcccaccattgcagaacaactcgctatttcgctaccctctgcggggctgttggtttctatctacgcgctcggcgtggcgattggcgccccggtgctcaccgcgctgaccgggcgtatgccacgtaagcaactgctgctggcgttaatggcgctgtttaccgccggtaacctactggcctggcaggcgccgggttatgaaactctggtgctggcacgcctgctgacgggactggcgcacggggtattcttttcgatctga

SEQ ID NO: 204295 - DNA, 420 bp, Klebsiella oxytoca
atgggggcgctgaatctgaaggccccggaacatccgctaatctgcgaatataaaacggttaatgaatacaacgtatctcgttttttcaatgagatacgtaaaatttatccagattatcagcagaaagttcatgttattctggatggtgctggttatcaccgttcacagttagtgaaagactgggcggaggtggtaaatataaaacttcattacctcccgccgtacagcccgaacctgaatccgatagaacgaatgtggaagttaatgaacgaacatgcccggaataaccgctacttcagcaacagcagggagttcagggatgcaatatctgaatttttcagccatacgttaccggggatagcgggttttctgacgtcccgaattaacgatcattttcaggtgctcaaacctgcatcttga

SEQ ID NO: 204296 - DNA, 234 bp, Klebsiella oxytoca
atgactcactgcttgtttatgcagggagtgcaggccctgacggctgaactgactgtcagattcatttcacccgtttgtaccggtgacaagctgatggtctgtgccagactgcttgggcaacgcaggggggtttaccagctcgaagcatggctggcaaagggacagcagaaagtggctcgtgccacggcgaaattcattgtcccgtcgcaggatattgctctggcgcatggctag

SEQ ID NO: 204297 - DNA, 351 bp, Klebsiella oxytoca
atgcccatgaatgaagacacaaaacgtcagaccgatatgaaaaatgcagccctgggggcagcagatgtcttacggggactggctaacagcgaccggttgctgttgatgtgccagttaagccatggggaagcgaatgtggccgagctggaagctgcagtcggtatcactcagccgaccctgtctcagcaactgggtgtaatgcgccgcctgaagcttgtcgagacccgacgggcaggtaaaatggtatattaccgtattgaggataaccgtatcatgacgttgttaaataccttgtatgatctctactgcccgcaggcaggcacaggtaaaggaagccataacaacgaataa

SEQ ID NO: 204298 - DNA, 1659 bp, Klebsiella oxytoca
atgaaaatagtgattgttggtggtgttgccggcggtgcgtccgctgcagccagagctcgccggttgtcagaagatgtcagtattgttgtgtttgaacggggaagcgatgtctctttcgccaactgtggattgccttatcatataggcggaaaaattccgttacggcagtcacttattcttaagactccggaggattttaaatcccgctttaacatagacgtccgtacctgccatgaagtgacgtcagtggatccggttaataaaacagtgacagttaaaaatttgacctcaggtgagatccataccgaagtatgggatcgtctactcctcagtaccggagccgcgccggttgtccctcctttgcccgggctacagcaagagggcgtctttacgctccgaaatcttactgacatggatgctatcctggcgtggattgagcaacataacgtcgctcacaccacgcttgtcggggggggattcatcggacttgaagtgatggaggctctgagcgaacgggggatccgtgttaccctgctggagatggaggaacaggttatggctccggttgatcctgaaatggcatcagccctgcatcaggaaatccggaatcatggcgtggatctgcgtctcagaacggcactcaccgaggtgctgcggacagaaacgggattccgcgttgcactgtctgacggtggctttgtgcagaccgacatggttattctcgccatcggggtaaaacctgagaacagccttgccacagtagccgggctcgaagtgggtaaacggggaggtataagcgtcaatgcctgtatgcagaccagtattcctgacatctacgccgtgggggatgcagttgaaacacctgaccttgtctttcaggaacccgctaatattcctctggctgggcccgccaaccgccagggacgcattgctgctgataacatgcttgatcaccacagcctttaccatggcagtcaggggacatccatttgtaaggtattttcgctgagtattggcagcgtcggtgcgaatgaaaagcaactgaaagcccatggtacccgatacgagaaggtttacgtccatgctgctgatcatgccggttactaccctggggctacgatgatcagtctgaaactgctgttcagccccgataccggtaaaattctgggggcccaggcgtcagggaaaaaaggggttgataaacgcatcgatgttctgtctgtcgcgcagcgcgcgggacttaccgtcaacgatctcgagcatcttgagctgacttatgccccgccttttaacagtgcaagggacgttgttaaccaggccggtatggtggcggcaaatgtcatcaggggagatacggccatatgtcatgtcagcgatgttttgcaacgggaaccgggcagttattgtttagttgatattcgttctcctgaagaactgaaacaatttggcgaatatcctgatgcgctatccatccctctggattctctgcgggagaatcttgaaaaattgcctgtagataaagagatttttatcggttgtcagagtggtctgcgcgggcatgtggcataccgtattctgcaggctcacggcttccggacatataatctgagtggtggctttataacctggcaggcggttatggagtcgatgaatcaataa

SEQ ID NO: 204299 - DNA, 387 bp, Klebsiella oxytoca; identical to SEQ ID NO: 156061

SEQ ID NO: 204300 - DNA, 270 bp, Klebsiella oxytoca; identical to SEQ ID NO: 156063

SEQ ID NO: 204301 - DNA, 624 bp, Klebsiella oxytoca; identical to SEQ ID NO: 156065

SEQ ID NO: 204302 - DNA, 585 bp, Klebsiella oxytoca
atgcaatgcttacaccgcacccgtcagggtttcatagaagagaaaacagcaacgtataatcgtctgcgaggattgatatctgaattcggtgtcatcgcgccacaaaatactgatgccctgcgccacatagtttctgtgcagaagagctctttaccgcttcaggttcagcaatgtgttgatgatttgctggaacacattgaagctaacatcactgaatatgaccgaattttgtcccgcatggccaaaacagatcatcgcagtcagcggctgatggagctaaagggcgttggccccacaactgcctgtgcgctggtcgccagtatcggtaatgcacatgattttaaaaatggacgtcaactggccgcctggctgggactgacgcaatcacaatacagcagcggcggaaagccgaagctcggcaggatcacaaaagccggttattcgtatctgcgaacgctcttggtacagggggatctttcagtgcttattggcgctgagaaaaggaatgactcattcagccgttgggtttgtatgttggttgagcgcagaaggtactggcaggctgttgtggccaacgtctattga

SEQ ID NO: 204303 - DNA, 372 bp, Klebsiella oxytoca
atgaataaaaaagcgcttatatctgattttattttggtcagaccccgaatttacattaatgacaacatctcgctggggccgggtaaaatcgatctattgcgcgctatagatgggtttcattccctgtcagccgccgcaaaagatttgggtataccctataaaagggcgtggctcctgattgatacgttaaacaaagggataggtaagcccgtggtcatcacgtcaacaggcggcagcaaaggtggaggctcggttttgacaccacttggccagaagttacttagctggtacgacaaaacagaggccaaccttaacgagcaatcacagcaggacttgcaggatctcgagaaaattatcttcggtgagagttaa

SEQ ID NO: 204304 - DNA, 813 bp, Klebsiella oxytoca
atgtcatcagtttcaaaaaggaatggaaaaggttttttctcaggcgcggtaattggggctttaggagggctgattgggctcggtggggctgagtttcgccttcccgtcctgatcggtagtttcaaaatacccaccctggaagccgtcatctttaacaaagcaatgagcctcgctgttgtcgctatcgctctaattttccgcacaaaatcgatagccaccgatcagttggtagagcatcttgatattgtcatgaatttactggcaggaagtcttattggggcatggtgggccgcaggccgcgccattaagatgtccagaatctggctggacagaatcattctgctcctccttgttttactgtcgttcgtcatgttctcagaagcatggctaccactgcacagtatttccggcgggttatttcaacccggtattgccacaattattgcaggtgtgatttcagggttctttatcgggatagtcgcagcattgctcggtgtggcaggcggtgagcttctgatccccacaatcgttatcctgttcggggttgatatcaaactggccggaagcctgtcattgatgattagcctgcccacaatgattgttggtttttcccgttatacaaatgcagatgctttccagattctgaaaaaagaaaggccgctgtttgtatggatggtcatcggatctgtgattggtgcggcaattggcggacttctggtcggcctgttcccggttaaagtacttatgactttacttggggtgatccttcttatctccgccatcaaaacgttcaaacacacccggcaaaaataa

SEQ ID NO: 204305 - DNA, 1332 bp, Klebsiella oxytoca
atgcgtcgtctgaaatgggtgctctggtccagcctggtgttgttcgcgtttttgtggctgttggccgagcccggcctattcaatacccggggcttcttcccccaccgtaacctgctggtacaactgaccggcgtgctggcgatggcgtgcatgagcctgagcatgctgctggcactgcgtccgcgctggctggaacaatggctcgacgggctggacaagatgtaccgtctgcacaagtggctcggcataggcgctttggtgatttccacccttcactggctggcggctaagggcccgaaatgggcggtgggctggggctggctggaacgcccacacaaaggcgccggtgctgtgcaaccaccgctggaagcctttctcaccagtcagcgtggtaccgccgaaagtctgggtgagtgggccttttacgccgcggtgatattgattgccctggcgttgatcaagcgttttccctatcggctgttctaccagagtcaccggctgctgacgtttgtctatctggtgctagtggtgcatagcctggtcttgctcaagttcagttactggagctcaccggtcggttggctgaccgccgtgctgctggccatcggcagctgggcggcagtgaagtcgttgctgcgccagctcggtacgaagcgtcaggtgcctggcagtatcaccgggctgcattacttttcaggcgtcaagtcactggaggtcgaaacccaggtgccgaactggccaggacatcagcctggtcagttcgccttcgtcatctcggatacccgggaaggctttcacccttacaccattgcctcgagctggaacccggccgacccggcgatcacctttgtggtcaaggcgctgggggaccatacccgcacgctgcgtgataagctgacagttggccagtcagtgaccgtggagggcccctatggctgctttacctttgacgacccgcggccacggcagatctgggttggcgggggtattggtgttacgccttttgtcgcccgcctgaaacacctggccaaccaccctggcgagaaccagcagatcgatttcttccacagcacggccgaagtggatgagcaggcactggccagactgaccgaggatgtcagccagacagaagttcagctgcacctgctgatcgacagccgcgatggctacctgaccgcagagcgcatccgcgccgcagtgccggattggcgtgaggctagcatctggttctgcgggccggccggattcggtgacgcgttacgcaaggacttcgcagcccagggcttcccggttcatcagcacttccatcaggagctgttcgatatgcgctga

SEQ ID NO: 204306 - DNA, 525 bp, Klebsiella oxytoca
atggaaagcctgacactttcgttttatagcaaaaaactatacgcaaatgaatctagtgctatcaagggtaagggtctaattactgtagaagtaggttgtaaccccagtttgaatgcactcgttaattttatcgatgctatcggcgtttgtgccggaactgacgcaatcaacgctgtaggaatcatttttaataaaattgaaagggaattacctcaggcattttcatacacaaatgtgttgttgcaaaaggtcatgccttcagaaattccgtctaaatcattaaatgttgacgggttaacaaaagttgattttgaatgtaacgccagtctcaacgatatcattgtactaattgaagcaatctgtaaatgtgccgatctcgaaggtgttgtaaatgttgcaggtccgattagctggactattgatcccccggattacagagcttttgacaccctgtgtgtcaaaaaagaggtccttgatggttctttctcaggtgttgatctgaacgtattcagttcttttcattaa

SEQ ID NO: 204307 - DNA, 384 bp, Klebsiella oxytoca
atgctgtttcggaaattggtgctgttgggtgggggccttatcttacttctggcctatcacggaggctatttgttacgtgactggccgtggttgttttattacgggatgatcgcgtggtggttttcatttagctggcatcttttaatttcccgtaacgcagctttggtaccgggaacgataaagaacaacgaaaaatcattacccatcgttggtcaaccccagactcatcggtgtagacagaatgataatggtgattcttccctgattatcaatagcatttattactcatcaacaaacagcaatcatacagatagcatcattaacaatggtgccgattgcagttattcggacagttcagattcaggatgcggtggtagtgattaa

SEQ ID NO: 204308 - DNA, 291 bp, Klebsiella oxytoca
atgaacgacagagttgtgtttttaaatctcgcatctaaagatgagaccccattcattacagaggtagagatgcttcttggcggggttccccgactcatgtatcaagacggtacagagcagtttgcggacgatgaaaccgaaacaatactgatttactcacctcggcttactgagcctgaacttgaagtcttttgcgaatcgaacattcagcgttaccgtgacttccacgaagtgaatttaaaacaacttgcgtggggagatcgtgtgccattaacccctttctgggaataa

SEQ ID NO: 204309 - DNA, 582 bp, Klebsiella oxytoca
atgtatatacatcttgtgccaactctttatcatgttatttcaaataaatgccgacttgaatcagtgacaatcccggaactagagttcgagattaaaggagatgagctttcaagcggaaagccgtatccaaacaaacggttgaatgtgggtatgctaaaaagccgtaaagcgatggttggattattgcttaaatatgacgataaggtcactaattttactacagattataaatgggatattgaaggtataggggttgttcagcaccaggtaaatatcattgtgcttgatagcgaatttgaccttgtttcacagtacataggtttgaatattggtctggatgaatggaagccaagactccatcattcttatcacaatgtcgcgcctgttaaaattcaaccgatgatggaatcataccggtccggtgaagcaataaaccagttgccgcaagatgtatgggtgcgtgatattctcaggtcaagaaaggagacattgcttttgcatacattgcaatcagaaagaatctcttcatatggtttttttatcgagcgtctcccgtcactagaatcggcaataaatatctga

SEQ ID NO: 204310 - DNA, 576 bp, Klebsiella oxytoca
atgggtgattataagtattacaagcgtcaggacaatctgaataactggtttccatacttgatgtttttggtgtctttaatttatgttggtttcattatttttctggtgtttttatttaaaaatataaatatctctcccctaataacagagcaaacattttcagtttttattagcgacgatagagttatccgcatgtggaaatgggcaatgatgtttgttgctatactgatatacccaattgttattattaaagttatggactacaaaccattaacgccctcagatattaaatatgagattgatagtttaatatttcacagggatttgaatatacacaggaacatcatttcccaatataatgatgggcttgagtattaccagaaactgatcgagtcggggattgttttccgacgaggaaatgtaagggttgttgagaaaaacatcacaaaaaccatgtcgtcttgtttaacagaagaggagcagaacgcaattaataaaaatgccgtgactaattattattgcgaagaaataaagcttacgtttgaaagtggaaagaatggtaataacattagttaa

SEQ ID NO: 204311 - DNA, 321 bp, Klebsiella oxytoca
atggctattgtaattaaagaaagctataccaccgctgttatcagcacagcgcacattgctaaagaagacgccgagttattgactgatgccagttataatcctcgttctgagagtggacgtaactggattcacgcaaacgaatttggctacataattcggactagcgctgaaaatccgggatggaaacagcttttacgtgatgatggtatctcctggcctactatcgaaaatatcgaaaaagtgcttaaagcggggtacgaatgtgttcattttgaccgtgatgcggatatcgtcgatggtctgttgtcctgggactggtaa

SEQ ID NO: 204312 - DNA, 315 bp, Klebsiella oxytoca
atgagcatagagaacgagtccagttcatttcagccgggtttatcagcaaccgataatggcgaacgacatgaagttattgtcaccggctgtgtgacaaaacacggtagagggattcatttctgcaacaatgagcttctcagtggtgccaatcataatctctggttccctttgaactctgatgacgactggttttccggcattgaacgtgtgctggtgatgaatggtctcgcggagaatgtagtgaatctcaccccactcaatgacgggaaagactatcacgactggaaagtgatgtataactgccggatcatctga

SEQ ID NO: 204313 - DNA, 204 bp, Klebsiella oxytoca
atggcagttataaaaacacataccggcatcgtgattactaaagacggggaagtaaagaaagaattacatgaaacccagtctatgtgggttgtcaataaaactgaatgttaccggaaagatactggtaaacgccattttggcgaaagaacccgacgccagttgatcctcgattctattgagccaattaacggaagtcagaattga

SEQ ID NO: 204314 - DNA, 354 bp, Klebsiella oxytoca
atgaacgacttctggcacgtgaatcttatgtacggggtcaatgcctgtgtggggcgtcgggtgatggcgtacggtgagcctggcacgatagtgaaagatttcgggcattacattggtgtagtgctggattccgcaccagaagaaccgcctggccgttaccacccaacagacggcattgagtacggcgaggttgtcagctacaaccctcccaaactcaatgcccgcatagccagagctcgccgcaactatcaggattatttggatgctgattacgggcatggtttccatgaatggctaggtatcaaccccccctcagtgcaatacgactacctgaggatgaggagtaatggctaa

SEQ ID NO: 204315 - DNA, 423 bp, Klebsiella oxytoca
atgagcgatgcggaagcgtgcactcaaaaaaaagataacatcgaactggcgcagagccatgaattgctgattgcaaacgggaacgagactgcaaacttgctacgccacctagcaaacaacgaaattgactctgactatttcgctgttgtctctgaatgtgaaagttatgggcaagaaaccgaaggggagttagcaatcactgactttgcgctacgggcagcgggtttcgttgatgaactggtagaggctctggtagagtcgcagcagcgtattgtcgagctggaatctaaactatctacgcctgtgcttctgccgaaaacaaatggctactggactaaggaagaaaaagcgtatgaagaagctattacgctcgcgaagcggcagatccgtcttgctggattcctgtgtgaggggaatgggtag

SEQ ID NO: 204316 - DNA, 231 bp, Klebsiella oxytoca
atggctatagctgaattaataagtatagggccatttggcgacactttcgaaatttggctgggcgcgaatcgctatcactacaggactgatggcaaagcggtgataatgaaagaagggatgaaccacgcctacccatgcagggtaacgagcgagacgattaagcacgcgcttgcagcgatcaccgatttacaatgccaactaaacgatttgaagcggggagccaaccaatga

SEQ ID NO: 204317 - DNA, 468 bp, Klebsiella oxytoca
atgaccaataaccagttaacaaccgagcgtttggaaataatgctcgctgagacgctcggaacaacggtggcacgcggtgatcacacgtcaattgaggtcactgcttcaatattagtcagcatactgtcagaggtactggaaagcaggagggccggaactgaaagcttggcggttcgtgaactgtttaagcgcgcaaagcagttgatgtatcaatcaggtggagcgcctattgagaactcgttgaacccgattgacgcatttctttttgacgcagaacaggtagagctacaggaaggccgaaaggcagcagccgaaccagtagcatatctagtatgtaacggcagtctttaccaggacaggccatttctaagcttgtcagctgcgagaatttcagtcaacgacaggaatgatggctctgaaattaaggcgctatgcaccatcgaaacattggcggagaaagcggaatga

SEQ ID NO: 204318 - DNA, 696 bp, Klebsiella oxytoca
atgaccaaatcagccataaccagagatgagcttaacgaagtagttgcaacatacggaaaaaaccacatcgctcatcgaatggctactgaattgctggccgcattggacagcgagccttatggcttcactgacggtgaccgtcgcgggatgatttacgaacctcagcatgccgatcgacttaacgacccgctcccggtatatcgccacgcgcagccagcgctggtagtttcggatgaggtccagcatgttgccgctgttctggagcttatcggtagttttgaggctgctgatatcgacagcgacacagtagatttacgttttgagattgatgatgtggacactggctctgacgtatccatttctgaatatgcagcacgcggtgccgcgattatccgcatgctggcgggcaatgctccgataaagccagatggtagcattctagaggcgatggagaacatacaaaccgagaatgaagtggcacgagaccagttagtcattctccagctagcgctattaaagcagcagagaaagattgcagagctggagtctcgcaccgtgaagctgccagatgaaagattttgcccggcagagtacgcaggaagccagctatggtcagaaacagaggtttggaaccaggctattagtgcatgtaatggctcactccgtacagctggcatcaaggtggaggcagagtag

SEQ ID NO: 204319 - DNA, 336 bp, Klebsiella oxytoca
atggcattcatatctcaactggggacaataccaaagcgtaacggaagagtgcctggaactaagttcgtttcgtttagaaagacaaagtctggtgctactggcgggctaattactaaggatactggactgcgcggaacaaaaatagacattcaaatcgatgaggataataaaactatccgtcttggcgagtacgaaaacggggtaaaagtaactcaaagacaggggggattcagttgctcggttagcgtatttaatgcagtgggtaattgtcgaatatccctgaccgatggcggggacgggtggtggtacggaagttataaagaaggaggcatctaa

SEQ ID NO: 204320 - DNA, 843 bp, Klebsiella oxytoca
atgcgttttaatacccctttaagataccctggtggtaaggcaaaattaaccaattttgtcgaagaattattacgattaaataggtttacatcaattcattacgcagaaccttatgccggtggtgctggacttgctctaaatttgttgatgaaagggagcgctgaggttatacacctcaatgatattaataatgcagtttattcattttggtactcggtgctaaatcattgtgatgagctttgctctttgattgaagataccggtgtcacaattgatgagtggcatagacaaaaggatataatgtctaagcaattagatgtaactactcttgaattagggttctcaacattttttctaaatagaaccaatcgttctggaattcttaaaggcggagttattggtggcaaaaaacaagacggtaattggaagttagatgcgcgatataataaaaaaaacttaatggatagaattcaaaagataaataaaaaaagtgatagcatattcctgacgaatatggatgctgttgattttctagattatgttgtagtaaagctttctggagattctcttatttatttagatccgccgtattatatcaaaggtcagggtttatatgaaaatcactataagcatgatgaccacactttaatctcaaagaaagtgatctctgaacttaatgtaccgtggattgtaagttatgataatgtccctcagatcaatgatttatataaatcatgtaaaaaaatgtcctatggcataaattatagtgctcaagatagatatttgggctctgaagtgatgttttttagcgatggtttgaagaaacctcgtgtttttaagtga

SEQ ID NO: 204321 - DNA, 333 bp, Klebsiella oxytoca
atggacgttattcgtaaaccactctggcagcgggtattacgggtctcgctgttctgtgttgtcgccattctggccctcggaggttttagcttcacgctgctgcattttgtaggtagcgaaacggaactgaggacgtggttgcttcagataaaaacgccgctcctgttctggcggctggcgctgtacacggtcatcgtgtttttctggctgcaccgtgtccggggctatttcctgcgtcactgtacccgacgttttcaggtttaccggctggaaatgatgacggtctgcctgttcgtgatgattgaaatcaccagtctacgttgggggatgtga

SEQ ID NO: 204322 - DNA, 249 bp, Klebsiella oxytoca
atgaaaaaggataatgccccacccgagcaatcagatatctggactatgcttttcaatgggttagctgaagctataaagattatcttctctgtcatcatggcgattgtggttgcaggcagcaaaagaaccgactacagaacctcatcaacagattcagaagactataattctggttttcgtaatgggcatagtgggccgggctactacgatagcaatgaccaaaaattaaagcactttgatgatgaatga

SEQ ID NO: 204323 - DNA, 798 bp, Klebsiella oxytoca
ttgaaaaaattattaccactgcaagaagtaaataaattagcgacattaatcttagaatctaatgactctgaagctttaagaccattgataaatgacgtaagaaaaaacatcgccattttaatatttcaacactcggctgagtcaacattatggagagctagaaaatgtaatgagactccagatggctttgattgtattgatgacatcatgcaacctcctactaattttacgccaaacaataggttaaacaatgcaagggaacctattttatatttatcaacaggaacgcacgcagtattttcagaatgccatgcggaaattaatgatatttttcacattaccggacttaaatttagagagaacaaatcactcacttatttttcaattggtgagatatcacgttactataaatggcaagactccacacactctgaagttcttgatgaaatgattgctgaaacagatcctcttagtattgacagtctcatatttaccgatactttcttagcatctttactttccgataaaaatgcaagagaaagggattatcttcatacaagaatccttgcagatttattattcaaaaataataatataggtgccatagcttatcccggtgttgaatcagaacaacaacaaaattttgcaataaagcccgaagttgcgaatgacatatttgaaatagctaacacgttcgttataaaaataacagaaaagtatctatgcggcatgtatggatttgagataacccgacaagcgaaagccattgaccataagaatagattgattgtttggtaa

SEQ ID NO: 204324 - DNA, 1452 bp, Klebsiella oxytoca
atgatgaaagagaaaaaaacatccctcaccaataatgagaatgaattcgatataacggttttcccctcaattgtggaaaagagcaaataccaagactcactgctcgccagttccaccgacgccagcaaggctctagaggcactgacgaagaactctggcgtggatgcactcctcaaaaaccatgattcactgtttgccggaaccacagccgccagcaaggcattcgaggcaatgacacgcaactccgttgcgaacacttttctcaaaaaccatgattcactgtttgccggttccactgccgccagcaaggcattcgaggcaatgacacgcaactccgttgcgaacactttcctcaaaaaccatgattcactgcttgccggttccactgccgccagcaaggcattcgaggcaatgacacgcaactccgttgcgaacactttcctcaaaaaccatgattcactgcttgccggttccactgccgccagcaaggcattcgaggcaatgacacgcaactccgttgcgaacactttcctcaaaaaccatgattcactgcttgccggttccactgccgccagcaaggcattcgaggcaatgacacgcaactccgttgcgaacactttcctcaaaaaccatgattcactgcttgccggttccactgccgccagcaagacattcgaggcaatgacacgcaactccgttgtgaacactttcctcaaaaaccatgattcactgtttgccagctccactgccgccagcaaggcattcgaggcaatgacgcggaactctggtgtggccactcttttcgcaaagcaaagagaatcatttacccgggattattttactacgagtattactcaacacttagataaattaaatccaaccgagattcaaaaactacaggaagctgctattctattttcgcgctcacctcaaggcgcagccgttattgcaaccaatatcaatacagtagaaataacagagcccgacgcattaacaaaattaaaaaaatacatcgaagaaagccctgttacttcacattttaggaaattacctttattagtacagcttatcatcatttatcttgtaatgactatgtcctctgttatttccgataaaaacaaagagttagcaatttatttaattgaagaatcacaacaatattttagcaaagcagtatcaccaaacgcccatgttaagaaattgacaaaacagttacccaatgaaattgatgtaagtacattaaaacatatcagaataattaccggcgaaaacgtccgattacggaatagaccatcaatgcatggtgatgtattggtcacgttgcaaaaatacacacctgttatcgttatcgataaaagtgatagaaaatggctatatatacagctatcacttggagaacaaaagatctatggctgggtcaatcgttcctataccaaagcattaaatcactaa

SEQ ID NO: 204325 - DNA, 1386 bp, Klebsiella oxytoca
atgttaaatctgaaatcttttctccgtccggggcgtttacgtccgggtacactcccgaccgttgaggcgataaacccctctttgcccccgggctactttctgcccatgacggccagcgaactgctggcgacaacccgccgtcagcaatggctgcaatcgctctgggattattcgtccctgccgaaagacatgtatcgccagtattaccttgcaccgctggagcattgtgtaacgctgatgcagcagtttcctcttacggaaagtgggccatatgcccgtcccggggggatggctgactatatgctggaaacagtgtcgtatgcggcgcggttgtcgaaaagctacatgctgccagttggcgcaccgccggaagagcaggcggcgcagagcgcggcctggaatgcggtggtggtctatgcggctatgttgccttcgcttgagtatctttgtcatcttcacgttgagctggagaacggtaaacgctggtttccgttactggatgcgcctccagaaccttatcgctttcgttttgaaccggaacagtctccggaacggctgcaaagttttggcgcaatgctggcgtggaagattatccctccagaagcgattaactggttgagtagctggccgaaagccatcaaaaccctgtcaacgtacctgaccggcttccgggcgcagtcgggcgtggtcaatgccattgtgtctgaggctattcgcctcactgccgggtcgccagaaagtaagacactggttgcaccggcggcaatggttccggctgattcatttcaaggtgacacgctgctgtccggattagctgatgatgtgccggagctggttgtgtcgtattccgaagaggaaatccttccggcagcggaacctgctcgtgcgtcggatgcagagctgatattcccggatgagcacaaagggccggatgatactgatgcgttgctggcaatgatgggcttcgccagcgctgatgaagcagaaaccggagaaattacgccatccgccgagttgaacgatcccggagaggcattctggcaatggctggtcacgggatgtcgttctggcagtctggtcccgaacaaacctgacgggcggattcatctggtcgccggttatgtgtttctgcgtgcgccggggatttttcaccagtatctgacggagacgaacacggcgggagaggataaggcccggcttcagaaagcatttgagagactggggcatcatcggcaggacaatggcacgatgtatacctgccagctgtaccaaaacgagcaacgggaagggcgctttcagaaactgagtggctacctggtacttgccagtaaggtctatgacagcgataacaatccaggggataacccattattgattgttatataa

SEQ ID NO: 204326 - DNA, 465 bp, Klebsiella oxytoca
atggcagatatatattatccccacgattatcttcctgttcccgttttcgatggttacggatttaaacccgtatcacctctaatcaggacgggaatggtgacagggcgcgctcgtcaacgtcgccgttatctttcgacacctacacaaaataccgttaagtggctattcaaaagtgatgggcaggcacagttatttgaagcctggttccgggagaagattgatgatggggctgcctggttttatatggtgttgaaaactccaatgggtattgagccttacaaatgtcgttttgtcgatatttatgaaggtccaaccccggtaaaaccaggcaagtggatattcaccgctactttggaattatgggaaaggcctgtgttacctcccggatgggttgagttcccggattttattgtgaacagcaacattctcgatctggcagttaacagggagtggcctgaagcatga

SEQ ID NO: 204327 - DNA, 2691 bp, Klebsiella oxytoca
atgtcccagccagtgggtgatctggtcgttaaaattgatggtgacagtgcaaaattcgatgaagaagttgcacgcctgaatcgtcagttggctggtgttggcagaaatgcaaataccagcagtgaacaggtaacaaaagcgtttgcgcgtgaagagttagcagcaaagcgtgctggcatatctgtaggtcagtatcgtcaggcgatgagaacattacccgcccagtttacggatattgccacccagttagctggtgggcagagtccatggctgattctgctgcagcagggagggcaaattaaggactcctttggcggactgagacccacattcagtgcgctgatggggtctcttaatccggttactctcggcattactgcgcttggcgcaacagtcggtgctctgggatatacattttataccggacagtcaacgctgtctgattacacaaaaacactggagttaacgggcaataaggcagggcagacagccaataatctactgtttgttacagagcaactggaggaatctggtagttcatttaccaaagcgaaagctgcggttactgcgctgtccagtgcaggggcagatttgggaaaagattaccagaccattgcttctgatattgcccggctttctgatgtcgccggggtagaggtcaacaaactggctgaaattttcgggaaaataacatctgatcccgaagccgggcttaaggccatgtcagaacagtacgggcatgtgactgccgcccagcttgattatgtccattccctgcaggaagccggaaaatatactgaggccctgaattatgccaatacattggccgcgagcggctttaaggatatggccgataatatccagcaaaatatgggctttctggaacgggctgcaaatgccgtaggcgatgcattttcgtggatgtggaataagcttcttgatcttgggaaacaggattctcttcagaagcaacttgctgatgcaactgaccagttatatgaactggacaaagctctgcgcggcaatgtacagggccagcagcgtataggcctggaaagagctgcagaccaggcccgtaaagcggttaattcgatcaccgatcaacttcatgccgaacaacggaaatcagaggagaaagagcgtcaggctgccctggaacgcagctccttggctaatcaaaaacattttcaaagtattgctgatgcagggctgacgaaagaacagcagcgcacacaggaataccagcgacttaatcgctacattgaagagcgtaaaaagctgaataaagccctgagtgcggaggagatagctcagtttaaaaagggaattgaggaaaagtataaagacccgaagcagccgaaaaagaagggcgtcactgtctctgcgggcgacagaacgtctgaccagaccagtgctgagactctacagctgatgacccaactaaaagtgctgcagcaacataagggcctgaacgatactatcagcgatgagagaaaaaaactctggtcattgcaggcaaaattcactgttattgaagaggcagcacaaacacggacactcagtaaagaagaacagtctttactgaccagtaaagagaaggttcttgctcaggcagaagttaatgcaaaactgggcgaccaaattgccgctcaggaacgccttaataagctgcaggataactctctgaagtatgttactcagatgcgtgaaaaaacagcagctttgaccgagagtgcaggtttaggtgacagggatacccaacggaatcttgagcgggcgcagttacgtcagggctggcagaatcagggtggaagcctggaagacgaaggctacaagaaagagctgtccgctcttgagggttattatgccgctcaggatgaaatgcggagtaactggctggctggtgtagagtcttcctggcaaaattatgccgatatggccaccaattataaccagattgcagcggagacgaccaatacggcgctgagcggagttacgagcagtcttcagcagggtttatatgaccttgctactcagtctgaagatgccggtgatgccctgagtaatatggtcgaaggtttcggaaagactgtcatccagacgttgactcagcttgctgctcaatggttggtatatcagggcattcagcttctagtaggaaagaccactcaggcaacggccgtttctccgatgatagctaatgctcaggcaacagcgctgcaagctaaacttgcggcatatgcctccacggcagcaatcccaatcgttggacctggccttgcgcccgctgcactggctgcagccgctggcgtcacagcacctcttgtagcagctatatccgcatcagcattagcaggtatggcccatgatggtattgataaaatacctgaaacgggcacatggctcctgaagaaaggggagcgagtgacgacggccggcacatcagcaaaactggatgcaacgctggaacaggtcagacagaagagagggactggaggaaaccatttcaaggttgaattcaataattctttcagcgggaaaccagatgatgcaatgctggcctcatttgataaacgtcagagggagtctgaaaagcgccttgtgaaatatctgacatctcaggtaatgaaaccgactgaggaatatggtcgtgctatcaggtcagtatatccagggcggagaatgacataa

SEQ ID NO: 204328 - DNA, 318 bp, Klebsiella oxytoca
atgaaactggcgagggaatttggccgccctgactggcgtactatgcttgcagaaatgtcttcgcgtgagtggctggagtggggggagttttatcaagagcatcattttatggatgaactgattgacagccattttgccagcctgagtcacctcgctgtttgcctgttcaccgatcccagtaaacataacctttccgtcgccgacttcagcctgttgggaatgttggcagacaccagtgaagatctatccgatgaacaattgatgtcgatagctgaaagtatgccaggaggagtccgttatgtcccagccagtgggtga

SEQ ID NO: 204329 - DNA, 387 bp, Klebsiella oxytoca
atgagcaaacttataaaggatgttctcaccgttggtgaggatacggtgacattatacgaattgtctgcactaaatcgcatggaatatctggagtatgtctttaacgcgaaaaatactctccctgttgaagcatcgcaagatgaaacggtaaaagcggttactttgttggccattcgtgattatggcatgctggtggccctttcattgtcccaggctcctgatgagaatcgcgatatcgcggaactgatgaatgaagtcctgagcgagtatggcactggtgctctgacacgtgcggcgacgatggtgcgcgaactgtcagggatggcagtgatggaacgtagtgatccagaagagaataaggagccactttccctggaaaagtcctga

SEQ ID NO: 204330 - DNA, 327 bp, Klebsiella oxytoca
atggctaagaattatgttcaggaaggtaaaaccatcccacttaataattcaggaagtgaaaccatttcaagcggtgatccggttgccgttggcagcatgattgccgtcgcgattaccgatattgcggtgggagatgcgggggatggtttcgcggaaggggtattcctgttacctaagctgaccacagatgcagtcaccgcgggcgaaaaagtttatctcaagtctggcaatgtccagttggatgaaaccgatgcagtgctggctggcaccgcctgggaagacgctgccgcaggcgtcactgttctggaagtcaagatcaatggctaa

SEQ ID NO: 204331 - DNA, 168 bp, Klebsiella oxytoca
atgttttattacatctggaatggattgctcatcgttatatgcatcgccttacctgtcgttttaatggtcgcttcaaatggggctcaaccaacatttatgtcttgccagcaaatgcgcagacggatggaaaaagagcgcaagaaaacaaaccagcaggacgataagtag

SEQ ID NO: 204332 - DNA, 144 bp, Klebsiella oxytoca
atgagcactactggaattctgacggcagaaattacgtttcgcccatacatgaagccgctgctcatcctttcggtgcttttgcgctggggctggctcactaagaagtgtatccggattgcccctgtaattggcaaacaggcgtaa

SEQ ID NO: 204333 - DNA, 360 bp, Klebsiella oxytoca
atggctgacattagctatggtcctgtatcaactctgcgtggtcatttttgtagtttaccgactgattctaaatgcgatgagcacccggagcgtctagccgttcgccgtgtgcaaggggaaacggattcgtttgggtgtgaatatcatgatatgtgccaggaatgccttgatgaatatgttaaggcatctcaggaaaccgaccattcagggaaatgtgactggtgcggtaagagcgttgaccgtttaatccctcatcgagatatcgaagaaggaagctgcgggagggtctatgaggtgtgtaagccttgtatcgatgcagagcgtaagcgctgggaggaagaagatgaagatcgttggtaa

SEQ ID NO: 204334 - DNA, 864 bp, Klebsiella oxytoca
atgagcacgaactggaaacacaacgatttagctcacgacctggccgagcatctccgtaaaaataccgcgcgcatttgctgggaagatatgcaactcggtccatcaggaacctgtcgccctgatgtgtacgccatggctcatagctacagcaaattttgtccggtggtttatgaggtcaaggttagcgttagcgattttcgtgccgacgttaccgcagggaaatacaccaaatacttcaaatatgccggaggtgttgtttttgctgtgccggaaggtctgctgaagaaaaatgacatccccgaaggatgcggtctgatgatccgcaaagagtccgggtggcatacgctgaagggaccaacgatgcgccagttggacaacttgccgcgcgatgcctggatgaagttgctgatggatggagtaacccgacaggtagagcgcacccagattaaaagtcgcgtgctgcaaacctattttgtcgaccagacgctgatgaaaaagcatggtgctgaaatagccgatcttgtgtgccgcgcctaccactcccgagaaaaacttgagcgggaaattatcgctcaggagcagagattgcaaagtgtgcagcaggaaggtgcagaggaactcgctcgccagcgcaaacgacgcgtggaggccgaagaaagactcaccgacgctcaacgtgatcttgcggtggctttaggtcttgatccaagtgcgcctatgtacgttctgacccaaacattgtgggaggccacccgcagactgaccggagattcggaaattcagagacttcgtagggtgttatcgaatctggagaaaaccctggctgatgggatgcggttattacctggggaggatgccgcatga

SEQ ID NO: 204335 - DNA, 534 bp, Klebsiella oxytoca
atgaccatcacactacaggcagtaaacgagctcattcagtcgctggagagtgcgggcgagctgtcgatcaaagagcgtaagtatctggagttggcgagggagtttaagcagctggctgcggagaatgtggcgctgaagagtgccattacagaccatagtcattctgttcacttctgcgaggtttgcggaaaggatgacccgtgcagcactgacgatgtttgttatgcgcttaatgaaacccccgccaccgatcgcatcgtagccgggattaatgctgatggggtggagtggattgaaggaaatgagcccagcgagtttggccgctactgggttcgatatgaaaccgacaccggaccgcggtactgctctgcgcaatggatggagtacaacttctgcgtatccagcaataccaatatccataaaatctggctggcagaccattcgcgctcaatcaacagcctgaagggtgtaactcattacacaaaacttcctgcggcgttagaagaccagcagctgcgcgagggggccaaatga

SEQ ID NO: 204336 - DNA, 225 bp, Klebsiella oxytoca
atgatttttctcaaattaagccaaaaggcaacgatagagcgccagggaaaatatggctgggaacctgaaacaatctacgagcctgtgtttgttgccgcagagcacattatcagcatgcatttcgccgggctgacaatcctgaaaatgacctccggagagcgcattgacgtgaaagagaccccggaagaaatcatcgtcatgcttaccgaaggagccgccaaatga

SEQ ID NO: 204337 - DNA, 483 bp, Klebsiella oxytoca
atgacagatcaaaccattctcgacatgtgctgcggctcacgtatgttctggttcgataaacaggacgcacgcgccgtattcactgatattcgcgccgagcagcacaaactttgcgacgggcgcagcctggttatcagcccggacattatcgccgatttccgcgcgctaccgttcgccgatgcctctttcccgattgttgtgtttgatcctcctcatctggaacgtgttggtgaaaacgcctggatgggcaagaaatacggacgcctgaacaaagacacctggcgcgatgacctgcgtgctgggtttaaagaggcatttcgcgtactgcgtccacatggcgttctcatattcaaatggaacgaaacccagataccggtgagccagattctcgcgctcactggcgaaaagccagctatctggcaacgcaccgggaaggcagataaaacgcactggataattttcgtgaaggggtcagcagcatga

SEQ ID NO: 204338 - DNA, 219 bp, Klebsiella oxytoca
atgagcgcagaactcatcgatcaggccaacgaactcgaagagcttcagtgtgaagccgctatagcgaagtatcgcatcgaccataacgctgtttctgctactcactgctgcgattgcggggaagagataccagaacagcgcagggaggcggtggcggggtgtcagcgctgtgctgactgtcaggaagagtttgaagaacgtggtaagcaccggaggtga

SEQ ID NO: 204339 - DNA, 276 bp, Klebsiella oxytoca; identical to SEQ ID NO: 36734

SEQ ID NO: 204340 - DNA, 360 bp, Klebsiella oxytoca
atgttcaatttcaatgaaggtacttttataaccgctccagttaaagactctgagcttaataatgaaagcatggattttattaaatccatcaaacctttatatcctgaactggatcactggagtaatgctggattttactttgcgtggggcgcttactcacaagatatttatgctatcggttgggctgactgggttcgctcaagagataatgggtttcttgcatactgttatatcacacagctattcccagattttaatttcggaggaaccggattatacgattcagatgtatgggatttaggagaatcgcaaccgtggaaaaaggaaactgaatttaaaccggaatgggtcaatatttaa

SEQ ID NO: 204341 - DNA, 711 bp, Klebsiella oxytoca; identical to SEQ ID NO: 18404

SEQ ID NO: 204342 - DNA, 132 bp, Klebsiella oxytoca
atgcgcgcaatcgtacttttaggggtgttgttgttaggggcatgttccagcagtttcaagccaccgccggagccggactggagccacaccgtgccagtcaataaaacgcttccagtagatacacagggataa

SEQ ID NO: 204343 - DNA, 1134 bp, Klebsiella oxytoca; identical to SEQ ID NO: 18410

SEQ ID NO: 204344 - DNA, 567 bp, Klebsiella oxytoca; identical to SEQ ID NO: 18430

SEQ ID NO: 204345 - DNA, 231 bp, Klebsiella oxytoca; identical to SEQ ID NO: 151672

SEQ ID NO: 204346 - DNA, 543 bp, Klebsiella oxytoca; identical to SEQ ID NO: 18383

SEQ ID NO: 204347 - DNA, 456 bp, Klebsiella oxytoca
atgggcggcttgagtggatatgaaattgacgacgttactaatgtagagcttaaccgttcaacaagcaaaggtgatgacgaggaagaagaagaaatcgagacaggattcgtaaaaaaagcggttctaaaaggtgattctgttaatagttctgctattttcacccaattacacaacaaaggatactatatcggaagaattgcttggtctgctaaacctaaaaacggaataggagacagaattttggttgaagctttctttaaggattcagaaaattgctctgatttttcctatcaaattaaaggaatcaataaccaaaaaggtagtggatacaatgttactattcgtgcagcaaatgaagttgaaaagaagaaaatcagcctactaattgaacagtcagcagcagacgcctataatatcgtgacgggtaaaaaggtggaagagcatgaaaaaatttaa

SEQ ID NO: 204348 - DNA, 432 bp, Klebsiella oxytoca
atgaaactatttacgattggtttcacacaatcttcggcggaggatttttttacgcgtctgaaggaatccggagcaagacgtattctggatgtgcgtctcaataatcgctctcagctggcaggttttgcaaaacaggacgatctgaagttctttgcccgtactctgtgtgatatcgattacgcacatatgccagatcttgccccgacgcgggaaatgtttgagcgatacaaattacagaaaggagactgggatatatattcttcggatttcatcgatctgattacaaaaagacatatcgaaacgctcgaaaagagtcagtttgctgatgcttgcttattgtgtagcgaacataaaccacatcattgccacagacggctggttgctgagtacctggcagataaatggcctgatgtcactatcatgcatttatag

SEQ ID NO: 204349 - DNA, 2652 bp, Klebsiella oxytoca
atgtcaaagaaactttttggtgcccccccaaccctgacagacgccagtaattctgttgtggtacgtggtgccagggagcacaaccttaaagaggtggatgtctctgttccgcgtgatgcacttgttgtcttttcgggggtctctggttccggtaagtcttcactggcttttggaaccatttatgctgaggcgcaacgacgctactttgaatcggttgccccgtatgcgcggcgcctcattgatcaagccggtgttccggatgtggatgccattgatggactcccccctgcagttgcccttcaacaacagcgaggaaccagcaatgcacgctcttctgtcggcagtgtgaccaccttatcgagcctggtgcgcatgatgtattcccgggcgggagcctatccggcagaacaacctatgctctatgctgaggatttttctcctaacacgcctcagggagcatgtccatcctgccatggtctcggacatatctatgatgtgacagaagcactgatggtacctgatccgtcactcagtatccgggacagagccattgcctcctggccacctgcctggcacggacaaaatcttcgcgacattctggtgacactgggctatgacgtcgatatcccctggaaagagttatctgaagaagagcgacactggatcctgtttactgaagataccccgacggtgccggtctaccccggactcagcccggaagacacacgtgtcgcagtcagggaaaaaatgactccgggttatatggggacgtttacaggggcgcgacgttatgttctgcatacctttgcacacacccaaagtgcactgatgaggaaacgcgtctccagttttatggaaggtaaactgtgtcctgtctgccacggaaaaaggcttaaaccggaatcattgtcagtcacttttgctggagtggacatcggtgagtttatgcagatgcctttagaccagctggctgagttgcttcttcctatctcccggggggatttcagtacgcatcatgccggggctgatactgacagggatatcacccgccgggaccggacagaacgcgcaggttccggcagagcagtccattctgtaacgccggatgtccgccggacctcagcattatcgacagagaaacgactggctgctcaacgactgaccagaggtgttatggaccggctgtatcagttgcagaaactgggacttggttatctgacattagacagaacaacgccaacactctccgcaggggaactccagcgattgcgtcttgccactcagcttagctccatgttgtttggggtcgtctatgttctcgatgaaccatcagcaggcctgcaccctgcagacagccatgcactttacgatgctctggagaacctgcgggatgccggaaactcagtgtttgtcgttgagcatgatcttgacctgatgcgacgggcgcaatggctggttgatgtgggacccgctgcaggagaacagggcggtcatattctctacagtggtgtacctgaaggtctgaaagctattgctgaatccagaacggcgcggtatttgtttgatgaaatcaggccaccacaatcatacgcccgacagccagcaggatggttaaaattacaggatattcaccgtcacaacctgaagggactggacgcctgtattcctctgggggtactgaccgctgttacaggtatttcgggttccggaaagtctagtctgattgctcaggccttacctgagctggtgctttcctcgcttggccatgaaccagaagacgtgttatccgagggcagtgatgctgagggaccaaccgttactgagaaaacttacggtacgctgacaggcgacaccggactgatcaaacgtctggtgcaggttgaccagaaaccgataggccggacaccgcgttctaacctggcgacatataccggactgtttgaccatattcgtaagctctttgccggaacacctgctgctaaaaactatcattatgatgccggacagttttctttcaatgtggcaaaaggtcgctgtgaaacctgtgagggtgaagggttcgtcagcgttgaactcttgtttatgcccagtgtgtatgccccttgtccgacatgtcatggcgcacgctataacccggatacgctcagggttcgctggaaggagcgaaacattgcggaagtcttgcagatgacagtggatgaagcctgcagcttctttgctgatgtagaacccgtggcgcgacctctgcgcctgctgggcgaaatcggtctgggatatctgcgtctgggtcaaccagccactgagttatccggaggagaagctcaacggataaagctggcaaccgaactgcaacgtagccaacgtggccatacgctgtatgttctggatgaaccgaccaccggactccatgcgtcagacgccgaccgtctgcttgtgcagttgcagcgtcttgttgagacagggaataccgtagttgtgattgaacacgatatgcgtgcagtcgtgcaggctgactgggttatggacattggtcccggagcaggtcatgagggaggcaacctggttgcagaaggtacacccgcccaggtatcacaggtttgtgaaagccgcacggcaccgtttattgcccgggagttgtcacggaactggtaa

SEQ ID NO: 204350 - DNA, 1311 bp, Klebsiella oxytoca
atggtacatttctgcgatcaaaaacatcatgttgtcgtgataggggctgagttcggtggactctccgttgtcagagaactggaagagccgggcgtttcgatcacaatcattgaccggagtaaccaccatctgtttcagcctttactttatcaggtcgctggcgcatcactgccatcagcagaaattgcctggcccgttcgctctctgtttcgtcatcgtgaggatgtacgtaccctgatggccgaggtccaggatgtggataccgattcacgggaggttctgctgaaagatggttcccgaattgattatgacacgcttgtcgttgccactggggccacgcacgcttatttcggtcatgatgagtgggaacagtttgcgccgggactgaagaacctggatgatgccacgaccctgcgcgcacggatcctttccgcttttgaacaagctgagaataccactgatcccgcgttacgggctgcctaccagacattcgtcattgtcggggggggaccgacaggcgttgagctgtccgggaccattgccgaactggcaaggaaaacgctgaaaaatgatttccgttctattgatccgacagagaccagaattattctggttgaagccggacaacgattgctcactgccttcccggagtcattatcggaatatacccgtcagtccctggagaaactgggagtggaagtcagttttggccaaccggtaacggaatgctctgccgaaggcgtagtatatggtgggcaacctcttcctgccaaaacgatcatctgggcagcaggcgtcactgcttctccggctgcacgctggctcaagacggaagctgatcgggctggtcgggttatcgtgggagctgatctcacgctcccgttacaccctgaaatatttgtaataggtgataccgcggccgtgaccggagaggacggcaggatgatcccgggcattgctccggccgcaaaacaggaaggacagtatgtggctaaactgatccagtcccgtttaaaggatgaaaaacctgtcctgaaacctttccggtaccggcatcaggggaacctggcgaccatcggtcgcggactggctgtggttgatatgggacggttaaaactccggggagccatggcgtggtggttctggaaaattatccacctgtattttttgatcggaaccagaaaccggttgagtgtcgctatcagctggatctggaaccacagtatcggatacaggggagcccgcattatcacgggaggtaaatcacctgatccggataagagtgcggtccattcccgctcagaagagtga

SEQ ID NO: 204351 - DNA, 831 bp, Klebsiella oxytoca
atggaacgtcttgaacatcatgccagctttgatgggtggcaggaagtttatcagcatgagtctggcacgcttggctgcacgatgaaatttggtgtttatactccaccccaggcgcttaacggtaatgtaccggtactctactggctttccggtctgacctgtacggaacagaattttattaccaaatcgagcgttcagcgttatgccgcagagcatgggatcatgattgtggcaccagacaccagtccgcgtggcaccgatattcctgatgatcctgactacgctctcggtcagggggccggattctatgttaatgcaacccaggagccctgggcgacacattacaaaatgtatgactatgtggtaaacgagctcccgtccctgattgaagaatggttcccggcgtctgataaaagaagtatcagtggacattcgatgggcggacatggcgccctgatgattgcgctcagaaacccgggccgctatcagagtgtatccgcattctcaccgatcgtcgcaccttctcaggtgccctggggagaaaatgcattgtctgcttatctgggtgatgatcgggaatactggaagcagtacgacacggttgagttgatccgtaaagcgcaggaaaggctacctctgcttgtagaccaaggactgaatgatgagtttctgaagactcagcttcagccggagagactgaagagcgtttgtgaggacaccggtcatccgttgacgcttaacctgcgtccgggacacgatcacagctattactttatctccagctacattggcgaccacattgcacatcatgcagcagcactgacgcgctaa

SEQ ID NO: 204352 - DNA, 1335 bp, Klebsiella oxytoca
atgaaagagtcagcattatctgctatccgttctgagatgcaatcacccgaaaccgtgtacgggatgccggctcataaagacagaacggccgctgtcaatgaagtacatgcgcgtccgcacctgcttatcacatcaccacagaccctgctgcagtttgctttcatgactaaaggcgaccagtcaggtgaccagcgggtcatggttgagctgtcagatcgtcttggtttaacaccatcagaaaattcagcacccctgcacggtatcacgtggcgggaaggcgctttgtattgtgaaaaacacggtgagttttccacctacttatggagtaccacatgcgatccgcgtgacggacagttaaggggagagaaccccttccggcatggtttcacgccaccgggttcggttatctgtggtacccgtctggatattctgccatggactgcagaatctgaggctgcagtaacgaatttagatcctgtcagcaggtgctattcagtaacagaaaatggccgtgccgcaattatctctgattttcgccaggataaagacgggctgacacgcattctgatacttgaacgggacctgacagaggcacagctgggtgcactggttcagcggctgcttgagattgaaaattatcgcacgcttgctttgctttctttaccacttacaagaaccatggcctctgaactgaggcgagtggaaaaccgactggctgaaattacagaagaaatgcgcaccggagagcatcgtaaaaatgaacagttgctctctgcgttgaccaatcttgccgcagaacttgaagccggcgctgcagcgaatctgtaccggtttggcgcaagccaggcctactatgaaattgttgaggaaaggctgaatacgctctccgaaacgccggttccaggctactacacctggtctgattttttgcaacggcgcattgccccagccatgcgaacctgccgttctgtgaaagaacgacaggcgaagctgtctgacaaactcatgcgggctatttcgttacttcgctcctggatagatgttgaactggaacaccagaaccgtgacctgctggcttcgatgaataaccgggccagacaacagctacatctgcagcaaaccgttgaaggattgtctgttgccgccatttcatattatgtggtgagtctgatttcgtatctggtgaaaggggttcccgggatccacgatgtcatgccacctgagctggcggttgccattctcgtgcccttcattgtgctcgcgatttggtgggtggtgcgaagaataagaaactcgcacaccgaccctgaacataacgaaaaccgctctgactga

SEQ ID NO: 204353 - DNA, 399 bp, Klebsiella oxytoca
atgtccaatccagttatttcaggcaatggcatcttctctcacgtctttatcggtgctgtagatgttcaaaagtcggctgagttttatgacgccactttaggtgcactcggtatcaacaaccttggtccttttggtaatggctgggtgttgtttggccgtgacaagccggctttcatcattgcccgtcctggcaatggtgaagcgccatccagcaatggtgtgacaattggctttgctgccgccacgcctgctgaagttgacgctttccatgccgcaggcctggctgctggcgggactgatgaaggccaaccgggtcctcgtggtcatctgccaggtgcttatgctgcctacctgcgtgatccggctggtaacaagatctgctcctataccttcatctga

SEQ ID NO: 204354 - DNA, 276 bp, Klebsiella oxytoca
atgccacattctccagaagaaaagaaacaggcgcttgtccgggtacgacgtatcaaaggtcagattgcagcgctggaacaggcgattgaaaacgaagcggaatgttcttcattgttgcagcaactggcttcggtacgaggagccgttaaaggcctgatgactgttgttctggaaagctatctcagggaagaatttcccgatacgaacaaaagaagggggtcgcagacgaaatctatcaacgacgctatttccattgttcgctcatatctccgttaa

SEQ ID NO: 204355 - DNA, 1977 bp, Klebsiella oxytoca
atgtccacaggaaaattcattttacattcaggctatatcccgtcaggagatcagcccgaagcaatagccagactgatagcgggagtcgaagcaggagcgacacatcagacacttcaggggataaccggttcgggtaaaaccttcaccatggcgaatgtgatacaccgtttgcagcgccctacattaatactggctcctaacaagacgttaaccgcacagctttatctggagatgaagcagtttttcccagaaaatgctgtcgaatacttcgtttcttactacgacttttttcagccagaagtctatatccccggaagtgaccgctttatcccgaaagattccgctatcaacgatcatcttgaaaggttacggttatctacgaccaaggcattgattgaacgtcaggatgtgatagtcgtcgcttccgtctcttcgatatacggattaggtgatccggacgcatacagagagatccagatcccggtatacccgggacgacaactcgcccagcgggagttaattcatcaactggcacgtctgcagtatgcccgtacagacaaaactctgggacgggcgatgttccgggttcgcggtgacgttattgatatattccctgccgattccgaacatcaggccatcagggtcgaactttttgatgatgttatagaatccgcaaaatggattgatcctgtcagtgggaaaattgcgggcgacattgaacattatttaatatcacccaaaacactctttgttacaccgaccgcaaaaataccctcagccaccaaaagcattcttactgacatggagaaacgggttgctgaacttaacaaagcaaatcgtctgatagaggctgagcgcttatacgaacgcgtcaacaatgatgttgaaatgatccgtgaactgggttactgctcaggtatggaaaactattcctgctatttcagcgacagaaatccggaactcccaccgacaacgctgctggattacctgccaaaaaatggcctgctctttgttgatgaatcgcacgtaatggtcccgcaaatctcagccatgtacagtggcgatcagagtcgcaaggatactcttatcgatttcggcttccgtctgccctcctcaaaaaacaatcgacccctgagttttgctgagtttgagaagattaagccccagactgtctttgtttccgcaaccccaggtaaatatgaattgcagaaatcaaagaaaaatgttgttcagcaaattatccgccccaccggtttactggatcccgaaattgaggtccgaagcaaagaccagtgtgtggagaacttacttgaagaaatccgtcattgcgtcaacagaaacaatcgtgtcctggtgacagtgctgaccaaaaagaccgcagaagaactgaatgattttctgacagaaaatgggatcctgtcccgatatctgcattctgatatcaaaacagatgaaagacaggaaattatcaatggattacgggccggggaatttgatgtcttaatcggcatcagtctgctgcgtgaaggactcgacatccctgaagcctcactggtcgcgatacttgatgctgaccatgcaggttttttacgttcatcacacgcacttattcagatgattggacgtgtggcacgtaatgtggagggtaaagccgtactctatgcaaacaggatcactccggccatgaaacaggcgatggatgaaacgcacaatcgcagggaacgtcagatagcctataacctggaacatcatattaaaccagtgacttcagttcgtaagcggagtactgaacaggatgaaagcgtctatcctgccactcatacagaggcattctgttcaacgctatcagagttgtgtgaaagaattactgttaaagaaaagcaattactggcgatcgagaattcaggtgaggagaaggatatagaaaaattaagaacagaactgagtgatttgtatcgtcaatttatattcatgtaa

SEQ ID NO: 204356 - DNA, 147 bp, Klebsiella oxytoca; identical to SEQ ID NO: 147100

SEQ ID NO: 204357 - DNA, 267 bp, Klebsiella oxytoca
atgaaaataatgaatgcagagattgagaggcaaatctggcatcacaatctttcctatttattgcttgcccagcgggttctgaatcattacgaagacacagccctgtttcggctaggtatcgacaagtgtaccggagataaactcctgcagttgtcgttgcccgaactggttcgtcttgctgaacgtccggagctgattaccgtactcagactcagggatcaccaccagatagatgtattactcagtcagtccactggaatgggatga

SEQ ID NO: 204358 - DNA, 714 bp, Klebsiella oxytoca
atgacagagcaaaataatttcggtcaatatataggcagtcaccttgacgatgacgtcactctttcattacctgatttgcgccaattaccagggcgttattgcactctgcagttgctgtccacccgtcacgggaatgacctcttccagggatggcacagtatagaggattcacgtgactggacctatcttccggatgaaagaccgccgacaaaacaggcaacccacagttatattcagcaactcattcaacagaagggagtatatcattacgccattatagaaaataattcagaaaatgctgtgggaactctttctctgtataacctcgacaataaaaatgacgtagcagaaataggaggcgtacatcttactccagttatcaaacgaacttcagtcagtacagaagcaattttcctgatactatcatatgtttttgatgtgcttaaatatcgtcgctgtgaatggcaaaccgacaggctcaactctcagggtatgagatctgccgagagattagggttccagaaagagggtgtactgcgtaataaacaaatacttaaatcaaggagcgtggacgttgtaatgtattcaatcattcaggatgaatgggaaagaatatccagtgcgataactatctggcttagaactgtcaacttcgatgaccggggacatcaaatacatcctttacggcattacctggcgacaacagagccctga

SEQ ID NO: 204359 - DNA, 201 bp, Klebsiella oxytoca
atgctcgacaccaacatctgctcgttcatcatgcgcgagcagtcggaagtggtgctgaagcgcctggagccggcggtgctgcgtgaccagcgtatcgtggtctcggttatcacttactccgagatgcgctttggcgccacaggtccgaaggcctccccaccccgcgagcagttggttgacgcgttctgtgtgccgttctga

SEQ ID NO: 204360 - DNA, 480 bp, Klebsiella oxytoca
ttgaacagaatgacaggactcgctgttttatgcctctcgctgatgggatgcagtgccgtgccatcagaaaacagtgcgcagtacctcagaacggaaatgcagtcgccagtatcaggggcaaccataattaccgtaactgcggacagccttatgaaacaagacaatacacataacgctatactgtatgcacttcgaccgatgcctggaaaagcattcacctctgagctggacagaaaatttgccgcagcgacgatgtatattgatttgtctccgggtgaaaaaagcagaacggccgagatcagtggtgagataaattactatgatcacgagcgatacgtgaatgctcgcctggtaggagacagtatcaggacaataccgattgcaccaaagaccatcccgcttacactgaataaaccattctcaatcaatctgccacaaggtattcactattcagtcatgctgacggacagccagccttaa

SEQ ID NO: 204361 - DNA, 132 bp, Klebsiella oxytoca; identical to SEQ ID NO: 133020

SEQ ID NO: 204362 - DNA, 936 bp, Klebsiella oxytoca
atgacgattgaaagctttttcatcggcactcgcatgtcaggaaaacgttatggacctcagagtaaagacatgcaggtttctgaattcatagcacttatatctccgaaaaatgaaccagagaaatttgtcctacccgatttctccggtctggcacgtcggattgacgcccagatccggaatcagtttattcagcaaaaagaggatgactattaccgtcgataccgacagctttcggaccggtggtatcaggccggctctatcagtgacagaaacaatcgcagccagcgttttgagaaggtcatggatgagtcgcttgagtttttggtttacagtcatgatgttatgcccaacatcaacccatataatctcaaatacgatgatcgcgttcaggttagcacgaaaggcaaaatgtactgcgtagcgcttctgttccatattatcgctcgagcggcctatgagccagtctctgtaggtgcagatcctacgctgcaaaggcattgcaagtggctgaaggactggattaataaaacgttaggggatcattttttagagggaatgatgattactttcgccctttgttatcctgaccactttcctgccctgcagcgccttagcggagagttagaaacacgtgatgttgacacattcctggctgacgaagttcgtaaggcaaggcaacacacagaggaacaggttaattatcataacggccggtaccggttgaaattcgagtacactcactttcaccaggagcaatttgattttttagccgaaatgcgtgatctccattaccggatagatcgtattgaacagctccttcagaaactgatagataacccggtagtagatttcagtgaagctgctgttgcagggcagtggattgacgaacaagtacagctgcttgaaacaaacgaaacgaagctaatactcccataa

SEQ ID NO: 204363 - DNA, 828 bp, Klebsiella oxytoca
atgatgaacaagctacaggaacgatatgctcgcataattgcgataatgaacaataaaggtggtcctggtaagaccagttcggctaccaatctggctgttcactatgccagatcagggaagcggacgctgttgattgactcggaccagcaggccaatacgacagaagtcaccgcaaatggtaaaaagtactattccatgtatggtccaactatttgcgatctctacagcaattctcgatttgatatccgcgatgtcatcatccccgcgatggccggtgatgctcctatccctaacctggatctgattccgtctgacccgacgttcgaaaaaattattgaacagacccttacccgcagtcaccgcgaaaaaatcctgggccgtcatctcgagaaagttcgcactgaatatgattacatcattattgactgtgcacctgggctcaatatcgcaaccggcaatgcaatttttatcgccgatcatgttctggtacctgtcgatggcgggagtttttctctgagtggtcttgaaatcatgctggactatatggatgagatctctgaggaagattatgcacgcttcagtgtattccggaacaattacaatggtgcaaataagaaaataaacacttatatcgaaaccgccctgggctcgcacgagagaatttctccgagactattgaaaagccggattcgtactgatcaggccatagtacagtctcaggtggcttgtcttcctctgtactactaccagaaaagtgcaatggctttagtggattacggcaaacttgcccgtgagctagaagaaattatcagcagtgaggcagcataa

SEQ ID NO: 204364 - DNA, 285 bp, Klebsiella oxytoca
atgtctaaagaacttgttcgacctataatggaaaaacctgaacgggccagaaaagaaagtagcctgactaacattgcggctaaaaagaaaaatacgacaggcgaaacaccaaaaactatacgcatgacacctgcggaaaagatgctggcgcaggaactggttgagcagatccaggcacttacgcacaagaacattacggtttccacattacttcgtgcagggctgtaccttgctcagtcagcaggaccagaaaaagttctgaaggcgattaaagagaacatttag

SEQ ID NO: 204365 - DNA, 696 bp, Klebsiella oxytoca
atgaagctcagtgtcagattgattgaagggtttaaaaaaacatatcttcctctgcagttcagagccttctgggatgatgagggattttgctatttaaaagttcagatcgttaacgggaagataatttttttctgtgctcagttgttaaattattataacacttcaattaccaatgctgttgagagtgtacgggcatcagctgtgaatgcactcattaatgacggtgcaattaaaatacagaatcagcaagggatttttgatttatttaaatcacaggaacgtaaaagtaaagaagtgatatcaattctgtttgagtatgttcgtgagaattctgtatgggtagaacattacgaatctcaaatcagcataacccaggatgaccgatatagtctggttcacttcaaccagtaccaggaacctaactggtcttttatttctaaagaaaaacttgaagagacatatcctgaatttgattttcatgtttccagaaagtctcttgaaaactggagtaatgcccgattatcaactcagacgattaaaaaattattaaaagaaaaaaactggaccatgaaggaagttgctgctcgctggaaccgttcggaatcatggatgagtaaagttgttaatgatgaggaaagggaactctactgggaagacgcttttaaagggctcccttcaaaaatacacgaaaaatga

SEQ ID NO: 204366 - DNA, 624 bp, Klebsiella oxytoca
atgaaccaatttacagaggacctacataatgtagtagctcaaatcttagccggcgcagaaatctctgatagtgaaattttcaaagaattaactattgaacctgatttttacaaggtgcaggaccagtattacggtggaaatggtatctatttcaactctgaatcagaaacccgcttttcactgcgtagcaaatccaaaggtgtattgtatctggccaccacggcatttacagggctgaaagagttttatcaggatgctccgcttgttgaaactgaggatcttgagaaaaactgtatggcggtaattcaggcagcacgcacaatcaagattattgatttagctgccctggcgccccatctgaaaactccgttaggttatttgatgggctctaaagctgtctatgaggatactcagtggctggcagaagtgctttctcattatgctgatggtattgaatatttgtctcaacacaccggcaaaacctgtatcgcgttgtggtctgacaccgttgatggaaacggaatgctgaagaacatctcagtcactccgttaatccagttcagtctcaacggacaaagtacgcaggcgatcttaaaatcaaagctgggtattcttactctctga

SEQ ID NO: 204367 - DNA, 678 bp, Klebsiella oxytoca
atgacaaacatcagttatgcacctaataaagcccgtgctcacctcaaaaaccgtgagcaaactgaaatccagctgctgcagacccgcattcagaatgtgggaagcaagttcgttgaagcactgcatgaactgccccacgagaagttactggaactgctcacgctgcaggatgaaacattctgggctgaattaaagaatcaggctcagctgcagacattaattaataccatgacacctgaaaaacaggcccaggaagatcttgctgaagcgagagaagtatttcttaagtcgctggagaattcaggcggagtgcataaatcaacggccgttataaaaatactggcaaccacgccgccaaccctgcataaaagaggaaaccgtggtgaagttattcagattaaatggggttctgaaaacctttacccggtatttcagttttgcacacgtgagaataattcagaaggcggtatgctggccggcatcccggaattattatccctgattaaacacaaggtcagtgctgtgcggaaatgtcacttctttacccgtaaagttgatattccgggaactgaaacacatgtctctattgttgacgcgctgcgccgtggcgctacgcctgaagagatgacccacttcagaatcctggcagaaaactttggtaccaaccataccatgtaa

SEQ ID NO: 204368 - DNA, 765 bp, Klebsiella oxytoca
atgactctgccctcttttattaacgcctcccctgccctgccggcgacaggccagtcggctggcctggactacggccgcgcgctttcgctacgcgaaatggcccggcactacaccgagctgccaaaatatctgctggctccggaagtggccggactgctgcactttgttcaggactggggtcagcacgctttttttaatacgttatggaataccggggcacgcctgaacgaaggccttgccctgagacggcgtgactttcaccttaacgagagcattccgcatgtcgttcttcgcaccgccaaacagcggcgtgccggcggcggccgtccgcgtaagggaaaaagtgccaaccgggtggtgccgttatcggacccggcctatgtcgatgagatgcgccggctgttcgccagcacgaaggagcagtttgaagatgatccgattacaggcgaacgtcgcgcgcaaccggtgtggaatgtttccgaccggacggtgcgtaactggctggtccgggctactgatgccgcggatcgtgacggcgtcagactgagcatcgacgtcagcccccataccttccggcacagttttgcaatgcaccttttatatggccacgttcaccctaaggtactccagggtctgctggggcatgagaagtttgagagtactgaggtctatacgaaaatatttgcgctcgacgtggctgccagtcagcagctgcgcttcaccctcgatacacaggatgcgctgcagctactgcgtataaaatag

SEQ ID NO: 204369 - DNA, 1095 bp, Klebsiella oxytoca
atgaaaaaaaccaaatacagatttgagagtgatgacgatccctttgtatctaaagatgttttgactctgatcgacaacggacttgtgtttctggataaggcgcgtgaagaattgcaggactccatgcccaaattttcgattgtcagtttctggacagcggtcgagatcctgctgaaggtacctttgttacatgagcactggagtctggtgtgctccggcaggaaaatagagcgagcaaggtaccttgcaggtgatttccagtcggtgacatacgatgaaacatgtcagcgattagctgatgttctggaacaccctcttcctaaagaaaccatcgacgtattcaaaaaagtcaaagaccatcgcaaccgggtggttcatttttatcattccgatttcacagacgagcaatcaaagaaaattcttcatgaacaggccgatgcctggtttgcgctaaatcgttttatgcgtgatcagtggttttcgatttttggagagcctctgaactctaagctcgcattagacgaagatggaatgctccggagctcgtttttttatgctgatgctaaatttcgttatctcaagccggaacttgatggactcgaaaaacagggatgttcagtctcagtttgccgctcctgtagtaaaaaagctgcggttgatatgtgtatacatgaggaaagcggaaataccctgcatgaatctgactgtctggtctgcggtaccaggtcagatcagtatctcgaagttacctgccctgactgcgggataaagcagaatttatacgctaccggtgaaacagaattcacctgcgtacaatgtaaccactcttcatcacgatacgatttgcttgatgaatgggagggtaaaccagaagattttagtcattctggtcttcctgcaagttgttctgattgtgacggctatgagacggtatgtgagtacggtggtggatacctgtgcaccacctgtctcgtattacatgactcactggaaacctgcggatactgtggcgggcattcaacctcagttcctgaaatgagcggtcttatagggtgtaacttctgtgatggtaacgtgcggttgctggaggaataa

SEQ ID NO: 204370 - DNA, 123 bp, Klebsiella oxytoca
atgtctaagcggttgagtggctcccgcatgtttttcttccagatcgtcaaaatcatcagtcaattcggcagatatgagccatttcaggtccagttcgcatacagcgccatcctcagtgattag

SEQ ID NO: 204371 - DNA, 2091 bp, Klebsiella oxytoca
atgtccgaaaataattatggtgcgctgatgatgaaatcgacactcagcgccagtgttgatattgacagcattatttcccccggtacttatcctgtccctgcgggcaatccgtcatcaccagatccagatggcggcactttaactgtctattcaggcccaacaaaacgacgaacattcacttctaatttgatcgttttcgcaacgtcgatttatgacaatctttctttaagctggggagaatggttttttgcacttgttcgctcggaccttagctcaaatgaaacaggttttggtagttggctaacgacacatgttcatgagtcggttgtaactgataatcttcatgattttcttaacaattccattaagtttatcaccccctccatgttcaaaagcttagttgttaacggtgactggtcacaagcaatggttgcagctgaccttgcagctcgaaatctcggcagaatccttgacggacagggactggaatatacaatcggctctgaaattgtcttacggtgtggttattttcggaatatcaggttcgcgccactagcgggtttttctggcgcggcaccgatttgcgttgtaaatatggctacaggcaagtgtattcatgactctgtggagttcatcggatttaagctgacgggaacaaaaatactgcaaagcacttacatcggtgagactgaggctatttttaaaggcgtttgccgttataactataatggcaatttaatccgtaccacgctcacggcggatgttaacacggctacagcctgggtcattcctgttgctgatgcgtcaattttttccgccgaagacgccgttcatatcggagacgggcgttataaaatcctctccatatcaggcaataacatcactctgtataatgatggcacgggtgccaccctttttgattccggtacgcggtatcagcactattccgggcagtatgtgaccaaaaatcaagggtacgataataacggtatccgtatagggaaccacactcagggctggagcataaaggtcgcgggaaaggttgaggctatcggaaatggctggactggcttctatcatgacagcggtgcatatggcgggtatctggagattgatggcgtccgggcgtcatcgaacggatacattggaattggtctggggtacgcaaataaaggctatgtcagaaactgcattactgagtttaacagcaacaacggcattgatacttttgaggcaaaacagaccttcgcagttgaaaataacctctgcgtggggaatggtgttgataatatttttgttggcggaaacagtgaaaccgccgcagtgagtaacaatacctgcatcaacgccttccggcttggaattctggtttttggacgaataactgccattcaaggcatggagttgactgataataaatgcttaggaaataaattcaggtcaatcactttgactggcgttagactaggtaagatttttgggggagacgctggcagagctaacaactattcgatttttattgaggggagagagggactgagcaacccggaaaaaatcactataaagggtgttgacttgtaccaatcatcaacaggtgatattggggggaaccttaggaataatactgatgatgcctctggaactgttgaccttattgacaataacaccttcagcagaatgccatctgtgaatattaccaatgtgaattatttcgggtgcaagttttacccggaatgctatatcgctgggacgggggaatattccgccaccgctggcgtcaatattgcggtgacattatccgtgcgaagacctcacaacagtaccatcaccgatgcagcctcggcccgtccgataagcttcgccatttcttcacaggccgatggttctgaccagtcaacagtgaactctgcggtaaaaagcctggctaatgccgtcgaaataatgaataacgccaccactcgcggaaaaattatcgccctccctgatttaggcgttatttcctataatttccgactggatgcgccgggtacgcgttatatacaggttgaatgtggcggattcaaaaaaatattaacgctgaagtggtcatag

SEQ ID NO: 204372 - DNA, 504 bp, Klebsiella oxytoca
atgaaaggactaaacatacctattgaagccatacaccgcttgtatagctcgcgacttatgaaaatattgcaatcttgtgagtctgtgtcagaaagtgatatagccataatccatcgcgccgctatcgaggttcttcacacaacttatggcactgtttttgcggactttaatgataaaaacattgatatccatcaagccattaaccgcctgcaacatcatgtttacttcgagctaaacaaccagcgcattgattcatcaaccgttacgtttgctaggttgctggatttgatacgtataccttttaatcagtgcgacatgctgatgatacaagatttgcaatctcgaccaaatgatcaatatgaagtggtaacaactcttcgatacctccccacaggagaggaaaaacaatacaatactccagtttgtattacgagtaagagcgagttcacatcctcagttacaaaagccaaacgtatcgctctaaggggtattttcaatatatag

SEQ ID NO: 204373 - DNA, 1335 bp, Klebsiella oxytoca
atggaaaaactgagtcagaatctaagggcactgattagacctcatcgcattaaatgcctgtacggtgggcgaggttcgggcaaatcgtgggcggtagcaaaaattctggtggaactggcggtaaggtcagatatccgcattttgtgtttgcgccgggttcaaaagtccattggttcatcagcgcataagctactgtctgacacaatacgccgttccgggtatcaacatgaattcatcatcacaaacaatgcgatccgttcccgtgagggtgcggagtttatgtttatggggctgcaatccaatctcgacagcatcaaatccattgagggcgtagatatcgcatgggttgaagaggctcacggtatcagtagtgatgcgtgggaaatacttctgccaactattcgccgtcctgcatcagaagtatggattaccttcaaccctgattacgcatgggatgatacctatgttcgctttgttcttaatgcggatccttcatggttcgtacaaaaggttaactggagcgataacaaaagctttccggcgagccttgaaaaagagcgcctccactgtctgaagtattatccagaccgctacgacaacatatgggagggggttcctgtcagtgaactaccgggggctgtcgtacatcgtgggaatctggaaaaactgtttgtcgcgtcggattcgaagctggcaaaagcctgtaggactggcgtcaaaacggcggtgctcgatgttgctgatgatggcgacgatgattcggtattgtcgttctttgacgggcgttttttataccgtatggagcgattgcaggcgcgtgacacggtacaacttgcgcagcagtcgctaaaactggcgacggaagaaggttgttcggccctgatatatgactctgtcggcgttggttctggcgttaaaggtgagttaaataaatttgaagattccgatattgagtttcgcaagtttgtagcgcagggcgaagtattgcgaaaaaaatcacgatatcgcggtggcaggccaaatgaagacacgtttcacaatttacgagcacaggcatggtgggcgtatcgggatgcagtcaatgattctgtgcgctggatggagacagacattatgccgcccgatggcctgtttgctatttctgaccagattccgcgccgatatcgtgaacgtatcctttcagactcgactggcgtcatgtgggaaacctcgcctgacgacaaaatccttattgaagcgaagaaaaaagttaaaaaacgtctgggcgtgtccactgactacgctgacgccatattcccacatctggtacgtatgaaatcaggaatcatcgaatga

SEQ ID NO: 204374 - DNA, 1854 bp, Klebsiella oxytoca
atgacagaccagtcagccgatctcgtaacgaaaattgatgttattccagaccttgacgggctcaacagctttgatgctgcgattgataaggctatcgcaaaggttaatcagcttgacgccgctatcaagcgcgtcaacaacctgaaacctgcaagcccctacgcgcccagcagtgcatcaacagcaccgacagccgccgctacagcagcaatagccacagtagccgctacaggcacgaatttgattgctcgtacacctctggcggagactgtacgccgcgagtctcagaaggtcgcacgtgcagccgttcagggcatgggtaacggtattggccttcctcttctgggcggtggcggttctggtggcggaggtctgctattgccgccgccgcgtggtggtggttttaacccgttcgacgcgtccaatttttccggcgagccgctaaataccaggaagaaacctgttgctgatgccgtacagagcgggatacgtaacccgtttggtgttgatacgatgctggcaggggccgggctaactgttggcattatggcggcgggtaatgcgctggctgacagccttgattcaatccagcggcagcaggcgcagattgcgaggttgacgcagacaaccggagacgcaaaagaggctttctttgcacttaatcaggccgcgagtgatgtacgaagtgacagcggggcgtttatatcaacgtataccaatatggcgaccgccacgcagaaacttggaaagtctcaggaggaaacaatccgggcgactcaggggctggttggcgcattacaactaggcggcggcagtgctgaagcggtaaatgcagcgctttaccagatgggccaggcattttcttctgaccgattcggcggagatgagtttagatctttcatggaggctatcggtacaatggccccggaagtggcgaaggctttcggcacggatgtaaaagggctacgggcaatgtcagaagccgggaaactcacggcggaaacgatgattaacgcctttgagaaaatggcggcgagtaatgccgacctgcttaaaaaacagggctggacgtggggccagacaatgacagtcatgaaaaatgactggcaggcatttttagcacaggcaaccatcggcggggagtggcaaagatttactgactggactgcaaacattcttatccctgtagttcgtaaagcagaaaaagaagtctccacattctgggcgactctctctgacgatagcaagtcagctattttgataggtattctgggtgccgttggggccgcatttgctgcgttggccattcctgtattcgccgcaatttggcctttcctcgccattggcgcggctgtatggttagtttatgaggcatttgtagaatggaaacattggcttgatggcgagacaggcaacatttttgccggattgtttgggagttttgacgagttcgagcgccgatatccagcaatagtgtctcttcttagggcgctttccgctaaagtgtctgaggctgcatcaaacatgaacaatagcggtcttgagttgcttaagccacaaaacgaaaagcaagtaacggacttagttacagggaaagaaagcagtggagggactttagatgttatcaacagggttatagaactgtttaatgaaggtaatgacgctccgaactggtatgaacgtcagcaggctaagattcagcctgggaacatcaataacagcgggaatacaaacactgttattaatgtcaataccggaaaagaggcggcagacgtagttaacagcttagataaaccgggtacaataagtggtgatgttagtggtaatattgctgaggcaactggagcaaggtaa

SEQ ID NO: 204375 - DNA, 276 bp, Klebsiella oxytoca; identical to SEQ ID NO: 36785

SEQ ID NO: 204376 - DNA, 1272 bp, Klebsiella oxytoca
atgttcgccctggccgacgtcaactccttctacgccagttgcgagagggttttcaggccggatttgcgcggaaaaccggtcgtcgttctcagtaacaacgatggctgcgttattgcccggagtgctgaagccaaacggctgggtataaagatgggaaccccctggttccagctcaaagaggcgcagtttcctgaaaaactgtacgttttttccagcaattacgagctctacgctagcctgagtaaccgcgtggtcgccctgctggaggagctgtctccccgcgtcgaacaatactcgatagacgaatgtttcctggatgcccggggaattggccaatgtatggatctggaggattttggcaggcagctgcgtgggcacgttctcagtggaaccggactgacgattggtgtcggctgcggcgccacaaaaacactggccaaatcggcgcagtgggcgtcaaaggaatggccacaattcaggggggtgctggcgctgtcgcccgataatccacgcaggacggcaaaattactcagcctgcagccggtggaagaaatctggggcgtggggaaccggatagcgaaaaagctgcacgttatggggatcaccaccgccctgcagctgtcgctgacgaaccccgcgtttatccgcaaaaacttcaacgtagtgctggagcgcacggtacgtgagctgaacggcgagagttgcatttcactggaggaagcgccgccgccgaaacagcagattgtctgcagtcgcagcttcgggcagcggatcaccacctatgaagaaatgcgccaggccgtctgccagtacgccgagcgcgcagcagaaaagttgcgaggtgagcggcagtactgccggcatatcagcatcttcatcaaaacctccccttttgcggttaatgaaccgtactacggtaacgtggccactgagaaactgaacacccctacccgtgacacccgggtcattatagcggcagcggtcaggtctctggacaggatctggctcgatggccaccgctacgcaaaagcggggataatgctcaatgatttcagcccgaacggcgttgcacagctgaatctgttcgatgacgtgcagccacggccgcacagcgatgcgctgatgaaggtgctcgacggtattaatcattccggactcgggaaagtctggtttgccggacggggtattgcgccggactggcagatgaaacgggagatgctgtcaccggcatataccacccgctggaaggagctgccggttgcccgtttctga

SEQ ID NO: 204377 - DNA, 1137 bp, Klebsiella oxytoca; identical to SEQ ID NO: 185063

SEQ ID NO: 204378 - DNA, 1089 bp, Klebsiella oxytoca
gtgatcaccaccctgcacattcaaaactaccgctcgattcgcgaaatgtcgctggagctggaacagctcaacatcgtctttggcccaaacggcaccggaaaatccaatatctacaaggcgatccacctgatgcacagcgccgcacaggggcagttttcgcaggcactggcgaacgagggtgggattttaaaagtgttctgggcaggcaaaacccgcagcgaccagctgcggcggatgaatttggccgttgaaaccgaaacctacgaatacgagctgcaggtaggctttgtcgaaaaactgccttacccctcacagtttcaactcgatccggtgatcaaagaagagtccatctggctgagtggtcaataccgccgcccgtcgtcacagctgatgaagcgtaaaaatcaggccgtatttctgaacaacgtgcatcacgagaaagtcacccacagcggcacgctgtatgagaacgaatcggtgttcggccagcttggcgagccgcatctttacccggaagtgtcgcagatgcgcgagtcgctgcgtaactggcgcttttatcaggagttttctgtatcaatcggctcggccatgcgcgcgcctcaggtcggtttccgctccccagtgctggccagcgacggcgcaaacctggcggcggcgtttcagaccatcgtggaaattggcgacgagctgctgctgatgcgcatcctcgaccaggccttccccggctgcgtgttttacagcgacaacaccggcggacgcttccggatgatgatgcagcgtgaagggctaagcagaccgctggagccggcggaattctccgacggcactctgcgttttctgtgcctggcggtggcgctattaagcccgcgtccaccggcctttatcgccctcaacgaaccggaaaacagcctgcatccgcagatgctgcccgcgctggcgagcttaatcgccgaggccagccgctactcgcaaatttggctgaccagccactcgccggaactggcgaatttaattgagaaacagagatcgttttcgctgtatcagctgtcgatggtggaaggggaaacgaaggtggagaggctggggtag

SEQ ID NO: 204379 - DNA, 960 bp, Klebsiella oxytoca
atgacaacaaaacctgtgctcggtattagcggatgtttgaccgggtctgccgttcgcttcgacggcggacacaagcgtatgggctttgtcatggatgaactggcccagtgggtgagtttcaggcccgtctgcccggaaatggcgattggcctgccgacgccacgcccggccatacgcctgacgctgacggacagcggcgaaacgcagctccgcttcagcaagccgccccatgatgatataacgcagaaaatggccgactttacggcggactatctgccaaaaatcggcgatctgtcgggatttatcgtctgcgcgaaatcgccaagctgcggcatggaacgcgtgcggctatatgatgaaaacggcaaccggggccgcaaggagggtgtcgggctgttcaccgccgccctgcttgaaacctacccgtggctgcccgtggaggaagacggtcggctgcacgacccggtgctgcgggaaaactttatcgagcgggtatttgccctgcacgagctgaacacgctgcgcgctaaaggcctgacgcgccgcgcgctgctggatttccacagccgctataaattgcagcttctggcgcaccatcaggcgggctaccgcgagattggcccgttcgttgcgtcgctgcatgaatgggaagatctggacgcgttcttcgtggcgtaccgcgaaaagctgatgaccatcctgaaaaagcccgcctcgcggaaaaaccataccaacgtgctaatgcatatccagggctatttccgtaaccagctgaacagccgccagcgcgtcgagctgcgcgatgtgatcctgcactatcgcgacgggctgctacccatcctcgcgccgttgacgctactgaaacactacatggccgaataccctgaccggtatctgatgacgcaaaactactttgatccctatcctgatgatttgggtctgcgtctggcagtaacctga

SEQ ID NO: 204380 - DNA, 411 bp, Klebsiella oxytoca
atgaaaaaaactgcctctctgctgatgctgaccaccctggcctttgcccctgccgcctttagcgcccctgccggcacgctgagcgtacacattcttgaccagcaaaccgggatgccgccatcggacgttaccgtcacgctggaaaaacagcagcaggacaaatggaccccaattgccagcggcaaaactgaccatgacggccgcatcaaatcgctttatccggaggatcaggatatgcagcccggcgtctataaagtggcctttaaaaccgcagattacttccacgggaagaagctggactccttcttcccggagatcccggtgctgttcaccgtaacccggaccaacgaaaagctgcacatccctctcctgctgagccaatacggttattcaacttacaagggcagttaa

SEQ ID NO: 204381 - DNA, 726 bp, Klebsiella oxytoca
atggcttactccatcggcgaattcgccagactcagcgggatcaccgccaccacgctgcgggcctggcagcggcgctacggcttactcaagcctcagcgcacggagggcggccaccgccagtacagcgatgaggacgtccagcaggcgctaaaaatcctcgactgggtaaaaaaaggcgtcccgattggccaggtcaaaccgctgctggagcgccctacgtcgcgcctgaccaacaactggctcacgctgcagcagagcatgttacagcgcctgcaggacggcaaaatcgagtccctgcgtcagatgatttacgacgcaggacgcgagtacccaagaccagaactggtcgcgaacgtgctgcgtccgctgcgcagtcaggtgtcggcaaacgtcgccgccgccatgaccctgcgggagatcctcgacggcatcatcatcgcctacacctcgttttgcctggaaggcgataaaaaagcgccgggcgacaacatcctgctcagcggctggaacctgaatgacccgtgcgaagtctggctcgaagccttaacccgcaccgggcaaggccaccgtatcgatattttacccacgccgcccgccacgctggccccggagattttcccggaccgccactggcttctggtcacgcgcggtaaactcaccgccgcgcgcaaaaagcagatcgagcagtggcagcagcaggtatcgcttgaagtgattatcctctaa

SEQ ID NO: 204382 - DNA, 345 bp, Klebsiella oxytoca
atgaagctatggcctgttgtgaccggtgttgccattgccctgacgctggtagcctgtaaatcccctaccccaccgaagggcgtgcagcccatttccggttttgacgccagccgctatcttggcaaatggtacgaagtcgctcgcctggaaaaccgctttgaacgcggcctggagcaggttaccgccacctacggcaagcgcagcgacggcggcatcagcgtgcttaaccgcggctacgaccctgtgaagaacaagtggaatgagagcgagggtaaagcctactttaccggcgaaccgaccacggccgcgctgaaggtgtccttcttggggtcagtttggatatag

SEQ ID NO: 204383 - DNA, 189 bp, Klebsiella oxytoca
atgtatcgccacgtgcaccagattctggcgcagagtaacatccgtgtcttccgcgtgtgggtgggggaattcgccacggcgatggagatgaccggcatgtccatcagcctgatgccggtagacgatgagcttaaggcactgttgaacgcgcaggccgacacgccgatgttccggcagtttcccgcctaa

SEQ ID NO: 204384 - DNA, 642 bp, Klebsiella oxytoca
atgacgttaaaccgcgagagcttacgcccgctctttgccgagtgggcgcgggtgatgcagggcaacaagacggtgctaaccgagctggacagcgtggtgggcgatggcgatctgggcctcaccatgagcgacggttttgccgcggcgtcggactatgcacagcacagtgacgaacccgatctgggacggtttttctatctggcgggtaaagcgatggcctcggcggtgccctccacgatggggacgctgatggcttccggcctgatgcaggcgggaaaagtctttaaggggcgagagacgatgacgctgcaggatacgggcgactttttccaggcctggtttgatggcgtgcagcagcgcggcaaagcgcagccgggcgaaaaaacgtttcttgatgggatggcaccggcgctggtggcgctgcgtggccagggtgagccgctgaacgtggcgcgggaagcgttgttagcggcacagcagggcgtgcagcagaccaccaccatggtggcgaagcacgggcgtgcggctatccacggcgaacggtcccgtgcgttcgtcgacccgggcgcgatggtcgcccagcttctgattcagggctattttaacgtcgttcaggcgatgtacccggctaacggacagtaa

SEQ ID NO: 204385 - DNA, 630 bp, Klebsiella oxytoca
atgaacaccacacaatttatcgcctgcctgcggtacgtctctgaggggatgatcgccagtgaaccacggctgaccgcgctcgatcaggtgattggcgatggcgaccacgggatcggcattaaacgcggctttaccgcactcaacgcgctgctcgccggacccgaatttaccgccacggatattggtgacgctttgctgcaaagcggcactcgcctgatgaccagcatgggcggcgcctccggggccattttcggcacccttttccgcgctgggggtaaaggcctggctgggcgcgctgagctggatgccgccaccctcgccgagtggttggcgatcggtatgcaggccatccaccagcgcggcggtgccgagccgggggataaaacgatggtcgatgcgctggccgccgccgccgagtgcgccaaagcggacgtcacgctaacgctgccggaagcactggcccactgcgcgcaggcggcgatggcgggcgcagagggaaccagcgcgatggttgcgcgcttcgggcgcgcgaaaaatctgggtgaacgggccattggccactgcgacccaggggcagtgtcgatggcgctaatcctgcagtttatggcggaatttgcccaccagaactaa

SEQ ID NO: 204386 - DNA, 312 bp, Klebsiella oxytoca
atgcgcatgacacaaccccgggcatggtgcctgttgggttttttgctggtttcgggcgctcaggccgctgagtctgacgagctggcgctggtaatgaagcaactggatcaggtgcaggccgcgctggagcgtgcccgcgtcgtcgccgttcaggatgggcaacacgggcgcttctattttgattacttacgggcaacgcaggacatcaaggcgattcgccaggggatcggtatctacctggaaccttcccgcgctcagccagtgccttcggcatctctcacaggtcagtatcggatggagcgtcgcccgtga

SEQ ID NO: 204387 - DNA, 237 bp, Klebsiella oxytoca
gtgaacgatgctcagaccaacgcatttaaggcggcaagcggcaatgccgatcccgcagtgctgagcaaattgtttattggttcgctgattgccctgctgattttgtgggtgggatggggctttgtgcatgtttatcgggggtacaaggctggccacgttaaagagcaggctctggtgcgttttgccattcgctcaatccttttaatcattatcgctatctatctcttcgccagctaa

SEQ ID NO: 204388 - DNA, 372 bp, Klebsiella oxytoca
atgttttgctctgcattatcttctctgcgtttttcttttcgtctctggtgtgcgcgggttctggccgttgctctgaccggaatttctgcggcccgggctgctttgccaaccgttgaaggcccgaaaagcagtaccgacagttctttttacggtcagatctccggctatctcaatgacggtattgtgctgggcgggttaatcctagcggcagttgccatgctggccgtcggtaacgccattattgccaccttttccgaagtccgtgacgggaaatcgagctggggtaagttcgggatgctggttgtcgtcggtgttgtcctgattgttgtggttatctggctggctgctaaagccgcgacaattctgctctaa

SEQ ID NO: 204389 - DNA, 381 bp, Klebsiella oxytoca
atggcgactatcgaatttatgcctgacaggttgaatgctgagccggtggtgttccgtggattcaccacgccggaacttggctttaccgcgctgttcagcgtactgggtggcctcgtggtcgccataccgattctgccatttcttggctggctcgcctttccgaccgtggcgctgctgatgccgctggtcactgttatttttgggggcaggctgatggcacgttttaaacgcggcaagccggaaaactacctttatcgcagactggatctgcttttaagccagttcggtctgggaacaaaagggctggtacaaaacagccatgtgctggcgttacgccgcctgcgtcctgtggttcgccgtcaggagaccgttcatgagtaa

SEQ ID NO: 204390 - DNA, 657 bp, Klebsiella oxytoca
atgagtaagtttaaaaatgccctgaatgcccgcgataaccatatccggacgctccgcgccgcatgtggggttatgttggtactgttagtgttgtccatgcttggctggatgatgtctccgcgcaatctgaccattcacaatcctcccgatcttcgctccggcagctcccgtccgtggtgggagatccctccctcaacggtatatgccttcagcttttatatcttccagcaactgaacagttggccgaaggatggtgacgttgattatccctatcgtattgagactttgtcggcctacctgacaccgacctgtcaggaactgctgcataaggatgcgaagcagcgtaaggacctgggcgaatcgcgggatcgcgtgcgcggtgtgtcggaaatccctgaacggggctaccgggatgacagcgtcaccattattgaccgtgataactggcaggttcgtctggatttggttaccgacgaatatgttaactccgagccggttaaacgctcgctggtgcgctatccgctgaaagtggtgcgctgggataaaaatccggaggctaacccgtttggtctggcgctggattgtctctcggaagcgccgcagcgtctggaagcggcccctgtggttaaggaagagaaaaagggagtgtttaactga

SEQ ID NO: 204391 - DNA, 876 bp, Klebsiella oxytoca
atgagtttacgacgatttttactgtcgctggcctgtcttgccgccttaccggcgcaggcggttgagctggtgaagtgggagcgtattccgctgccggtatccctgcatgtcgggcaggagcgcattgtgtttgtgaaccgcaatgtgcgagtgggatttccgcctgaactgaaggggaaattgcgcgtacaaagtaccggcggcgcggtgtacctgcaacccggggagcagttttcccgtacccgactggtccttcaggatgtggagaacggcgagatgatcctgttggatatcagcgccgaagaggggaaaaacgttctggagccagtaagcctggtgtatcaaggggaggtctccagctcgacggggaacggtgatgttgcggtgaccgacaataaaaccgcaacaactggcgaacgacagtccacatcgaaaccgaaagagaaaaaatccaccacgccgctgccggtggctttaacccgctatgccgcgcaaagcctgtacgcaccgtcgcgcacgattgagccactgcccggtgtgcattccatttcgctggcgctgccggataaacttacatcgttgctgccgtcagaatccgttgaaatcaaaccgctggccgcatggggattgcagggttacagcgtggtggcgctgaccctgcgtaaccagcgtgcagagaaagtggttctcgatccgcgtcgtcttcagggtaatttttacagtgcgacattccagcatcgctggctgggcgcgagtggcacgccggaagacaccacgacggtgtatctggtgaccaaagggcgtcctgatgccgcgtttcttcctgagccagtgaaggcgaaaacaggcaaaggagggaagggcgatgcagattaa

SEQ ID NO: 204392 - DNA, 1467 bp, Klebsiella oxytoca
atgcagattaaatcgaataccctgctgaaggtcattgtgccggtggtgttgctgtcggcggtggtgattggcgtgaaatcctgcggtggtacgaaacagacgcaggattcggcggataacaccgccgtggcagatctgacacaggaagaactgcgcattctcggcatcgagggcgatacgccgcaggatacgctgcgtacgctggtcgggcgtattaaaacgatccagaccagtcaggagaatctggagaaacagaataccgcgctggccgaagaaaacgcccgattgcaaaataaaggcagcaacgtcgatgggcgcattaatgatgctgttaacgccgtcaaacaggaaagtacacaggcgcagcaaaaacttcaggctgaacagcagcggctggctggcctgctggagtcattgaaaaatacggttcccggcccaggagcgggtagcaatactcccgcaggcagtgatttacctgtcgggctggggctggaagatgcagggcaagccgaaacggtggcgcaaggcactgtctggatagaaccgcaggatggtgtgcaactggatcgcaacggtaagccggtgaccggtgcagcagctgcgaccaatggcaccggcacattccagtttccgacagcgtttggtgggctgaatgacaatgagatcacccgtcagaaagctgagcttgatcgtgtcgcgaaaaaccagcaagccattgaggaaaccgatctacctgtttacaccttgccggagaactccacgctggttgggagtcaggctatgaccgcattgctggggcgcgtgccgattgatggcaaagttactgatccctatcccttcaaagtgcttattggtaaagagaacctgaccgccaacggcatcgagctgccggacgttgaaggtgcgattgtgtccggtacggctaccggcgactgggtgttgtcctgcgtgcgcggtgaagttcactccattacgtttgtcttcactgacggcacggtacgcacggtgccgcagtcggcaaaatccagcgatggcagcaacgggaaatccaatggcggcagtattggctggctgtccgatgagcacggtattccctgtctgtccggcgaccgtaaaagcaatgcctcaacttacctccccacgttatttgcgctgtctgctgccggtgcggcctctgatgcgatgtccgaaagccagatcacgactaccaccgaagggtcgtctatcaccagtacgctgaccggcagcgccggacaggctgcgctgggcaaggcgttatcgggcggtacgaacgagctggcggaatgggtgaaagcgcgatacggccagatgtttgatgcgatttacgtccctcccggtgcgaatgttgcggtgcatattacccgccagatcccgattgattacgaagagaagggccgcaaggtcaaatacgattttgatgtcagccagcaacacgagctggattaa

SEQ ID NO: 204393 - DNA, 402 bp, Klebsiella oxytoca
atgaaaggatacggtttattcatgctggtcgcgttgttgctgagcggttgcagtacctccaaagatgaaatgctgccgcccggcgacagtaccatgctggatatgtggcagaacaaagccagcagcgcccggaccacgacagaagcccggagcgtgttacgccgggggctgaacgatgcagatctggtaacccgtcagtcgctggaagagagctatacccgcgatgctcagaatgaaatccagcagcttttcccacgtctgcccaacccggatatggtgatttatatctacccgcatatggcggggaatgagcctgcgccggtgccgggttacagctcggtcttctctttttacagccgggtgcagtatgcgctgccgggtgaacgactggaggcactctga

SEQ ID NO: 204394 - DNA, 393 bp, Klebsiella oxytoca
atgatgcgcttcagatccacggttctggacgttgtggacggtaatatttccaataccggcgtgttgtttgatgcgccgccacagggtaatccgcgaattagccagcaccatcatgcgcaactggcggaattatgccgccagatccgtcagcgggtaggggagaaggcgacatttacttattctcctcatcgcgtggccgggcataactgcctggctgttcaggtggaggggaagttgggtacggttaacttgctgctgactgtaaccggcagtctgcgctggccggtggcggaggattacgagcatggggtgcgctggtatattaatgtgccagatgcggtggatgtgatctttttagtgagagaagttagaaaatgtgtagatatcaactaa

SEQ ID NO: 204395 - DNA, 798 bp, Klebsiella oxytoca; identical to SEQ ID NO: 156060

SEQ ID NO: 204396 - DNA, 429 bp, Klebsiella oxytoca; identical to SEQ ID NO: 156059

SEQ ID NO: 204397 - DNA, 144 bp, Klebsiella oxytoca; identical to SEQ ID NO: 156058

SEQ ID NO: 204398 - DNA, 207 bp, Klebsiella oxytoca; identical to SEQ ID NO: 156057

SEQ ID NO: 204399 - DNA, 252 bp, Klebsiella oxytoca; identical to SEQ ID NO: 156056

SEQ ID NO: 204400 - DNA, 501 bp, Klebsiella oxytoca; identical to SEQ ID NO: 156055

SEQ ID NO: 204401 - DNA, 171 bp, Klebsiella oxytoca; identical to SEQ ID NO: 156054

SEQ ID NO: 204402 - DNA, 909 bp, Klebsiella oxytoca
ttgattaatgtttttggtcatctcaatcctgacagtgatgccatctgtaccgccgctgtcacagctgactggctttcccgacagggccgtccttcccgtgcgtggaggaacggtgaagcgaacccggaaacccgctatatttttgaaacagccggtatccccctgcccccccttctcgatttccccctgaaaagggaacgggtatggctggtcgattttaccgaaccggcgcaggggcctgctgaccttcctgagagtaatatcatcggaattatcgatcatcaccggctgggaggtctggccaccttactgccgccggagatctggataaaaccggcaggtagcagcgcaacagtactctggttgctgatggatgcagaaatgcgccgcaccatgcccccgactctcggcatcctgcttcttggtgcgctgctcagcgacacggtaaacctgcgttcacccaccacgacggaagacgatatccggacagccgctgagcttttcgtgctgtcgggaataaaacgcaaagcttttgttcacggccttctggccgctaaaaccgatatcaccggacagacggccggtcagattctgaataaagatcttaagactttttcgctcgcaggcacagatgtgcgtattgcccaactggaggtgagctcacctgatcaggtcgctcctttactggaggaactgcggaatacgatggcgcagatggtggtaaatacgggagccgggttgatcgtgctgatggtaaccgatatcaataagtgtttttcaacactctatttcgccggaccggagagcggtaatgccacatcatgctccttaccgggcatggtcagccgcaagaaacaacttctgccctggctcgaacatttcctcaggcaaggccggagacagccatga

SEQ ID NO: 204403 - DNA, 426 bp, Klebsiella oxytoca
atgaaaatctatactcacgcacttgttctggttcaggggaaagaggatggcgttccccttctcgcactggcggcggctctgtcccgtctgcttgagatgaaaatcacgcttgcccatatctgtaacgactaccgggagatgaactatgtctcggacagcctgatggacgatgccgtctccagggatgttgtccaggcgaaggcgctgctcagtgagctgacatcctcggtggatgagcacgttgacgcccgtgagctggtcaccatgcggcgtttcgaggatatacagaaatgcatcaccgataccggtgcggatcttgtgattgcaggtcaccgtaaccggtttatgggcacgctgacctcacgttcagctgaatacgttaaccacctgaacgtggatgttctgattaaacacatttacgactga

SEQ ID NO: 204404 - DNA, 990 bp, Klebsiella oxytoca
atgaattttatactggaaaaagtcaccgctcgcgaaatacttgattcccgcggtaaccccactgtagaggtggatgcctggacttctgacgggctgatggctcgtgcatcagtgccctccggggccagtaccggttcgcgggaggcaactgagcgccgcgatggtgacccggggcgttttggtggcaaaggggtgcttgatgctgttaaggccgtcaatactgaaatctgtgatgccatcaggggagccgatgtgcgggagcagcggcggctggataatattatgcgggagcttgacggcacggagaacaaaagccggctcggcgccaatgccattctgggtgtatcgctggcagtagcgagactggctgcacaggtcacccgtcagccactgtaccgctatcttggggggcttaatgccggtcttctgcccgttccgtgcatgaatattattaatggtggcgttcatgcccggggtcagggcgctgactttcaggagttcatgatagcaccgcacggtgcatcaacgctcactgaggcggttcgtcagggcagtgaagtctatcaggccctgcgtcagatccttgtgtcaagggatctctctgctgcggtgggtgatgaaggcggatttgcccctgccgtctcatcaaacagagagcctctggaattcatcgttcaggccattgaaaaagccggttaccgtccgggggaagacatcagtatctgtatggacccggcttccagcgaattttatcgtgacgggaaatatcatcttcgcaccgaaaacagcgccctgagtgctgaagagatgacggattattacggggaactgatgaaccagttccccgtaattctgcttgaagacggactcgcagaggatgactggactggctggaaatatctgcacgacaaactgggcgggcgtgctgaactggtcggggcactgttgcaaatagtcggtggtgataaacttatcatccccttttgctga

SEQ ID NO: 204405 - DNA, 276 bp, Klebsiella oxytoca; identical to SEQ ID NO: 101078

SEQ ID NO: 204406 - DNA, 333 bp, Klebsiella oxytoca; identical to SEQ ID NO: 167605

SEQ ID NO: 204407 - DNA, 864 bp, Klebsiella oxytoca
atgcgcttcattcacgcactattactggcagcgatcgctcactctgcatatgcgtcggaaaaattaaccttcaagaccgatcttgagaagctagagcgcgaaaaagcagctcagatcggtgttgcgatcgtcgatccccaaggagagatcgtcgcgggccaccgaatggcgcagcgttttgcaatgtgctcaacgttcaagtttccgctagccgcgctggtctttgaaagaattgactcaggcaccgagcggggggatcgaaaactttcatatgggccggacatgatcgtcgaatggtctcctgccacggagcggtttctagcatcgggacacatgacggttctcgaggcagcgcaagctgcggtgcagcttagcgacaatggggctactaacctcttactgagagaaattggcggacctgctgcaatgacgcagtattttcgtaaaattggcgactctgtgagtcggctagaccggaaagagccggagatgagcgacaacacacctggcgacctcagagatacaactacgcctattgctatggcacgtactgtggctaaagtcctctatggcggcgcactgacgtccacctcgacccacaccattgagaggtggctgatcggaaaccaaacgggagacgcgacactacgagcgggttttcctaaagattgggttgttggagagaaaactggtacctgcgccaacgggggccggaacgacattggtttttttaaagcccaggagagagattacgctgtagcggtgtatacaacggccccgaaactatcggccgtagaacgtgacgaattagttgcctctgtcggtcaagttattacacaactcatcctgagcacggacaaatag

SEQ ID NO: 204408 - DNA, 864 bp, Klebsiella oxytoca
atgcgcttcattcacgcactattactggcagcgatcgctcactctgcatatgcgtcggaaaaattaaccttcaagaccgatcttgagaagctagagcgcgaaaaagcagctcagatcggtgttgcgatcgtcgatccccaaggagagatcgtcgcgggccaccgaatggcgcagcgttttgcaatgtgctcaacgttcaagtttccgctagccgcgctggtctttgaaagaattgactcaggcaccgagcggggggatcgaaaactttcatatgggccggacatgatcgtcgaatggtctcctgccacggagcggtttctagcatcgggacacatgacggttctcgaggcagcgcaagctgcggtgcagcttagcgacaatggggctactaacctcttactgagagaaattggcggacctgctgcaatgacgcagtattttcgtaaaattggcgactctgtgagtcggctagaccggaaagagccggagatgggcgacaacacacctggcgacctcagagatacaactacgcctattgctatggcacgtactgtggctaaagtcctctatggcggcgcactgacgtccacctcgacccacaccattgagaggtggctgatcggaaaccaaacgggagacgcgacactacgagcgggttttcctaaagattgggttgttggagagaaaactggtacctgcgccaacggggcccggaacgacattggtttttttaaagcccaggagagagattacgctgtagcggtgtatacaacggccccgaaactatcggccgtagaacgtgacgaattagttgcctctgtcggtcaagttattacacaactcatcctgagcacggacaaatag

SEQ ID NO: 204409 - DNA, 555 bp, Klebsiella oxytoca
atggcgtatgagttctgcgaaataggtgaatcaaacgaatatattattctggcggctagaatcttaacgaaatcattcctagatatcggtaataattcctggcctgacatgaaaagtgctactaaagaagttgaagaatgcattgagaagccaaacatatgtcttggaatacatgaaaatgaaaaattgcttggatggattggccttaggcccatgtacaaattaacatgggaattacatcccttggtaataagtactcaatatcagaataaaggtattggaagacttttaataaatgaattagaaaaaaaagcaaagcaaattggaataattggaatagtattgggaactgacgatgaatactttaaaacttcattatcagctgttgatctttacggcgaaaatattcttgatgagataaggactattaaaaacataaaaaatcatccgtacgaattctatcaaaaatgtgggtattccattgtcggagtaatacccgatgcaaatggaaaaaggaagccagatatttggatgtggaagaagataaatgattag

SEQ ID NO: 204410 - DNA, 1470 bp, Klebsiella oxytoca
atggatcagtaccgcaatgatcgcctgccgtatgacgcccagaccaaacgccgggagccattgctgaccttcaagcgtggggcggtggtacatttcgccatgtccgactctgaaatcatgatggcgaccaagctggatggagaaaacacctttttcctgccgttcaataaggggcgcaaggacgaaagtggcacggtacatgcgggtaacccgccaggtgagattaaggccgatggtacccaggaatacccggtagcctacttctgggaggcggtctgccagccggatgcctggctgcggattttccatagctttgtctacgtcgagaaaaaggacgtggtggatattcagggtaactggtcgaagaaagaaaccctgattttcccgcgctttcaccaatggacggcagtgaaccagatgctggccgatgctcgcgaaaatggcgcaggcatgacctacctgtgtgaccacagcgcaggttccggcaagaccagcaccatttcctggacggcccatgacttggtgaaactgcgcgaagataacggcgacgcggtgtttaacagcgtgatcattgtcaccgaccgtaatgtgctggacggccagcttcaggacgcggtgaagcagattgaccatcagtttggtgtgatcgccgccattgaccggcagaagtcatccaagtccaagagcaaacagctctcggatgccttgttgtctggcacgccgattgtggtagtcacgatccagaccttcccctacgcgatggaagccatcatcactgacaaggccctgaaagggaaaaactttgctgtgatcattgatgaggcgcataactcgcagactggctctaccgccgctaagctgcaagccgcgctggggatgagcggacaaggcaagatgtccaccatgacggtggatgaactactggagcaactgcaaaagtcccgcgcccgcccggacaatatcagctacttcgcctttaccggcacgcccaagcactccactttgatgctgtttggtcgcccgacagatccaagccaaccgatctcggacgataacccgccgcaagccttccatctgtacaccatgcgccaggccattgaggagaaattcattctcgatgtgttgaacggctatgtgccctacaaaacggccttcaacctttccaagcagcttgaagacagcaagcgggtaagcggcaaggccgccaaacgcgccctggcacagtggatgtcattgcatcccaccaatgtgacccagaaggtacagtttatcgttgagcacttcaccaaaaacgtcgcccaccggctggatggcaaggccaaggcgatggtcgtgaccagctcccgtgccgctgccattcgctacaaaaaggcgtttgaccgctatatcgagcagcacagcgagtacggctttattcattcactggtggccttctccggcaagatgaccggtaagcaggtgatgcactag

SEQ ID NO: 204411 - DNA, 882 bp, Klebsiella oxytoca
gtgtttatcgtcgatgagaacgaggaattcaccgagcagagcatgaacccggatgtccacgggcaggatttgagctttgcctttgaccgcccggaataccgggtgatgttggtggccgacaagttccagactggctttgaccagcccaaactggtcgccatgtacgtggacaagaaaatcgccaaccatgtggagattgtgcagaccttcgcccgcctgaaccggacggcacccgggaaggatgaagtctttatcatcgacttcgtgaacgatccagagaacgtgcgcaaggcctttgccacctatgacaagggcgctcacatcggcgaagtgcaagacctcaatgtggtctacgagatcaaggagcgactggacgagcacggcctgtacgacgagaaggacttggccgcgttcaaagaagcccgcttcaaaaccatacgtgacatcacccatactaaatcgccacagcacaaggcgctgtatgccgctacagctggagcgacggccttgtataacgacaagatgaaaatgttgcgcggtggcatggcaacctgggaagcagcgtttgagaaggcccgcgccaagggtgatgaggcgggcatgaagtctgccgatcaccaccaggatgagtatgccgagcaaatcaaggcgctgatgggcttcaagtcggacctggggcgcttctgccgtacctattcctatatcgcccaactgattgattttggcgacccggagttggagaactttgccgctttcgccaagctgctgcaaaagcgccttcagcacgaagcaccggaaaccgtggacttgacaggcctggtgcttactggctttgacatcaatgctcgacccgatgacgtagaagacgaagggctttgttga

SEQ ID NO: 204412 - DNA, 516 bp, Klebsiella oxytoca
gtgttcacccttgagtcaactgataacgacattaacgccaacattggcggctacaccgatggcggcgaaagcggcgctatctctgttctgaataaccgctacaacggcagaaacccgaagcataccatcagcaactttagccgttcacagagtcgctttgtgcctgtcggccgcatgagtttcacttccagctataccgcagcagccggagcgacaatcagcgtcccgctggtattctacaagccaaatgcgacgagcaatatcgatgtgctgggcggtcaggtggaaattcagatttgttctaacccttcactgctgaccatcgggacggtgagcagtgcattgcgtacagccggaatagagctgagcaatggggcaacaactaacggcaaaatcctggcaatggcagcgttcggtacgctctcgtacaacttcacactgacaacggcagggacagtttaccttaacatccgttcgccatacggcgacggcgtcattcagttaacctggacataa

SEQ ID NO: 204413 - DNA, 534 bp, Klebsiella oxytoca; identical to SEQ ID NO: 22864

SEQ ID NO: 204414 - DNA, 255 bp, Klebsiella oxytoca
atgagtatgcaaaacacaaaagaagattcgtatttaagtcgcaacattaaatggttgagcccgcttgttattctctctttttgcctgttaagctcacaggttgccgagattataggcgaaagcaatgtaatcccagagtatattttaaaaatcattgcggcaatagctcttttcatctgtgcatttaacgcaagaatgacgccaaccatttccgccagaatctttatcatcacgatctatacccgtgatcattga

SEQ ID NO: 204415 - DNA, 630 bp, Klebsiella oxytoca; identical to SEQ ID NO: 18390

SEQ ID NO: 204416 - DNA, 1164 bp, Klebsiella oxytoca; identical to SEQ ID NO: 127067

SEQ ID NO: 204417 - DNA, 534 bp, Klebsiella oxytoca
atggaaaaacggctgcgctggtactggcgtaacccttccgatctttgcccgtggcacatggatgaaacctacgtgaaggtcaatggccgctgggcgtatctgtaccgggccgtcgacagccggggccgcactgtcgatttttatctctcctcccgtcgtaacagcaaagctgcataccggtttctgggtaaaaccctcaacaacgtgaagaagtggcagatcccgcgattcatcaacacggataaagcgcccgcctatggtcgcgcgcttgctctgctcaaacgcgaaggccggtgcccgtctgacgttgaacaccgacagattaagtaccggaacaacgtgattgaatgcgatcatggcaaactgaaacggataatcggcgccacgctgggatttaaatccatgaagacggcttacgccaccatcaaaggtattgaggtgatgcgtgcactacgcaaaggccaggcctcagcattttattatggtgatcccctgggcgaaatgcgcctggtaagcagagtttttgaaatgtaa

SEQ ID NO: 204418 - DNA, 183 bp, Klebsiella oxytoca; identical to SEQ ID NO: 145261

SEQ ID NO: 204419 - DNA, 141 bp, Klebsiella oxytoca
atgagccatcaactcaccttcgccgatagtgaattcagcactaagcgccgtcagacccgaaaagagattttcctctcccgcatggagcagattctgccatggcagaatatgaccgctgtcatcgggcactgttgcaaatag

SEQ ID NO: 204420 - DNA, 183 bp, Klebsiella oxytoca; identical to SEQ ID NO: 145261

SEQ ID NO: 204421 - DNA, 276 bp, Klebsiella oxytoca; identical to SEQ ID NO: 36734

SEQ ID NO: 204422 - DNA, 207 bp, Klebsiella oxytoca
atgatgtccctctgggatgcgctccggatgaatatgatgatctcatatcaggaacttgttcgcaccttccctgagctttcgtttatcgaccgtcgcacctttgtgctctcagccatcggcaattgccacgggcaggtcgtcgactcgccggataaccagcgagccggtcgttcgtcagacggaggtggtcaaggttgtgacctgtag

SEQ ID NO: 204423 - DNA, 141 bp, Klebsiella oxytoca; identical to SEQ ID NO: 36145

SEQ ID NO: 204424 - DNA, 165 bp, Klebsiella oxytoca
atgataatagaaccgaatatatcaaagactcgcttgaggatccttgaagaccactttgctaaattttgttgcactctaaaaatcattacttcatggctgaagataaatgacatatctgtgctatctaagggcataccgcgtaatgttgggattacagatacataa

SEQ ID NO: 204425 - DNA, 534 bp, Klebsiella oxytoca; identical to SEQ ID NO: 22864

SEQ ID NO: 204426 - DNA, 270 bp, Klebsiella oxytoca
atgaggggcactcagtcgcgagatgcagagattttgtaccgtaaaacccaacaatactttgatcgtatcccgctaggtgaattgtcggaacaggaatcagtcgttttagaggctttgatgctggatggcggtattgtctgcgagtcctttcgtgatgagatcgttctatcattacaacaagaataccttacatctgctacgcgcgaagaaaaagatgctgccattcaggctttgatatcagttatggcagaagatatttccgacagataa

SEQ ID NO: 204427 - DNA, 876 bp, Klebsiella oxytoca
atgtcatttgaattttctccgagcccgcaggccatctggctttaccagtatgacgccgatggtgtttatattggttccgtgtttatgaccattccggcgggtacaggtctacccgccagcaccacacatattccctgcacaccggaaaaaggtcagacaggaatatttaaaaatggtgaatgggtatatgtggatgatattcgcgggacgcgctactgggatatttacggctcgggatttgttatttccgcgctgagtgattctctgcctgactgggccattacgattgagccgccagtcgcggatgccggttgcgttctgctgttcactgatggtcggtggatgcaggttgaagataagaccgggcagctttactacgagagcgacggcacgaaacataccgtctctgacgcatggttcacgttgccggaaggctgcacgttcgtagccccgccagaagacaaaacgacgttcgtcacgcgctggaacgggactgagtgggtatatatcaaagacctgcgcggtcaggttgtctggaataccaccacgcgtgaatctttaactattacggatattggccccgttcctgatggctatacccttaaaatgccgggccagtttgatgaatgggatggttctgcatgggtgaaaaatgaagatgccgagcaggcttacactatcgctcaggctgaccgtcagaaggctaagctgctgtctgctgcatccgagcaggtctcacttctcagctacgccgtcagcagcggtcaggccaccgacgatgaaaccgcgcagcttgccaggtgggaagagtaccgtctctctgtgagtcgtgtggataccacagcaaccgatattgtctggcctgagaagccgtaa

SEQ ID NO: 204428 - DNA, 810 bp, Klebsiella oxytoca
atgtatcacctggataatgcctcctccgttcctgatatgcccgccatcaagccggtattatttaccgagcgccgctggtttactgaaggcggcgacggtattcagccgagttatccgggcgcggactggtttaatgccattcaggcggaaatgctgaacgtgctggcgctggccaatatcacgccggataaaacacagctggatcagtttgctcaggctatccgtattttctcctcggactatatgataccgccgggtattcctctggcatggccgggggcgaccgcgccgaccgggtttatgctgatgctgggtcagagcttcgataaagtcgcgtatccacgccttgccgtggcgtatccctccggcgttctgccggacatgcgcggccagaccatcaagtttttgcctgcctccgggcgtgcgctgctgtcttatgaggccgacggcgtaaaggctcataaccataccggtagcgttgcctcaacggacctcggcaccgtatcaaccagtaacttcgatcatggcacaaaatcaaccagcctggataacgagcattaccatcagggcggtgatggcgcaccgggcgatacatggcttgaaacaactcatggtactgataaccagaaatacacaaccctgaattataccagcacggctccggctcatagccatctcgtggatattggtattcatggccataccgtctacatcggtgcacacgctcacacagtgaccattaacagcacaggtaataccgaaaacaccgtcaaaaatatcgcctttaacgccatcgtgaggttagcgtaa

SEQ ID NO: 204429 - DNA, 1809 bp, Klebsiella oxytoca
atgtcaaaccgcctcaccactgaaatactcatcaatctggcaggtaacctgaccgcgaaggcccgccagtatggagccaacatgtctgaatttgcccgccgtaatgagcgggcaatgaacgtggttaaagctactacggcggcggctggccgtggtcttgatgcattgggtaaccgctacaccaccctgattgccggttttgccggcagcgccatgttgagagactttgccgcgacagaccgccgcatcacccgtatggggctggctgcagagaagaccaaaaaagagatgtccgagatgttcagcggtatgcaggatgccgcgatcaaattccgtgtcgatgacagcgaagtggtcagcgccattgagaaagtcgggaccgtcactggtgatatcgattacggctttaagaaccgtaacattatggccgcttcgctggcagcttctggttccgaaggtgaaagcattggtggcctcttttctcagtttacgaagttcaacctgaccgacgaaaagcagacactgcaggcaatggataccctgaatcagctcggtaaagaaggcgcatttgagctgaaggatatcgccgaacgcggcgtaaaagcgttctcaatgtatgccgctgccgggggaacgggcgtcagaggtgtgaaggacgtcggcgttgcgctggagagtgcggtcgatgccaccggcgatacgacgacagcctccactgcagttgaaaaccttattcgagatttgcaaatcccaaaagttgtcaaaacactgcgccagaacggtatcaatgtttttggtaaagacggggcaatgcgatctctccccacgctgatgcaggagattgccaaaaaatccggtaacaaaggtgcggagaaacagaacgcccgcttactgggtgccggtttcaatcaggacagtatcctgttgctgagtagtgtgacgtccggtaaaggcgcggagaaccttaaacgttataacggggttgtagctgacggtcagggcattatgaacgatgccgcttatgctgctaaagacttcacctcggccatgtcatctctgaacaacacctggaaaaaatttgcgaacagcaatcttgcggagcccgtgcaggagctggccgacgccatcaactcggtagaccagaagaccgtccagaactggctggaaaccggtaagaatattgccatcgcggtcgggggcgttatcgccgcccgcaaggcgtttcagcttggtaaaggcgcgtgggagctgttcggcggtggcaaatccaaaggtatccctaaaggtgtctctgacgtgtttggttcaggtgtgatgcccgtctacgtcgttaatatgggtaatggaggcatgggtggcccagatattggtggtcccgacggtgggagaaagcccggacgcggcggttcgggacgcgcctactcagctctagggtcatcatggatggttggtccattagccgccacaatcccttttctgtcagagcctccccctctgactgatgatgataaggctagcatggtcaaatgggcgcaagaccgcgctaaaggcccgtctgtttggacaaaggtaaaagactggctgacttctccgaccacctccctagctggttatcaggatccgtcgccgtgggcgtcgatgcagccacaaaaccagcctggctatccgttcctgcagcaacctgagctgaagggcagcatcgaggtttctgttaaagatgatcgggttcaggttaccagcgttaaagtcaatgcccccggtgtcactatgagtgcgtccagcggtgttcgtaatatggagcagcagtaa

SEQ ID NO: 204430 - DNA, 384 bp, Klebsiella oxytoca
atggctgagttaaccgtaaccctgaaacatggctttatcaccggcaaaggcaccgaagatgaagcccgtcattccgtcgtcaccttccgggagctgaattcgaaagacgttatcgatgcgcaacttgaagcagaacgtgtggtgattggtgacaacggtaaggcggttgcctattgctccgaagtgctgatgggactggcgctgttgcgtaaacagattttaagcgttggtgatatccccggcccgttgtcgcttaaacagctttacagcttccacccggaagaccttgaattcctgtccagcaaagccagcgcgatggacgacttactcgcggagacagcaaaccgggggcgaactgacgccgctggcgacggcgttcagtaa

SEQ ID NO: 204431 - DNA, 516 bp, Klebsiella oxytoca
atgaaacttattggtaatatatgttttgcagtattcgttatttgggctgcatcatttttctttaattctgaagctaaagatttgccgtctaatgaggctttaatctcacagtttgaaaaacagaatatcttaaatggaaacgaatggaagaaagggagcattgtcgaaggtgttcaagtttattccgctcgcacggcaggtaattcaattaaaagttcatggttactaggagttaaacaagtaggagtaatatcagtatcctcaaaaacagatccagccttatcgaaaaaagatgcgctatccacatgtcataagctagttcagggagtcatggcaagagacgttcgtgacgattatgatattgtcgcacgtgtcttcaagtatgcgctggattcggaaccagttgacaatacaaagcgtgatgcagagataattgacggatataaatttgaggttcaaatggggccaatagcttccaacttgtatagttacgcctgtacaatgaaaccaaaataa

SEQ ID NO: 204432 - DNA, 465 bp, Klebsiella oxytoca
atgactgatatcaccaaactggcgcagatcctgaaagcggcagcagagaaagccactcaggggcgctgggaatattacccgggaaatacgagcattgaatataacgttgactcgatggatgaagaccagggttcaatcgtttatgtcgatagtggcgacttcacgcaggctcaaacagaccgtaatggggagttcatcgccctggctaaccctgccaacatcctcgcactggtagaggcgctggagaaggcgcaagggatggaaacctactggaaaactcaatgccgtgggataacggaccattgcgaggagttgcaagcgcgcatcgcagagctggagtcccgcaccgtgaagatgccagagccattcaagttggctaaatcatcgagcggattaacttactacttcgccgacgatgtcgatgctgcgctcaccgccgctggcatcaaggttgagggggagtag

SEQ ID NO: 204433 - DNA, 4944 bp, Klebsiella oxytoca
atggcgctggtcggtattaataacgaaaacgaattttactccaaccattatctgggcgaagtctttaccagcgacatccgcgatgttctggagccctggattgagcaggaaaatgccgctcgcgaagctgaacgcgctgcccgtgaacagggcaatgaggttgaggcaggctaccgcgcgccgtggaaccagcttaacagcctagcgacagagtttttccgcaaactcactgatcatgaaaaacagcgccagatcccgcagcgtcttgccgatcaacgcactcgctggcagccgctattaaaggcattgggttatgaactcaatccgcatattcagatgctggatgacgatacgcctttgccggtactggctcgttacaacagcaccgacggcagtccgtggctgtggattgtcgaagcacatgaccaggaagaaggaacgctggatccgctggcgctgtcgctgctgaccgcgcagttcccggcagataccgataaacataagcgcgacagtctgcgtaaaaaagcgaacggcgaataccgcagctggcaggatctgctctccacggtggtcttcacgcaaaatgaaccgccgcgttttgtactgctgcttggcaatcgccagctgttattgctggatcgtactaagtgggcgcaaaaccgtctgctgcgttttgattttgaagaaattttaagccgtcgtgaaacggatacgttgaaagcgacgtcggtgttgttacacaaagactcgctgttacccggcagcggtgcgccatatctcgattcgctggatgacaattcgcacaaacatgcgtttggcgtgtcggaagatctgaaatatgccctgcgtgagagcattgagctgttgggtaatgaagcgatgcgttatctcatcgacaacgagctggcttattataccgggaaacgtgctattaacccggatgagttgagccgcgaatgcctgcggtatatgtatcgtctgttgttcctgttctatatcgaagcgcgcccggaattgggctatgcgccgatgaccgccaaaacctatctacagggctacagcctggaaacgctgcgcgatctggagatgatcccgctgaccagcgaagaagatcgcaatgggcgctacttccacgatagcctgaatatgctgttcaaactggtgcgtgacggctacagcggcggcgtgaaaatgcagagcgacctggagagcggcgaccggatcactattcacagccatcagttcagcgtgccgcgtctggaaagtcatctttttgaagcgaataacacccgtattcttaaccgtgtggtgttccgcaacgaaaccctacaacaaattattcaggcgatgtcgttaagccgcccgggtaaagggcgttttaaccgccggggtcgtatctcctatcgccagctgggtatcaaccagttaggtgcggtgtatgaagcgctgctctcttaccgagggttctttgccagtgatgacctctacgaggtcaaaaaagccggagaagagtttaacgagctggagacaggctacttcgtcagcaaagacgagatcggcaaataccacgacgacgagaaggtttacgaaaaagacggcagcctgcgtattcaccgtaaaggcagctttatctatcggatggccgggcgtgaccgcgaaaaatccgcctcttactacaccccggaagtgttgacccgctcgttagtcaaatatgccctgaaagagctgtttaaagagcaaattgatccgattaccgatccgaacgccaaagccgacgccatattaaacttcaccgtgtgcgaaccggcgatgggcagcgcggcgttccttaacgaagccatcaaccagctggcggaagcttacctgttccacaaacagcaggcggaaggtcgccgcattcctcaggatcgctacacccaggagctgcaaagggtgaagatgtacattgccgacaacaacgtattcggcgtggacttaaacccggtggcggtggagctggcggaagtgtcgctgtggctgaatgccattagcggcgatgcatttgtaccgtggtttggctaccagctgcactgtggcaactcgttggtgggcgcacgccgtcaggtgttcaacaaaagcgagctgacctacaaaaaagcgaaagatccgagctggcttaacagtgaaccggccgagctggcgatgaatattccacgcgaagagaagcagattttccacttcctgctgccggatagcggtatggccaactacagcgacaaaaccgtcaaacagcgctatccagatgatttcaaagcgctggacagctggcgcaaagagtttaccaaaagccttgcaccgcatgagattgccgatgtgcagcgcatcagcggcaaagtggaagcgctctggaacacgttccgtcagcagctgaaagctgagcgccagaaaaccgccgacaattatccggtttggcctgcggaaaatacgaaccaagcccgctcttctttaagcagcaaagatgaaaccttcagcggccgcctcgaagataacagtacctatctgaaactgcgctgggtgatggactactggtgtgcgctgtggttctggccgatcgacaaagcagatgaactgcccgatcgcggtatgtggctgatggagatggagactctgctcgatggtattgtcgtcacggaaagagtcactgaagccgcagagcaggccaccggcgatctgtttgccgacgagggcatggtgcgtgaagagtcttcgctgttttccggtgctggtcgcctgaaaaccgatgtgctgttccgccatttgccgcgtctggcgattgttgatgcgctgaagaaacagcaccgtttcttccattgggatctggaattctgcgatctgtttgccgaacgcggcggctttgacctgatgctcggaaatcccccgtggctgaaggtcgaatggcaggaagcgggcgtgctgggcgattacgagccggagtttgtgctgcgtaagctgagcgcctcgaagctggcaacgttgcgtgttgatacctttaatcagattccggcgctggaagcggcctggcgcagcgagtatgaaggctgtgaagggatgcaaaacttcctgaatgcgcagcagaactacgctgttttagcaggtcaaaaagcgaatctgtataaatgtttccttcctcaggcgtggcgtctgggggcggaaaaaggcgtggtggggttcttgcatcctgaaggaatttatgatgagccgaatggaggatatttcagagaacaaatttatcctagattgcgcctacattgccagtatcaaaatgagttttccctttttgtcggaacaaatgaccatggacgtatgaaatttggtactcatatttacgctgtcaaaaaaaataagacaattgaatttattagtatccataatctttttacgccgtcaacattagacgactgtttcaaccactctggccaaggaattgtcggagggattaaggaagaaggatatataaaaggaacttactttagccgatggaacactaatgggcatagtgacagattgattcatacccgaatcgaacatcttgcattatttgcacacttgtatgatgaggttggcactcctgctttacaggctcgacttcctgctttacatgcgacccagcttgtaactgttctcgaaaaattttctaatcagccgaagagattaggtgatttgagtaaacattattactctacgcaattgtggaatgaggtcaatgctcaaaatgatggaacgatgagtagagagactcaatttcctgaaacttcatcagaattgattctgtcgggaccacacttctttgttggcaatcccttaaataagacaccaagggctatttgtgaagctaatagccattatgattgcctggatctattaaccctcccagatgactatctgccgcgaacaaactacattccggcatgtgacattcaagaatatgctaaacgtaccccacgtgttacgtggactgaactgggtgaagatgagccgagaaaggtgacagattattatcgttttgttaatcgcgaaatgatagggccatcttcggagagaacgttgatttcaacaattgttccaccgggagtaagccacattaatacttgcctgggttcagcatttagcaatactcaaatattgcttgattatttttcaatgacgctttccctaccgttggattatcgggttaaaagtactggtatgggacatgctaatacctcccttattaaccaactgccagtacttacaaatgatgcttaccgtacagcgctacatagccgggctctatgccttgtatcgcttgtgagcagttatgccgacctctggcaatcctgctatacccaagaattcaacgtccagcactggagccgcaatcttccgcagttacctcaggatttcttcgctaatttgaccccagaatggcagcgtaactgtgctttgcgttctgattacagccgccgccaagcgctggtggaaattgacgttttggtggcgcaggcgctggaattaaccctcgaagaactgctcaccatctatcgcgttcagtttccggtaatgcgacaaaacgaagccgatacctggtacgatcaaaatggccgcatcatctttaccccaagtaaagggctggtgggcgttggcctgccgcgtaccgcgcgtaaagccgacctgaaaaacggttttgtctttgatgtcgatagccctgaatggaccggcggcgactgtaccgatcaagctatcggctgggatgatgtcaagcatctgcaaaccggcactgtcagcgtcacttttgatgactatacccgcagcgatgaaggcgagcgccgaaccgtcacctggcaggcaccgtttatcaaacctgaccgtgaagacgactataaagtcacctggtcattctttgcacaagataaggagagcgcctga

SEQ ID NO: 204434 - DNA, 6525 bp, Klebsiella oxytoca
gtggctaagaaagccgccgatgaccttctggcacagaagaacgccgtcgacgcgcagatccagacggtaaataccacgattcagaacgtcaacgattcgttagcgctgcaaatcgcgtctatcagcgcgggatctggcgaacaattcgacttcacctcaatctcgtacttcgataaagactctgaaggatgggccgaggatgatagctggaaattaccgctgccgattacctccgatggctggctgattccggcagggccaaccggcacaatgcgcagcccgaacgccaccaaaatcgacgccacagcgtataaatacattcgctttcgcgtccgcaaaatcggctcgccgtcgtggaatcttcgcctgtggtggaccggccagactgaacaaggatgggtcgacgctcgccgaatcaccgtacctgaaccacaattcgacccggccacagggatcgccgtggtgtctatcgcggatatcccctgggccgcatcggcagacatccgtcgtgtacgcctggacttcaatacggcgggcctgtccacggctaaccacttcgagatcgactggttcgccgtaggccgtccgactccgggggcgtcacaggctcagattcaggaactacgccaggcaatgaccgatgccgacagcgccgaggctaccacccgcaaccagttagcggtccagcttcgcggcacgcagactggcaccaaccctgacctgctgaccagtggattgattttcgaagagcgcaagatccgtgtcactgcggagaaagcgattggatcgaaggtcgacacgttgcgcgtggattacgataaatccacggcagctgcaacatcccgcatggataccatcgcgagcgatctcgaagcgaccagccagaagacagaccaggtaacagcggcccttgccacggcaaacagcacgatcacggcacaaggccaggcgattaccagtattcaggccaaaaataccgcgcaggacgggcagatcaccagcaactcgcaaaacatcgcaggcgtctcttcgcgtctcgataatatgcgcgttggtgggtctaacctgctgccgaattcgggtgagcttaccggatacaacaatgtcagtaagaccgagcgctttaaaggtaacgcgtgcatttcgctgattacggctgcgaatgcttccggatacgcgcagagtgagatagttcttgccggacctgtggacgggaccgaatacgtctattcgttctatgcgaaagcgactgaagcggtgcaaattaacgcctatttttatcagccaaacacgacaggatcatgggaaacgagccagggtaaaaaaggggctggaagtgatggaaacgcggcctttgatctcactactgaatgggtgcgttattgggttaggtggaaacagactgcaggggtcggcacaaagcgcctaatctttggacgtctgcatccggcggccacagcgcgcactgtactgattagttcgccacagcttgaactcggcaacgtcccgaccgactggaaagaagcaccgcaggataacgccagcgcggatgccgtcaccgggctgacgactcgggtcaccgccgccgaaggtaagatcgagacgacagccaaccagactacaaatctcgttaaccgcctgaataccggcaacctgctactaaacggtgacgccacagccagtgtgacttcgtggaccctgtccgggaccggcgacggtgcaccagtctacgacgctactcaaaaagccatgaccaccgataagccagcgtttcgcgtggcaaacggcacgaagatcccggttgaggcgggccagacgcttatgctgtcattcgacgtcaaagtgtcggacgcctcaatcaataccggctctcagatattctggataggcgtgatcaagacatggagcgacgcgacgacctggacagtaaataatagcgagtggcgcaccggcgtttcgacggcatggcagaccagaacgatcacccttaagatcccaaacgatttcaccggacagtgggtctatctgcgcctggcgtgcggcggctggactccggcggcggcccgcttctatttccgcaacttcatgctgtcagcgtctaatgggatcgccgggatggcgtcggcgcaagccgttacggatctatcatcacgcgtaacgaagacggagaaggatatcaccacacaagccgggcaaatcaccagcctgggcgggcgcatcgattcgactaacgcagaagtcgcgaagaaggcgaccacggcagccgttgacgcgctgaaggccacggtaacgcagcagggcaaagatattaccgcgcaggccgagcgaaccactaacctgtctaacaccgtcaatgcgaacaagaaagacgcggatgacaaaaacaccgcgcagggccaggctatcactggtctgacccagcgtgttactgctgccgaagggtctctgtctacgcagtcaagacagatcaccagtctggacggcaagatcgacaacgtaaaaaccgacctcggcaaaactatcgccacgaaagcggatggatccacggtcaccgcgctgtcacagaccgttacgcaacagggcaaagaccttaagacgaccagcgacgccgtcacatcgctgaaaggccgcgtgagcacagtagaaggtgaagtggctaaggcggctaccattgaggcactgaatcagctaaccacccgcgtgtcgaccgccgagggcaagctgaccacgacaggccagcagatcactggcatcaacgccagcctgaacgctgcaacggcgtccggtggggactacatccctaacccgacctttgacccggcctatagcagcttcggctttacgcgtcgcgataccgtcgacgatgcgaccgacgactcaatcccttatgatgcggacatcccggcgggatgccctaaccgctatgtcgtccgcctggatcgccgtgaccacttcgccaacctcgcggcgatccccgttaaaccgggccaggtctttgagatgtccgtatgggttgcagcgcgcgcagacgcgacggcaccgtttaacctgtatatcgccagcacaacgacgcccacaggcggcggtacggcgcgcaattcaaacggtaacgtggccccgacacagacctggagacaggttgtctggcgctggacggtcccggccagctggacttacggatatctgcgcccgttcctgcagattaaccaaagcagcccgtttaagtctgtctggtacgctaccgactggcatctgcgggaagtcacggccgcgcaagaagccaaagcagccgcagatgccgctgccggtagtgtgtcgagcctgtccggtaccgtcgagcagcaaggcaataatatcaaggcgaacagcgacgcaattaccgccgtcaccggccgcgtgactaacgtcgaaaaagggaatacggcgaacagtcaggcaatcacgaagcttgagcagaccacaacgcagcagggcaaagacatcgaaacgaccagccaggcgctaaccagcgtcgcgggatgggtcgagtctctacgcgacgctggcgctaatctcgtcccaaactacgattttcgccaggggtctgtcgcgtggaccactcaggaaggcgggcagattaaattcggtgattatggagagggtaaagcgggcgtccgcataaagtgggcttccggtaactactccgggatcttcccaaacgggcagcacaaatttcaggtcgatggcgggaataagaaataccgcattgttgtcaaagcgaagaaagtttccggggcaggtaacctgatggtcagacgctgggcgcaccgcccggatggcaccagcggctacgagcagcagacgctacagttcgccacggcgttcgacgtcaagacatacgacttcaacgcttgcccggacggcaccgtggcggtcaccttcgggatctactgcttcccggacgccgccgaggtggatatcgattacgtggcgatctacgacatcaccgatgccatcctaatcgcggccaacaccagcgcgacgcagcagcttacgcagcgtgtgacgaagacagagcaggacatcatcgcgaacgcagcagctaccaccgcagtatcctctaacctcacggctgcgctggcggacatcgataataagatggccggtaatcttgtcgcgaatggtggcttcgagcgaggcctggactcctggacgcaaggctcaaccaccgttgccactgttatcgacgcgcagtcgccgcactcaggcggtcgtatcctgaagctgtccgcacacaactccgcgcaggacaccattgcgcagaagtatgacatcccgatccagaaaggccgcacgtataagctgggcgggtggattcgtgccgatggcaatgccgagatgccatcgacggcgcagggcaataacaaaatacgcatgggtatcaccggccagaccaacccggttattgaagtccagtttgacccgaaaaactaccagaccggatcgcagtggacagagattagtaagacctggaaagcgacggccaccacgttcgcccaggtcagcttcatggcgttactgtccaaaggtaacctctatgttgatgatctctatctgctggacgtcaccgaagcggtagacatcgcggcaaatgctgccggcatctctactattcagaccacggtcaagaaccagggcgaccttatcagcgcccaggctgacgcggtgacacaggttaaagcggacctcgggaccgtgtcgcagaagtctctgaacccgttcattgacggctcgtttgaatcgtatgcagataaccagcggatcgcaggagcgcagttcatcgcgacgacgcaggcaaagcgcgatggcagcaagtccggtaaggtgacccgtaacagcggtgaaaccgggaacagcgacaagacaaccggtacctggttagctattcgtagcggcggtaaatatcgtttcagcgcatgggtgatgatgcaggggactgaatccccgccgtcgggctggtctatggcgataggtatgatgacacgcggcgagggtggttccggtaactcctggccagcagggattgtggtaaacgacaccgcaacttccctggggggtaaacgtgatcaatgggtcgaggtgaccggcgtcgcaactatctccggcacccacgcacagggcgttttgtgggtctcgtgccgtggtacgtcaggcggtgccgggtattcgctattcattgacggtctgaccatcgtcgatgtgaccgatgcgcaggatgcgaaagcggacgcaaaagccgctgccgatgccacaacagccctctctgccaccgtgaagcagcagggtgatgatatcaaggcacaggccgggcaaacctccagcctggtctcacgtgtaggcgatgctgagtcgcgtattacaaagcaggacgaaacgatcgccgcaaacggcctggcgatgtcgaacggctttaaccagatgcgcagcatgattggtgacaacagcgctgcaattacaacgacgagcaaaaccgttgctgacctggaaaaatcaaccactgagcagatcaccacgctgacctctcaggtcggggatatgtcagcgaccattcagcagacggcatcaaccgtggcggatttgaacggaaaactgggtgcgcaatggggcgtgaaggtcaacacatcttccggcggcaagaactacgttgcggggattcagctggggatcaacggcagcgggcaatcacagttcctggtgcaggctgaccagttcggtgtttatgtgcccaacggtgataaaagcaatctggtcttcggtgtcgacggtaacggcgcatatatgcagcaggcgatggcccgaaatcttgtcatcgactttgcgcagattagtaataatatccagtcgacaaactggaacggcgacacagtcgggtgggcgatcaacaaggccggatcagcggtgtttaataacgtgaccatacgcggacgtgtcgaagcatccagcgggagctttacgggtaccgtgcgtgcgactgacggctattttaacggcaccgtttacgccaacaaaattgaaggcgatgtgatgattggcgaggtagcaacattgccattcgttgagaaagatatgttgggttccggacagtatgatctgttttacatcagcggggagaccttcgaccgtttcctggacaccaacctgatctgtcagatgtcatcatcgttcaggtcctatggtgacattgttgtgagtacccctggccgtgaagattacattcactattcatgggacgccgggaacgatggtgggtcacgtgcaattccgctgaaagggttgaaaatctacgccgcaggtaaaggtcagcgtaaccgtgtatggatcaactgtaagaatgggcgtgggttcagctataggacatataccccattggcacaggtatggaatggcacggtgtttgacccatcctcggcagccaggacaagccagcgcgaaaagttaatttttaccattttccgcatgggcaatcagattatttccgcaccttaa

SEQ ID NO: 204435 - DNA, 309 bp, Klebsiella oxytoca
atgcaaaatatcaagattgaatatgttaatggcgcgctggtggcgcttgagcgtgacggtgtgtcttacgcgcatctgcctgtgtcagctatccatttcgaccataccgctaagatattcccgcacctcaagattgagattgaagctggtggtgcaccattcgtaccggcagcgccagaacagccaccagctgtcgtggaagaagtgcagacagcaaaagaaggggagctattgccgccggatgatgccgcgccacggccagcgcgccgccctcgtaatcgcaaccgcaaccgtaacaggagcctgtaa

SEQ ID NO: 204436 - DNA, 240 bp, Klebsiella oxytoca
atggacgatttccgattgaagattgctttaactgatctggtttattctattactgttcatagttttgttattttctgggccggtgttggaatgttgttactgggagttgtaggacttgagttaactagtacagcttcgaatatattgactgagataagtggctacatgatgttttcagcgatttcgatggaagtgattaaggctgtttttaataaaatagtatggaagtcattcatctga

SEQ ID NO: 204437 - DNA, 507 bp, Klebsiella oxytoca
gtgaatgcaacttacttaaagccagctatcgccgcggtgattattgctggtgcctttgttgctggtttagcctggagcgatcgggcatgggaaaagcggtgggcagaacgtgatagtgccgaatcggctcagaaagttaacgcgcaaaccgccgccaggatgattgaacaggggcgcttgatcgcccgcgatgaggccgtacaagatgctcaagctcaaatcgctgcagcgcgtgctgatgccgctaatctctctggcactgttaaccagctgcgccagcaggcaaaagcctttgccacccgcctggacgccgcaaagcacaccacaagtcttgccgctaccgtcagaagcaaatcaaccggcgccaccgccggaatgcttgccgacatgcttggagaccttgcagaagaggctcgacggtatgctgcaatcgctgacgaacgctacaccgcaggaatgacctgcgagcggatttacgaatcggtgagagtggaaaataaacaataa

SEQ ID NO: 204438 - DNA, 234 bp, Klebsiella oxytoca
atgaaggttgaattaaccattgatcgcattaaagaacttcctaggggcgcggtcccggcactggaaaaagaattatttaaacgactccagaatcagttcgatggatgcagtttggttatacgccgcgcaggcttggaacggctaagtgtttacggtggcgaaaaggaagataaaaagaaggctgaggaaatcctcaagcagacctgggaaagcgcagacgactggttttattga

SEQ ID NO: 204439 - DNA, 1404 bp, Klebsiella oxytoca
ttgaacaacaaaccagttaatgcctcgccagcgaaaaagttttttgtggatatgctgactcgagatatagaacttacagatgcaatacttgatcttgttgataactgtcttgacggcgcaatgagatcaatatcaaccaatcccgataaaaaatataacgggttctacacaaacttgataatggacaaggataaattcattatcgaggataactgtggtggtatatctgctgaacgtgcggaaaaggaggcattccgattaggtaacacaaattttggtaaagaacgaacagtaccaaccataggtgtatatggtattggtatgaaaagggcaatgtttaaaatgggctctcactccattgtttcgacaaaaacagacgaagatgaatatgaagtggagattcgcccagactggttaatcgatgatagtgattggtacttgccattaacacataaagccaccggattaaatcataatggcactagaattgaaataacccagataagagatggtatatccaagctattaggagataaaattgttttccaatcagatctaatgaatgtaatatccaatcatttcgcaatagttataaataaaggttttaaaattagtttaaacggcgaagagattaaaccaagcctcacaactcttctttataatgaaaatgctttcaaagatggagatggaataactccttatgtttacactaatgaactgaatggagttagtatagagttatctgtcgggttttatagagatcttacaacagatgatgaagatgttgagtatttagaatctaaaacttctagcgaaaaggctggttggacagttatttgtaatgaccgcgttgtcatctattctgataaaacaagattaacaggatggggggaagcgggagtacctgcatatcacacccaatttattggcatagcaggcgtagtaaaatttacttcaaatgatgccagtttattacccgtaaccactacaaaacgcggaatagatggaaattcagatctttacctagccgtaaaagattatatgcgtgaaggtcttaaaaccttcataaactttaccaataaatggaaatcatacggtaacagtaataacactataaaatcgatgagtaataagtcgcttcctgcaacttcaagtgaacttattaatatgattcctaaaaaacaacttaaagcgaatcctaaaccatttggaggaaaaatatacaagcccacacttccattgccaaaagttattaacaaaacaaaactaataaaatatagcgttgaacttgatgagtttaaccaagtagcagaatatctattcgatgatgtcaatgtaccggctgttgatgttgggcgaaaaacatttgataaaatgttaaaagaggctttagaaaatgagtaa

SEQ ID NO: 204440 - DNA, 1005 bp, Klebsiella oxytoca
atgagtaatggaaacagcataccttaccatcttaggcataataaagccgttgaccggaatttgttcatcgatctactaggaaaggtaaataattgtaaaaatatatcagactatgtatacgctggttttggaggaccttttcttgaagatttcaaagtaatgcatagcgtactaaaaataaaaaaaatgatatctcttgagattgttgaaaatacacataagcgtcagaaatttaatatgccgaattcttgcatagatatcggaaaagaacctcaaacaagccagaatttccttacaaattataactttaaaaaaagaactcggcatgtagtatggctcgattacactttgccttctatgttgaacgaccaattaggcgaaattgaactactctgcaacaagcttaatgcctacgacatattaaaagttactgttaacgctcacgccgaaacgcttggtcgcgatccaaacgcaccatactctgcaactccccaagaatatcgtgcatcaaatttaagttccatattagatagatatgcaccttatccgataattccagatcatacgacttcaaaaaagtatccaataacattacttcacgcaattcgtaaagcagtaaacatggggttatccactaggtctgatatatttatgcaaccattatcatcttttatttatgctgatggccaaacaatgctcacagctactgggattttgttggaaaatgatgaatcaaaaatcaatcgtttctttaaaaagtctcgcttagaacattggtcatttatcgataaaacttgggataagccgagaaatataagtattcctacgatgtcattaaaggagcggtttgaaattgaatcgaaacttccaaatagcacccctgaagaaattattgagtctatggggttctatctctctgagacagaacccaaaacaattaatcaattaaaaacctttattgagtatcaaagagcaataccttggttttctaaagtgcaattctga

SEQ ID NO: 204441 - DNA, 1161 bp, Klebsiella oxytoca
atgcttaactatatgaaagtaatagatttattcgcgggagttggtgggcttagcttaggcgctgctagagctgggtttgatgtttccgccgctgttgagattgattcgcatgctattgaaacgcatcatgttaacttcccaaattcacgacattttatggatgatgtatcttccattgatgggaaagaattactaaaaagtattaatttggaatcacttgattgtttaattggtggtccaccttgtcaaggtttcagtagcattggtaaaggaaatgttgatgacgtaagaaatgaattatattttcatttctttagaatcattaacgaaatacgaccattatgctttttagccgaaaatgtgccaggcattatgaatgagaaatatgatcccattagaactaaagcattatcattaattaaagatgattattatattttgccacctttgaaagtgaaagcttcagattatggtgcaccaacaacaagaactcgtatattttttattggctataaaaagatacttggcaaagatctcttggatataaaacaattcaccccgaaaaaagctgagcgtatgattacagtcggtgatgcattagctggcattaattttatggtagaaccaagttggcagactgatgctgaggcttggcataaagtagaacgccattttaaaggctcattttacgataaattgtggggtgagataccttctggggttggggataaagaaacgctgtataaattgaaacagggtaaagtttctggatttttgggcacactgcatagccatgaagttcagaagcgttataacaatttacaatttggagagattgatcgcatatctaaatctaaacgtttagatcctaatggattttgtccaacattaagggctggtacagggaaggaaaaaggcagttttcaagcagttaggcctattcatccatatcaaccacgtgttattagtccaagggaagctgctcggcttcaaggcttccctgattggttcaaatttcacccaacaaaatggcatagtttcagacaaattggtaacagcgtttgccctatagttgctgaagcaatgctgttaccattagctgatctgtgcaaaatgtttagtcagaattgcactttagaaaaccaaggtattgctctttga

SEQ ID NO: 204442 - DNA, 1074 bp, Klebsiella oxytoca
atggaactggaagaccatgcgggcaacggacacgaagcgctgatggccgcccgcgataccctactggagctggccgctaaaaataaccagctgacccgcgttcgccacaacgggcttgacgatagcccgcagctacaggtggatatcgatcagcgcaaagcccaggcgctgggcgtctccatcgatgatatcaacgacaccctccagaccgcgtgggggtcaagctacgtcaacgactttatggaccgcggccgcgtgaagaaggtctatgttcaggcggccgcgccgtatcgcatgctgccggacgacattaatctgtggtacgtacgcaacagcagcggcacgatggtacccttctccgctttcgccacctcccgctgggagaccggttcgccgcgtctggagcgctacaacggctattcagcggtagaaatcgtcggtgaagccgcgccgggcgtcagtaccggtaccgcgatgacaattatggaagagctggcccgccagctgccaaacggctttggccttgaatggacggcgatgtcgtatcaggagcgcctctccggcgcgcaggctccggcactgtacgccatttcgctgctggtcgtgttcctgtgcctggcggcgctgtacgaaagctggtcggtgccgttctcggtgatgctggtggtgccgctgggggtcatcggcgccctgctggcgacctggatgcgcggtctggaaaacgatgtctacttccaggtgggactgctgacggtgatcggtctgtcggcgaagaacgccattctcatcgtcgagtttgccaatgagctgaatcagaaaggcgaggacctgcttaccgccacgctctccgcctgtcgccagcgtctgcggccgatcctgatgacctcgctggcgtttatcttcggcgtgctgccgatggccaccagtaccggtgcgggttccggcagtcagcatgccgttggcaccggggtcatgggggggatgatttcagccacggtgctggcaatcttcttcgtaccgctgtttttcgtgctggtgcgtcgtcgcttcccgctcaaggaacggccacaataa

SEQ ID NO: 204443 - DNA, 939 bp, Klebsiella oxytoca
atggaaaagggtactacgtccacgccgcacgatgcggtattcaaacagtttctacgtcatgctgacaccgcgcgggacttccttgatatccatctgccgccagcgctacgaaaaatgtgcgacctggatacgttaacgcttgcgtccggtagctttattgaagagaacctgcgggcatactactccgatgttctgtgggcgctgaaaactgccgcgggagaaggctatatctatgtggtcatcaaacatcaaagctccccggatgcgtttatggccttcagactcatgcgttatgctattgccgcgatgcagcgccatctggataacgggcataaaacgctgccgctggtgatcccgatactgttttatcatggcgtcgccacgccatacccctggtcgttatcctggctcgacatgttcgccgacccagccctggcaaaacagctttataccggaccatttccgctggtggatattaccgtcgtacctgatgacgaaattgtgcagcatcgaagagtcgccctgctggagctgatgcaaaaacatattcgtcagcgcgatctgctgggtattgtggagcatctgacggccattttgcttaatggatacgctaatgacaggcagctgaaaacgctgtttaattatctgattcactcgggcaaagcgcttcggttaggtaagttcatccgcgaagtggcccagcgggtaccgcagcacaaggagaagctaatgactatcgccgaaaggttacgtgaagtagggcgcaggcaggggaagcgggaaggccttgagaaaggtcgtctggagggggttgaagaggggcagcgcgccgaagcgctgcgtatcgcccaaacgatgctcgccgaaggtatggcgttggagacggtgctaagaattaccggtttgccggaggcggcgcttgcggtcaggcatcattag

SEQ ID NO: 204444 - DNA, 645 bp, Klebsiella oxytoca
atgaacggtctgttgaacggaaaacgtatcgtcgtcaccggcgcggcgcgcggcctgggctaccactttgccgaagcctgtgccgggcagggagcggcggtagtgatgtgcgacattctgcggggcgaactggcggaaagcgctcatcgtctgcaggaaaagggctactgcattgaatcccatgagatcgatctcgccgatagcgagtcgatcgaccgggtattcagcgctatcggcgagcggggggcgatcgacgggttagtgaataatgcggcgatggccaccggcgtcggcgggaaaaacatgctcgattacgatccggatctgtgggatcgggtgatgacggttaacgtcaaaggcacctggctggtgacccgcgcggcggtgccgctgctgcgcgaaggggccgggatcgtcaatgtcgcttcggataccgctctgtggggagcgccgcggctgacccgcgttgaggcgacggaatacgtgcccgcggaacgccatcagctgtatgaaaacggtcgcgcgctcagcggcgcgcagcagccggaagacgtcaccggcagcgtagtctggctgctcagcgatctgtcgcggtttatcaccggccagctgatcccggtcaacggcggttttgtttttaactaa

SEQ ID NO: 204445 - DNA, 240 bp, Klebsiella oxytoca
gtgagctacatcatcgcgtttgtgaagtttgatgattcgaacatgaactatccggtcgaatgttttcgcacggatattaaacctcaggaccgggtgctggttcgccttgcgaatgagcggataaaacaggccaccgtcgagcgcattgattacctgaactgggactgtacggggcgtatcgcgtggaaggcgggagaagcccagctcggcgaaaaaagttcggctcgttgcgcagcctga

SEQ ID NO: 204446 - DNA, 174 bp, Klebsiella oxytoca
atggactctgggtcccatactcacgtcgcaggccacgtgttcatcaacccagataccggcgtgactgcctcggagaacttgttcagatcgatggttccccgcatgactggtttgaaggacgtgcccccaaatgctgcctgctcgtctttattgatgacgcgactggtcgcctga

SEQ ID NO: 204447 - DNA, 339 bp, Klebsiella oxytoca
atgttggtgaccatgtcagataaagaactcagccggatcaacgtcattcagtcagttgttgataaacgcatgcgccgtcgtgatgctgctcatcagcttgctctgaccgaacgtcagacacagcggttaatgaaccgttttcgtgagtctggtgccgcaggtctggcaaaccttcggcgtggacgccccggtaatcacaggcttcctgagtcactgaagctgcgtgtactttctttacttcacgataactacagcgactttggaccaacgcttgccgcagaaaaattgcgcgaacgccataacatcacggtgtctgttgaaacgctcagaaatggatga

SEQ ID NO: 204448 - DNA, 1665 bp, Klebsiella oxytoca
atgaatcaggtaatatttaagagagtcgccatattgtcgctttcagagaaaaaagcttttacttttaatttctcagaaggtttgaacttcattcatggtacgaatgatactggaaagtcaagtctaatcaagagcctgtacttttgccttggtggggatttaaggcttgatgacagttggaagaagcaagagataattactaagctaacattagcttatcaagatgaaattataaactttatcaggaaatcatcctatttcgtagttactgtgcataagaatggagtgaaaaaatcagaaaagatttttagcaaagtatctgagttaacaagtgaaattcaaaatttatttggatttaatcttctgttagctcttaagaagaataaagaaacaataattgcaaatccggcttcttattacttcccattttatattgatcaggatgatggttggagtaatgtacttgattcatttaacggcctaaagatgtatgtggattggcaaaaaaatgctctgcaatatcactcaggtatcaagccaaaagagtattatgctctcaatggggagcaaaaaatattagcattaaaaatttcagagcttgagcaagaagcggaacttatacgaaaaacaaagcttaggtttgaaaagtatttcgaaaacattagttttgatattgatgtgaatttttatcttaataaaattgattattttataaaacagtgtgaggaattggagcagcaagaaagagcatatagattaaaagcaatgaatctatactcgaggagaaatatattatctgatctcattttcagtattgaaaacgagagggttgattcctctggcaatacaagtgaagaggatgatatttcttttgcgttaaaaaaatatgatattaacaaaaataaagttgccttattcagccaaaaagcaagtttatatgatgaaaagagtaaggttgatgagcaacttatgactatcagaagtaaattattagagcatgctgaaatgagtgatcatattaagtctatgcttaataatgtacatgataatttctcgattaaagaaattattgactctgaggcttataaaagtgcagccttagcatttgaagaacaattatcggagatccgagaaaagataaatgcattagccttagaaaaggcagtccttgatactaaaataaaaacctttaacaatgtgaaaagaactagaataattaacgattattttctttctatgctcaatagggcgcaagtaaaactgcacttaccaatcactgaaaaaggtggtgttataaattataaagctttaactacaggtaaaacgggtagtcggagtccaagagcaatatttgcatatcattacgctttgttaatgacaattaaaaaatactctacactaccgattttaccaattgttatcgattcaccaaagcaacaagacctggatgatgaattaacagagcaactaattcagttttgtttggatgatcttgctgaggtatctcaagtaataattggcgcagtcaagccagaaaaaaatatggtcggttatcattctattaatttagttaagaagtttagtctacttcaacctgaggcttttagtgaggtttatcaagaggttgtgccgcaatttaatgctatgttcagacatttgaactaa

SEQ ID NO: 204449 - DNA, 1074 bp, Klebsiella oxytoca
gtgaaccttgctgatgcattaatacacgttccccaagacgaacgtgggggagaaattgcgattcgaggatttgagtatcaacgatgctgggcaatagatgaattgttgaatcgtcataaaaaaaacgaatcatacgtatttatacctgagtatcatgatgatgttttaattcttaattcctctgaatcgcccactatggcaacgtttgcacaagtcaaaacaagagatacacactggacaatcactccgttaataaagtctgatggtgaaggtaagttatctttcataagtaagttgtttaaacataaatacgatttttcttcttataaaactgatttaacattcattactaatgctgtgtttaagttttttgataagtatgaatttaatgcagatgagctaaaggtgtcagaaaaagataaaatattagatgctgtgaaaacccagttgccgggatttggttctccagatttatcatctctcaaattcaaaacatctaatctcagtcttttggactacgacgcacaccttttaggcaaaacagtcgaatatttagaagatacaaaatcttctgaagtaattaatgcaatggcgttcaaaagaaccctcgttgacctttttgaaaagaagacaagagtttcatccagagaaattaaatcatttaaagaattaatagataaaaaaggaataagtaatgagcttatagctaagttgatctcagaaataaaatctcttaagacaagtttccctgactgggagaaaattagtattctgctatcagtgctgcacaaagatgaatttgaaacgctgatgcttaaaattaagtacgaattgttcttggtaaatgttaaggatataaattcaattgagtatgatttttatcgattattaaagcaaaaaagaattaatgaaaaatttaatgccgaaaatatacctattcatattgaagaaatgatctcttatgcattagaagaaagtgatgagttcagacaattgattgatgatgattataaatatataatggcatgttgtgcggttattgagaagatgtcaggcaatgaggcgaaaaaatga

SEQ ID NO: 204450 - DNA, 906 bp, Klebsiella oxytoca
gtggatagcgcacgcgcccttattgcccggggatggggagtaagcttcgtcagccgttgtctccgggtgtcgcgtgcgcagttgcacgtcattctcagacgaaccgatgactggaaggacggccgccgcagccgtcacacggatgatacggatgtgcttcgccgtatacaccatgttatcggagagctgcccacatatggttatcgtcgggtatgggcgctgcttcgcagacaaacagaatctgatggtatgcctgcgatcaatgccaaacgtgtttaccggatcatgcgccagaatgcgctgttgcttgagcgaaaacccgctgtaccgccatcgaaacgggcacataccggcagagtggctgtgaaagaaagtaatcagcgatggtgctctgacgggtttgagttccgctgtgataacggagaaaaactgcgggtcacgttcgcgctggactgctgtgaccgtgaggcactgcactgggcggtcacaacgggtggcttcgacagtgaaacagtacaggacgtcatgccgggagcagtggaacgccgctttggcagcgagcttccggcgtctccagtggagtggctgacggataatggttcatgctaccgggcgaatgaaacacgtcagttcgccaggatgttgggacttgaaccgaagaacacggcagtgcggagtccggagagtaacggaatagcagagagcttcgtgaaaacgataaagcgtgactacataagtatcatgcccaaaccagacgggttaacggcagcaaagaaccttgcagaggcgttcgagcattataacgaatggcatccgcatagtgcgctgggttatcgctcgccacgggaatatctgcggcagcgggccagtaatgggttaagtgataacaggtgtctggaaatatag

SEQ ID NO: 204451 - DNA, 753 bp, Klebsiella oxytoca
atgaatgtggacgaggtcgcttttaaaaaaggacatcgttatataacggtgatctccgatcgtgacgggcgggcgctggctttaacggatgatcgaggtaaggaaagtcttgccggttacctcagaaccctgactgacggacagctgcaggccattaaaacgctctcaatggacatgaatgcgggctatataagagccgcgcgcatccacttaccgtgtgcagttgataaaatcgcctttgaccgcttccacgtagcgaaacagctgggtgaggtggtggataaaacccgccagaatgaacatccccgtcttccggttgaaagccgccgtcaggccaaaggtacccgcttcctgtggcagtacagcgacaaatggatgactgagtcccggcaggaaaagctgatgtggctgcgggaacagatgcagcagacaagccagtgctggacactgaaagagctggccaaaaatatctgggatcgcccctggagcacagaacgcaggaatgactggttgcagttgatatcgctggcgtctcaatgtgatgtgccgatgatgaaaaacgcagcgaaaaccatcaaaaaacggttatatggaatactgaatgcgatgcatcatcgtgtctcgaatggtaatgcagaggcgctgaacagcaagatcagactgctgagaataaaagccagaggatacaggaatcgggagcgctttaagctgggagtgatgttccactatggaaaactgaatatggcgttctga

SEQ ID NO: 204452 - DNA, 129 bp, Klebsiella oxytoca
atggacgaaaagtccctctatgcacatatcctcaacttgtcagctccgtggcaggtaaagtctctttctctcgatgaaaatgccgcttctgttaccgttactgtcggaatcgctgaaatactcagttaa

SEQ ID NO: 204453 - DNA, 549 bp, Klebsiella oxytoca
atgccaatacctatactctatacagaacgcttactgttaaaaccattatcctcagatgattcctcacaaattcaaaaactttatcctcgctgggagattgttcggtacatggtttcatcagtaccatggccctatccggataatggtgccgagaattatgtcaataacgtggccttgcctgatatagcaaatggaatcgcttggatctggactatcagacatcgtgaaacacctgacaacctggtaggtttaatctgtctgtatgatgttgaggataataatcgaggattttggttagctccggagcatcagggaaaaggatttatgcgcgaggcctgtaatgcagctacagattattggtttaattctttaaataagactgtattgcgtgcgccgaaagcggctctcaataaccgttccaaacgtatttcagaaagcagtggcatgcggctcatcaggactgaaaagaaagcgtatgtcagcggtattctggattctgagctatgggaaattacccgtgacgaatggaatgctcgtaagggtggataa

SEQ ID NO: 204454 - DNA, 252 bp, Klebsiella oxytoca
atggattttaatgcacttgttgatttgttaattaacacgggctatacgccggaatactacccgctcaaggtcaacaggattgtcgaagttctcaacgggatgtcggaagctgactataaagactattgcctggtatgtaaaaagcccttcatacatgcgccggacaggtatgattcctgcccgacatgtagcgcaaaaaaatgcaaagttgctattatgcgttattatcagtccgtagttccctttgaataa

SEQ ID NO: 204455 - DNA, 378 bp, Klebsiella oxytoca
atgaatgatatccaaaaagtacaatacgaccaaatcattgattctgtgaactttgcattaagatcgctgtctgaactatttgaagtacatggaatgcatggcatgtatgaccttacaaaccctaatctcgatcaactgaaggctgttttccatcaaatgaaagagggcatttcaaaggttgctgagaattttgaaacgatggtagcaaccgcaagagatatggatgctgcgaatgcaagtatcaacgtaatgaacattaagcaagggctcaactacgctgaatcattgttgcttgcaatagagaaattagactatgataagtgcgtggaagcgcacgacaacattaaagatcacaacgtgccaccaactcagtggtag

SEQ ID NO: 204456 - DNA, 207 bp, Klebsiella oxytoca
atgaatgcggataccgaaaggtatttcagcgatcttatcgaggccaaaaaatttaatggctatacgctggtcagcggagaagactggcagaagcccacagtcgacgaaatccagctggtcaggggacttatctccctgactgacatccagctggccaaccggctgactgtggacgaacgcaccatccgtaagggctttgttgaataa

SEQ ID NO: 204457 - DNA, 168 bp, Klebsiella oxytoca
atgacaacaatcgatatgtataatgttggctcttccagtactttttattcagcctatgagataagcaagcttaatgagtatctggataagcaggatttggatcatggctattattacacgccggaaaaccctgtgctgtggcaatttgctcaggaggatgaattatga

SEQ ID NO: 204458 - DNA, 1566 bp, Klebsiella oxytoca
atgctgtcactgtctgttggcggtgtcctgatgacgtccattctgctgctgagcgctctcactctggttcagaaagaaaatattgagaatagcctgctggaaggcaacatagcttatgcccgcaaactggctgacacaacggaccgttatctcagtacagcccagcaggaactagcctacagtgcaggtctgattgttgattttcaagatcggaaacaactgcaggcagaagccgatcgcctgcgtctgcagtcgggattttttaactccgttctggtcgtcaaagcgaatgcggtggtagctgccacgtctccggagagtctgagtctggtcgggatgcagttgcgttctcctgccagccagcagtcaatcatttctcgcaagcccttcatatcacagcctttcacctcagcgacgggcaactacattgtatttctttcccagcccattttttcgcaggagggtcagtatgagggctatattggcggaagtatttatcttaaaaagcatagtatcctcagtgagatccttgggcagcatttttacggtaatcaggcagaagtaagtattgttgctgctgacggccgcctgatttacagccgtgccccaagcgccgtcgggcgactgcttgatgtccatcaggcaaatctaacattactgtcaaaagcgcagagcggccattttgtcgatcatcatgccggtaaggctcatctcatcggttttgctagtctacagcaagctgactggaaggttttcattgctggaacgtcggacaatgtatcccgcattcttaaggaaaccatgatcagtgccttctggatcactctcgccattatcatcctggctaactgcgctgttatatatttctctgccagaatatcccgcccgcttgagagactggcaagctttacccgcacggccgacagcgaaacagcgctacggaagctggcgcagcttgaacccggctatcaggaagcagagcttctaagggaggctgtaagccagcacctagcgtcaatgaccatgcaggttagccttctgactaatgaggcgatgaccgatccacttaccggtctgctgaacaggaaaggcttcactacacggattaaggcgctcaatccgcttggaaatcattctgttatcgcaatcgatattgatcatttcaaacatatcaatgatcattatggtcacgacgtgggagatgccgtattgatcagcctcggccagatactgagattactgactcgccagaatgacattgtctgccgttttggcggagaggagttcattattttactgcctgactccaacctgaacgaaacacgtgttgtggcagaacggatccgtaccgtcacaggggaaacctcgtttgcggaaggaatccacttaactctctccgctggcatcgccacactatctgactgctctgcagatttcagacagctgcttcgtcaggccgatttagccatgtataaagccaaaaactccggacggaaccgggtttgtacttacgattcgggtaactatcaacaacccgagtgcccatccaaaaatgatacgcgctga

SEQ ID NO: 204459 - DNA, 471 bp, Klebsiella oxytoca; identical to SEQ ID NO: 199174

SEQ ID NO: 204460 - DNA, 150 bp, Klebsiella oxytoca
gtggcgcacgtattcggtgaacgcacgttggccacgctggagcgtcttccgggcctgctgtcggcctttgaggtcgtggtatggatgacggatggctggccgctttatgaatcacgcctgaagggagaactgcacgttatcagcaagtga

SEQ ID NO: 204461 - DNA, 1026 bp, Klebsiella oxytoca
atgtcagacacacagaaaaacattgatttaataaaagatattaatgaaatagccgagaagggcatacaggcttttgaattgtcatatagtgaatctgggcaatcaaatcttcacgagccacttttgagatggtgcgattttattttacgatatatacccccagtgaaacgtgatgtttttaaatcgaatcgattcactaaaaatattccagatgatgcaaaagcgggattgcagagaatagaggggttatttacttcaggtggcgatgtcaatccttaccagagtaaaacattgacattatttaatgacacaagcggtaaaaaatccgcgcaaagaacggataacctttgggctgattggggcattcaccatcttcacctgtcattaaacccagtgggttcaggtgaaaaatattcagaccgctcagaatgggtgttattcctgaaggtgtatgctaatgcagttttatttattgatataaaaagccatgataaagacatcgagcccgaccttttttctcaaaaagacttgattgaaacatttatacgcaactggccagatgaggcagggatgtatgagatgaaaggtgtttcaaagctggcaattaaccaaccaattaccgatgcagacatcgcaaaattgagaaagaatggaataaatctcccctttgaggcaaacggaaaggtttatgcaccattaggaatgggaatgacgaccgctgtaacctctacgagagtttcaatttatcgaaataaaatatgtaattgggctaaacaaatagaaggaatattcatggatgaagatggcccattcctgaaggaagtgaaatctcagaatgtacaaaaccctaaattcgaattgtatatgtatgatggtgatgtgttcggcattactgagaaaaatattgataaaggatggatattcactagaggaaaatccgacaacgttttcagctgtttatttgactcattgatgcctgtgtgggccagtcctgtggtattgcagtactggaaacagaacccataa

SEQ ID NO: 204462 - DNA, 477 bp, Klebsiella oxytoca
atgccgatatgctttcagaaagatgatgagaaagccatcactcgggctatagaatctcttaaaagccagttacgggaagaacacaaacgttcaggtcgggctggtaagccttcaccactagggtatatctgggccagagagcgtgttaccggggaacgccctcactaccatctggttttgctgttcgacaaagacgtttacggttatctgggaaattatactaagcctgacgctgataatatggcgacccgaatacagaaagcctggtgcagtgcgattgatcttgattatccttactatgccagtcgggttgaattccctgagaatcacagtgcctggttcacccggcaggatgcgttaacgttaagtcccgattattacgacttcctgctgcgggttgcttacatggcaaaagagtacagtaaagatttccatgatggttatcgtaacttcggtacaagtcagcttatagtttga

SEQ ID NO: 204463 - DNA, 876 bp, Klebsiella oxytoca
gtgatatgggatattgtctttaactctcatggtggtgagatctttacggagttagatttagttgagctgatgaaaaaccttaagcgctctccggatgcggaggtacttaaaccatattttattttttctaaaattctttataacatttgcattgatgatttacaggaagcagagattcttttgaatgagatttcatcacctaagttaccttttggttatctccctgccgcttgcagcatgttaaaattggcacttaaaataaaatcaaaagggaaaaatataaaaaatggagaactaactgcagatgtaaatatgatgttatcctgccagagtgtttttaccgatggggttatgaggcatactaagtcggagcgtccgaaattcttactaacggaatatgaaaataacttacaaatcatgcatgtgataaaacaatataacgacctggtacgcaggataagtgtttataatgaattagatttttatgccgtacacccccaatctatagctggagttctcgatgaggttgaacatgcattggggaagattaataaaaggcttgatatttccaaagaagacgtcggtagtgagatgctggcagaaataatgataaccgagaaaatactgactgtccgtgaacttagcaaagttctgatcagctacttacccggatctacgctttataactgtatactcaatctggataacatcctaccatacctgaaaattcccggcgagatattgattaatatttccaacttcagagcgcttgctgaaggaagtgagcgtaaacgtaaaataatcgcaaatgcaatcctaattgtaaatatcatgcaggggagaataaaaccgcagaaaacagtagtagaaggatga

SEQ ID NO: 204464 - DNA, 294 bp, Klebsiella oxytoca
atggaaaccttatcatcacacccgacacgggtgactcagccctatctgtcacccgttgaaaccaggcaacggctgctgactcatcttttatcgcagcactatggtctgacgctgaatgacactccgttcagtaatgaaaccaccatacgggaacatattgatgctggagtatcgctcagcgatgcggtgaactttctggtagaaaaatgcgggcttattcgtatcgaccgaaagggattttcgtggcaagaacagactccgtataaatgtctaacttgctcaaataaccagtag

SEQ ID NO: 204465 - DNA, 1113 bp, Klebsiella oxytoca
atgggcgttttcgtatatgctgacgaatcaggacattcagggcgcaatatttttgacgagaaatcaccaacatactttcagggagctattatctctctcggtgatgtcgaccccatcattaatggagtagtccaaaggcactgccaggccttaagtgttccgcgtcttcactcaaatcaacatcaagagcatgttgtttcaattatatgtgcggatctacttgatgcacttgaaaaaacaccttgggaattttcattatgtgtcattcacaaaccttatcttgcacctactaagtttgttgacctgttctttgatagcggtgataacccagcagttccagttttatggtacaacactgaattattccggcatgccatgtgcttaggaatggcggatctactttccgaagaagacaataaagctttttgggatggttacctaagcgatgatatgcctaaaatgctgcaagtcgcagaaaatgcgctatcacggattggccgaatatctgatcctagaatgaaagaagttatgactgatggtttaacttacgctattagtcaccctgacgagttcacgctgatttgtacaaatggaaaaagcgcttacaaaggccagacccctaatatggttgctttttctagccttatggccgcaacacattctttctgtaaaaaacattcttcctcagtcaaggaactgatccatgatagaagtgacgaatttcgcgggactatgagagagtatcaccgcatttttcataaaattgatcatgtcgaagatgaatttggcggcccaactctttttgaggaggctcagttcaatttaggaaaatttgatctccgtagttcagaaagccatcctgcacttcaagctgttgatgtctttttgtggatggtacagcgagatctagttaccgaacacgggcagaaaactttagtgcgtctcagaaatcacctatgcgatttcgtaatatctcctgcaatgtctcaactgatagtcaaagcccgtacttatcaactaaatagtaagcctatctcttctgaagaaatcaaagctggaagaaaattttctgctcagttagaagcgaggcgacaaaagcgcttgagcaagtag

SEQ ID NO: 204466 - DNA, 300 bp, Klebsiella oxytoca
atgacaaagccagcatcaaccagcaaaaagctccgtaaacagcacacaccggaattccgtcaggaagccctgaagcttgcagagcgcatcggtgtggccgcagccgcccgcgagctcagcctgtatgaatcacagctttatgcctggcgcagcaagctgaaaaatgcagattcctctcccgaacgtgagcaggaaatgtccgttgaaatagctcgcctgaaacgacaactggctgaacgggacgaggagttggccattctccaaaaggccgcgacatacttcgcgaagcgcctgaaatga

SEQ ID NO: 204467 - DNA, 135 bp, Klebsiella oxytoca
atgcatggccgtatgagtcatgatgcggttgatggcagcccggtttcccacatactgcccgcgttctttgttcaaacccgaagccagaagcaaaaacccccgccattgctggcaggggttttgctgaaaagttga

SEQ ID NO: 204468 - DNA, 465 bp, Klebsiella oxytoca
gtggatttcgtcagtacgttaaaagaggttgataataaacgcatcggggtactgggtttttcaatgggcggttttcgactggccgccctgtctgacaaagtcgccgccactgccgcgatctcctggttcggtacctggaacggcctgatgcagccaggcaacaacgttctgcgcggtcaatcggcgttttatatgcttcatccgggcctggccggacatcttgatattcccgacatcgccagcattgcagcgcccaggccgatgctgatttatagcggagggcaggataagctgtttcccgctgcagccgttaatgacgccttcgctaaggtgcataacgtatgggcgtcacagaacgcgcaggataagctggagaccagaacgtggccggaactgggccacgtcttttatcaagaacagcaggatgaagtgttcccctggcttgataagtggctcaagccctga

SEQ ID NO: 204469 - DNA, 3255 bp, Klebsiella oxytoca
atgaaaagaatgttaatcaacgcaactcagcaggaagagttgcgcgtcgcccttgttgatgggcagcgcctgtacgacctggatatcgaaagccccgggcacgaacagaaaaaagcgaacatctacaaaggcaaaatcactcgtattgaacctagtctcgaagccgcgtttgttgattatggcgccgagcgtcatggtttcctccctcttaaagaaattgcccgcgaatacttccctgccaactacagttcccacggccgccctaacatcaaggacgtgctgcgtgaaggtcaggaagtgattgtgcagattgataaagaagagcgcggcaataaaggcgccgcgctgaccacctttatcagcctggcgggcagctacctggtactgatgccgaataacccacgcgctggcggtatttcacgccgtatcgagggtgacgatcgtaccgagctgaaagaagcgctggccagccttgagctgccggatggcatgggacttatcgttcgcaccgctggcgtcggcaaatccgccgaagcgctgcagtgggacttaagcttccgcctgaagcactgggaagccatccagaaagccgctgaaagccgccctgctccgttcctgatccatcaggaaagtaacgtgattgtgcgcgctttccgcgactatctgcgtcaggatatcggcgaaattcttatcgacaacccgaaagtgcttgagctggcgcgccagcatatcgcggctcttgggcgtccggatttcagcagcaaaatcaagctgtacaccggtgaaattccgctgttcagccactaccaaatcgagtcgcagattgaatccgctttccagcgtgaagtgcgcctgccttctggcggttctatcgtaatcgacagcaccgaagcgctcaccgctatcgatatcaactccgcccgtgctacccgcggcggcgacatcgaagaaacggcgtttaacaccaacctggaagcggccgatgaaattgctcgccagctgcgcctgcgcgacctcggcggtctgatcgttatcgacttcatcgatatgaccccggtacgtcaccagcgtgcggtagaaaaccgcctgcgcgaagccgtacgccaggacagagcgcgcatccagatcagccacatttcacgctttggcctgctggagatgtcgcgtcagcgtctgagcccgtcgcttggcgagtccagccatcacgtctgcccgcgctgtagcggaacgggtaccgtacgcgataacgaatcgctgtcgctttccattctgcgcttgatcgaagaagaagcgctgaaagagaacactaaagaagttcacgctatcgttccggtgccgattgcttcgtacctcctgaacgaaaaacgtgctgcggtaagcgccattgaaacccgccaggccgatgtacgcgtcatcatcgtgccaaacgatcagatggaaacgccgcactactccgttctgcgcgtacgtaagggtgaagagacctccacgctgagctatctgctgccgaaactgcacgaagaagagatggctatgccttctgatgaagagccggccgagcgtaaacttccggagcaaccggcgctggccgcttttgtcatgcctgatgccccaccagcgccggctcagcaagagcctgctaaagctacggttgccgtcggaacaccagccgcttccgcacctaagtcggcagcgccagcgcagccgggtctggttgcacgcttcttcagcgccctgaaaaatatcttctccggcgcagaagaaactaagccggctgaagtccaggttgagaaaaaagcggaggagaaatccgagcgccagcaggaacgtcgcaaaccgcgcgccaacaaccgccgcgatcgcaacgaccgccgcgataatcgggataaccgcgataatcgtgacaaccgcgacaatcgtgccgagaatagcgaagttcgtgaatctcgcgaagaaaaccgccgtaaccgccgcgagaagcagcagaacgtcgaacctcgcgacatccgccagacaacggcagaagatagcgataaaggcaaagctcgcgatgatcaaccgccgcgccgtgaacgcaatcgccgtcgtaacgacgagaagcgtcaggttcagcaggaagctaaagcgcaaactcgtgaagaaccggtcgtacaggatagcgagcaggaagaacgcgtgcagaccatgccgcgccgcaagccgcgccagctgtcgcagaaggtacgtattgaatctgctgccgctgagcaggttgtcgagccggtagccgcgcctcaggtcatcgaagcgccagccgtccaacccgaggccgcagctccgcgcacggaactggcgaaagtcgacctgccggcagttgttgaaaccgctgcggaacatgacgatactggcgaagcacgcgaagctaacggtatgccgcgtcgttcgcgccgttcccctcgtcacctgcgcgtaagcggccaacgccgtcgtcgctaccgtgatgagcgttacccgacgcaatccccgatgccgctgaccgtagcctgcgcatcgccggaaatggcatctggtaaagtgtggatccgttaccctgtcgttcgcccgcaggaccagcagcaagaagaagcgcaggtacaggagttcgctaccaccgcggttgaccccgttatcacccctgcggccgccgttgaaccggctgtctctgaagtggttgccccggaggtagttgaagagcgcgttgttgagccggtcgtcatctctgagcctgtggcgatgatgaacgaacctgaagctccggttgtcgaaaccacgcacccggaagctatcgccgcaccggttgatgaacagccgcagctgattgccgaggctgatgaaaccgtcgccgaagaggttgtcgcagaagctgtcgacgtcgtggcgaaagaggctgtcgagccggaagcagcggtcgctgaacctgctgcggttgaagaagccgcggccgctgttgaagaagcgcctgtcgtctccgaaccggtggttgagccggcaccggcggcagagccggtagtgaagactcaacctgttgtcacgactgtgccggtcgttaaggtcgccaatcgtcacgccaccgcgccgatgacccgcgcgcctgcgccagactacgtccctgaagcgcctcgtcaaagcgactgggttcgcccgagctttgattttgacggtaagggcgctgctggtggccatagcgcgacccataaagccgctgccgggcctacccgtccgcagcccgtagagtaa

SEQ ID NO: 204470 - DNA, 141 bp, Klebsiella oxytoca
atggccatgcaaacatggttagccttattactgtgcatattttgcctctgcgtttcggtatatagccttatttcttatatccgcgacaggagaaaacagaaatttccgttttcagccaagcactcttcgcgcagaaaataa

SEQ ID NO: 204471 - DNA, 369 bp, Klebsiella oxytoca
atgaagcagctatctataattgaaatagaatccatttctggtggctattcttgggatttttcatctttatctggtgcagtcagcagcattgctggcaatgctgctgaagcggtagcatcatgccttcttggcgcatcaatgaccggagcgattggttcatttatgggaggatactatgcggggttgaccggtggtaagcttggtgttggcattattgctgccggtgttggcatgatctggggattgggtgtaggtggaatcgctggcggaattgccgcaacacttttgggttgggatacttcctcaaaaattcttactgatatgtttaatggagtcattgatggcactttcactccatggaaagcataa

SEQ ID NO: 204472 - DNA, 945 bp, Klebsiella oxytoca
atgaataaatattttttattactattgatgttggttttccctatttatggttggtcctgtagctcgggggccaattatggtgatgtgacgatggcgaatctacccgaacaaatattaattaatgcggggagttattctgccggaacggtcctttatgactccgggagaataacgcgttcgaatactcaggtctggaactgtgaggggaagatgtatgcccgttttgaatggtcttcagcaaatgcaggcgcacttactggcgatcatatctatacgacatccgtaccgggtattggtttaagagtgaaagtctggctgaatattaccggtgaatatgatggcgatactgacgattttctccctgattacactgagcattatattggcgactcagagttttatcttggaaaaccaggggggtttttagatatctatgccacaacaaactattcacccgcctaccagctacagctggtggccacgggaggcgcaatcgccagcaacagctctctgtcgataaaggaccctatctcatcggtttcgcttaaagatagcactggcacgatggttatttcccaactgcacatcagcggtacgacgcaaatcaagctgacgccgatgggctgtacggcaggtacgaccgcgctgaatttccctatgggctccatgaaaacgagtgagtttactctttcctcgacagccggctccgcccagcaaacgctgatgctttcctgcgaacccggaaccaatatatcaatgcgtgtgacggcgactgaagccgaaggcgataatccgaacaggagcgttattgcgttaacggcgggggaaaacgtagcaaccggtgtgggtgtgcagttaagcctcgacagccggctccgcccagcaaacgctgatgctttcctgcgaacccggaaccaatatatcaatgcgtgtgacggcgactga

SEQ ID NO: 204473 - DNA, 2184 bp, Klebsiella oxytoca
atgactgatactcctcaatgggtgcgtgacttctttggcaacggaaatttactgaagctggacaggttgctagaaaacgttgaaaacgcctaccctgcggacttaaaaaccgtcttactgccgctctacgagagcgcgactgacgctcagtggccgatcattctgccctggtgcgatgctcatcgctgggtattttttgccgcggcagaaacggatcgcaccacgctggagctcagcaatgtgttgaatgccaggctggggtctgccgatgttattgccgatagaagggtgactttcgtccccgcgcagggagcgacatcgctgtctgaaacggctctgctgacgcactgtccggccggatttatccggatcgaattactgcccacaaagcagaaagataaaccagcaaaagagcgggtcttcgccgcgctcaaagacgttatcgctctgtttcgtgataggccatcaatcgtacgcacggtcaaacgtccctttgggcggatcttgagtgatttcattctggcgaatagccaaaaagacgaagccacaagcgacgctttactacaggaactgaagaacaacggcgcgctttcgcgacgcaaccttatgctgcttgaactccagcaggcgggtaagttagagaagtgggacacgctgctgaatcacgattcgcttgctgatttggttcggggacgcattcccacaactctgatgcggatgctgctgaaagcataccagcagcgcttttttacacccgacatccacgggtatccgcaggcctccccggcggatcttcgcccgcaatgtctggcgctacaccctctgtttacgcagatgccttttttatcccaggatgaggctgactttgcggcgtggaaaacctgggccaccggcgtgatgcttattggcgaagtcgacctgctcaacgcgttaccagaacgcctaaaaaccgactggttgagtggattgcacacctgggccagtcggccgttctacgttgtgagtccgtcagcagcgacagcgacggcgtcgctcccggatacgctgcaacagcttgccgcatatctgcaaacctccctgaccgcaacgcaagaggagattaccggctacgcacaaacgctccacacgcttgatcagcagttgatagagcaggcgatggcggtaccactgctgaaaacactcatcgaggagatccgccatctgaccaatccgcaaatcgtgggctgggatatctgtttctcccgactatgtcagtcagaagtcgacagcaacagcctggtgcaactggtcgcgctggaaagtgaaaactggcccgccgactcgttccatgaagcgacgatgctccagttactatcaagtcaggttccaccagacgcgttcccgatcctgcgtaacgtgatgcctgcctttattgaatggcttgaacgtcatcagttcagtctgagtagtacgacgtggctaaagtggctggatgttcttgcgatggaacaaagcgtcagtcaggcggatatcaagctggccacaatggtgacggaccgcttcctacaaggctctgttagccaggaagcgtatcaacagtccggtgccatgctggaactgatcgtcgaacgcgccagttcattccgcaacctgccagcgctgggcgagttgatcgaactcttccttgatgctccggtgcaggatcgggcgacgctcacctcgctgtggctcagcgttcagtcttttgtgagcggaatatgggcgcgattagatccgactactcgtacagtgatgcgcaacttggcgactgacgtgctaggggaaggtgcagagcgcgtatttccggctgagcaggatagctgtacggcagatgcagaagatgaattgccggacttatccggagccagagtggcgatttatagcctgacagaaggcgcggtaagacgcgcgaaacggatgctggaaacgctgttccccgggatcagagtggagatcagccatgcgcacactgcaaccgacaagttgattaatcaagcaaaacaggctgattacttcatcttttctgcaggcagcgccactcatcaggccttttacgcggtctcagcacagcgcagagatttaatctaccctacaggtaaaggtgccgggtcaatgctgaacgcgtttattgcgcacgttcagcaggtctctgcagtagtggcataa

SEQ ID NO: 204474 - DNA, 531 bp, Klebsiella oxytoca
atggaagaacaacgacaaattttcctacatggcccactgggccagcgacatttgcgggaaattctaagcgcgcagtttagtggcttgatcctctacccagaaccgatctggctgatctcaccgtggatgagcgactttgacgtgattgataaccggggcggtcagtggagttttcttgatccttcatggggggcccggatggtcagcttccaggaattgctcgccaccgccgtcaacaatggctgtccgctacgcatcgtgacacgtgaagacacgcgcagcgtggtctttatcgagcgactgttgacgcgcttatcgcccgatcacgacatgcaatacctatatcacgagaacctgcacgccaaggggttgctgaccaaacatttctttctgaaaggatccatgaattacacctggagcggcgcaaacctgaacgatgagcatctgctgttttcaactaataatacggtgatttcagatgcgttgattgaatttagcggccagtacacctttggagacacccatgactga

SEQ ID NO: 204475 - DNA, 4437 bp, Klebsiella oxytoca
atgtctacggctgatttgtcccacttgcaccaggcgctggacctgctcgaagagcgggaagcggaactgctggtctggggggatacggatggcgcatttacccatgccgatatcatctcactctttacccggcacctgccctacgaagatgcagagtcgttactggcagaactgcagaatgctgccatgctcttcagcgtcccgaccagcaaaggggggacgcgctaccgcacgcgtatggcggaatcggtctacctgttccgccaccagcgtcaatggttccgcgatcaaccgcttcagcgagcccggacgcttgtcgccgactaccgtttcgtccgtcgcccgcgcaactatccgaagcgggaacttccggcgcaaacagtgctgagcaaatgggtcgacgtcccgtggatgaacgagattaaacgcaaggcgctttcccgactgatcggcgacttttccattgccggctttcaggaacgctcaaccgaacgtattttgcgcgcctggcactttcatagtaatcatgctcacgcgaaagaagccaccgggaccattgtctgtgccggtacggggagtggtaaaacgctggcgttctatctcccggcactcacctcgctcctcaatgatattcagcgcgacaacgcacagcgggtcaggacgctggcactgtatccgcgtaaagaactgcttaaagatcagttcatggaaacctggggcaaatgtcgtgaactcgacagtcaggccctagcactggcaggacgcaagatccgtattggttcttttttcggtgacaccccgttcaaccatcaatacgcaacgaaagataaagacaaggatatgccctttgatttactccgttgcaccacgccgaaatgtccggggcaaatgcactggaaagcagaagatatcaaagcgaaaagagagattcttcgttgtagccactgcgatcacagcgtagacagtgacgaagtgatcctaacccgcgtctcgctgatgaaaaacccgcctgacatcctgtttactaccaccgaaatgctcaatcagcacctcgggaataaccaaacgaatcacctatttggcgttggcatcggcgtaacaccgccgccggtagtcctgctggatgaagtacacacctatgtggggaataccggtgcgcagacagcctatctgctgcgacgctggatgcaacttgcacgcagccgcccccattttgtcgggctgtcggcaacgctaagtgacgccgaacgtttcttcgccgatctggtaggcgcgcataaaaaacatgtggctcttatcgaaccgaagatccacgaaatggaagatgaaggggctgaatatctgctggcattacgcggtgatccggtctcgcaaaccgccctgctgtctactactatccagaccagcatgctcgcccggcgtattctggatacgaaaaggaaaaaatcacgcgggacatgggggcaaaaaaccttcgtcttcaccgacgatctggatatcaataaccgactttatcatcaactgtgtgacgccgaaggctggcggtcacgtggtcaaaacttatacgttgcgaaaccgccgctggccgctcagcgtctggaaacaccgcaaaacagccatacgctgactctggcaggacagaactggcgtatcgcgcaggatattggtcacccacttgacgaaaatgaccgggccatcgttgcccgaacgtccagtcaggacgtcggggtcgatcctagagcggaagtggtaattgcaaccgcgtcgctggaggtgggctttaacgacccctcagttggcatggttattcagcataaagcgccacgtaacgttgcctcctatttgcagcgtaaagggcgtgccggtcgttcaagaactatgcgtccgtggatggtcgcagtcctgtccgaatttggccgcgaccgcgtcgtttatcaacgctatgaagagctcattaatccagagataaaaggacagtcgttgccgatgggcaacattcatatccagaaaatgcaggcggcaatggcgacacttgactggctgagcatgaagatccccggaagtaatatctggtcattgctgaataaaccgcagacaaagcgagagtctcttgaccatcttgatcgtatgttccacctgattaccgccgtgatcgaacaacatgcgtggcagcaggagttggaaaagtatctgttctacgcgctgcgcatcactgacgagcaacttcagcgtgtactgtggtcgccgccccgttcgatcatgatggagttgctgccgacattaaaacgacaactcaccacccaatggtcgcggatgggccaaccggaggcagaccgttcgacgggacgttccccgctgccggcctttattccttcagcgctattcagtgaactcaatctgccggaactggagatccatctcgagcggaagttcaagaaacgtgaacatttgccctttattcagggtctgaaagagtttgcgccggggcgcatttccaagcgctatgccgtttactccgacaatgaagcagactggcttatcccgaacaactttgttccggcgatgaattgcgtttcggatgttgattttgaaattgagcaggctttcggcgatacctggcagcccgagtgtatcattgagtatgaaggtcagccccctattagggtcattcgcccgatgcaggtgcttacgcgcgcgctgcgattcgagcaaaatctcaccgagaaaagcaactcgcaactgtactggcatacccggtttaacccagacgatcaggccgatccgctccccattcctgccggcccgtggacggacaccctccactccattacgttctttacccaccagaacatgacacctctcgacgtcacgcgttacgccacccacgcaacagcctcattacgcaataaaaccaagcaacaggcgcatgtgaacttcaggtgggtcgacaatggcgagcctgtcggggttggcgtgcggcagtgggtggatggcgcccggctcagatttacgctgccgcccactctgctgcaacgcctccggcatgacccggccattcagcgcgcactgcgaacgctctatttccagcatcggatcaaacatgaaccacgcttcgaatatgacacgttcaccgctgactggatctacgagtgctacctagcggcggttacgcgggaattggccacacagtcgtctctggcagactctatcgcggaattaaaaaccccggacggccgacgtcgactgactgatatcgcggacacactcttccaggcagagaatatctttgaaaatagcgaggatggtgaagacgacgccgaaagccaggaactgcagcaacatttgcgcaacctgtttaaagagaccgacattctggaaatggtggacaggcacagcgcgatcctgactcaggatctcagtgatgatgtcgattttcaggactggctacagcatctgctgacaacgacccttgccggagcggtcaaacaaaccagccacctgttgctgccggatgtcgatgaacgcggtctggtggtggataccgaactcaacgacgaagtactggacatctggctgaccgaatcagaacccggcggctgtggcatcattacccgtctggaagacgtttttcatcaggatccggtctccgtactgaatctgtttatgcgtagttttgccgccagcgattacgagcagatcgactacgacctgttcgaaatgctttcgcggctcccctcttccagcgagctccaggaggccttaaatgcgatacgtaaggccagcagccatccgcagcgccgtgaggctaacgcccacctcagagcgctgttgaaggcgcagggatttgcactcagtcacagttttatgtcggtgctgcacacacgggtactacgtccgggcagccaggcatcacatgatgcgcagatgcttgcatatctcaacgcatggcgggaactggaagacaaagccggatacgaaatcgctctgaatatttttgcccatacccaagcgacgcaagaactgcctgacgccagtgtgattaaagtttttgagcgcttttgcaaaattcagggaatgctctggcagcgcggcaatgccatccgtcagtcggttctcagctattacaatccgtttaagtccggtaacaacctgactgaacgactgctgctaagctcactgtttcaacagacggcgtgcagcatcagcatcagcgagaacgactggttagcgcagttacatcaagccattacccaacacggctttgcagaactgcatatcccgcgcgaggcccgccatcgtattgtggaagtgatctctctggtgcaggtgaccccgattgagtactttggtttgcatctttatccccgcgaatccgccgtggattatcaggatggcaatctagtgttacgtattgaactggccgaagcgctgctgtaa

SEQ ID NO: 204476 - DNA, 849 bp, Klebsiella oxytoca; identical to SEQ ID NO: 100179

SEQ ID NO: 204477 - DNA, 3207 bp, Klebsiella oxytoca
atgagcatgatggagtactggccatccaggaaaaatatcgtccaatgcattcgcaatgaagcagaagaattagaggatcatgtgcttctggccgtgcatgaaccgatgctactgacccgacgcgacgtcaatgaaaatcataaaatattacgtgacgaagacctgttccagcagttacttcatacggagcgcgccatcccactgattggccgctcggggatggggaaatcacatctggtgcgctggttagactgccggttcaacatgtacctggcggaaaacgaccagagcgagcaatgggaaattgtccggatacccaaaaactccagtctacgacaggtgcttttacgcatcctgaaaaacttgacgggggaatttttcgacaacgcacgcatgcgcgttaatgaagtaacagaacagtatccggcgaaagatctggcagatctactgttgaccatgatggcccatcagttgcaggacatgcaaaaagcggtcatggaagaaggtcaaacgctgctggcacaaggtaaagacattccagcagaccgactcgcctatatggaagccatcattgaagaggtggaaaacggtatctgtgatctgatcaccgaccccaacttcaaacagaatcttctgaagccgggccactgtattttcaaacttgccagtcggatgagtagtggtctggaagaaggagaagaagatcatgataaatatgaacttcttccggaagatctctattttgtctttgagcctgacgatctgtccgcgcgtgcacgccgctatcttaaccattctcaactgcatgagtcagaccaagtggaggcgcgtacccgtgcagcgcgcgtgctcaatgaagccatgcatacctcgctgaaatcactcttcaagcgcctgttcaccttcaatggaggatcttttcaggagctttttcaggaaatccgcaaggagtttctgcgacttaatcgccgtctggtgattctggtagaagatatggcggcgatctccgccattgaagatgtcctgatcgacagcctgatcgaagaagcggcacctggcggcgtgcaaattctctgccctgtccactcagtgattgcagtcaccgacaattatcccggctataaacgccgccaggaaacgttaatcacgcgtgctggctacgagtgggtcatcgagaacgtcgataaagacaataacgaagatcgtattgtctcgctctgtggtcgctatctgaacgccgcacgctttggatcagaggagttaaaaaacagtcctgagcaaggtaagccccagtggccacctgtctggcacagtgatgagatccccaatgcactagaagattttggttattctgccaataagaaattcccgctcttcccgtataaccgcaatgccattttggcattggcggataagcattgccgcgacagcagcggcgagttgatttttaacccgcgtacaatcattaaccgcatcctgttagatattctgcgcgattgcagaatagaagcggaaaaaacacagttcccgccagcaaatttcgctggaattcatgccgttcccgagatcgaagacaagatttcacagatagttgtcaaccgggttggcagttcggtgacgcttgccgccatctggggatatggcattgattcatttgatgaactacgcgaaaaactgccgggcagcgttgcgagtgcctttggcctcgatgaactagcagcgcaactgaatggcaaaggtcccaccatggagtcggcggaaccagcaacaaagaacgcacacgaaacggcgggcaaaacaggcagtacgccggcgggtaaaaagattgacaatccggaattcaaaccgaaagaagaggcaaaatacactgccaaatccgaactaccctttatcagggcggtccgtgcatgggtgaatgacaatgtcattctgccgcaggatgttgcccgtgatttgcgtgcggcactgaacgcctgttatgaaattcatgcacagccagagttgttcggtatgtcttctcggccaccgctgaaagaaggtcgttttacgttgatttcactgccaaaagcggcgtctgacccctcaagcattattacgaacttttactctgagcaggacctgaccgatccttcccgacgggtagatgtgtataacgctgcggtagccctgttacgtatccagtattacgccggtttaaagcaaggctttaattatccagaggcgcaggaagactacactcgctatcaaaacttcatccagtggtgggtgccgcaggctacggaaagcgccattaatcacttccgggcgcgtaacttacaggatgcgcttaaaaagcatctgcaaaaagctctgctgcttggcctggtgacgggtaaagaagaaccggcggagatcgtcaataccctatgcctcacccagaaaggtgtcgggagaaccgaagggaaaagtaccggtcgaacgctgacgacctctccttccgagatctgtttcagagggattgaggcgaccctgcatccgcacgccagcgccagagtcgccgaagccagggcgcaggcgctcgtaggatgggatgatgccagaaaagcgtggcttgaacaggttgccatcactgagcaaggctcaggcttgggcagcagtcgtgcgctggatgccgatgtaatatattccgcgctgaaaacagtgttaaaacagccgcttggtgcggaaattgaacgtgcggcgctctccgtcaaacaggaacttgccagcacgctaaaaaatgttcatctctttgccaacattaaagatagcgacgatttcctcagccaactgaacaactggcagacgtttattgagactgtgcggaccgagcactatcccacaggcagcgctcagtacaaaccatcttcgtggctgctgggtgaaattgaagccctcagaaccgacgccgaggagagtctggcgactttaattgcgttactttccattgaaaaacagaaagatagtgcgaaattgtggctggagatctgtcgacttgacggtgactacgtttcaagaatcagcagcgtacttgcgcaatggcaactggtacaacccaagatcgcgttcacactccagcagatgaacgccaaaggggatatccagcaactgactcttgctctgaataaagtgaatgaccgtctgaaaacacttgtgagcgatatcatcgcctctggagccgatcaatga

SEQ ID NO: 204478 - DNA, 876 bp, Klebsiella oxytoca
atgtcaataattaacaacgcaaacccaggaagcggcctgatactgcttcctttgattgaacgcgttctgcaaagcgcacaggaaccgttgtctcaggacacgctgctcgcccgctatcgtcctgataacctgcccactaacgataacgcatggggaaaattaaaagagaacctgagcttctggtgcaatctgggactctggccgatgctcgacggaaagatgttaccgcttgaagcaggtgtgcgtccgttggcgcatcggttgcttacctgtacgattgatgcttgtcgtgaaaacggcgttgccagtgggaatgaatgcgaaccgctgtggcgggtactgagttgcctgttgagccttcagcaacactcgctcgggggcctggaacctctctcccctacgatcatcaccaacaaagtgcataaatggttacccggcgaaaccatcaataccaacaccgaaaaactagtgagagaatttggtcgttttctcggttttctcgagttaatgccggacggaaattatgtcaccgaccctacccgggccattcaatattttctgccggagatctttgacgatacgcgtacccttcccgccaaaatctttatggcaaacatggcggaggtcatgccaatgatggacgggggccagttcagaaactccgttcatgacgtgatgcagcaggaaaaagactgggtcgcgccggaaggtgacaatatctgcaccagcacatccgttgcgctgcaacgacttgaaatcagtaagcgcattatcctcgccatcggcagtgatgataaagacgccttatcactccacttacctggcggtaaaattcgccgggttagccaaatcacgctaagggaggatgcagaatga

SEQ ID NO: 204479 - DNA, 2481 bp, Klebsiella oxytoca; identical to SEQ ID NO: 81883

SEQ ID NO: 204480 - DNA, 3108 bp, Klebsiella oxytoca
atgaacgtattacccattgggtcacttgttgtctctgagcaatttgaaggcataggtaaagttgtcaccgtcgatagtgatacaaataacgccacggtcgctttttttgagtcaccgactcaaccttatgcacggcaaacgaatgttcctttagaacaactcagcccgacaatcccgcacgaagaggcggtaatttattgcattgaaccaaaaagccaacgatgggctagagcccgatttggcggttcgcgccccaaaggggattttctcgtcatctttcgcgaagatgaaagtacgacgctgacaatcgacgaaatttttgttctgaacaaagcgccggataccccagtaaaccctgcagatttccttgcccaccaagctaatgacgcgccgttctttttccctcaccgccaagcctttattgaaacttacatccaacaacgtgctgcctgccgggcgatggcatctatttccagtagcgccgttgaacttgagccccaccagttggcggtggtgcgccgtgtgcttcaggataaaaaccctaaatatattctggccgatgaggttgggctggggaaaaccatcgaagctggtatggtcgtccgtgaacacgcgttagaaactactggccacgtcagcatgcttattgcagttcctgcaccgctcgttaaccagtggcgggaagaactgggtgaacgctttcaactgaaacaacttattattgatgcctcgtcagccctcgcgggtttgcgacaagatgaggtcacagaaggcatcgtaatttgtagctattttgatgcttgcaccttgattgaacagggattcccaccttcgcttatcgtggtcgatgaggttcaccagattgcctcctggccatggtcaggagacaaagatgaacgttattacttcaacctgatcgctcagggttgccggaaagcccactacgttctgttactcacagggacacctctgcatggacacgaaaggaacttcttgtcaatgttgcactgtatcaatcccgaagcctaccaagtggatgaagcccatctgcgagactttaccgaactggtcaaaaatcgtgaaaacctcggcgggatcttctcggggttagtaccttccgtctcaaacgtcagcttacgccgtaatctggaaacactgcagcagcagttcccagaagatactgttctgatgacactctgccagcaactcatcccgcttattgggacgttctcccccaatacccaggagcgtgaagaaaggatccgggatattcgtcggcacctaggggaaaactatcgcattcatcatcgactgttgcgtaaccgccgtcaggtttcactcagcttcgatgaaacgaaaaacctcaacctaaaccttctgtttccagggctaaatggagcagcggagtgccgctggtattgcgatgggttagcgttagacgaactgattgatgagtatcgttccttatctttactaccgcagaatacgcagtgggcaatgagtgaagacacgtacctcttctggattgacgatctcctatccagcccactctgcgtcatgcaacgcgctaaagtacatttgggtgaagcggaacgcactcaggaagaacgagatctgttagaacacattgtttcaactgcaaaaaatgaacttcaggccattgataacaagcttgccatcaccctgaatgagtggctgcaaaagaattcaacaggaaaagccatcgtcttttgcgatcgtccggatcttgcccagcacttggcaataaagctcgaactgctgctggagtaccccctggagcgctatcagccgggtcaacccctgatgtacctgaaacccggcagccccattcggatcctgatctgcgataaaagcggcgaagatggtctgaatctccatgggggtctgcgactggccgttcactacggtttaccgcgctcttgtagccgtattgaacagcgccttggtcgtctgaacaggtacagtgcaaacctgaaaggcgtaaaacccgtccagagtctgatcctgaaaaatcacgccgaccgcggattacgcaacgtgtgggccagtattctgaaagacagcattggcgtatttaataacaccatcgccagcctccagttcgtcctcgacgattatctggaaaatgcgtggcaaaatgtctaccaagaaggtccggtggcccttgaacgtattgccagcgaattccctggcgaacagggcattctggccaacgaaacgcataaaattaacatgcaggaaaagctgctggcgatggatgacgagattgccgaggcagcgatttttgcgcaacagataagcgctgacgatcatcttgcagtagcgcagtgtaatgcgctgacaaattggatcacgcgtgcactgcgttttcgcgccaccggcaccgcagaaaaaggtatcaagtttcagttcgaactctctgaccgcagcacagggacgctggtcgattttaaaacctttctcaccacctgcatgctcagcttcgataaagaagggggtaacccaccgtcaacgcatctgatgagcgctgaacgcattccggcgatcgacggaacaaccgtttatccgctgcgttatgggcagccatttgtcgatacgatctggcaacttttaaaccaagatgcccggggcagttccatggcggtactgcgggtgctcccaaagccattgaatgagcccaattacttcttccagtctacctggcttgtcacccatcgccagacgcaggacacctacgcccaacgccgtatcgcagacgagttgtacccgccgcgtattgtgcaacactggctgtcctctaagggtacaccggtgacgaatccgcagttgctggaactgctcaatagcgagtacgccaaacatgaaacatcgcagaaattctatgcagatatgaatctgcgccctaatctctggcaagaaattgaagagcttgtctcaccggacacctggaaagagatggtggaacgagtctatgccagtgaccgggaacaacaacaggcaaccttcggcgaacaagccagactccagttaatggccgtcaaagccgtggtggtgtgcagcagaaatctactggaggaaatcgtctga

SEQ ID NO: 204481 - DNA, 174 bp, Klebsiella oxytoca; identical to SEQ ID NO: 81880

SEQ ID NO: 204482 - DNA, 261 bp, Klebsiella oxytoca; identical to SEQ ID NO: 81869

SEQ ID NO: 204483 - DNA, 1224 bp, Klebsiella oxytoca; identical to SEQ ID NO: 81865

SEQ ID NO: 204484 - DNA, 372 bp, Klebsiella oxytoca; identical to SEQ ID NO: 81861

SEQ ID NO: 204485 - DNA, 1476 bp, Klebsiella oxytoca
atgtccaatcattatttacgcattttcacgcagccaaaatcagctatcctgctgattctcggtttcgcctctggattaccgctagccctgacctccggcacgctacaggcgtggatgaccgttgaaaacatcgatctcaaaaccatcggttttttctcgctcgtcgggcaggcctacgtctttaaattcctctggtcgccggtaatggaccgctatacgccgccgtttcttggtcgtcgacgcggctggctgctggcgactcagatcctgctacttattgccattgcggcgatgggattccttgaaccttccacgcaactacgctggatggcggcgctggcggtcgttatcgccttttgctccgcctcgcaggatatcgtgtttgacgcgtggaagaccgacgtgctggccgctgaagagcgaggcaccggggcggcaatcagcgtgctgggctatcgtctggggatgctggtttccggcgggttggcgctatggctggccgatcgctggctgggatggcagggaatgtactggctgatggccgccctgctaatcccctgcattatagctactctgctggccccggaacccagcgacgtcattccggtgccgaagacgctggagcaggccgtcgccgcaccgctgcgcgacttcttcggccgcaataatgcctggcttattctcttgcttatcgtcctttataagcttggcgacgcgtttgccatgagtctgaccaccaccttcctgattcgcggcgtcggttttgatgcgggcgaagtgggcatggtcaataaaacgctcggcctgttcgccacgattgtcggtgcgctttatggcggcgtgcttatgcagcgcctgacgcttttccgcgcgctgctgattttcggcctgctgcagggggtatccaacgccgggtattggctgctctcaattaccgataaacaccttttctccatggcgacggcggtgtttttcgaaaacctgtgcggcggaatgggcacggcggcattcgttgcgctgctgatgacgctgtgcaataagtcattttcagccacccagttcgctttgctctcagcgctctccgccgttgggcgcgtatatgtggggcctatcgccggctggtttgtcgaagctcacggatggcctgctttctatctcttttccgttgttgctgcggttccggggattttgctgctgttaatttgtcgccgtacgcttgaacatactcaacgttcggagagctttatgccgcgcacgctttttcctcaggcctacgggctggcattagttattctggcgattggctgcctgatactggcgatatggctactgctgctggtcctcaacgcgctggattacaccaccttttccttcctcgcgggcctgcttgaggttgccgttcttaccgccgttgcgggtattttgctcggcgcgttccttgactacctcgcattgcgcaaaaccgagttgatttaa

SEQ ID NO: 204486 - DNA, 1644 bp, Klebsiella oxytoca
gtgaaagctaaatgggtattaatgttttatctaggtatcttggaactcagccttatgcaggcagaggctgcgttaacgccgagtaatcaggctgaaagatcaaatgaatttctgtttattgaaaataataatgatgacaattattttcttgcgaatacgtcacttgatccgaggctgtcaggtgccagtaagtggaccagcctgaaatattcaggtagtggtagcattaccggtacccagcaaagcctcggttatatcagcacttatgtacactatgcggtgggatccaataataaactggatatgtggctggaaaactctcctgtctcacatcctctcaccggctggcgatgtattaactggtataacggctgcaatatggacaccagcctgattgagccagcaataacagatagtgaaggattttacggcgcgcaaaatgttgggtcgggggccaaatggctgcacggtatgttgtcggatgcgttctatcagtacctccgacagatgccagtaggtagcgattttacaacgacgatcaatgcctgttatacctcagccaattacgatgcccgtgcaggtgagcgttgtagggatcaaactacaggctcatggcgcaccagtaaagtaacccacaccaaagtgggacatttaaagataatgaacactaacgggctccaggaagtctttataaacagcgacggcgagcctactattggagaagggaatgcaaactgccagtctgtaactgtcgggactcgaagcggactgagctgtaaaatggtcgactatacgttgcaaaccactggtatttccaatacctcaattcgtatatacccggtgattaatcatgcaggcctatcttcagcaattaattcacaggatatgcagttcagtttggatggaaataactggaaaagagggagtaatgctgcttattattataactttaatgatattaaatcagcgaacagcatctatattttcatttccagtaacttttttaaaaaaatggtggagttgggtgtcagtgatataagtacccgtgatttatttaatctccgtttcgagaataccgtttcagtagaatcagggtattatgagttttctacctcaaatgaactgattatcaaaccacgtaatttcagcatcagcattatttccgatgagtacacctcggcgccgacccgcgagggctacgtgggcagcggcgagccgtcgctggatttcggctatattgtgacgactagcggtaagaccgccgccgatgaagtgctgattaaagtcaccggcccggcacaggttattggcgggcgttcatattgtatttttagttcacccgacggcacggcgaaggtgccgttcccggcgacgctggcgtttacgacgcagaccgggtcaaccaaaacttacgatgccggatgcgatgatacctggcgcgatatgaccgatgctctgtggttaaccacgccatggacggatatttccggcgatgtcgggcagatggacaaaacgacggtgaagttttccatcccaatggataatgcgatatcgctgcgaacagtggatgataacggctggtttggtgaagtgagtgcttcaggagaaatttatgtcaaagcaacgtggcgcaatgccaattaa

SEQ ID NO: 204487 - DNA, 738 bp, Klebsiella oxytoca
atgtcaaagcaacgtggcgcaatgccaattaattggctgcgggtattttggacgctgctattatttctgcctgttatcgcgcaagccatatctgtgggagatatgactttttccatgtcgccgggtgagaaattcgtggccaaaagagtcgtgaatcacaatagaactgcgcgactctaccaagtatctatcatcggcatcgatcgccccggcgggaatgaagtacgtagccgaccggcagatggtgagctgttgttttccccgcgtcaactcaccctgcaggcgggggggagtgaatattttaagttttattaccacggtccgaaggataatcgcgagcgttattatcgggtttcattccgtgaaatcccgactcgcaattacgtgatgcgtaatcaaagcggtatagaagtgagtatggatccaattgtggtgatcgacactattctcgtcgttcgcccgcgtgaggtacagttcaaatggtcttacgatcggacaggaacggtcagcaacattgggaatacctggtttaagctgctgattaagcccggctgcgatatgacggaagaggaaggagatgcgtggtatctcagacccggagatatcgttcatgaccagaaactgtcaaaaaaaggaaatcatttcattatttataatgataaatttataagaattgatcagcagtgtaatatcaacaaccagcctgaatctgaaagagaacgaaattcacaggcgtga

SEQ ID NO: 204488 - DNA, 438 bp, Klebsiella oxytoca
atgagaaatatattcttttttatagctatttcggcgatgtttgtttgtaatgtgaaagctgaggcaactatcagttgccgtgcaaaacatactcttcatcgcggggggggcactgtaaatgcattttatcatttcttatttgataattctaatggtgtaattatgtttaatggaactatcatcgacggagaaactagttttattgtgagtcgaactatacattttgattttactgtcgcaaatggcatgtataagtccgttaatcgtgccataagcaagatcccgacagacaacacaccagatgaagttctggcaaaacactttccttcattctttataaaaaaaggcgaagttttaacacttcgtacctacaaggttaataaaagagcatatattattagttttgttagcacgccgacattttattgttacaaataa

SEQ ID NO: 204489 - DNA, 774 bp, Klebsiella oxytoca
atgacgactcaatttcttgaaggccgtatcgcactggtcaccggcggaacaaccgggctaggtttcggtgcggcgaaacgcctgattgaacacggcgcaacagtctatatcacacgccgccgtcagaacgtgctggacgaggcagtaaaaaaacttggcacctccgccagagcgatacatgcggatgtctcaagtaaagaagatatgctgcgtgcggctgcaaccattaaggccgaacaagggcatctcgatattttgttcgctaacgcgggcggtggccatgccacaccactcgaagaactaactgaagatcagatcgacagcgaactgagcattaatattaaaggtgttgtactcacaatgcagagcatgctggacgtgcttcgcgacggctcttctgtagtacttaacgcgtcgatcactgcagatatggtgttacctggatttgctgtttatgcagcgactaaagcggcagtacgttcactgtcacgcagttggaccacggatttaaaagggcgaaatatcagggtcaataccataagcccgggtgtagccccgaccgaaggttatagcaacgaactgaacatgagtgacaacgatattgccgcatatgtggagcgaatttctgcagaaattccggctgggcgcgtgggcagcacggaagatatcgcggatgcgctgattttcctggtatcagattcgagcacgtacatccgtggcattgatctgattgtagatggcgggatgacccgtgtgtatgcaggtaagaactga

SEQ ID NO: 204490 - DNA, 195 bp, Klebsiella oxytoca
atgcagaaaataaaatcagaagaacgccacatcatctgtaaactgaggtgcaagcctgaggatcgtgaacgcgttaaagagttggttcttaaatttgttgagccagcacgcctggaaacaggctgcctgtcaacgtggtcaggctcctttaccactacagctctgggtacaaaaaatcaccttaacgtacaataa

SEQ ID NO: 204491 - DNA, 318 bp, Klebsiella oxytoca
atgaaaaaatatctgactgcaattgttctgcttggcggttgcctagtagctaataacgcgctggcgcgtgaggtttccaccatcaaacaggcgaaagcgatgcgtgataatacaaaggtggctctggaaggaaaaattaccggacgagcaggggatgatgatcgttactggttgcaggacagtacagggaaaatcagagttgatattgacgatgatgaaagaggtctggttggcaaaaaagtgctcgttgtcggtgaagtcgataaaaacgacggaagaacagaagtcgatgtggatcatctgcgcgttctcaactag

SEQ ID NO: 204492 - DNA, 930 bp, Klebsiella oxytoca
atggctaagaaacgattgcaggttgctctggtggctgttgcgctgctgcaaatgtcatccctggcgtcggcaaaggacattagggtcacttatgctggctccatgggtaaggtaatggaccaggggttaggcccggcctttgccacagcaaataacgacgagtatcaggggcaggggcagggtgcgtacgggatggcacgtctgctggcaagccacaaaattgaggccgatgtattcgtctccatcaccccaggaccaatgcagatcctcaaagatgccgggctgatagatgaggcggcccccgtcgccagcacaagtatggtggtcgcttacagtcctaagggtaaacatgcggcgcagtttgaacaggccagccggaagaaagacggctcgtggctgacgctgctggcgcaaaaagatgtctcattcggtcgcaccgacccttatgtcgatccaaaaggccagaatattgtcttcagcctgctgctggccgaaaaatattacaaaatgccgggtatcgccgataaaatcctgggctctttgcagaacccggagcagacccatcaggaaggggggttgctggcgcgtctggaaagcggtcaggtggatgcagctgcagggtatgaaagtgaagttcgttcagctcatttaccttacgtcgcgctgccggatgaaattaacctcagcaacccggcgatggcgaaaccgtggtatgacacggtcagtttcaccattaaagacagcaaaggccaggatcaggtcctgcacactcaacctatggtgttctatgcggcagtgctgaaaaacgcgccaaatggtgtggaacagggacaaaagttcgtctcgtttatgaaaagcgccgaggggcagaaattgttcaaagcgtttggctacgccgggcctaaaggggaaagcttatacgcccgctaa

SEQ ID NO: 204493 - DNA, 609 bp, Klebsiella oxytoca
gtgctggcgctcggggttatcattcttatcggtatgccggtgtcatggtggctgtcacaagccaccggtcgaaaacggttgatcggtgaacttctggtgatgatccccctgctgacgccaccgctggccatggggattttgctggtttcggctttcgggccttatggcatgtttggtcgctggctttcagtgttgggggcgacgctggtaaataatccggcggcgtttgtactggcccagatctacggtgccttgccttactttatcgtggtggcgcgttcggcgtttgccactgttcccaaaaatattcttgaagcgggacaaacgttgggtgcctccccctggaaccgttttcgttttctcactttaccgctggccttgcccgggctggcttctgccgtggcgctcgcctgggctcgcgcggtaggcgagttcgggatcgttatgatctttgcttatttcccgcagggtataccggtaaagctgtataccaatctgcaaaatgacggggtggacgcagtgtataccttactgtggatgctgcttttagtgacacttcccctgccgatggtctgctttgcttttggcaaacgaatggcaaggaaatga

SEQ ID NO: 204494 - DNA, 936 bp, Klebsiella oxytoca
atgcgcaaaaatcttgatgcgtcagtgtatatcattatgttttttgtctgtgctgtatggggaacgcagcaggttgcgataaagattgccgggcaatatgtctcaccggtgcttcagctttcaatcagatcgggtctgtctgcattgataatctttcttctttttaaccaccgtgacggaatttctaaaaaaatcatgtctccaggcgtcgccgcagcggggatttgcgtcggactgctgtttgccctggagtttctactggttgcgctgagcatatccagaacgactaccagccatatcacccttttcctttatacggcaccgttatttactgccgtcgggctgcatttcctcctccgggaagaaaagatgacgcgcctgcagtggcttggaatcattgttgcctttaccggcattgcggtggcagtgaagtttaccttttccgctgatgctgcaattatcggtgatgtatgtgccctagcagcaggcctagcatgggggatatccagcatcgttatccgcctctctgcactgtcatccctgccatcgtcctgcacactgttttatcagctggcgacgacaagcgtgatactcgcccttgtcgcctggtgccgggacgagacgctgtttattctgaaccagacatcgctgctcagcctgttatttcagacgcttgtcgttgcggttatcagctacctgacctggttcaccttattacgctactataaggtctcctcactgggtacactcatcctgatgacccccttaatggggattgctgcgggtgcggtatttctcggcgaaaagctgcaaccgaatttcatcatcggttcggctcttattctggctggcctgttgttaacccgtctggggcaaaacccgtcccgcgtacgcaaggcgaattttgataagaaggaaagccattgtgagtcataa

SEQ ID NO: 204495 - DNA, 1056 bp, Klebsiella oxytoca
gtgagtcataagcctgtgaaatccgcgcctcatcagacagagtcatacgactttattgatgccattgattgtttgcctgtcggcgtgaacacggtccgacctgaactcagtattggcattctgctctggccggaatttccgttactggcgctggctggactgattgattcgctgcgtcatgctgctgattttggcgataacagtcagaaaacccgctgctcctggttcatcatgagtcctgatccgacaaagccggtcctgtcgagttcaggtacttcgatacaaccggatggtggctttcgtcgaccagaggattttacctatattgcggtaataggtggcctgttgcgcagtctggagacggggtatccggctttccgggattatctccaccgtgccgcaaacgccagtgtgccggtaatcggtatctgtacgggcagctttattctggctgaagaaggattactggattatcgaaaagccgccgttcatccataccatattcaggattttcgaaaacagcatgctgctgtttatgctgaaacgggccatgattttatcgatgaaggggcggtgctgacctgcgcgggaggcatctcgacaatcagcctggcgactgaactgatccgccgacattgtggcccggatcgggcaacaaaggccattcaccagatgtccgtgccaaacaagattgatgatacggcgatttctgtcgccagagcgattggtttcaccaaagtcagcgatccgcgtttgcgcagcgcggtcttcctgattgaacagtcgctgctaaaacagatatcgacagcatggcttgccgctcaggttcatcttagcgcacggcaacttacccgcctgttccatgatgaatttagtaaatcccctcaggattttatccgtagcactcgcctgaaatacagcagctggttattaaaaaactcgactgaaagcatcaccgaaatcgcgttaaggacaggattcagtgactgtgcccattttattcgtaactttcagaaagaatatggttgtacgccaggttactggcgttcccgatga

SEQ ID NO: 204496 - DNA, 636 bp, Klebsiella oxytoca
atgaaacaccggacctggctacttgaagccctacatctgcacttcgacgagcatttagcccgggtcgaggccggacgccgcctgggaattccaaaaacgaccgtttgcgatctttttgttcgcttccggaaagccgggctttcatggcctctgccccccgccatgtcggaacaaaaactggatgaatgtctttaccaccctctatccagcgcaccgccagcacctgtggttaccgttatgaccgcaaaaccgatcgccagaaagcgcatccgcagaccaaacttcccgcgagcgttcaaaatcgcactggtcgagaaatcactgcaaccaggcactaatgtggcccagctggcacgcgaaaacggcattaacgataacctgttgttcaactggcgctgcctttacaggaagggcctgttgcttccacacaacagtgaaccggcactgcttcctgtcatgctgtccgccggacccgacagaactgtcaccgttccggcctccgggccggaaaatccgtccggtgaaacactgtgctgcgaactggtccttccttccggtaccgtgaggctgaaaggcacactgacgccggaaatgctgcaggtgctcatccgcgaaatgaaaggagggagccgatga

SEQ ID NO: 204497 - DNA, 294 bp, Klebsiella oxytoca
atgagaaacggcttcaacggtctggcatcaaaggtgcagaatacgcttagtgctgacccgttcggcggtcacctgttcatcttccgtggtcgccgcggcgacatgataaaggtgctgtgggcggatcgggacggcctgtgcctgttcaccaaacgccttgagcgcgggcgcttcgtctggccggtgacccgcgacggaaaagtccacctgacgcccgcgcagctgtccatgttgctggaaggcattaactggaagcacccgcagcggatggaacgtcctggtctgcggatataa

SEQ ID NO: 204498 - DNA, 678 bp, Klebsiella oxytoca
gtgtccaaatccgtgtacggcttccgcctggccggcgcggataccggcgtcattctgcgcaatgacgggaaaaattttaacttcctcactaccgctcccgggcaggccagggacggggcatttaacaccctccgacccttttccttcagcctgtccaccggccgcgtttccctgcgtaatggcgtcggtatctccgctaagaccaccggtccggacccgcttatcaacggccagacctaccgggcgccggacatccacaccagttttgtcaccggcaaaaaaaccaccacgatgctgatgggcgccagagttgttaccggtaaggaagactacgggctgatttcctaccgggatatgaaggggaactggaacgaactccacctgaaacccaatgccgagctgacggtcggccagctgacgaaacgaaatactgagggatggattaaagcggccggtgtccgcaaggtgaataacgggaaggataacaaaaccaatgccctgtggattcagggtgccggggacctgtctgctgatttttatcattacgaacgtatcggccagcaccattttctggggctgcatgtggccaacggtggtgctcagggatggtatgagtccgtaacgatggccatgcctacaccaacggggcctggcacagcagctccgatgcccgcatga

SEQ ID NO: 204499 - DNA, 309 bp, Klebsiella oxytoca
ttgattattgccgccgaagtaaaacgtgatgaacagggatactggatgcatcctgcgctggcgcgcagcggctgtgaaaccacggctgaattcagctactggctgagaacccacggactgcagtgcttcgtgatgacaatgcgcgacgaagcgcctgaggtcttcgctgtcggatttactgatgaagctccggatgcctgtggctggatacctgagccgccggacgacgatggctggttcctgggctccgtccacgctaccggcgacggtccagtctgctactggttccgccagacaacaaaagcctga

SEQ ID NO: 204500 - DNA, 642 bp, Klebsiella oxytoca
atgttcagatattttattttgcgtactgagcagcagttattctgttatttatacggtatcgcaccagcgttggtcctgatcctcttgttttatcctgttttccgggcgagtggattttatctggttgcgttgtctgttgcgctgttctgggcaggtcttgctctgtacacccgttacgtcgaccggatgagaaaaccggaggtctcaccgctggtcagtatccgcgacggtattcaggtggtggccatgttgccgcaccatgaaaaggcccagcttgaatgggaaattctgcaggatgatgacgtgtatcgccgtcagatgcttgcccttctggacctgcttcagcgggttgcctgcaggggattgatttatgcgctggcggtgatgctggcaggtatgtgcatgcttgcctggggttttccgcaggacgccacccggctggtcaatgcgcttcggagtatgcctgcagcagaactggtgcatcagacggggtttgttctgcgcagtgttctgctgatttccttgatatcggtgctgatagctgacgtggtagccggtaaaggattgccgaatgccttccgctgcgcattgctcgacaggctgccggcagaggccttgcgtatcagaagagggacagagtga

SEQ ID NO: 204501 - DNA, 348 bp, Klebsiella oxytoca
atggattttgaagcgcggaaacaaaaagcgctggcaataatggctgaacgcagaatgtggaaaagcaattacgcacctcccctggtacgtttgttgtggagactgggggtaaagatccctccgctaccctttatgtcgttctggcagctcttcgtggtgatggctgcacctttttccatagggtacgggctactgatgtaccttatggtctggcgagtacaggggatgagtcctctgttcgcttgtgcggtcagtcttatcgctggcgtattatttggcttaacgatggcgttatttcacctgtggcggcgaagggcgaataaattacctgactggaacgatttgtaa

SEQ ID NO: 204502 - DNA, 603 bp, Klebsiella oxytoca
atgactgaagaaaaacgccctgtactgagtctgaaacgaaaaccggcgccggacagcacaccagctcccgggagcgatgccatacccggcgtggttcgccggaagaaggtggtggtggtgtctgccccgcctgcctggaaggtaaaaaaagagaagctggagcgggaaaaaaaggctgcggaagccgctacgcgtaaagctgcccgggagccagttaaagcggtaaaaacgccgcctccggtacgttatctttatctgcttccgccggagcaggccatcatgaccctgaaagcgttctggccacagctgtttgacggcaactcgccacgcctgctggcaaccgggatgcgggagcagctgtttgccgacatcgcgagccgcgatctgccgctgtcgcataaacaggtaattaagtgcctgaaaagcctgacccgctcggcgggatatttgtcccggatgcgggagggggcttcccggtatgatctgcagggaaatgtggtggctaccgtcactgctgatgaagcgcgctacgccagtgagcgaatgatgcgggagctgctgcgtactgaacacatgcggagccagtccgctgactgtacataa

SEQ ID NO: 204503 - DNA, 609 bp, Klebsiella oxytoca
atgattttatacttgttaagcatacagtatatatcttgcattctggcagggtggaggtttcatgaaaccattttcattgttagcgccgcactactttggttggcactttttaaatatgttatgtgccgcattgagaaaaaacgccaaaaaatagtggttaaggataacaatgttgcaataattttaattacgggtgtttctgctttgcttaatccagttgtgtgtatgttgttgattgtattgattcctctttatgagctgaataaaaaatttcatttcctcacctttaaagttatcaatagtcagcctataggtaccgcaaattttcgggggggcgaaagttctgacagattcatccttaatgaacacggcgtgaaaaatcttcatcaaataacaaatatcaatagtgttcaaaatgaattgttattagattcggaaaaccctcgcgtatatattagttctccggagtttgataatttagatgatgtgggcaattatgatgattatcatgggatacatgttccagatatcaacccggcaaacggcttgccaatggttgggagtgttgatgttttaggtaatcccggcggtgttgatagagataattaa

SEQ ID NO: 204504 - DNA, 2853 bp, Klebsiella oxytoca
atgacgccacttgaaatctacaccatcgccggtggcgactggctgcggggcaatcttaatgccatcgcggcgttcatggggaccggtacctggtcgtccattgagaaaatgtgtatcgcgttttcggtgctgattgtggccgtcagctggataaaaaaacacagcgtgatggaccttatcggctgggtgttctccctgaccctcgtctccatgctggtcgtcgtccgcacgcccgtgcagatcatcgactacagcaacgtggcgcaggtctacaaagtggataacgtcccggttggcctggccatcccggcgtcgctgaccacgcgtgtgggtaatgccctggtccagagctacgagatgattttctccctgcccgacagcatgacctacagtaaaaccgggatgctgttcggcgggaatctggtggcgaaaagcaccgattttgtctcgcagaatccggaaatcaccaccctgttctcggattatgtccagaactgcgtgatgggcgatatctttctcaacggtaaatacacccttgaggagctgatgaactcccccgacccgtacacgctgatattttctaaacccagcccgctgcgtcaggtacccaatcacgactataagtttcttgaaaagccggagctgggcacagcctttatcagctgccaggtggcagcgacacagcttaaacaacggctggcgctcgactcccagactggcgggaagacctggagctactatgcgcgccagctgttcggtggcaaacccaatccggatctgctgttcagccagatgattggcgacagctacagctacttctataacgccagccagagtgccgggcagattatccgccagaacgtcaccatgaatgcgctgcgcaacggtatccagagctacgcgtcccgcagcggcgacacggcaagcctcgtgaacatcgccaacaccacgtcgctggaaaagcagcgtctggcacaggcgaccatggggcatcaggcattgcgttccctgccgatgatgcagacggttatcatgggcatcatgattggcctttttcccataatggtgatggccgccatgttcaacatgatgaccctgcaggtgataaagggctacgcgtttgccatgatatggctgcagtcctggccgctggtctactccattctgaacagcgcgatggcctactacgcaaaacagaacggtgtcccggtggtcctctcagagctctcccaggtccagctgaagaattcggatattgcgaccactgcggggtatatctcgatgatgataccgccgctcacctggtatatggtcaagaacattggtgccggcttctccagcgcctacagccattttgcctcctcgggactcagttcgacgtcgcaggccgcatccggtgtcgtcgatggcaactactcctttgccaatatgcagatggagaacgtcagcggctataactggggcaccaacagcacgaccagcttcgggcagatgtcgcggcaactggggaacgggggcacggagacgcagaccggggacgggacgacgctctgggatgcgcgctcctctaatttgccggtcgaaatcaatgtcagccagcaactggccagcgcacagcaacaaatggccagagagtcggatgtgcaggctgaaagcgcgctgcacggctacaacagcagcgtgacgagcgcctggaacagcctgaagcagtttggttcgaatatggggaccagttcttccatgacttccggagctgacaacacggaatcctctcaggattcgatggcaagaagtaaaatgatgaatgcagtaaattcatatgcaaaagcgaaccacattagtagagatgaagcatttagtcagcttatggacaaatcgcttaaaggaactgctactggtgaaatgtatggtggagctagcatgaaaggcggtttcgaattttttggaaatggcggacatattgaaggtggtgtaagaggctccataagcagctcggcaacttctggttcgcaagataccgtaagtgaatctggaaggagaactaatgttaataatcatgatacaagcagtcaggtagttaaagattttagagagtcatcagattatttcattagcaaaaaaacaagtgattcaggaagtattactgataataatgcttcgactcaggttgatcagtttgctgcttcactttcaagtgcaaaaaatagctatgaccaatacacgaccagccgtactcgtagccatgaatatagtgaaatggcatctcgtacagaaagcttaagtggtcaaatgaatgaaaatctgacgcagcaatttgcaagctttgttcagcagcgatcgccacagaatgttgaggccatacttactaatactaattcacccgagattgcatcacagcgagaagcgcttgcgcgtgaatttgtaaaaacacaggtggaaccaaaaattgatggggcatataagaattctcatggacagcttggtcagagcatggggactgtatcagcagggaattctagtgattctgttactgcggactatgcgcaaaattcaagtaaaattaataacatggttcatgcggctggaataaaaagtgatgtagggagtactgttaacacgatgatctcgcaagggaagcaagttcatgataaagctcaggttgaccttcatgctcaggaactggaagtgcaaaggcaacattcaaatctagaaaatggccataaattggagggaaataatgttggaaatgaatataatagaaggagggatgaacagacgtcgctccctggtgcagatactcgagatgagcttttaaaaaaggctcaagattatcagcaaaaacataaaccataa

SEQ ID NO: 204505 - DNA, 327 bp, Klebsiella oxytoca
atggaagagaaaaagggagagggtctgatgatgttctgcgtcgcggtcttcgtgattttcctggtcagtatcatgtctttcagcctgtggcgggacagacagattaatgcgtttatggcgaccaaccgcgcctggggtatccagtgtgacagggtttctcaggctgcatgggttatcagaaaaggcgagcgggtcgatttagaaatggaccatctttttttgtattgcgagggcgaccattttgtcgggcgcgatgatgccggcatacgttccatcactctcgataaatacatcgtctatcagtacatctcacaccagccacactga

SEQ ID NO: 204506 - DNA, 1956 bp, Klebsiella oxytoca
gtgaaagaactcccgctcattctgacacttcacgcctctgtcctcagtgccttcatctggctggcatcgccggcctgtgctgacagtggtaccgattataaagccgggtcggattttgcgaagcaggtgcagggcagcgggattgactcgctgaaaaacttcagcggcgagcaaaatctgccggggtataccgacagcccggatcagacaaaatactacggtggcgtcaccgccagcggagacagcgacctgaaaggcgactcggccgctgagttcagccagggcgagaccggtaaaaccattacggagtcattcctgaatcgtccgccggacctcgtctctctggatgcgccgtttattcaggcagcaaaggataccgaatcgaaagcggacactatcgtcggtgataccggacaggcctgcacggcccaggtggtgaaccgcagcgaattcacgaaccacacctgcgagcgtgacctgcaggtcgaggaattctgtacgcgtgaggcgacacttcaggacaatgcgaccacagtgacagagcaggtcaccacgaagcaggtggtcaccctggctcacagcggcggcaccacgcagtggaagggaactgccagaatgccggaaggcggtcgtctgaaaagcgtctcgctggacagcgacaatatggttatcgcctttatcagtcagtgtgacaacgagggggcggtacgggacagctgtaagcaggctattaacgaccgcctgacctttatggacaagactttcccggtcagcgtggtccagtggccccgctcgctgaccctctgctccggaggtcagaatacccattgcagaaccacccgttacgatggtaccggcaaaattcatgaatcgttttccgtcgacaaaacggtcacctccggccagaccttcagtctgacgaaatcctcaaaaacggtgcccaccgtcaacgtcaaatcggtccaggtcaccgtgacactggtcatggatgtcacccggaccacatatgctcccgcagtggtctgggttgagagttgcccgttcagtaaggatgagggaacccgggtcagtgaagagtgcatcagcccgggcggaacgaagaatatcgtggtggacggcaaaacctggtcattcacggaggcgtgctggaaataccgggatacctggatgacgcagccggccgataacggctcctgtgaaagcctgatgaacaacgctgcctgcacgctgtcatcccgccagtgcgccttttacagtgagggcggaacctgtcttcatgagtatgccacgttctcctgtgagacgcggaccagcgggaaacagatgatttgtggcggggatgtgttctgtctcgatggcgaatgcgataaggcggcctccgggaagaacaatgattttggtcaggcggtctccgaactggcggcactcgcggcagccggtaaggacgtggctgagatggatggcgtgaatgtcagggccttcactggcaacgcgaaatactgcaagaagttcgcggccgggttcagtaactgctgcaaggacagtggctggggccaggatatggggctggcgcgttgcagcggcgaagataaggcgctcgcgaaagccaaagccagcaagctgaccatcagcatcggggagttctgttcaaagaaagtgctgggtgtctgtctggagaaaaagcgcagctactgtcagtttgattcaaaactggcgcagattgttcagcagcagggacgtaacggccagctgcatatcggatttggcggcgcgaaaagccccgactgtcggggcatcagcgtggacgagcttcagcgtattaactttgaccagctggatttcacgaacttcatggaggatttaatgaataaccaggctattcctgagaacgcagcgctgacagaaaaaacaaaagaacgcatcaaagagcttctcacgcagtcttcagcaaagtaa

SEQ ID NO: 204507 - DNA, 405 bp, Klebsiella oxytoca
atgattgaagcaactaagcatgtctggtttgttttacgagacgaaccgctatatatcattcctgttgtatattcagttgtctctgcattagtcatgatttttttgagtctcaggacttataagagactgtggagccggatacttggcgcaacagttacatctttagtgattattgtctttagttatagcctgctttctccggaatcgacttataaagatattcaacaaggaaaggaaaacatttcctttgcgcttaaaaattgcagagtctctgcatttgaagcgcaacaggcagggttactcgggacaacaaaagatgcctgggcctgcccggacggtataacccgctaccttcctgttaaatacaggtcagagggcggtttatctgaaaataaaatgcattga

SEQ ID NO: 204508 - DNA, 225 bp, Klebsiella oxytoca
atgaaaacaaagagaaataatccataccccgatgaaaccggtaatgcggttccggtcggggagcctggtgcaggaaaaacagcgttttcatcagaactgatttttgcccgatcggatgtcactcagcttaagcgtgtttacggtgcgatgagtccgggagagcgggataagttacgccggacaattatggtcaataacccattcaggatgaacctgaaaaaataa

SEQ ID NO: 204509 - DNA, 363 bp, Klebsiella oxytoca
atgaatgctgtttcaagtgttcagggcatcgctgtctctgaaaaaagtaagccgtcttttctgtcccgcgtcttcaacaaaaagacggccctgaaagctgttaaatacgccctgcctgctgtggcggttgcggcgctgttcccgcaggcggcgatggccaccgcgactgacctgatgaagtccggtgacaccacggtcaaaggtaccttcggtaagtcttccagcgtggtcaaatgggtggtactggcggaagttatcgtcggggccatcatgtatatgaccaccaagaacattaagttcctggctggtttcgccattctgtctgtctttatcagcgtcggtatgaccgtcgccggttactga

SEQ ID NO: 204510 - DNA, 705 bp, Klebsiella oxytoca
atgtgtgcgatggatcgtagtggcgaagatgacttaagtcaatcagtaaggaatatcattttttgcattaaatcaatttaccatttctccccagttgctgtttgtgtgagaaatgaccaacacgacatgctttactctaatggctctttccaacagctatatgattttttcaaggttgaaagtgaaaaatccttattcaaagtgggagcaattaatctagaatatgttctgactcaattagaattcgattgcattacactggggcaaggttgcgtactgtgtaagaattttctatgcggtcattatagttttcagatccgtatggaatcaatgtatataccggctggaggagcctgtattctttggcagataaacttacaaatcaacttaccactaattggcaggaagagttttcgtaagtacttaattaaagatgatgagctttataattgtgtcatgtcaagattgaatgaaaaaaacctagagtctctttcttttgttattcttgggtatacctacgctgaggctgccggccatatcaaattacccccctcaacagtgagaaagagagttgagaagtcgcgagaaataattaatgagcatttcatttcctttgagcgttttcgtgattacctatttaagactaaaaagatattcttctttgttgattactgttcaactattataaatgttagcaacatgtaa

SEQ ID NO: 204511 - DNA, 321 bp, Klebsiella oxytoca
atgcgtatgtctgtactatttgctctgacgtgtttgttcagcgcgtttaatcttgtatttatgccatttcatccccttatgatgttgtgggccttctggttctccatcgccttcattctggttaatgtaattgcagacagactgcgcctgtggtccggtattgcatgggggatggctgccgctgtaatcgtcgcttttatgcttaatggtgcagaacccgatgaagaaaaccgggtactcatcagttcattcgcatgtcttgtctctgcatggtatgccgtgattcagttcagaaaagagaagagagagtctctgtcctga

SEQ ID NO: 204512 - DNA, 267 bp, Klebsiella oxytoca
atgctcaggtgtgacaggccgtttctgtgggggaggggaaactccccctttttctgcctgccggcgcaggaggacccgtgcgataaggatgtcccccgtgccggctccgcgtttacccggcccggcctccgggccttttgggtgaaaacccgcctctgttatcgccgtgtcgtgtgcgggcggtgccgtgccttcactatagcccggctgctgcagatgcaagggtgcgctgacgccgccatcctcgcccggtcgcagtgtttttaa

SEQ ID NO: 204513 - DNA, 978 bp, Klebsiella oxytoca
gtggataaatcctccggcgaaatagttaacctcacgcccaatggaagtaacacggtccagcctgtggcactgatgcggcttggtgttttcgttcccactctcaagtctctgaaaaacagtaaaaagaatacgctttcacgtacggatgctacggaagagctgacgcggctttctcttgccagagctgaaggctttgataaggtcgaggtcaccggcccacggcttgatatggataacgatttcaagacctggatcgggatcgtccattcctttgcccggcataaggttattggggataaagtggaacttccgttcgtcgagttcgctaaactgtgtggtatcccttcaagccagtcgtcccgtaaacttcgggagcgcattagtccatcgcttaaacgcattgcgggtaccgtgatttccttttcccgcactaccgaaaagcacactaaagagtacatcacgcacctggtccagtctgcctactacgatacggagaaagacgtggttcagttacaggcagatccgcgtttatttgaactttatcagtttgaccgcaaagtacttctgcaactcaaggctatcaatgccctgaagcgcagggaatcagctcaggcactctacacctttattgagagtcttccgcgggatccggctcctatctcgctgtcgcgcctccgggcccgtctgaatctgaaatctccggtcttttctcagaaccaaacggtaaggcgtgccatggagcagctgcgtgacataggatacctggattacaccgagatccagcgcggccggacaaagcttttctgtatacactaccggcgtcccaagctgaaggcacccaacgatgaaagtgcagaaaacccgcaactgccagcggcgaagcgggatgtcagtccggaaatggcagaaaaactggctgtcctagaaaagctggggatcacgcttgatgatctggagaagttgttcaaaacatcctga

SEQ ID NO: 204514 - DNA, 399 bp, Klebsiella oxytoca
atggataggtgctataacgaattcggtttcttcgctttttgctcggccccgtttgtcctggccacgcggccctaccgacttgagccgctgtgggccgtcatcgatgaaaccatgcgcaacaggctgaatcaggcggtgaagcgggctggagaagacagtgtatatttttccatttcggtcacgccgcatatgttccgccacagctataccatgcacacactctatcaccggcagtccaggacagtcattcaggctctggccgggcataaggagccgcgttcgatggaagtttatacgtgggtgcttgcgctggacccagcggccacgctggccgagccgtttagcggggacgggcgtgatgcagctgagattttacagacactgccgccgctgaaatga

SEQ ID NO: 204515 - DNA, 336 bp, Klebsiella oxytoca
atgagtgattacaaaaattctgtttcacaccagaccattgaactgctgacactctgtctgcaattgcagtcagaaaaagacggaatttcacgcccgttgcctgacaaagccccggtaggtctgtctgatacctttgatgactttgcccgccagatccatcaggcctgcctgtacgcttcgatgaccgacagcctgttagccctgcagagccgcctggcggataccggccggcagttggaacagcatggacagctccgcgtcgaagacggtggtaactatgccgccgcagcgcttgcctggtttgaacgatccacgggcacggtgaacagccaatga

SEQ ID NO: 204516 - DNA, 261 bp, Klebsiella oxytoca
atgggagcttatattaattatgtttcatactctgtacgcagtgagttagttaaaatcaaagaactccgcgatattcgaaaccgattacgtgagctggagaaagagctaacccgcaaagataaagctctggcagaagcggctgcgctcctggtgttgcgggaaaagcccaatgccctctgggacactgacaccccttccggagcggcagaaattatttatcttatccgtgaagctgtcgctcacggcgcccgtaaaatctag

SEQ ID NO: 204517 - DNA, 612 bp, Klebsiella oxytoca
atgtctacattacaccttgtctcggataattgctattttcttattggatttgataagctgttttcagaaaattcaggccgattctccaatttgaatttaatccatagtgatgatgtttttctgcgtaataagtcaattatatcggatgatgatgttattgttgttaatataaactgctggaaaacaaggcgtactgtaatgagaattctaagtagaaccaaaaaacgtattgtaataatggctaaatttataccatccaataacaaagtatttttcgctttaacaaataaagatgtttcttaccctactttattacaaaaagcaaataaaataagcactgccacattggatataaaaatattgcaaaatgacatgaaaattatattcctacatgataaagggattgggattagtcaaatatctaatttattgaggaggcacagcaaagaaatctctttttcacgtcgacgtattctagaacggttcggattgaatggatcgcactgggttaacatttccatatgttgtgacataataattatgcttaatgctgaagcaatgggatgccctgaacgaatgctgccgcaatggctgggtggagatagacaataa

SEQ ID NO: 204518 - DNA, 621 bp, Klebsiella oxytoca
atggactgccatattgtttctgatgatgcctttttcttgctgggtgtagatagctcactgatatactcctatggcgaagtacaactaataaatataacggagtctgaggatagattacgtcctttttatggcgatattatcgtgctgtatattaccgatatcaggttaagaagacaggttatgcagcgagtatttattcgtgaatgtcgactgataattattcataagccacagggcatcaatcccgaactatgtttgggaggttttccttggcttctgccatgggatattcgtcaggaagcgctaactctttatattcgacaggctgccgtctgccagcggtatatgcatattgtgtcgccacgggagtggttgctgttttcatatttatgcgaaggactgacagtttccagtatcagtgacaggacgggacttaaggtaaagtatatctatgaactaaagcggcgtgtgcagatgaaattcggactacggaagtgcaatgcgactgacatcctcctctgccgggatatgatgtcattaaatccgccacggggaaatagtgcgttaaggatgcagatatcagattcacggcgtacgtttcgcaagatatcagctcgttaa

SEQ ID NO: 204519 - DNA, 300 bp, Klebsiella oxytoca
atgtcaatagaaatcagtgagaaactagcattagtgcgtgagtccgagaggttaaatagaaggcaattcgctgaaattacggaggttccttatagctcccttacctactatgagagtgggaggaccattcccccaaccaacgtgattatgaaaatccttcaacacccccggttcacgaagtacacgttatggtttatgaccgatcagacttctccagaaaccgggcagattgcaccggccctcgcacactatgggcaagatgtaacaagctcgcagcactcaggccaaaagactggctaa

SEQ ID NO: 204520 - DNA, 480 bp, Klebsiella oxytoca
atggctaaagattttatttacgtaccagctaatcacgcgcccattgacggggtgtacatcaaaattgatgagatatcatctgtagaagagcgcccgggcaaaacgttcatctatacgaaaaacggactggaagtatcgacagtgctgggtgcctccacagttatggaattgatctccgcaaggtggccggacgcatcgactcagcaagacgagcctcagtgctttatcgaaaagcagatggttaacggcaagatcgcagaaatcaaagtcaaagtaaccagcgaccttataacgagtgaacttgaatatgaccatgacgggaagaaacgctcccatatcatggcgacattcaggaaccctttagactatccgccccttaccgactcgcgcttactctcttcgttttttgaagttgccgccattcacagcaaaagacataaagaaattgttgattttgttcgcgcgggaaacattggttaa

SEQ ID NO: 204521 - DNA, 252 bp, Klebsiella oxytoca
atgattaataaatgctatgccgagatatttaatcaggcgctggaaacattttattttaattgtgaaaacaataaagaccgggcaactgaactaaagctattaaacaacgtggcgataaatgtttacggtatcgcattttgcgcagaggacaccgaaagcatggaagcaatgaaaaatgctatcgagcaacttcgccgcaatatcctgcctcgcccgtttgatttatcccggataggggtgacgtggacataa

SEQ ID NO: 204522 - DNA, 222 bp, Klebsiella oxytoca
atgtcagtcaagccgataaagctaaataaagaaatgagcgaccccgattttatggaaacaacaacaaacgcacgcaggagagagcgcgcttatctgctggggcttttgcgaaccctcatagacgaacttaaaaaacaaaacctgtccccggatgaaatatacgcatctgttgagttatggattgtttaccgggaagtaaccgccagaaaggagaaaaaataa

SEQ ID NO: 204523 - DNA, 282 bp, Klebsiella oxytoca
atgagttatttaaacaccgatattataaatacaaacgaaaaaccgggcgccattcctctcccttgcttgtcagtcgttcgcaatatcccgctgaccgttcacgctcgcgctattgacgctctgatcgctttcgctcggggtgtaaagaattttactcgcaccaaatcccggcattacctcgttatacgcctgggcattcgctggcgcttactcagtaaagacgacggtaaaagctggtcattgatgacgcatgaaacctataaccgggagtcctgcaaatga

SEQ ID NO: 204524 - DNA, 750 bp, Klebsiella oxytoca
gtgatccatttccacggcggccccatcacccctgatacgtgcgcgctgactgcctggcgcgcgcgtcacgcctttattagctttgcgaatccaggacagttggcgctggcgagtgaggtttgccagtcattcgcactcgataacggcgcatttacatttaaaacaaagggccagccggttaactggcgggattattacgcctttgttgagcggtggaaaaatcaccccagattttcgtttgcctgcatcccggacgtgatcggcgggacaggggaggacaatgatcggttgttggcagaatggccgcacggtcgttttgtcggtgttcccgtatggcatatgaatgaatcagatgcccggtttattcgcctgtgccgcgaatacccccgcgtagcaattggcactatgggcgaatatgacgcaaagcgccctcgcgcttgtgtcgcaaggcttcgcgaccttattcgtcatgttgttgatgttaatggctaccccgtttgtaagttgcatgggttgcgtatgctgaataaagccatctttgcgcacattcctctctcatcggcggacagtacaaacgttgcgcgcaatatcggaatcgataaggcgtggaaaggggcttactcgccagcgagtaaagaaacgcgagcgcatgttcttgtgcagcggatcgagtcgatgaatagcgccagcgccttatgctatgacgcagagcgcgatcgttttatgcctcaattgtcgttcgagttgtaa

SEQ ID NO: 204525 - DNA, 2343 bp, Klebsiella oxytoca
atggcgaattattcaaatgagagcgcaggtgagggatgctttgcctatgaatggaataaaccgcgtccggctataggattctcttcagttgccgaatccgagcagggcttttcgtatttaaccctaacaggagagcgcaagcctctttcgtttgaggatctgcaagatgtggtttcggacagggagaaaccagatctccataagtatttacgccaccgcctcgccaggctcccgcatttcatacgccgctattacgccaaaaagctggacgagctggacgcggacgatcatgccgatgctgacgcgtggctgattaataccttcgaggctcacgttttaccccgaattgaccgggttaatgacggttacatgcccggtcatatgttgcctgcgccgttgctggaattgcgcgatcagttctggcggatgctctggacgggaaaaaaggggattaaaaggctggcgcataaccttgctgacttactgacgggcgagtttatgcgcgagcaggaatatcagtttaaccgcactcaggatgttgaattctccgttatctctggttacgggcgcattggttttcttgcgtcacatttaaaaaccgggatccccggctggcaagcctactgcaaagaagagctggaagcggaggatgcacttcgcgcggtatcgcgtcttgagtctcccaaatggtggaccaaccgtctgcgccgtatctgcgatcgctggcgtgagcatctgctgatttcagcgggttatgttcacaaaaaagccgccccctattgcagcaatccctgctttaaggagtggctggcgcagaagaaagcgaatcgcgagtttttgaaacgcatggaacttgaggatcaagagactggcgagcgggcatcactgatcgacaaggtgacgcgcagcgttgccaatccggcaataaagcgcgccgaactaatggcacgaatgagaggattcgaggatatggctaatgccgataatttagtgggtgaattctacacgctaacagccccatcaaagtatcacgccaccctggcggacgggcggcgcaatgacaagtacaacggagcatcgccgcgcgacacccagcgctatttgtgccgggtatgggctaagacccgggcaaagtggaaacgtaaagggatccgtgtatttggctttcgtgttgcagaacctcaccacgatgcaacgccacactggcacctgctgctgttcatgcgcccggaatgcgtcgaattagcccgcgcgatcttctggggttacgcgctggcagaagacggcgacgaaccgggagccgcagaaaaccgctttaaggtgaaaccaatagatgaggcatttggaagcgccacggggtatatcgcgaaatatatttcaaaaaatattgatgcgcatggcgtgggtgatgagcgggacgatgagacaggggagccactgaaggatatttctaagcgcgtttgcgcctgggcttctcgctggtcaatccgtcagtttcagcagatcggcggagcgccggtaacggtttaccgtgaactgcgccgcatcaagacgaataaaatcgaggtcattggcgctgacggtaagccggtcgttatcgatcgcgagtattccgcaccaattcccgcagccttggttgatgcacagcaggcggcagacgatcgagactggacggcttacacaatcgcccagggagggccgcttgtaccgcgtgattgtttacgcgtgcgcctggtttatgagaggacggaaaacggcaacgattacggcgatgacgtggagcgcgtgaacggggtgtattgcccttatgcagggggagattccagccttttaacgcgtacaaccaaatataagatcgtgccaaaaaatggcacggattcagccgttgaccttcagggcggcagcgccgcccctcggagttctgtcaataactgtacgcacagtaagggcgaggttattgatggggaggacagggcgatcgattttgacgccctgacgaaacaggaacggcgggcattggcccgcaggattagcgatcaggcagcggctgaagaggcccgccgccgggagcgtcgccggacaaccacccttgaacggccggcactttcgccgcaggcggaaaaactccgcgactttgcggcatcaagcggctttgatttaggggctggcgagctttcggcattgctggccggtcatgcggtatcgcttggcggtcagctttatatcggcaccagtggcggggatcttattcgtgtcaaaggttccgcgccgatatcgacagaaacgcagattaacacctggctaaaccggttaggggtgaattaccgctatcgtcagaaataa

SEQ ID NO: 204526 - DNA, 261 bp, Klebsiella oxytoca
atgcgcgtactgaaaatgtattgcaaggaatgtaacgggcctgcggttattaaaaaaaccaactggctgacgctggaaatggcggatctgtattgcgcgtgcgctgatgttgagtgtggacacacctttgtttctcagctgacctatgcacgggagcttagccccagcgcgaagacaggcgacagactgatcaatatgctgatcagccagctgcgacccgagcaaaaacaatatgcgctggagttactgagcgctgaatga

SEQ ID NO: 204527 - DNA, 1050 bp, Klebsiella oxytoca
atgagcaaaaaacgcaaaaagaaccggccaggccgggcagcaagcccggaaaaagagacgtttacgcccggacgcggtagtgtgatcacctttggagagcctgagccgatactcacaaccgggaccgattatcacaatatctggtacgacgacaccgcgaaccagtgggcgctacccattgatcgcctggcgctggcacaactgccgaacctcaacgcgcagcatggcggcgttctgtatgcccgccgcaacatggtgactgctaattatctcggcggcggcctgacgcatgacgaatttgacgccaccgtgtttgattacctgctttgcggggatgttgcgattcagaaagtgcgtaatctctttggtgccgtggtaaaactggtgccactgccgtcgctgtacctgcggcgacggaaaagcggcgaatttgtcattttgcaggaggggccgtcgcttgcccttccaccgcaggacgtggtttttgtccgttcgcacgatccgcgccagcagatatacgggctgccggactatatcggggccattcattcggtactgttaaacagcgaggccactatttttcgccgtaagtattatcacaacggggcgcacatgggcttcattctgtataccagcgatcccaatctgagcacggaagtagaagaggaaataaagcggaaaattcaggaatcaaaaggggttggcaacttctctaacctgtatatcaacattccgaaaggcgatccagaaggtgtaaaaatcctgccaattggcgaggtgtcggctaaagatgaatttaccaacattaaaagcatcacggcgcaggatgtactgaccgctcaccggttcccggcaggtctggcgggcattatcccgacaaacgccgccgggctgggcgacccggaagcctcgcgccggacctatcgccttgatgaagttgtaccgctgcaacgccggttcaggctggcagtgaacaacgatcccgaaataccacccgcgcttcacctgcgctttgccgatgacgcgcaaggcgcagggggcgaaatttga

SEQ ID NO: 204528 - DNA, 1806 bp, Klebsiella oxytoca
atggcaaaatatgcagatgaaattatttttgcggcgcggtcgttatatctgaaacgatggacgccgaaagacatcgcgcgggaattaaatattcccgtgcggacggtttataactggtccgttaaacaccagtgggccggtatgctcgcgtatgaatccgtggaggaagctattgcacggcgcatcagccagttgacgccacgggaaaacaaatcagaagcagagcgggccgagctactggcgctcatcacgcagcacgtcaagctgatcgcgtcacgaaataagcacgccgaaaggatggcggagattgccgcgcagtcaaccggcaacgcgaccgaaggcggcaccgagggcagcgagaagaaaaagagacgctatcgcaaaaatgacgtttcagagctgaccgccgaacaactggacgcctgggcgcgggagcacctctttgattaccagctgtattgccgcgagcataagctggaagactggcgctttgtcctgaaatcgcgccagattggcatgacgtactattttgcttttgaagcattcgaagacgccgtactgagcggtcaggatcaaattttcttctcagcatcacgcacgcaggcggaaattttcagggattacatcattcagattgctgaacaggcgttcggcgtcaaactcagcgcgtcaggtaacaaaatcagactgagcaacggggcaatccttcgtttcctcagcaccaacgccagtacagcgcagggctttaacggccatctgtacggagatgagattttctggatcccgcgcttcaaaaagctgcatgacgttgccagcgccatgaccacacagcagcgctttcgcatcacctacttttccacgccgagcgccaaaacgcaccaggcatacggcgtctggacgggcgacgactggaaagaggacgatccgaagcgcaaggttatttcgttcccgaccgataaagagctacaggcaggcgggcagcgctgcccggatacgctctggcgctatgtcattacgatggatatggctgtcaggggcggtctcagcaagctggttaatattgaccgcctgaaaaaccgctacagcgaaaccacgtacaacatgttgtatatgtgcgtgttcattgatggtaaagatgccgtcttccgtttctcggagctggagcgctgcggcgtggatgccgatcgctggatggactacgacccgaccgccgcccggcccttcggtaaccgggaggtgtgggcgggatttgatccggcgcgcaccggcgataactcaacgctggtactgattgccccgccgctgtttgagggagaaaaattccgcattctggcgatctaccactggcaggggctgagtttcagctatcaggcaaagcagatccgcgaattaatgaagcggttcaacatcacctatatcggaatagacatcactggcatcgggcgcggcgtgtatgagctggtatcaaaattcgccccacgggaaacatcgcctattcactacagccttgaaagcaaaacacgcctggtcctgaaaatgatcgacgccgtggcgcatcgccgcatcgagtggggcaaggatgccattgatgaggtcagccgcgaacgagcggagatcgtcccgtcctttatggcgatacggcgcgccctgactggcagcggcggcgccatgacctttgtcgcagagcgcacagagctgaccggtcacgcggacatcttctttgcgaccgcgcacgcgatgattaacgaacctcttgatcatgagttcgaggggaattcctcttacatattcggtaaggcagcatga

SEQ ID NO: 204529 - DNA, 1050 bp, Klebsiella oxytoca
atgtcggaaggggtggtgacggactggctgtgtatttgtacggcaggtattgcggctgacgggcgaccagtagaggagcagtggttgattgatgccgccgagacctacagccagcaggtgtacaccgccctgatctggccgtggcacgattacggctcgggggagcgtgagttttacgtgagtaacctcgggttggtccaggaattaaaatgtgaacagactgatgtggggctgggtttatttgcccgtctggctccaaatcagtttttgattgattacaaccgctcgggacaaaagttatttacctccgccgagctacagcatgattttcagggaaccgggcgcacgtatttaacaggtgttgccgcgactgatattccggcaagcgttggaaccagccggatagaattaactgccgatgctggtcgtggtgttattcgcaccgatccggtgacgctgacaatgggtgatttatccaggccacccagccggtcattcctgagccgcctgtttaattcaggacgatcaaaaacctttaccaaaacgccggaatctgaatcggcgcccgattcgaacgatgaggaaaatatggacgaactgaaagatatgatcagccagttactggcgaaattcaacgaaacgcagaccgctgcgacggaagacaacgccgaagaagtggccgccgccgcagaggaagttgttgatctggccgacgaggttgccgcactggccgaagaggtggcagccgcaccagaggaagaaattgacgcggtaaaagaagaactgacagcccgccgcgctgaactggcgactgctatggaaaattataccgcactgctgagcggcggtagcaaggcccgtaagcctgcccgccgtcagtcctttagccgtcagtccagccgtcgcagtgagcgcgcccgcgatcgcaagctggaaaagctgactgccgccgtcacgagcctgactgaactggccgcaaaaggcgcctcacagacgccaaccggcatccccccggaaggcaaacaagaagacgcgcctaagctcgtttaa

SEQ ID NO: 204530 - DNA, 996 bp, Klebsiella oxytoca
atgcaatatcttagtacacgcgcccgacagcgcctgacggggtacatcaccgcactggcgcagtcatacggtatcactgacacgcgccagttctttgcgcttaccgacccgcaggacatcgcgctgcgtgacgccatcatgcacagtgacgagtttctgggtcgcctgacgatggagactgtggaccagttaaaaggccaggttgtggtgaccggcgcgccgggactgtataccggtcgtctgcaaaattcccgcttctcccgtgaaatgggcgtggacggtaaccagtatgaactggtggaaatggattccggctcatatctgccgtaccacacgctgaccacctgggctaatgcgggttcggataatgagttttataaccgcattcagaccttttcaaaccgttcctttgcgcatgacatcctgcgcattggcttcaatggtacgcacgccgccccggataccgacccggtaacctatccacgcggcgaggatgttgcgccgggctggcaccagatcgttaaaacccgctcaccgggccagattgtcagcacggcaaccacggttgacatcaacggcggtggtgattttaccgggctggatgcgatggcgaacgatgcgcgcaacaccctcgttgcggaagagctgcgcgattcccctgatctggttgtgctggtttcccgcgacctgctgaccgccgaaaccacggcattactgaaccagatcgacaagccgacagagaaagtcgctgcggcgatgatgaatcgccagcttgccgggatggacgtttacacgccgccattcctgcccgccggtcgcctgattgtcaccacgctgtggaatttacatgtgtacacccagcgcggcacggaacagcgcaaggcggaatgggtggacgatcgtaagcgtttcgaaaacaactatctgcgtatgagtggttacgccgtcgagtatgacgagctttacgccgccttcgataacatcacctttgcgtaa

SEQ ID NO: 204531 - DNA, 816 bp, Klebsiella oxytoca
atgaagctgaccccggctatgcgctggcgggcgaacgtggaggcgcagcgcaagctgcgcgaccaggaggccctgagcagttcgccgcaggaccgccgcgcagccgattgcgatctggcgatcgatgtcaggcacctgcgtgaaggtttcgaactgattgcgcagcggattgaacacaagcgcgcgtatttgctgccgaaatggttgccgcaggtggagcgctatattgcggcgggtgataactacgcctttccggcgctgggttactgcattatctggctttttgataccggtgaatttgagcaggcgttgagcctggcagatctggctatcgctcagggccagcccatgcccgagaatttcgccagttccctgcctgcttttattgcggataccgtgcgcgaatgggcggacagtgaatatgagcaggggcgcagcgtggagccgtatttctcccttgttttcccgaaagtaaccagcgaatggacgctacacgaagagatccgcgctaaatggttcgtactggccgcccggctggcgctgcggggtgaagatggtaagcaggccgctcccagcacctttaccagtgttgcgccgctcaataccgccgctgagcacctgaataatgcaatggcgctgacgaaaaaatcaggcgccaggaccttactgaacaagatcggggcgcgcattcgtgtgctgacccgtgatttaccggctgcccctgcgcaggcgggcgcggtggagggggcaacccgtgaggatttgccagccatggaaaccggtcagcccgctctctcttctgaaacagaggactga

SEQ ID NO: 204532 - DNA, 471 bp, Klebsiella oxytoca
atgcaccctggattgtctttcagcggcaccgccattgattatcaggatatcccagtcaccaatggctgtgcattctggccggatctgaatgtggcggattttcagcgtcagcgctcgctgccgccgggcatccccgcgcagacgctggcgaatgccctgctggcgacgctggcggagattaacggcgcactggctgacgtggtgctgcgttaccaggcgaaaggctacggcaccgctcaggatgttcccggcgcgcgcgccggaaacgagacgcagctgaccgcgcagtacaaaaaagccctttatgcccgcgcaaaggcggatttgctcggagagtttcagacgctgggacgccgcgagacactccccggcgcggaaggtgacgacacacgcgcgagcctgctggctgaggccgcgctggttattcgcagtatgaaggggctggggcgtgcgggggtgtacaaagtatga

SEQ ID NO: 204533 - DNA, 486 bp, Klebsiella oxytoca
atgacgccagcagagtcgcagcttgacagcctgacgcgtttcattcgtgaaaccacgccgccgcgcacacaaacgtatttcgaagcggtacaggacagcggcacgctgatccgctccttaaaagatatgggcctggggcaatatcgcctggggatagcccgctataccgtgacgctggactggtcgtcgctgccttaccggctgtattccccggttcttctgtatgccgccgtgctggcctggctggagcaattccgggatccgctgtttgatgagcttgaactgccggacccgacttttgatgtggtgtttgataacgagcaatcctgtagcgatgtgctgataacgctggagctggccgacgccatcaccattgttcgcgatccagtgggtgacatcctgctgaacggtgagcgctggatgttacagacgccggatatttttaccgcagaagagtttggcctcgatgtcggagtgaaaacatga

SEQ ID NO: 204534 - DNA, 654 bp, Klebsiella oxytoca
atgaaattcagcggcgggctgagccgtcagcaccttgcgcgactgcgcgcggaaatgcgcaagcttgagctgacaccccgcaagcgccgccgcctgctgctgcgtattgcccgtcacggcattattgcggcagcaaagcgcaatcagcggcgccagcaatccccggacgggacgccgtggcccgcccgcaagcagggtaaaggcaaattactgccaaaactgccgaaattacttgccgtgcgggaaattcccgaacaggaaaaggtagtgatttatttgcgcggcgatggtcgcagggggctggcgcccggcgtgttgggccatatccatgcgcagggcatgaccacaacgatcaacgcgggaaatctgcgggcgcgctcagcgcagggcgttgcaacaaaagcgcaggcccgggcactgcgaaaactcgggcataaacaccgccgggacgggcgccttgttaagtcttctgccgcctggattgaggcaaatctggacgcgtcacaggccggattgctgatccgcaagctgagcggacagcctgtacagacaacgtggcgcatcgaattaccgtcccgtgagtttctgggcgtcaatgacgatgaatttgcacgaatactggcccgtcagcttcagggccttaactatggataa

SEQ ID NO: 204535 - DNA, 1155 bp, Klebsiella oxytoca
atgacctggcctaacgtcactattaatcagattaaccagcgtcagggtgatatcgctgacgttgagcggacgctgctttttgcggggccggctctcccggccatgcctgccgatgcctccctgctgatcgccgtgaatgcgcagagcgatatcgacagcgaactgcgctatgcctcagatgtattgcgcgagaatgttgccgccgcgcagctgaatggcgggcagaactggcaggcgtatgtcgttctggccgatgccggtatcgcgtcagcccctgcctcagaggcaaataaactctggaccagccttatcgagaccgcgctggcgacggtggctgtggaaggggtggtgattctcggcaccccggcagacagtcgcagcctgatttcggcattgcacgatctccgcgccagcattatcagcaacctcgggcgctgggtgtggtttgttgtcgccctgagcgcgcccgctgccggtacggactggtcagcatacgtaacgaaaacaaaagccacgctgaacgggctggcagcttattcggtcatggtggtccctttgctttgggggccggatgcgggtgtgctggctggccgtctgtgtaaccgttcggtgacgattgcggacagtccggcccgtgtcatgacaggcgaactgctgggaatggggggtgatctgccggtggacgggaagggcgcagagatcacgctggcgtggctgcgggcgctgcatgatatccgttgcagcgtgccgatgtggtatcccgactacgaggggctgtactggtcggatggtcttatgctggaggtgaccggcggtgatttccaggtgatcgagcacctgcgcatcatggataaggtcgcccgccgcgtccgcgtccgcgccatttcccgtattgctaaccgaagcctgaacacgctgccgtcaagcattgaggcgcataaaaccttctttggccgggaattacgcgaaatgtcccgctccgtgcagctgactggcgtgacgtttccgggagagattgagaagccaaaagaaggcgatatcacgatcacctggctgtcgaaaaaatctgttgtgattggcgcaacagcccgcccgtatgcctgcgcaaaggaaattacggtgaatattgcactggataacgagctggaggaataa

SEQ ID NO: 204536 - DNA, 453 bp, Klebsiella oxytoca
atgagccgcatcgggggaatggattttgatgtcagcattggcacagaggttgtgcatgtcactaccgccacgctgaccatcacggataacacagcggttgccctgactcgcggggtaccggatggctttgtgaaaggggatgtttcagccgagggcgagctggagctggacgagaaaaattttaaggtaatggcggcactggcgagcgctgcgggcagctggcgcggcattgaaccgttcgacctgttgttttacgcaaaagcgggcgacaccacgtcaaaagttgaggcattcggttgtaagcctttgctgactgacctgatcaacatcaccccttcgggcggggagaaggcaaccaaaaaggtcaagtttcttgtaacagccccggaattcgtcagcattgacggcgtgcctgtactgagcgcggaagatgtccgggatttagtggggtga

SEQ ID NO: 204537 - DNA, 288 bp, Klebsiella oxytoca
atgacgagcacaaccctgatagccattcttgccgtaatgggtctgacaggagaattagcccgcttactgctgagcaacacgccgctgacagcgcggcagatgatcgggcgcgcaatgactggcgtcctggtttcggaggcggtgttatcactgagggttcaccgcccggatatagagaatctgacgctggttggtataggggcggtggtggctgtgctgggctattcatttctggagccattgttaaagcaggctgttcgcagcctgtttaagaggaaagaaaagtga

SEQ ID NO: 204538 - DNA, 339 bp, Klebsiella oxytoca
gtgaaactgagcgaaaaacaggcggtttttgccgtcatggtggcccgcctgatcctgtgggctgatgaacacggataccgcgtcactttcggggaggcgtaccgcaccccggaacaggcggcgctgaatgcgaaaaagggtagcggcatcgctaacagcctgcatacgcagcgcctcgccgtcgatctgaatctgttcattagcggggaataccagactcactcgggggcgtatctgccgttgggtgaattctgggagtctatcggcggcagctggggcgggcggtttaaaaagccggacggcaatcactttagccttgagcataacggggttcgctaa

SEQ ID NO: 204539 - DNA, 399 bp, Klebsiella oxytoca
atggtcgcgttgattaatcgctggttgcccggcctgtttcccgcgctggtcatcggtctgattgtcggctccgttgccgcatggcgcacagaaacggcgatccacaatgaatttcaggctgctgtgtggttgtcgtcagtagagcgtcagtcactgattgctgatatttccgacgcgtcagcggctgcgcttgagtccaggctggaggcgcttcgcaataatgaaactgtagtagagcggcattttacgcatgaaatcattaatcccgtatttcgtaacatttgcgctactgatgagtatgtcaggctgttcaacgaaagtaccgcaacggctgcgcgaaccctggcaggcgaatctgcttcatccctgcccggtcagcctgccgacgctggcgggtaa

SEQ ID NO: 204540 - DNA, 270 bp, Klebsiella oxytoca
atgagcgaaaaatttaccctttcccttaccgttgcgggccatgacctgagctttgagccaacgaccacggcttacaaccagctgacaaatgaatccgtgcgcacgcagaacgtcgccggggctatccgtgactacctgctgaaaattgttgccccggacagtcgcgccgcgctgctggatattctgaagaaacctggcgcagccgaacagctggctaaattcattaacgacagatttgcgccggaacttgaaattgaactaaaggcgtaa

SEQ ID NO: 204541 - DNA, 2406 bp, Klebsiella oxytoca
gtgcaacaaatctcattcgccctgagcctgaaaaaccagctttctgcgccgctgggcgcggcgggccgctcagtctcgcagtttgcgcagaacagccgcgaggccctggcctctgtgggaatggggtttgcggggttatgggcggggtttcagccgttgaaagggctaatcacgcaatctggcgtcctgaaaaacgccctggacgagctggcgctgcgtggtgtcagtagcgacgtgctggacaacctgcgccggaaagcgtcagcgctgagcagtgatttcggcgttgctgctgaggatgtgatcgggggtgccaggctgatgcgccgcgaatttcgcgggctggatgatgtcgatttgtcccgcgccgccgcgtcggcggcaaccctgggcgcagcagtgaaatccggtacggacagcgcggcgcaatatatcagcgacctgtccggggtgtttacgcttgatgtgaatatgaccggcggcgctgattttgccgagtcgctggcctcaaaaacagcctggctggtgaaaaataccggccgggatatggacagcattcgcgccatcatcaacaccgccggcaagaccggcgcaggggcaggtgtccgtctggatgagcaactgattgtttctgccagcctgagcggcagtttaggcgacagcgcaggcggtatttatgatgagttcctgaaaaatgcaaagagcggctcccgcgcgctgggcctgagttttaccgacacgcagggccgcctgctggcattccctgacattctcgacaaactccaggctaaatacggcgataccgttgccgggaatgtgaagcttcagcagaagctaaaccgggcctttggtagcggtgccgccgccctgacggcaagctggggatctgcgaataagttgcgcaaacaaattcatgatatccaggggatccgggggctgggcggcgccagcgattcagctgccgggctggcggatatctggtcgcgattagccagaactggcgagcgcgttaaagccgcgatcggcaatgcgctgtcacctgtactcgacccactggccgataaagtcgcgcgggcctcagcccggttcgccagatggctggagatgttccccaatatcgcccgcgtcgtgggatacgtcactatcggggttatcgccctgactgcagcagcgtcacttctgactgtgtttgccggagcgcgcatgatgctacagctgactggcctgacaaaaatctttcgcttactgaacctctcattgttgccaacgcgcattggcctgctggcgctgtcagttcaggcgaaagcgctggccgtctggtcgggcatctgtcgcgtggcaattctggcgtggaatggtgtgctggctgccggtgcgatagcgatgcgagtctacggcgcggcgacaatgctggccggaaccgcgatgcagctgctgaccagccccgtcacgctgatcattcttgccgtcgcagcactggcggcgggtgtctggtacgccgtcacgcgctgggactccctgaaagcgacagttatggacagcagcgcattcaaatttattgccggggtgatcgcgaaccagggcgatactatttctgctgttgtggattatctctcatctgattttatggccctggcgtcagtatcgctgattgctggcctggctggcgtgcggctgctgtcgaaggtgtccggtcttgtcagggggatccgcttactgaatctcgcgttactgccaacgcgcattggcctgctggcgctgtcagttcaggcgaaagcgctggccgtctggtcgggcgtctgccgcgtggcaatcctggcgtggaatggtgtgctggctgccggtgcgatagcgatgcgagtctacggcgcggcgacaatgctggccggaaccgcgatgcagctgctgaccagccccatcacgctgatcattcttgccgtcgcggcactggcggcgggtgtctggtacgccgtcacgcgctgggactccctgaaagcgacaattatggacagtagcgcattcaaatttattgccggggtgataacggacctgggcagcacagcaagtgcgattgttgacaaaatccggggtttcttcgcagggttgtttgatgacgtgaagcgctcgttgctggagtcccttaactggatcattgagaagttaaataagttgccgggcgttgagatcgatttgcttaccacgtctgcggcagacccgcagttgcaggccgccgtcccccctcccgccggactgtcaccgcctgtactgagcaacaatcccgccgcgcagctgctgaaagggggcgacgtggacaatagtcgccatgtcggcgtagtgaacgtgtacccgcaaaacaacgaaacgtttaactcactaatggaatcaagggagctgtacgccggatga

SEQ ID NO: 204542 - DNA, 324 bp, Klebsiella oxytoca
atgagcgatttgtattttgacctgctgatcactgatggcaatttcactctgaacagcgctgctgagccgttattgtgcaaaaaccgcgatagcatcgcacaggatgtcatccatatgatcattgagtcggagctgagcaaaggtctggttgctgaacgcagcccgacgctccgggctgatattgtcatgcagcttgaactgcttgtagagacagacgacaggatcgtaccgggtacggtatccattcgttatgtcggcggtgattatctgatctcagcggaaacagtggactttggcccgctgtcgctggaggtgacgccatga

SEQ ID NO: 204543 - DNA, 1188 bp, Klebsiella oxytoca
atgaaaaaccgcccgaaccctgactatgagtccattcttgccgatcagggaatgccggttacagaagaccaggtgcgcgcagaatttaacgccattgttgccggtgaggggttgatcactaataccagccgcatgtcgccgttctggcgcctgatcaccgcgattgtcaccgcgccggttatctggctgaaagacgcgctggttaatgtcgtgatgcgcaatacgtttttagccacggcgggcggcgtgtttctcgatctctttgcctgggcggtcaatctggagcgtaagcccgcgagtattgcgaccggcgttatcttctttgtaaaaaccgaccccgcgcgcacggttaccgtaccggcaggaaccattattcagactgagcgtattaacggcacggtctaccaggtgcaaacgatacaagcttttaccctggcagcaggggttgccgctgcatctgtgcctgtggaggcgctggaagccggaagcgggcataacctcgcgccggggtattttcgcattctccccgtgagtattgacgggatatcagaagccgttaatcaggaggactggttatcgtcgccgggcgcagatatcgagagcgacgacgagctgcgtgaccgcacgcgcaaccagtacaacctggtcggccagtatcatatcgatgcggtttaccggggcatgattgcaggcatcgccgggctgaccacggatcgcatttactttgtacacgacgccccgcgcgggccgggtactgcggacgtttatctgttgctggatgccggggtggcaagcgcgccctttatcacgaccgttaacgattacgtcatggcgcaggggtatcacggtcatggtgatgacgtgctgtgcctgccgctgccggaaaagacgtataacttgtccgttaccctgtggctttataccgcctcccgccttgcactgagcgcggaggaatgcgagcgcctgcgcaaaaacgtatccgatcttattcgttgtgcctttcgtgaaaatagcgactacagcgtagaaaaaacgtggccgtacagtcgtttttctatatcccgcctcggggatgaaattcacgatcatttccctgacattgagtctgttgttttttcgcgcagcgatattctcagcgatcttgatgtaccccgcctgggtgcgctgggggtcgaatatggagaataa

SEQ ID NO: 204544 - DNA, 2982 bp, Klebsiella oxytoca
atgtaccccgcctgggtgcgctgggggtcgaatatggagaataagcccgtaaaaaacctgccggtctggatgaataaaggcgagccgttgacactggcgcatgcggcgtccgtatggtgggatcgggtctacagctggctggcttttccgctggcgcagattgatgtcgatacctgcgatgagcgcctgctggcgttgctggcttttcagcgggatattgagcgctttcccggcgaatcctccgaattgctgcggcttcgtgtgaaatatgcctatgtgaatgcccgcgattctggcagcaaggccggttttgagcagattttttcccgtctgggtatcgggacgatccagcaacttgagcgccagatgcaatacgactgggatgttattctgatacgtatcagcgacgaacaattgagccgtgacaatgcgttaatgatgcgcctggttcgccagtacgggagaacgtgccgccgttatttttttgatgtgctgaacaacgcgcccgcgacaattcacggtggtgaattcagcaatgaaacgcgttactactcggcacgcgcagtgatgcatccaaccagcattacagctgatccaacagaactaaatttggccccccaggacgcggggatcgttcatattgagatcctgccggaagatgcggaggatcgcacatttactgtgcaatcgtccgatccttccgtagcgtcggtgaaaatcatcggcagcgtcgttatcgtgacgggtcatgtgcgcggggccgcagtcattacggtcacaacgaatgacagaggtttaacggcagttattaacgttcgcgttgttgctgtcctgaaatttgttgcagaaattgagaaccccgatcgcggtctgttttttgttcgcaagtctgacgatttcacgattgattacggtgatggtatcgacagccgggaataccgttttgactctgcatccgatatttacgcctgggttatcccgacacgtgcgcttgaggccggaaagcgatacaccatcacggtaaaaaatagtgaaaccgcgtcattgcgcgcccgctatggcagtacatcggcaaagctaaatccggccagagagttaatttcggttacgggggagcgcagcaacctgattgcctttgcaagcgaatgtaaaggccttgttaagatccatgaacgtgcatttgatgatctgccaaatgttgaaagttgctcatcaattttcaggctctgtaccgctttggaggatatcccggcatccctcttcagccgactgacgcttgctaccgatttttccaatgcgttttatgcatgttcgtcattaccagccgtgcctgccgggttgttcgccgggctggcgcatgtcacgacatatgcttctgcgtttgaaggatgtaccgcgctatgcacaatcggcagcggggcgttccggggaaatctggcggcagttaccttcagtagtgcatttaatggctgtacctctctggaggctatagcatccgggatcctgtcggggtgtgttgctgcgaggaactttaacagtgcgtttaaaagttgttccggcttgccggccgtacccgccgatctgtttagtgacgttcctggtggtgactttacctatgtgttccagtcgtgccacgcgctggcatcgttgccgccagcgctgttctgccagtgcgccggtgcgacaatattcacaggtgcattcagtgattgccgttcgctcgttagtgttcctgctacattttttgcaggactggcaaacgtcacaacttttaattccgtgttttctggctgtacttcactggttgttgttgaggactacatttttgcagattgcgaaaatgccttggtattcacccatgcttttagcggctgcgctacgctggaatctgtcggggagcatattttctcaggctgcgatcgtgcctcatcgctaccttatcttttttataactgctctgcgctgcggcggttgccgctttttgctgaatattgcccgcaggctgtggcgtttgaccgcgcattttatcaatgcgcagcgctggagcatgtccgcgaacgggcgttcgatggactcagcctcgtaacgagtttcagttttgcattctggggttgctcatcgttaacacgtatcggtgagggggcgtttagcggctgttcgtccgtaacaaacatgcaggaaatgttcaggggatgtacatcgctcgttgagctgggtgcggacatattcagcggctgcgtaaaagccagcaatgttcagcgcctgtttgccgattgtgtcagcttgcgcgaactgcctgccggattgttccgcgacttcttgtcagtgaccacgcattacgggacgtttgaatattgtactgccctggagtttgtcccggtggatttgttcgccggaagcccgaatcttgtaaccatgcctgtgacattttatggctgttcagcgctggcgagcgtgccggacgcgctgtttgcttcgaatcatctgatagtttcctttagcgtcacatttggatacagcgggatagaaaatattcctgctgatttgtttgccggaaacccgaatgtaacgcaatttgctcagacgttcagaaactgcaagcagttacgttctgcatcccctggattgttcacgcataacactgtcgcgacggctttcacttatgcatttatgaattgctcacgactggaaacagtaggggccgggctgcttaatcttaccgccgcgtcagccatcgcttatacattctcaggttgcggaatgttgcgcactgatgtgaatgatattttcaatcttgagtcttatccgcaattcagaggggtgcaatacgctttcagcgggtgcgcggcaatggcgggtaaaggtcttgtgtttattaataaggttccgggagcaaccgatcataccagcacactttatggttgtgttgcgctggatgattacgaccagttgccggaaacatggaaagaggttgcgaaatga

SEQ ID NO: 204545 - DNA, 201 bp, Klebsiella oxytoca
atgaaatcagtaactgaattaaaaaaggcaatcagtttttgccagacaaatgaatttttttatgaatatctgcaaaaactggaatcggcaggggtgatcacccttgctgttggcgatgtggacccgggcgcgggaatggtcagcgatgaccttttcgggcgcctgttgtttgtatttggcatagatcaaacacaggaataa

SEQ ID NO: 204546 - DNA, 1818 bp, Klebsiella oxytoca
atgtcacaaagcgctattaccaatgcgtttacgggctggctggcggactgcatggccgacaacaagcccgcccgcccggataagatgatttttgcttacatcgccggtcagaatgaaagcgcggaaattgatcctgatgaggcgttgccgccgacaagcgcaatccggcacaccgcagatattgcgcagtacggaaccttaaacgagcgctcttttgtttgctctgtcattctcgatcctacggttggtgactggtcctacaactggatcggtctgatggacagcgaaaccagtacgctgttgatgattgttcatcacgcgacccagcaaaaattgcggaccaaaaacggcgagcagggcaatacactgacccgcaatctggtgatggacttttccggcgctgcggcggcatcacaaatcaacgtcactgcgcagacgtggcagatcgactacagcgcgcgcctggtcagtatggacgagtcgcgccgcgcgttccgtgtggattacttcggtgatgcggctttccggggggagggttttctggtgtcactgtccggtaatgatgccactgtctctcccgggctgggttatgttggcgggttaagggttgaacttgagcaggatttaaaattatccgtatcgggtaatacagcggtatgggtcgatgtcacctggtcgggaactgtgacgggggcctggtcgcataaattttcagttcgcgcagcttccgcgctttcagactacaccgacgaagccggattccggcattttgtcactaagattgcctctgtatcgggaggaaaaatcaccgatcatcgtgagccgtttcccgttcagcggctggagggggctattgtcgatctggacttttacgatcgcaccgagtcggatgagcgcttcttgcaggcagataacaatctgaatgatgttcccgacgctgctgcggctcgcgataatctcggccttaaaggttcggcggtactggacgttggcaaggtggcgaacacggtagcggcaggcgatgacagccggataaccggcgcgttgcagaaaacaagcaatctgtctgatgtttccgacactgctgcagctcgcaaaaaccttggccttaaaggtgcggcggtgctggacgttggcaaggtggcgagcacggtagcggcgggcgatgacagccggataaccggcgcgttgcagaaaacaagcaatctgtctgatgtttccgacactgctgcagctcgcaaaaaccttggccttaaaggtgcggcggtgctggacgttggcaagggggcgaatacggtagcggcgggcgatgacagccggataaccggcgcgttgcagaaaacaagcaatctgtctgatattgccgacaaaacggaagcccgcaaaaatctcggccttggcgctgacggcgaaggcttcaggcttattgttgattctatcctgtatgtggggctgacaattcagagcgaaaccaacccgcaaacccgctttgcctggcaaaaatgggtggaccagagcacgctgtatgctggccgggtaataagaatcggcgcggagtccggcgtcatcggcggaaaaaaccaggtaaaactcgacgccgatcatcttccgcctcactggcaccgctccggtgacagatcgccgggtgccacctgggacccctccacaacacacggcactgacaatcagaagagcggcccgctaaacatgacagagggaacctatatcgacgccagcggcacgaaggaagccagtaatgcctcgctcgatgtgacaaacgagtatgtcaccgtgcgcatgtggaagcgaacagcgtaa

SEQ ID NO: 204547 - DNA, 699 bp, Klebsiella oxytoca
atgtggagccataaggtgttacgaccagcggcggaggctgacggggtgatgtgctcggtggtatccgtgggaccctggacgcccggggccggacagttggagccgtcagggtcatatctgagtcctgaaaatgctatttcgtggatggcggcgaaattggctggcgcaccgtcaaatctggatgtggttgcaatgctgttaactgcgccaacactgacagcatttatcgctacgctttcgcaggcggctgatgttttcccgctgccagctttgacgcagatctaccggcgagcggtgacagcctcgacgttgaacgaaagccggatgattaggcctgcgacagccgcgagccagttcgcctttgcacccctgtcccttgccacggtcagacgcgcagccagtgcggccggtgcgctgactgcgggcgctgtcagttcagctatcgatcccgctgcgttactgagcgattttgccgcgcgccgcgccgggcttcttggtcagctgggccgcgaggctggtgatatcgccgcaaagtcggtgcaactttacaccgtccagtcgcgcggcgatgttgctggcgcgatccgcgagatgaaagagggtatccccagcccggatcatgttttctcgctggggctgcttttcgtcggtgatgacctgagcgcgttaagaggggggttgcatgaaccagacgattag

SEQ ID NO: 204548 - DNA, 528 bp, Klebsiella oxytoca
atgaaccagacgattagttttgccctgagcgggcaggctataccgctcagcaatctggacgtttcgctgtcaatgaaactgccggataaggaccagtcaggacaggcatcgagcaccgccagttctgaacagggaacgaaggcaaaagaaatcaaggttagcgggctggtcagcttcgaaaacgccagtttactggcgcagatttatgctctggcagaagcaactgccgcaaatggcagtaagcgccggtatcgcgtgaatcacagcctggcccaggcggtaaaattcagggaagccgtttttactggcagcgtggacacatccaaagagccagatctgatggcctggaaagtctctttcacgctcaaggaatatttcagtgtggcagagaaaaaggcgatggcttccgttgcccctgcgcagacacagaccgcgcagggggcaaaatcagcggacgaaacccccgaggcgctcagcggttttgagcgcattttacagaaaatcgataaggctattggcggggtatga

SEQ ID NO: 204549 - DNA, 1650 bp, Klebsiella oxytoca
atgaaaccaacaatcacgctaaaaattggcactgacgcggcggccgttgctgattatcacctgattctgtccctgaacggctgcggacgtggctttatcaccacgcaagtcagtcgggattgtaccggcgaactggttcgcctgaatctcggcatgggatcgtctgtctggcgctggttcgtgggatacgtcgagcgttgtggcccgggagataatggatggaagcggctgtatattcgcgagctggctggcgcgctggagcagaatttcccgctgtccctgcaacatcccacgatgacggatgtttgcgacgatctgggggctaaaagcggtattcagtttattctcccggatgccgattatacccgtacccccattccgcactttaagagcacgggatcgggatgtcgcgcagtcgagagtctggccggcgcgttctctgtacctgattttgtctggtatcagctgccggacggcacaatctacgccgggagttatgcggattcccgctttgcggaaaagccggttgacatccccgaagcgctttttaagtccggcgcgggcgggaattccgcgcagctggcgctgatcccttcaatccgccccggtgttatcgtgaataaccagcgcattgtgaccgtggaagtcaaaaacggcgacatgacactgcaatgggcctcactgagtggcgacagaaccccggaaaaacgccagattgatcgcgtatatcccgaactggctgcgggtcttcatttgccccggctggcccgcgtcgtcgcgccgacagataccgccagcctgggtgacgttgccgatccattccgcccacgctatgccgtcaatcttcaattactggatgaaagcggcaatgatgccgccgcgcctgagctggttgcggtgcctttgccggtcccgctggcagggcatgagggcgggatctaccagtacccttctgctggtactgttgttgaagtggggttttccgctggaaggccggatcagccgttcgtgcgccagacaatgcagaatgacctgatgctgccggacattaagccaggcgagcagctgcaacaaatgcgcgcagaagtcagtcagcgcattacccttgatggttcatggcagcggcaaaccgatcaggctattgaggaatccagccggacccgttcggtcagctctgacagtgagatcaggaataccggccagcgtgaaacgaccgtgcttggaacggataacaccacagtgatcggggcatcatcactattggctggcgcaatcgtgcagcttgctgatggcgcctggtctgtcggcgcgaccggcgatatcacaacgcgttgcgctggtcgctctgataccgttacagcgaatgccgcgctgaacgtgggcggcaacctgagcgaaaagattaccggcattcgttccagcgcagccgcagtgcagcagctgctggcgccgagcattgtgatcggctcgctggaaactaacctgatgcgccttttcaccgatatgcttgatgtgatcgaggagttggcaaccctgaccgcgaatcaccgtcaccctgacacctccgctccgactaacgccgacgccatacgtgcaaacgctgcccgcccgggcgcgctccgcgataagtacggcagctttatcggctga

SEQ ID NO: 204550 - DNA, 498 bp, Klebsiella oxytoca
atgtcgatgatgccgtttgcgatcttcctcaggtcgtcgcagttgctggcatcaataaaaccgaaatgcgccgacacgccgtttgtaaaaagaattttgaaagaagcacgtagtaatgatttgcatattgataatttagaaaagggagtttttgcactcatgaccaacaaaaacataaatacgctccattgcgttggttttggccgggttattgacgagataacggccgacatcgaaaacgccggcctttcgttcaggcgcggccccagatacttctccgtaaatccatccgagttcattgatattatcattcccgcctctacaacagggctttctgttcttgcagggatcctgattgcacacatcaacaaaaacaggcgcgttaaggtcgtatttaatgatgactctccgatcaaggaaattgaagcgccaaattcagaggagctaatgaagctactgaatgaaatcaaggagattgatctgcgaaatacaccgtaa

SEQ ID NO: 204551 - DNA, 315 bp, Klebsiella oxytoca
atgaacaatacatcgcacacgcaagatgaaattttgataaccgatgacgttctggcaaggtacaaaatttcacgtagcacgctctacttctggagtaccccgtcccgaatgccgtcatacttttctcagccgtttccgaaaccgaaaataaatggcagccctaagaggtggcgaatgtctgatctgctggcctgggaagataatgtgggtattaaaccaaaggctgaccaatcagactttccaggtgattctgccataccccaagccaatggcgctgatcatcaaggtaatcatgcaggttatatctcgccatga

SEQ ID NO: 204552 - DNA, 1275 bp, Klebsiella oxytoca
ttgtttcgtcaggatgcgttagaaaacaggaaaatgaaatggtgtgggcgggctattttactccccggaatacctctgtggttagtcatgctggggagtattatttttatcacggcatttctgacgtttgttatcgcaggcacttatagtcgtcgtgtcaatgtcagtggcgaggtttcgactttgccgcgagccgtaaatctatactcaggtgtgcagggcgttgtggtcggacagtatgttcatgaagggcagtcgcttaaaagaggtgacccgatttaccagatcgatgtcagcaaaagtacacgcagtggcgtggtcagcgataatcagcgcagagatattgaaaaccagctggttcgcgtggataacatcatttcccggctcgaagaaagtaaaaaaatcaccctacacacactggaaaaacaacgtctgcaatacagtgaggccttccgtcgttcatcggatattatccgacgggcagaggaagggataaagataatgaagaacaatatggagaactacagaatctatcagtcaaaaggtctgattaacaaggatcagttaactgaccaggtggctctatattatcagcaacaaaataatttactcagtctgagtgggcaaaacgaacagaatgctctgcagatcactagcctggagagccagattcagacccaggctgcggatttcgataaccgcacctatcagatggaactgcaacgctatgagcttcagaaagaacttgttaatactgatgtgggtggggaaattattatccgggcgttgtccgacggaaaagtggattccatgagcgtcaccatcgggcaaatggtcaatgctggagacagtctcctccaggttatccctgaaaatatcgaggactactacctaatcctctgggttcctaatgatgcggttccttatatttctgcaggggataaagtgaacattcgttatgaagcttttcctgcagaaaaatttggccagttctctgcaacagtgacaactatgtccagaacgcctgcttcaactcaggaaatgctgacctataagggggctccccagaatacacagggtacctctgttccctggtataaggtcattgtgaagcctgaaaaacaggtgatcatttatgacggtaaatcccttcctcttgagaatgggatgaaagccgaaagtacattattcctggaaaaaaggcgaatttaccagtggatgctttctcctttctatgacatgaaacacagtgccacaggaccagtcaatgagtaa

SEQ ID NO: 204553 - DNA, 486 bp, Klebsiella oxytoca
atgatgtcgcatatacgagaaaccatcagaggcagagatgaatggaccgtctatgagcagatgggttttgccgtcacttgtatgctccataaccgtaattatagtctgtatccggtgttaaccattcagctctggaccgaatatgcgatacagcaccatcagataaagttcctgtttgattcaagaggttttcccctggcgtatattacctgggcgtatcctgagacagatacggaagcacgtctgctcaacgatccggagttcagactgcatccttctgaatggaatgaagatggaaggatatggatcctcgatttttgttgtaagccaggatttgggcgaaaggccattgaatgtttcacagagcttcgaccatggggagaaggagaagtacgatggctgaacagaagaaagaaaatcatgatacgcacgccagcgcgacagaagaaatcacgtggtatccctaagctacaggaaaaacggtaa

SEQ ID NO: 204554 - DNA, 1551 bp, Klebsiella oxytoca
atgaaccagcaatgctcgcttgctgaactcaatgaaaacctggtgcctttcactgcacgacgggtaacctcatcgttgatctggtgcgctgaggatgccttgaatatcgaggctttacaaaaagcctgcagctatataatagatccggtcagttcaactcattctaaaatattccatgcagagcgctatggtgggagtggtattcagcgtaatggcggtggcgcacgttgtgggtttgatagtaactatcaggtcaaaggcatgggagccaatcctttagtcggtgacgggactgacggacgtcattctaacggcgcgctcggtgccgtccatgcaatctatgaggctttatggggagaggtgctggcgcaaatattaccctatggcgcagtgcgtgcccgggcagttttacttacggatgtctataccgacaaagcatttgaccgctcccacgggaaatcccgacgagcgctgttggtacgcgaacccgcggttcgcccggcgcattttgaacgcgcgccttatttccgaccacagcaggaatatgccgatcggttgattcatgatgcccgccgggtcaggtccgtgatccgcatgcttcccggaaatttacctgtaccagcagagggggtcagtgaagaagcccgacgtaatccccgactttattgtattgaggggttatgtgaactggctcaccgtgaagcatggcagatggcattttgtcgtacacgtttcctgagactgacgacttcgccttccaatattgcgatggatggcagattaatggattttaacgggctcagttgtctgttccctggagattatcccgataattttggacatcaactcagactcaccgaactggtaaaagaaccgatggtgctgatgcagggactgtccgatctctgtctgtacctcggaaaatacctgtttgaacctgatttcacactgatggcccgtcaaaaggttgaggagacctttcagaaaacattccgtgaagcatgttattactgttatctcgaacaactgggtatccccgcagagtttataccacaggaagggatcccggagacgctgaaacaactggtcaacagcttcgttgtattggtcaataaacacagcgagcggttgtaccgtccggatgctggaagtaaagatgattcaccactgcaaaggctggtggtggaactgattcgacggagccagaacccaatccgcctggcggataacaacgataagcgtgatgtccatttcacagaagcacaacactgttttacccgggcaatccactggctgacgcaggtgggtatcagacgcccaattaatgcttcgtccctccgtaaagaaatggaaaaccatgcaaggaagagactgcagcccagaaaaggtctgggtaaatcatatatgtccgagaaaattgccgccctgctggataaacacggagatgatcaccagtttttgcagaaggcattttctgatatggaaacccggatgaaggcattttccagagaagcgttcggccatgtaaacccgatcagaattgcagagtaa

SEQ ID NO: 204555 - DNA, 243 bp, Klebsiella oxytoca
atggttgaaaaactgtatatcccgtcagtaatagatacgcaccagatcgtaaaagactctcaatttcatcctcattttcgacaaatggatcctttatcttttaatcctgtaattcaggctactaatagcactcatgtccctgccggagaagataacaataaaaatgaaccattacatgaatacgatgaatatgtttgcggctgtggttgtgactgctgttgtggttgtgggcatgatctctga

SEQ ID NO: 204556 - DNA, 225 bp, Klebsiella oxytoca
atgctggatagattaattaactttgagataagctttctatttttctcaaatgagaaaactaacattctaataacagctatagtaaccgtttttttaatgttttcattatatcttttaccagataagaagtggctggtattcatcgttggggcgttgattatatgggagaggattcttctgctgaagataaaaaaaatgcagtccctggtgaaagataatagctga

SEQ ID NO: 204557 - DNA, 1236 bp, Klebsiella oxytoca
atgagggatcttattcctggaaatcgtgatgatatctgtgcggaagcacgaatacgcgcacagttgtccacaagtctaccaatagatatcacccacttctggcatgaagttgagtctgctgcttttcctctgatgacaaaaagcagcaccaacacagaaaatagggaggtcacatttctgtggcgctcggaagaggtgctacaaggcgtatatcttcgcctgaaccgtgttacagataaaaaagatgtcaaaaaaggacttatgactcatatcccttcaacagatatctggacactgactctggagttaccagcctcatatcgaggttcatactccttcattgaaatcccgccaggaatgacttcggaagaaatttctcagcttggaggtcgcttctcaccgttactcggccagtctgatccgtttaacaaaacatcagaaataaatatacgaggatttggggaatcggtcctttctcttgatctggctcctgaacaaacggaatgggatgatacttcccacacctgttccggtatactctcaacgtcatattcctttgttgcgggacaccagcgccagattcgtttctatcttccgaagaatccaacctcagatcctcttggattacttgtattacctgatgcagaaacatggtttggccgtatcggtattacccgggcaatagatattgccattactactggacgtatcgcgccgatggccattatggggatagacaatattaatgaatctgatcgtgtgaatatcctggggggtaacaaaaaacttattctcgatattgcagggaatctgataccccgattatataaggattatcctgatatcgtatgggctggtcgttcgaatacaatcctggccgggcaaagcctcggcggagtcaccgcgctgatggcagccttatatgcatcggacatatttggcacagtaatcagccactccccttcaatgtggtggagtcccgacaggaacacaccgatcatgtttactgataatgatacctcatgggtaagtaaacaggtactttctacgcttccaaaagacgttaatatccggttaggggtcggctctttagaaggtgcaacagtgccgcatgttcagcagttacatcaatcgttgctcgccgctggtttgaaaagtgaagtttctgtctataccggcggtcacgattatgcctggtggcgtggggcaattatcgatggattaacagatatataa

SEQ ID NO: 204558 - DNA, 1113 bp, Klebsiella oxytoca
gtgcgtattctctttgttggaccgcctttgtatgggctgttatacccggtaatttccctggctcaggcttttcgtgtgaacggacatgaagtagtcattgccagtgcaggtaaattcacgaataaagcggcagaagctgggctggttgtttttgatgcagcgccagaactggattcagaagcgggctatcgttatcaggaagagttgagaaagaaaagtaacattgtggggcgtttctcttttttcagtgatgagatggcggaccgtctcgttgattttgcaggacaatggcacccggatttaatcgtctaccctccactcggtttagccggaccgctgattgccgctaaatatgggatcccttcggtcatgcagacggttggattcgcccatacttctgcccatatccggatggtaacccgttctctgaccgatgcttacaggcgacatggtgtcagtggccctgcgcgtgatcttgcatggattgatgtcacaccaccgagtatgagcattcttaaaaatgatggtgagcctgttatttcgatgagatatgtcccttacaacggaggcgctgtccgggaggcctggtgggacagagtatcgggaagaaaacgtttgttgatcagccttggtacagtcaaaccaatggtagacgggctggatttgatatcatgggtgatggattctgcaaatgaggtggatgctgacatcattctgcaactggggatgaatgcacgtgccggattgcgaaaactgccatcaaatgtgcgtctggttgagtggatccctatgggggtatttctcaacggcgctgacgggtttattcatcatggcggagcgggtaataccctgacagctctgtataacgggatacctcagattgtgtttggtgaaggtgctgatcgccctgttaatgcaaaagctgttgtgacgcgtggatgtgggatcattcctggagacaatggcctgaccagtgatttggtcaatacctttctttatgatgattcactgcgcttatgttcagcacaagttgctgctgaaatggctgaacagcccagccctgctgagatcgctggcctcctggtagcgaaactgaaaaccaactggcaataa

SEQ ID NO: 204559 - DNA, 183 bp, Klebsiella oxytoca
atgataaaatatgccgttatcggagcgatagccggaacgctgttctttagcctctggccattgtgcaaaacattgtccggtaatacacccgagaatattgtttatgcgcttccccttattctggtatttgcagcaggtgccgtggctgcatacctcaccaggaatcgacagtcgtcactataa

SEQ ID NO: 204560 - DNA, 222 bp, Klebsiella oxytoca
atgaatgtgaaccctgtcaagacaattcagatacaatggtggagcgcgccacttgccgtattgtttacagtagtgctcttttttattttagataacaccgggttatcggaagacattcatcctgtgattcgaacactgatgcttagcgctgtcacagttattatgctgtggggcattaacatgttttatggccgtacgaagaatgggagaacaccgccatga

SEQ ID NO: 204561 - DNA, 465 bp, Klebsiella oxytoca
atgaagatatactggacacgaaagagtattcctgaactcgcagatcttcctccgcggctgaggaataaaaactttaaagacgcacataatgccatttccacccacattgaatactgggctggtgcagcgattgctgtcatttgtaacttaattattttcagaatatatgaatatttctttccggctcagaatacatttccttataatatagtcaggatgttgtgtgtcatctatcccggaatgataatctggtatcaattctgtatttatggaatgaggaaacattatcgtcatatactggaaagaggaaaggcaacagataatgaaagtgattcagagaagctaataatggaagcggacgccagagaatattaccagtggagaaacgtgcgtcgctttatgtttatacttaccgtcattatggtatttttatctgttctgatgctggctaaaacagtaaggtaa

SEQ ID NO: 204562 - DNA, 225 bp, Klebsiella oxytoca
atggttaccggtcggacaaaacgtcattcacgacagcgtcgggtgtcgcatacctggcctggcgtgctgctctgctttcatgtgttcatccgctccagtgaactgcaccttccccgcaggtcagtgaatgatttcagaaaccgggtccggacgatacccgccacatgtgaagccgttcagggccgttcttctggcatcattatcccctcggatgttacgatgtaa

SEQ ID NO: 204563 - DNA, 150 bp, Klebsiella oxytoca
atgcttgccccattagtcctttttgtcccatctttatatgatggctgggtgaccgtagctactgctatcggcgctcctaatggcattatagctgtagatgaaatggcaaatgaagaggaaaaaacggatactgattcaaagtttcaataa

SEQ ID NO: 204564 - DNA, 261 bp, Klebsiella oxytoca
atgaatacgttaactggcttcatagtttttttaattatcgctctggtatttggatacttatgtcatattacggcggagcgaaaactttcaaaggcaagggctgagctcaaagcggcggaggaaagagggaagccttactcggaagaagttgtaagttatatgatgggtcagccaggtataattgcaatcttctttgcattcatcagcttcctttcatttattgcgtcactttataatctggtttattggttttttccataa

SEQ ID NO: 204565 - DNA, 240 bp, Klebsiella oxytoca
atggctggattaaccaaagagcagcgagctcaacgagcggcggaaaaatttgctgccgagctggctgagccgaacaattctcagcaggagcaggagcaggagcaggagcaggagcaggagcagaacctggtagtaatggtcacggattaccctgcttttcccggcgcaccgacaaccgccgatgtccaccctgaagaggttgagaactggaaagcgatcggctggaaagaaacggagtaa

SEQ ID NO: 204566 - DNA, 573 bp, Klebsiella oxytoca
atgttcagcgaagaaaaagtggctcagatggctgcttacctgctacttaaacgcggcgggcgcatggcatatctgaagctaatgaaactgctctatttggctaaccgccagtctatgattcggcatgggcgtatgatgggcgaagatcgcctatattcaatgcggcatgggccagtaatgtcgacaactctcgatttgattcgtggcaaagccgatatcaaaggggagtactggtataacctcattcagactgatcgtcatgatgtggccttgtgtacagatcctcgagagatggatgttgatgaagtctttgatgagttaagtcgagcagatataagaattcttgatgaaatctatgctcagtacggtcatatgaacaggtttgaattgcgtgatatgacgcatttgagagatgtatgccctgaatggcacgatccaggcaattctcgtaaccccattgatgtacgagagattttccttaatgaagggaaatcacgagaagaagcagaaagtattttcaaaagcatgtgtgaatcacagcaacttaaggaattttcttctcaattgtcatga

SEQ ID NO: 204567 - DNA, 156 bp, Klebsiella oxytoca
atgcaaaatcttaaagatgcagtgaatgatccacgattcaagacgatgtgctcaagattggcagtaatggtgtctgtgggcgggacggcgggcacggtgccacttttcatggcaatttgcctaggttttgcaattgtgatcacgcacatccgctaa

SEQ ID NO: 204568 - DNA, 3219 bp, Klebsiella oxytoca
atggcagaacaagaatcacgactagcgatacgcctggacagctccggggcagagaagcaggctgaaagtctggttgaagctctggtaaaaatgacacgcgcaggtgaagaggctgaaagagccactgatgatctaggggatgcaacccaaaatctcaactcacgcctgagggatggcgctgccgcaacaggaagagcgacaaaattcactgaggagcagcgagagtcattccgtaaactccgcgatcaaattgatcctgtgggtgctgccatagacagaatcggcaaaaaatactccgaacttaaaggatattttgaccgtggtcagatcgatcttgatgaatatcggacattagcgaaaagccttgacgctgccactaacgagttaactggggttgctaaagcagaacgtgaagctgcaaaagcagctgatgagcaaaaggctgcactacagcgcctgactgcacagttagaccctatatctgatggttttcgcaaaattgctgacaaccagaaattattggatagcgcaaaatctaagggaatgctatctacagagcagtacgactcactttctggaaagttaaaacaaatgcgaggcgagcttgaactgactcaggcccaactcggaaaaacggggatgtcagccagacaaaccgcttttgcaatgcgcatgatccccgctcagatgacggatatcgttgtcggcctctccactggtcaatctccatttatggtgctcatgcagcagggcggccagcttaaggatatgttcggcggcattgggccggcgattaaaggcgttggtgggtatgtggcgggactgattaaccccttcacacttgcagcagcggcggtcggcgttcttgggcttgcttattataaaggcacccaagagcaggacgagtttcataaatcactcacgttaaccggcaatcttattggaaaaacatccggccaattagcagatatagctgctcgcgctggggtcgcggcggattcaaccacaggcaaggctgcatcaaccctaaatcagttggtttcatcggggaaggtggctggcgattcgctggaacgcgtgacaaccgctatcgttaaaaccagtgacgccacaggtattgccaccgataagctagttggtgatttcaacgatatcgccgccgaccccgttgcagccattaccaaactgaatgaccagtatcattttttgacgttggcaacatataaccagattaaagctcttcaggatgaggggaatcagcaggatgctgctcgggtggcgactgatacctacgccaacacgatgcagcagcgtgcgaatgacatacatcagaatcttggccttctcgaaagtgcttgggattctctgggaaaaacagccaaaggcgcctgggatgcgatgctcaacattgggcgtgagcaaacactatcggataagctagccacattaaacgaaaatattgctgaggcccaaaagggacaaaaagaaggaggcttctggaacagctttaacgcaaggtttagcaacctgccggagatgataaaacagcgagatttacttgaatcagttgctaatcttcagggagatgtaacaaaaggacaagcgaaggctaaagaagctgaacagcaacgaattaaaactcagcaggaagcagatcgagtaaaccagcagtacatgagcaatgcggataagcgtaataaagctattaagcagcagagcgagttcctgaagtctggcgcaatttctgctgcgcaatacgcaaataacgtttcccgcattaacgagatgtacaaggatcccaaagcaccaaaaacgcccaaaacaccaaaggggaaagcctacacagaagattccgccacccgcctactcgatcaaatcaatcagcagactgctgctatgcagtctcagctggaagcaagcgataaactcaacagcgcgacacaggcacgcgttaagtttgaacagcagattgctgatctcaagtctaaaacgcagcttaccgccgaccagaagtcgattcttgcccgttctgatgcaatcttgcaggcctacaagcagcaggaggcgttgcagaactccgttaagactttggacgactaccgaaaaatgcaggagcaggttgctccgaaagaattgcgacaaaatgagactttgcaaaaacgtctcgaaatcctgcaaaagatggtcgaactcaaaaaactttcaccagaggacgccggaaagcaggcaactgacctgattagcaaatcaattctgccggattccgtcatatcaggtgttaacaaggctggtggaacgctcacttcaagtgcgactaacagcgacctggcagggcaaggcctgaacatgatagggctgcaaatcgatccgcagcttgaaatcattgataagttgaaacaggcccagaccgattatgcagcctggctgaatcagcaacagcaggcgataacgcagagcacagttctgaatgaacaacagaagcagcaacagctactggccttacagcaacagggccagcagaatcaggaggcattaagtacggctgtctacgttgcgcagatgcaatccgctcaaaactccttctccggcatcaccgattcgatggagacgatgtttggtgagcaatccgcgatgtataaagccgcttttgtgacgcagaaggcattcgctatcgctcaggcagctctgcagcttcctatggcgatggggcaggcgatggctggcttgcctttcccggctaaccttgcagctgtcgctcaggttatcgggctcatggcctcgattacttccagcatctccagcgctgcgctaacaggcatggctcacaacggtatcgactctgtcccatcgactggaacttggttgctggaaaaaggggaacgggtcatgactgctgacacatcggcaagactggactccacgcttgagaacctacgcaaaaacggactggacgcgacgctcagcaaaccgggttttgggaccggggtgcagaacgtgaatagtgataacagcaggaaaaccactattcacgcaccgatagaacagcatttccattcacctgctggtgtaacccctgaccagatggctatctccatggcacaaacgcagaagcgggcgacaacagatgcgcttaatcaggttgcagcgcaagtgctgaagggggacgggaaggtgggtaacgcgatgcggagtaaatatcctggcagggggatgagttga

SEQ ID NO: 204569 - DNA, 762 bp, Klebsiella oxytoca
atgagcatctatctgaaagacaattccatgattctgaacacgccggaaactgtggatacggttgtggcaccagtcatgccgtataccgcgctcatcatggcgggtaatcagtcgctggaaacggcctttcgcctacggcgctacggcagcacactgagccaagtcacgctgaacggtccgtggtctgcaaaccagccaggctttaaggcggatggcaccgcactggcttattttgacgtggatgtgacgcagcaggttccacgcacgctgctggttaccgggctttttaataaaggtgcgcggattgccggtattgcatttggagatccggatacgctgaaatctttctacgtcgagcgcggtagcggcgtctctggttcgggtttcccgtcaaaaaacttcatccccgtctggtccggcgccgcaattggcactgccgggaaacagcttactctcgatactgaacctgacggagctttaacgctgttcatcagcggagacggtaccgggacgcgatggggcgtgatctataacggcatgatgaagtcgctcgcgaaagacacgacttataccctttccactgcggcaggccgaacccgtatcggcggatcatctgcacagccgacggggtcagccattgcagcgcacggaatttatgccgctgcatcattttctgaactccttaccgatgacgagctattgcagatgggaaatttcatgaacagctacgcatctgatatgggagcgaccatgtatgaataa

SEQ ID NO: 204570 - DNA, 1788 bp, Klebsiella oxytoca
atgaacaactacacaacgaatgatgatttacgtgctgacttaatttcaagcgaacaagggatgggtgacagccttgttaaacacgcacccaggagtcaattcagtaaagcccgcttagtaaaagataagctagacgatttcccttgtatcttagattacacaactgatagcgtaaatgatgatacgatgcgttttaaaagagttcttcaggaaggtcataaagttgttaaattgccacaacgttcaattgctggagcactgagagtcggtgaattggatattacttctccattggttattgagggacaaggtgtaacttctattaactcacttagctctactattattaaaattgcagatgcatcatatggaatacaatttctagggaataaagataaccggcctcacggtggcggacttcgttatattgatattcggggagaaatagataactcaacaggtatacttcttcgtgtagaatcgtggtcatacttttggtgtgaaatgctggcgctacaaaatcttgcggactggggtttatcattgcgaaatgttgctgaaggtggcattaatacttatctttgcagaaggctgggtagcgatactacaggatgtatacagtttgaagattatctggataacaaaaacaacaatgtgaacaactttagtcttacacgtggaacgcttgggtttaactccggaaactggatttatggaactgattactctaatcttgatgccatctggattgataaaaacaagttcgaatacgatgataagcctgcatctgggaacattagttcaaagcatgttatatatttaggacaggcaaacagagtaagtatcgaccataatgtatttactaactataagcttaccaacactaacatttactctcattgtataaagattggtgaaaactctcgtgtacaacctaccattacgaaaaataaatttcacggttgtgacaatgttttgattgagatagctggcggctcagttggtggcagcgaaaacgaatctaatagaggtaatgcaacaacagatggaacttttatttgcacatctaatcttcctcaagatatccaaccattgatatttcattctaataatggagttaagaataagagatcccactttgatgtaccagggtttatttcttcccatcaaatgattggaaccatcaataatccatttgtacctgattcaaaatctatgactcactaccttaccgtaatgtcagttcctgcttctaccgaaattcgtcgtggaacgatatcctcagcacttatttctgaaaaggattttgttcatatcagcgcccgtctgaagaatgtatcagatataacctcggatgttatacttactcttgatggcgttaattacggaccagtgagcgtatcagctgatggcatttggaaaaactataaatggcaaattcgacctgataaaatatcaagtggggcattcatcctaacaaatggatctgctccagtactattcgatggtgtttttatcgaaaggaaagaatatttcgactggtcttttgcatggaatcctggagctattgctgctggtcagtcagcaacctcccctgtacaaagcgtgaaagacacaattggatttctaccatgggtggttaaagcaactgccaacgggtctacatcgggaactgaactacaggaaagtgtggatgtgttaggtaatgtaactattatttgcaggaacaatactacaacatcgataactccctcattttctcggattcgtttacgctatgaatcttaa

SEQ ID NO: 204571 - DNA, 633 bp, Klebsiella oxytoca
atggttgactacgcctcgaaagcccgcgccctgcaaatcctgagtggggatgcggttcaactggatcagtgggcgcgccgcggtgagccgctgaacctgagtctcggtctgtatcacggggcctatttacgcataccggtgttggccgcgattcgttcctgggaacccccacctccgccacaaaaaccagcacaaaaaaccgtgccgaaaaccatccgcctcgacagcatgtcgctgttcgataccgggaggtgggcgcttaagcccggatcgacaaagctgctggtgcactcgttggttggcatcaaagcaaaacccggctggctgattgtcgttgcgggccataccgacagtaccggtgaggaaaaagccaaccagatactttcgctgaagcgtgccgaatcggtgcgcgactggatgcgtgacaccggagatgtaccggagagctgttttgcggtgcagggcttcggcgagaaccgtcctgtagccaccaatgaaacggttgaagggcgtgcgctgaaccgccgtgtcgaaatcagtctggtaccgcaggtgaatgcctgccagccaccgggcatgccttcggccttatcgcgggagagcggcgcgtcaatcaatgaaacggagaagtag

SEQ ID NO: 204572 - DNA, 900 bp, Klebsiella oxytoca
atgattactacagaacagcactttaatgaagctaaagacttactcaattttttatgcagttggaataatgacttgagcggttacgttttcagagggcattcagatgagagttatcaattattaccatcagttttgagagatacttcacggtatatagctgataatcaatatccaagaaccgcagttccagggcagttgcgaaactcagatagtgaatggcatcaaattcaacatgagcgaataattctgagggagttttacaagttagcagataaccatggcctaaaagttcctaacgtagaaaaattacgtaactctttaataggaagatttgaccttgattttacacagcaaggtagaatcgaatggctttctcaagatattttagaagtcgcggccttagcccaacactatggtatacctacacgtttattggattggtcatacgatccttttgtttcttcctactttgcagcaagtggcgtcactaatgcttcaggtaatttgacagtatggtgcttcaatgctgaatatttatccatgtggttaaatgacacctcgccattacaactcaaaataatcatccccccatattctgaaaatagtaatttatccgcacaacgagggttatttacacatatgcctgttgaattcgatttttcaaataatgctaatgcttctatccctgttgaccggacacctttagatatcaaacttgataacatacttcctccagagccatatacacaaaatagagaaaaaatatttttaaaacttacattaccatgttccaaagcaaaagaccttctaaaattcttacttcaacaaggttatggggaagcccgcatttatccgggatataaaggcatagctaatcaagtgatgagaaaatacaaatag

SEQ ID NO: 204573 - DNA, 750 bp, Klebsiella oxytoca
atgtcaaaaattgaaatagaaatatatataaaggaatcagcaatagagaatgttgcagaaaaagatggtcgttctcataatggtaaatatgaggtcgaacgagttttgtctaaacttcttctattatctgaattctattctgggtacaaaggccatgttgattggtttctgaccggaaactcaaaagaagatgcaatgaagcggaagattatagatgacacaatgctttcttatgaagctagtgatcttttgtttcaaaacttacaaaataaccttcctttaattgtagatcaaatatggaatgaatatcatgatgtaattcgttttaggaattatgttcagagcaataccaatttttatctgtatgaattaatcatcagtgtcgataataccaaaacaataagtgattttgcatttgatattgttaataaagtaatctcaacgatgtttccgcgattaattagagtagaaacaaataattatagtctagatggaaaacaagccttccctgacagattgccggtagggtggatgttttatattaataaaatttttgaagagaaatttttgcagttaggtgaaaatgccaaacaaataaataaaaatgaaactccaatggggacgttatttatatcaaaaactgatttttttgatggcgcaaataaagatgatgtaaaactgtctaatgatgttgaaattgttcttgcgtcaaaagatatactgccaacttacaaaaatattttttattaa

SEQ ID NO: 204574 - DNA, 132 bp, Klebsiella oxytoca
atgctggtaaggtattatataagctcagtagatttaacagcggagaaatttggcacagcgatgaaaaatcattggggtattgagaataaactgtactggcgtttagatgtggcgatgaacgaagtcaattga

SEQ ID NO: 204575 - DNA, 231 bp, Klebsiella oxytoca
atgaacgacacgttgatggatgaaagacgcttcaggttgtttaacgtggttgaagattttaatcaggaagcgctggcagtcgaagtagacttaaatatcccgcggcatcgtgtagtacatgttctggcgagactctgcgcggaaagaggtatctggcgtttatccgaagcgatgatggaccggaacttaccgccgcagcattatcagaatgggcaaagcaccatgaagtga

SEQ ID NO: 204576 - DNA, 528 bp, Klebsiella oxytoca
atgaaaaatggtaaactgcagttttttatcttattttgcgggtatttgttgagtgcggtattccttactttcatagcatggtttggatacgacatagtcgggctgctaggggggctgcttccttacctaaagggaggtatgattaatagtgactatttaccagttagtatcatccttaacaattactcaatgtatattggtttttttgttggtgtgttattttctttgttaatgtgtgttgttattgatattaaaaaaataaatggtgagcattatttttcaagggtattcattggctgtgtgattgttttgcttgttttgatatttatgtcgatggtaatggagccttcggacctgattaatgctaactatttatttagagtgttttcttattcttattttagctctgtgatatattatcttttactcctcttttttttctatataatgacagtgatttccgtcatggggataatcgttattccgtcaataattatgatgaaaagaaggaaaaatgctggggcttaa

SEQ ID NO: 204577 - DNA, 1242 bp, Klebsiella oxytoca
atgaaacaatcacttgactatgtagtggacgtccccgttgatactcttattgttacagcagatccctcacaacccgcaatctggacgaacacctccgagattgaaaatgcgattcagcagagtgcttatgttgcaagtaacgctatgctcaattacctccaaaaacatgccggcgacatttttgtctccgagatgaattttggatttcaggaagacgctaagcgtttactcgctgccaacggcaaggtatctaaagcccaatctaatctgaatgactcaaaatcggcatttgacagggcaaaagaaaatggaacaccgaagcaaatcgcccaagcaaaactcaattatcttaatgcccaaaaaaatctctatcaggctcgtaatgaaatgcgtcaagtttcttcggagatgatgagtcagcagattttatataacaacggattaattggctttgggattgtgcccgatggtgaaacccctgacagtcttaataatacatcaggaaattatcaatcccaaattaatcaaatgcagcagacaacaaatcaggagaatgatttcattaatcaggttaatgccaacataaatcagactacaaatgatttgaacactatcaacgctggtggctatcctgatggctataaaaataatcgtgatttagctattcagacatcaatgactttggctgcacaaagtgcagagaaaatctctcagcatgctgggcagaaagcaggtgaaatcgcccgtaatctagcgaatacagtcagaggaaataaggttcgcaattattctgatgctaaaaagactctggataagctgttaaaaaaccccaaactatcacttaaacaggctgataagaatgcaattaaccaggccattacggctgataagatgaaatctttagccaaagattttgatgctttaggtaaaacatttgggtttctggataaaggtttcaccgcaaaagatctttatgaaaaatatcaaactggctatgtgacaggaaactggcaacctctcatgctccagatagaaagtatggctctaagcggcattgctgcagcatatacttacagttttgtaacgggcatttcactgggggttgctgctgcggtaggcattacgctgtcagcaacagcagcagcgattgcagccgcaattgctgctgctgttgtagcctctttcttcgatgtagattttgcagaaaaccttaataaccagttaattcctaagctttactaa

SEQ ID NO: 204578 - DNA, 207 bp, Klebsiella oxytoca
atgccgatgaaatattcatggtttcaccatcacgactgcacaactcagcaggctgatgagctgatggcgaaatatcgccagcggggcgtaagggtcgagcgcagtctgaatcaggatttaatcacctggaccgtcagtgcgcagctggtggaggacaaaaatcctccgcgtccggcttctcgcacccgaaatcggatgtgggggtga

SEQ ID NO: 204579 - DNA, 282 bp, Klebsiella oxytoca
atggaaggtattcctgtagcattaatggaagcaatggcatctggattacccgttgtttctacttttcatagtggaatccctgaattaatatcagatggtaagactggttggctgtgttctgaaagagatgcagaaggtattgccttagctcttagcaaaataataaataataaagatatggtcctcaatattgtcagctcagcacgtaaacaaattgaagacaactttaatcaggaaattgaatatattaaaatggcctccttattggagagtctgaaatga

SEQ ID NO: 204580 - DNA, 1326 bp, Klebsiella oxytoca
atgagtgggatcaaggggcaagctagctggttactattttcgaatggcttttctgcgatattgcaaattatacagataagtattcttgctcatacacttgcacttgatgagttaggcttattggcaatagtcaatactgttttaatgatagccatgatccttcaagatatgggtatgagtagttacatagtccataagcagagtctgactagacagcaacaaagcactattttttggattaatctttcacttagtctaattgcagggttaattgtttttgcttcttcatggccattagctattttttatcatatgagtaagcttgaacctttaatcatgctcgcaagcattaactttcttttcttaggttccttatctcagtatcaagcacattatgtaaaagcaaagcgaatgatcttactttctaagattgaaatggcggctaagtttttttcttttgtgtgcgttatcggtatgctttacttaaccgatttaagaacatctgcagttattattggtctgattataaatgctttcatacgtctactattaatgtcaattctcggagagcgatcgtggaatccaacttttgcttttgagaaaagcatttttagtgatgttttcaaatatggagtttatcaacttggttcccaaataatcaatcaactccgtactcagttggatattattattataggtaaagttcttggtggcgaatcattagggttatattctttagcgaaggatctgattatgcaacctttgaagttggttagtccagtgattaatcgacttgctttgccaagattcgctgaagtacaaaatgatactacaaatttaggtaaggcgtttctaaaaggaacatgtgttattgcttcattcagtgctattatgtttcttagtatctatattttttcgccaattataattacagtactctacggttctaatcgcttacctattattgaaatcttacccttcatgattctttttggaatgttaaggcctatggggggattaactggcgcaattgcacaagcaaatggtaaaactcatgttgagttttattggaacataattgcaggtatcgctgttctttgcatgtcagtaacgatatttttaaactctacattgtggtatgtatctttagttctctcaatgtctcaaatacttatcacagttcttgtttttcctttttttattaagcctattattaatatcgatttttattcttattcaaagcagtgggtgccaattacaattgtatttgtatctttgatatttctaatacataagtttagtttattctttaaaccattttggtga

SEQ ID NO: 204581 - DNA, 216 bp, Klebsiella oxytoca
atgtattttatgaaattccatctggtttcttctgggtatatctatattcttcttcgccatatgcaaatttggcgtcacagcaacgatttaataatgtcgataaaggcgattttggggatttcttttcttcctctgtcttgcctgattttattagtaaatataccgctccctatgtatttagtaagttccaacctaagaggatcactgacgaactaa

SEQ ID NO: 204582 - DNA, 543 bp, Klebsiella oxytoca
atgcgtcgccagtggctcctggcgttcaaggagaacggcatcaccacggtagagcagattaacgccgggatgcgggttgctcgcaagcaggaaaaacccttcatgccatcaccgggccagtttgtcgcctggtgccgttctgaggaggcggtgacgatagggctgccggatgtgaatgaacttgttgagatggtttaccagtattgccggacccgcggtcagtacccggacgctgaatcgtacccatggcctgagcacaaaatcacaccgataacgatgaaacacaaaacctgctactggatggtcaccggactgtacaccgatatgcgcgcaaatggcctcagcgattcagagctgcgtcgtaaagcctcgggcgagctgttgcgtatggttcgtcgcttgaatgcgggagaaataattccggagccggttaagcagatccagaagcttggcggaaggccattaacacaggagcagggcttaaacaaaatcgctgaaatccgcgcaaagtttggtcttgggagagggcgtaaccgtggctag

SEQ ID NO: 204583 - DNA, 393 bp, Klebsiella oxytoca
atgaccaataaccagttaaacagagaacgtctggaaaaaattaaatcatggcgtgaaacctatggagctggaagcaacgtaatgctgccagttgaagaggctgaggctctggctcgcatgtcgctggccgcaatggacagcgagccggtggcgtggatagttcacgcccgcactggtgaccaattaaccaccgacggcagctatgtcgccaatgctgaggggatattaggtctacattctacaccgctctatcgcaacgcgcagccagcgccgacagcacgcatggtcgtaatccctactatctggaagcattatactgccgccaaaacagcgattatttacgagaaagccatgacagatgcaggcattaagtggagaagtattgatgattaa

SEQ ID NO: 204584 - DNA, 192 bp, Klebsiella oxytoca
atgattaatgagcgcttaacgcatgaagagttagagtcactatccttggcgatgaaatcacacttcgaggttatggctgaatccgcttcagaggcagaggttattgaatgcagccagatagtaagagcattgtgtgagttacaggaacgccgcaccgcaatgctcgcagtcgctccacaggaggtgaaatga

SEQ ID NO: 204585 - DNA, 1929 bp, Klebsiella oxytoca
atgaatgaaataaatactgttaactatccaaacgtagacattagtaccgaacacccagacaacattgaacaattacgtgaaatcttagcttccgatggcacgcaagttaatacaaaaggggcatttttagcgggcgatggtggtggtggcttatggatatttaatgcctcaaattcatccaatgatgtttcaaaatacccccatcttttcattgctccaaataacgataaaacaggtaagtcaggggcctggagacttaatatctccgatcatataaatgccattcaatatggagttggattaaaagatcttgatatttctgttgatgtttccgatcttgttaaaccgaaaaagccggaaaatccagaagatatagaagcgattaatgagtataagttggccttaggcaaatacaattcagatgtttttacaaggcaagcaaaagaagcagccactttgaacaaaattattttagacgaaattgttacatgggcaaacagcaagtataacatccatctccccccaaaacctatatatattacatatttaaaatatgagggattagtacctaagttcaaagggacatttgccacaaacagacaacaaggaacaatgtttgttactactgatgcccttagcactgaacctgtaatcaaagtaacttccaagatggatactccagaaaatagggttacaggtttatttatggaggatatatcaattgtttcaatggattttttctcggtaccaaactacaatactttcacaaataaccgctcagcaagaacatgttatgattttaatttcgctggaactcagatacatttaaatagactttacgctggtggatttaagcgtggattcattgctaacgaattatgggatggattcattggggaaatacgtattatgtattgttccgacccaacgggttctataccggctgttttcattggttcaatgaacaaagacaatactaataacctccagattgatcacttacacattgaattttccccttggtcacttgagctagggttttgtgaacatgttacatttaatgtagtgaagtgtgagagctatcgtattttagatgccactaactacatagtgaaaatcaatgctgaagcaacaaagctaaaaataaattcacttcatgttaccactcaaaactcaacaaaaacacatgcaatttatgactcaggacagtttaccgaaattaatactttgtggtgctctggcgggcaaagcgaagaatacccctaccccggtattcattggtattatggagcatccttaaacaattcaaagaaagtaataaagaatgctcatatgaaccaaatgtatgctgctgatggtacagatccctctgactatccggttattttagcaaattatcaacgtttcgatggcacccttcgagtatctgactcgtacagtacctcaatgggtactttagttaatatgaatactggcttaatagcaattggcacacagtgcgaaatttcagacatacatttaatagttggttctggaactaaatactctgggcctgtttttttctttaaaggggatggttctaatgtcgtccgagttacacaaactgcaggaaataaaatcttcagacttgccggaggtaatagctttaacaattacattggtatgtttggctctcaatttcaaaacaccagtaatcaaaccatttatacatatggaaaacgagtgatttttctaactacaccaactacagttaatcaaatttacggtatggttggagatattgttactatattatcaaatgttgagggtagttatataacatatagctctgataaaattattactatcgatggctcatcgttggcaatgaaaaagggattgccctatacatttattatggtagcacatggcactgccgtacaaaaataa

SEQ ID NO: 204586 - DNA, 480 bp, Klebsiella oxytoca
atgggcgccgtggctgcggacggcctgcagggcggctttcatattgcgcgggtcgttcatggcgtcgaagacgcggaacacgtccatgccgtttttgacggcgcgctcagtgaagcgctccaccacgtcatcggcgtagtggcggtagccgaggaggttctggccgcggagcagcatctgcagcggggtcttcggcatggcctttttgagctcgcgcaggcggacccacgggtcctcgccgaggaagcggatgcaggcgtcaaaggtggcgccgccccagcactcaagggaccagtagcccgcgtcgtcgagctgagcggcgacggggagcatatcgtcgaggcgcaggcgggtggcgaaaagggactggtgggcgtcgcgcaggacgacatcggtaatggcaacggtcatggattcctccgtgaattaagggttaagtcggcgatggtggtggatggcggcggcaatcaccggctttaa

SEQ ID NO: 204587 - DNA, 831 bp, Klebsiella oxytoca
atggttactaatccgcgcattggccagcagcgtgccgtcttccgcgcgaatgcgcccggagaccgtgaccatctgcttcacttccggctcaatcaccgccacgttccccggataaagggtcagctggctcttgcgcccggtcacgatgtcgtagctgtcgagcgaatttttactgttctgcaactccacttcatagcggctgtagggcgacagcggcaggtagttgcggttgccggagagctgaacaatgcgaccgttaactttggcgctcagcttgccgtcattttccagtccggtgttgaaaatcaccccggcattgccgtcggtacggccgctggcggcgatatttttcccctgccagcccacactgccgttggcggtcaggttggtgttcacgtagccatccacgccgctgttcacgttcagcgtaccggtggagtagcgggtatcaaactgagcatatgcgccgccgctgagggttttatcatcgcctgtgtcgccggaaatcgcccgcgaaacgttggcgccgatggtacggatggtgctgccttcatcaaactgtttacgcgccgacaggttggccatggtgtagccgttctgatgggtcatcccggcgctgaaccagttgccgagcggcagcgagaaatcgagcgcaatatacttcccggtgctggcgctgctgtcgccgttattaaagcgctgtatccctgcgcgcaggcccagcgatccccaggatccggtataaagcgtctggtagtaatccgccgtgtagtagtggctgttatagcggcggtcatcgttatagctgatgctgaacgtccccagttttga

SEQ ID NO: 204588 - DNA, 246 bp, Klebsiella oxytoca
atggaagctgccgccccagaactgccaggccagcggcgcgccggcgccgcgtccgcggctgaacaatttattgacccgctgggtacgcttgctgaccacccggccgttcacaatgacttcaacctcgacatcgtaaatgccatacggcaggccgcgcgtgtccacttcgtggttacccatggcaaagttctgcacgctcatcaggcgcccgtcgcgggtgagatgcacttccccggcggcgggtaa

SEQ ID NO: 204589 - DNA, 321 bp, Klebsiella oxytoca
atggccggcaaaatcgcgttcatacatcgctttatagacttcgctgtcctgattgccggagcctataccgtacagcgagccgtcgagcaccacgtgatgctcgcgcagcgcggtgacgttgttcagcgacagatagctggaggtgttgttgccgccgttgcgcatctggttgttatatacgccgaggttatagttcatcgtgctgctgagggtattgacgctggactgaccgatatcttcgctgcgcgaacgcagcacggtacccagcgcctcctttctcaccaccagctgcagcagcagctggcgcaggctgagctgtag

SEQ ID NO: 204590 - DNA, 669 bp, Klebsiella oxytoca
atgaaaaaacacattctggccatcggcctgttgctcagcacaatgacgcctgccctggcgctggatgtgggcgatatctcttcgtttatgaacagcgacagcagcacgctgagcaaagagatcaaaaatacgaccgacagcggtcgcttaatcaacatccatatggaacgcctctcttcgccgctggatggcggtaaggtgatcccgatggataagcaggacgagattttactgactcccgccagcctgctgctgcccgcgaaggccagcgacgtgatccgctttttctataaaggcccggcggacgataaagagcgctattaccgcatcgtctggttcgatcaggcgctcagcgatgcccagcgcaacggctcgacccgcagcgcggtagccacggcttcggcacgcatcggcaccatcctggtggtggccccgagaaaagtgaattaccgctatcagtacgccaacggcacgttgaccaataccggcaacgccaccctgcgcattctggcctatggcccgtgcctgaaaccggcggatggtaaggattgcaaagaaaactacttcctgatgcccggaaaagagcgccgctttacgcgcgtcaatgtggctgacaaaaaaggacgggtcgcgctctggcagggtgagcagtttgttcccgtgaaatag

SEQ ID NO: 204591 - DNA, 1083 bp, Klebsiella oxytoca
atgcggcctttttttcgttcaaaaataattattgcacgttacaacgtgcatatgattataatgctcgtacattcacaacacgagcagagtaatatgactaaccaatttgataacgatgcagataaagagccctcaggaaaagcaaaaggtggtaaagcaaaagctgcaaaaatgactcctgatgaaagaaaagaagctgctaaaaaaatggcggcggctaaaaaagaattggcatccctaccaatagctgaatatggctcatctgacgcaccgctacgcattggtgatgctgagatccaatgttatgtacttagcgatggctcacgtgttctttctcaaaggggtgtattttccggcttgggtatgtctggaggtgctgctgaccgactacttaatttcgtaggcggagacaggataaaaccttttttaaacaatgatatattgccggttatcgaaaaccctataaagtttagacacaaaaccggtggaggagtcgcctttggttatcctgcaaccattttggcggacatttgcgatgcaattcttgcagccagaaaggagggaaagcttcaaaaacaacaggagcatttagctgagcgtgccgaactactcgttcgtggctttgctagagttggtatagtagccctaatcgatgaggctacgggatatcagaaagctcgtgagcgagatgcactcgcaaaaatactcgaagcttttgttgctaaagaattgcaaccatgggtacacactttccaacctgattattatgaacagttgtgtcgtctccgaggggttccttatccgcctcaaaagaaaaactttccatcttatttcggtacattaaccaataaaatagtttatgaccgccttgcaccaggattgcgagaagagcttaaaagtgaagcagccaagagtaagaggaaggggcgtcttcaccaacatcttacccaagaaattggccatcctaagcttagagaacatctatcttcagtcgtaacaattatgaaattgagcaaggattacgaacactttgagggcaacttagaaatggttcatcctgagctacccaaagctgacaactaa

SEQ ID NO: 204592 - DNA, 2409 bp, Klebsiella oxytoca
atgccattccgcattcagctcctggcgcaatatatggcagaagaaggccacgtttaccatatcagcaccccacatcgcggtcgcctttccgccatggaaatggatacagataactcagcagttcaggatctcattcttgccgctgaaagtattcctgaaataaagaaatacgacatgccagctttgtggaaatttacgagcgcgaataaaaaggtcttccctgaaggtaagcgccacgaacttggcaagcgtatacagtttgcgaaattgtggttcgaaaccaatgtcatcgatcgcggcatccttaccagggaatgggcagctggcaatcagatttcagcagttccccatactgacactcacgctacacccgaacgctataaacgcgccgtaacgcaaaatatcgcgaatctggctattgagatcgctattgctcaactgtacccggatgcagagcctggaaaaatcagccgccctcaactcatcggtgccaaagacctggtagacaggaaagaggatgtgcatgttaaggcgctcaagattctgagcaaaactacagatattctcgattacgacgcaaatagcatattcggcgtcacccgggccattaaatggaatggcgaagaaagcacgtcagaactacgggcaatggttcgtaactggcttgcggctaatggcatgtatgaaaacggcgagcgctcaaaaggctatccggagtgggaagaggatccgcgcgcgggccgtcaatcaaatgtcattgaacaacctcacgaagatctgaccgaaaccaaacaacctgaaattgccaaagtcagcgctggcatgtactccattgaaggcctcatggccgcccctgccccaaagagcgacaacgaagaggccaccagccatgtgcagatggaagagactcagcaggtcaaagacgaaactgataatccggtaccagcaggcgaaagcgctgatgcggatgctgaagaaacagatgccgtaaacgcacgcaaaattctaactgagcgctgccctgacctggccgctgcggttcttcgggaccaagaaccaacaaccacaccggaagtttcctacgaagaaccagaccagaaaccgacaacgccagcgtggccggaatacttcgagcctggtcgatatgaaggtgtaccgaacgaggtttatcacgccgccaacggcatcagctccacgatggttaaagatgcccgggtatcgctgatgtattttgaggcgcgccacgtatccaaaaccatccagaaggtacgctcccctgttctggatatgggtaatctggtgcatgcactggcgctgcagcctgagcagctggaaaaagaattcagcatcgagccggaaatcccggaaggcgcctacaccacggcttcgacgatccgcgcgtttatcgacgagcacaacgccagcctgccgccgctgttgagcgccgacgatatcaaagcattactggatgcatataacgccaccctgcccgcgccgttcccgcttggggcatccgttgacgaatcctatgcgtcatatgagcaactcccggaagagttccagcgcatcgagaatgggactaagcataccgctacggcaatgaaggcctgcatcaaagaatacaacgccaccctgcccgcgccggttaaaaccagcggcagccgcgacgcattgctggaacagctggcaatcattaatcctgacctggtcgcacaggaagcccagaagccgcaaccactgaaagtctccggtaccaaaacggatctcattcaggttgtgaaatccgttaatcctgacgcggtattcgccgacgaactactggatgcctggcgcgagaacccggaaggaaaagtgctggttacccgtcagcagctaagtactgcactggccattcagaaagcactcctgaatcacccgatcgccgggaagctactgacccacccgagccgcgcagtcgaggtgagctatttcggaattgatgaggaaaccggtctagaagttcgcgtgcgccccgaccttgagatagacatgggcggcctgcgcatcggtgcggacctgaaaaccatcagcatgtggaacatcaagcaggaaggcctgcgcgccaaattgcaccgggaaatcactgagcgcgattatcacctcagcgcggctatgtactgcgaaaccgcagcgctggagcagttcttctggattttcgtcaacaaagacgagaactaccactggatcgccatcattgaggcatccgaagaactgctggaactcggcatgctggaataccgcaaagcgatgcgcgccatagctaacggtttcgacacaggcgaatggccggcgccgatcaccgaagactacgccgaagaacttaacgattttgatatgcgccgtctcgaagcgctgcgcgtacaggcataa

SEQ ID NO: 204593 - DNA, 2409 bp, Klebsiella oxytoca
atgcccttccgcattcagctgctggcacagtacatggcagaagaaggccacgtttaccatatcagcatcccgaatcgcggccgcctttccgccatggaaatggatacagataattcggcagttcaggatctcattcttgctgctgaaagtattcctgaaataaagaaatacgatgtgccagctttgtggaaatttacgagcgcgaataaaaaggtcttccctgaagggaagcgccacgaacttggcaagcgtattcagtttgcgaaattgtggttcgaaaccaatgctatcgatcgcggcatccttaccagggaatggtcagttggcaatcagatttcagcagttccccatgctgaccctcacgctacacccgaacgctataaacgcgccgtaacgcagaatatcgcgaatctggctattgagatcgctattgcccaactgtacccggatgcagagccgggaaaaatcagccgccctcaactcatcggcgccaaagacctggtagacaagaaagagggtgtccatgttaaggcgctcaaaattctgagcaaaactacagatattctcgattatgacgcaaatagcattttcggcgttacccgtgccattaaatggaatggcgaagaaagcacgtcagaactgcgggcaacggttcgtaactggctcgcggctaatggcatttatgaaaacggcgagcgctcaaaaggctatccggagtgggaagaggatccgcgcgcgggccgtcaatcaaatgtcgttgaacaacctcacgaagatccgacagaaaccaaaaaacctgaaattgccaaagtcagcgctggcatgtactccattgaaggccttatggccactcctgccccaaagagagacaacgaagaggccaccagcgatgtgcagatggaagagactcagcaggtcaaagacgaagctgataatccggtaccggcaggcgaaaacgctgatgcagatgctgaaaaagcagatgtcgtaaacgcacgcaaaattttaactgagcgctgtcctgacctggcagctgcggttctgcaggaccaggaaccaacaatcacgcctgaagattccgccgaagaaccagaccaggaacttacagcgacagtatggccagaatacttcgagcctggccgatatgaaggtgtaccgaacgaggtttatcacgccgccaacggcatcagctccacgatggttaaagatgcccggatatcgctgatgtatttcgaagcgcgccatgtctcaaaaactatcaataaggaacgctcgccggttctggatatgggtaacctggtgcatgcgctggcactgcagccggaagacatggataaagagttcagcgtcgagcccgaaatcccggaaggtgcattcaccaccaccgctacgatccgcgcctttatcgacgagcacaacgccagcctgccgccgctgttgagcgcggacgatatcaaagcattactggatgcacataacgccaccctgcccgcgccgttcccgcttggggtatccgttgacgaatcctatgcgtcatatgagcaactcccggaagagttccagcgcatcgagaatgggactaagcataccgccacggcgatgaaagcctgcatcaaagaatacaacgccaccctgcccgcgccggttaaaaccagcggcagccgcgacgtattgctggaacaactggcaatcattaaccctgacctggtcgcacaggaagcccagaagccgcaaccactgaaagtctccggtaccaaaacggatctcattcaggttttgaaatcggttaagccggatgccgtgtttgccgacgaactgctggatgcctggcgcgagaacccggaaggaaaagtgctggttacccgtcagcagctaagcactgcgctggccattcagaaagcactcctgagtcacccgaccgccggcaagctactgacccacccgagccgcgctgtcgaggtgagctatttcggtattgatgaagaaaccgggctggaaatccgcgtgcgtcccgatcttgaaatcgacatgggaggcctgcgcattggtgccgacctgaaaaccatcagcatgtggagcgtcaagcaggaaggcctgcgcgccaaattgcaccgggaaatcatcgagcgcgattaccacctgagcgcggctatgtactgcgaaaccgcagcccttgaccagttcttctggatattcgttaacatagacgagaactaccactggatcgccatcatcgaggcatccgaagaactactggaactcggcatgctggaataccgcaaagctatgcgcgccattgcgaacggttttgacactggtgaatggccggcgccaatcactgaggattacgccgaagaactcaacgattttgatgtgcgccgtctcgaagcgctgcgcgtacaggcataa

SEQ ID NO: 204594 - DNA, 1161 bp, Klebsiella oxytoca
gtggctgccttcgtccagcgcatcaggtgtgaagctccagcgtccgtcctccccggcaactaccgtacccagtaccgtgtcgccgtcatagatcgtgactgtggcgcccgcctcggcggtaccgctcagggtcggcgtgtcatcatccgttacgttgccgctgttcagtgtacccgtgtcttctcctgcattatcagtcacctgcagatcgctgaccggattcacgattgtgtccaccgtcagctcaaacgccggagagcgctcgctgacattccccgccttatccgtcacggtggtgctcaggctgtggtcgccctcgttcagggtgtccggagtgaaagtccagcgtccgtcctccccggtaaccaccgtacccagtacggtgtcaccgtcgtagatcgtgaccgtggcccccgcctcggcggtaccgctcagggccggcgtggcgtcgttggtcagatcgccgctggtcagcgggccggtgtgtccggccacatcgtcagtcacctgcagatcgctgaccggagtcacgactgtgtccaccgtcagctcaaacaccggagagcgctcgctgacgttcccggccttgtccgtcacggtggtgctcaggctgtggctgccctcgtccagggtatccggcgtaaagctccagcgtccgtcctcgccggcaaccaccgtacccagcaccgtgtcgccgtcatagatcgtgaccgtggcgcccgcctccgccgtgccgctcagggtcggcgtggcatcgttggtcagatcgccgctggccagcgggccggtgtgtccggccacgtcgtcggtcacctccggcgcactggcagacggcgcggtggtatcaatcgtcagctcaaacgccggggaacgctcgctgacgttcccggccttgtcggttacggtggtgctcaggctgtggctgccttcatccagtgcatcaggggtgtagctccagcgtccgtcctcaccagcaaccaccgtacccagtaccgtgtcgccgtcatagatcgtgaccgtggcccccgcctcggcggtaccgctcagggccggcgtggcgtcgttggtcagatcgccgctggtcagcgggccggtgtgtccggccacatcgtcggtcacctccggcgcactggcagacggcgcggtggtatcaatcgttag

SEQ ID NO: 204595 - DNA, 870 bp, Klebsiella oxytoca
atgaaaggtattgttcttgctggtggttcaggtactcgtctttacccaattactaaaggcacttctaaacagttgctgcctatatatgacaagccaatggtctattatccgatatcagttttaatgcttgcaggtataagggatatattaattatttcgacgcctgatgatatgcctggttttaaacggcttttaggtaacggtagtcaattcggtgttaatttcacttatgctattcaacctagtccagatggtttagcacaagcatttctaataggcgaagactttattaacggtgatagctgcgctttagttcttggtgataatatttatttcggtgagagttttggtcgtaaattggaaactgttgcacaacgtaatgaaggtgctacagtattcggatatcaggtaatggaccctgaacgctttggtgtagtagagtttgataacaaaaataaagctatatcacttgaagaaaaaccgaaagctccaaaatcaaactgggctgtaactggtttatatttttacgatagaaatgttgttgacctagctaaaaaggttaaaccctcacatagaggagaacttgagattacgacgctcaatgagatgtacctagagcaggggaatcttaatgttgaaaagcttgggcgtggttttgcttggcttgatacaggcacccatgaaagcctattagaggcatcgcaatttatccatacaattgaacaacgccaaggctttaaagtggcctgtcttgaagaaatagcttatcggaagggatggcttgcggctgatgaagttttagctcaagcgaaggtgttggctaaaactcaatatggcgaatatcttagaaacattgtcgaggaaaaataa

SEQ ID NO: 204596 - DNA, 1176 bp, Klebsiella oxytoca
atgcaggatggagttcctatttttttacctaatggtgaatatattataactaattccattaatgttggaatcacctctgggcttgttggggctggcgcaaaaaatgttgtaattgacaatagaggtaatgaccatgcttttattttccctatcggctatgatagaggaacaaaagatttttttggatttagcttaaaaagctcaacaggatcagctaaagataaatacgcattttattttagctctgcaccttctggtaaacttgaatactctgttgggtggagattcattggtattgaactggaaggtaaggggatggggggagggtggtatctccaggattgttttagagttactattagagattgtggtgcctccgctttatcaaatggattctatttggctggtagtgtcgtccaactgacagtagataactttgttaataatggtgataaccatcctgagactacacttggtagttatggggtctatatggggacaaaaaaatataatgatggaaatggtataaaaatgcctgagggtattaattttataaattgtaaatttgttcggcaagatattggtgttcgtgcgcttggtctatatgttcagttcgtcaatactgaatttgactattgttcaaaaattggtgggctatatgctggcggagataaagttgatttcataaattgctatgttgcttcaactgcatcacggcataatgatttttatgcatttattatccaagctcatgcacctcatacgcctgaacctatacttgtttcaaattgcacgattaatatgcaaaagaacaaggttagcggttataagtcttatggagtattactttctggaggagcttcttttctttcaggtgccagggttgataactgttttttcagaggggatgggtatgaaaattgtatttttgctaatagagtggatggggttataataaataataacaccttcagggttaaaggtgaaaatattaaaattgaatcggcaaaaaatcttacgatctgtaataattatgctttgggaaattattctttacctaaacctggccctgcatattgttggattattacaggcaatagtggctccttttctgaagtcgatctgtctcaggcaaatagttctttaattataaatcaaggtctatttaaatcatga

SEQ ID NO: 204597 - DNA, 282 bp, Klebsiella oxytoca
atgttcaaattaagagcaagtggtatttatgaaatagaacagcttaaacgagtgatacttgaacaaaatggtcagttaaccattatacaaaatggtgatgaaaatatacgttatccaatcatagtggatggtttggcctaccatgatctgctcgaaatccttaacaagaatagtgactggttagaaaacgaagttataaagcaaggcttcaataaaatcagtgaagtgtatttaggtgagtatttatcaggtagaatcaatttatacggatatgaaaaataa

SEQ ID NO: 204598 - DNA, 831 bp, Klebsiella oxytoca
atgctcgattttatttctgatctacaaaaatatgatgcggtaatccaagttgggggctccttctttgtcgatttatatggtactgcacagtttgaacatgttctatgtacattaattgcaaaaaaagatatatatttaattggtcacagtgttggtccttttgagaatgcgttttttaaagaagttgcggcttatgcgttctcaaacgtgaataatttaatattgcgagaagatgttagtcttgagttaatgaagtcggctggtatacccactgataaggttataatgggtgttgataccgcctttttagtgaatgatatgaagtttcaagataagcattacgtgctagaccactggctagatattataggacgtaaacctacgatcgcaatcactgttagacgtttggctccttttgataaacgccttggagtttctcaggaatcttatgaaattgcgatcgcttcgatggttgatcattatattaataaaggttatcaggtcgtagctttttcaacttgtaccggtattgaaagttataataacgatgatcgaatgattgcttattcagtacgtaacagattgaaaggctcagttgctgattttcacatcgtaatggacgagattaatgaccttcaacttggttatcttttaagggcatgtaaattaactgtaggaaccagattgcattcagcgattatatctattaattttggaacgcctgctgttgctataaactatgagcataagtccttaggtgttatgagaggacttggaatggaacctgtctcttatacacatctgacgctgccgacgatctactctgtgtag

SEQ ID NO: 204599 - DNA, 339 bp, Klebsiella oxytoca
atggttattttcactctgctggcgctggtggccgtgctcgttctgttactactgcgcaaatatacccagctggagttcgttggctatgcccggctgctgctgaaaacctggtcggtaaggttcggcgcagttggtgcgctggttggtgtatgggctcaatcattcccggacgctgcccttcatgcctgggcgatgctgccgccggatatcaaagatattctgcctgccaacattgtggcgatgattagcccggcgctagtggtgctcgctatcctctctcaatacgtcaggcagccaaagctgaaagaaaaagccgatgggcagcaggaggcgcaatga

SEQ ID NO: 204600 - DNA, 426 bp, Klebsiella oxytoca
gtgcggcataatctcccggaggcgatgctgcgcatctgtcccggctacgggctggcagacggcggtgaacctgtagcccgggcaggcgcctggcgccgcccccgggagcaaagtgcagtgcggcataatctcccggaggcgatgctgcgcatctgtcccggctacgggctggcagacggcggtgaacctgtagcccgggcaggcgcctggcgccgcccccgggagcaaagtgcagtgcggcataatctcccggaggcgatgctgcgcatctgtcccggctacgggctggcagacggcggtgaacctgtagcccgggcaggcgcctggcgccgcccccgggagcaaagtgcagtgcggcataattacccggaggcgatgctgcgcatctgtcccggctacggctggcagatggcggtgaacctgtag

SEQ ID NO: 204601 - DNA, 1155 bp, Klebsiella oxytoca
atggcgctgaacacagacacaatcgacaatgcaaaaagcctgctgaatgcgggcgctcaggacttcaaaaaataccaggatgagttgtcgcgcatcccggcgtttaatgtcctgattggcagtaaggcgttgaccgtgctggatgagaaagtgatttctctggagctgacggataaccggggatttaacgccgacgagctgacgatcaccgttgatgacagccagggtgatattgagctgccacctcgtggcgccgagctgtcgttatcgctcggctggcagggggagccactaatctacaaggggatttatattgtcgatgaggtagcgcattcagggccgccagaccgcatcgagataaccgcccgcagcgctgattttcgcgatgaattcaatatcaaacgcgaggtgtcgtggcatgacgtgacggtagagcgcatcgtgtcggctatcgctcaccgttacaaactgaagccggttatttccgagcaactgatgaacgccgaaatagatcatgccgaccagacccaggagagcgatatgtcattcctgacgcgtatggcggatattctcggcgccattgccacggtgaaaaacggttgcctgttgttcattctgccgggaggtggtgtcagtgcgaacggcaaagcgttgccggaattcgccattacgcgcggtagtgcagaccgtcattcgttccgcatcgcagaccgcgacgcttacaccggtgtgcaggcttactggctggatctgaacttcggcaaaaagaaaaaagttacggtgaagaagcgtaagaaaatcacggagaagaagctacggagcagcagccgggaaggggattatatcgccggagaggatggtaatgtttttgtactccgcacaacatacagtagcgaaatggtggcgcagcgtgcggccgctgcaaagtggcagcagctccagcgcggtgctgctgaattttcgttaaccctggcttatgggcgcgcagatctttacccggagatgcacggaacagtaacgggctttaaggatgcgatcgataatcaggactggataatcgcgaaagcagggcatacggttgacgatagcggattcaaaacccgactggagcttgaggcgaaaatacctgaatggattgcagaaagtgaaggttag

SEQ ID NO: 204602 - DNA, 516 bp, Klebsiella oxytoca
atggctattcctaaaaaactgcggctgtttaccctctttgttgacggggaaaactatatcgggaaagtacctagcgtcacgctcccgaaactcacccgaaaaacggaagactatcagggcggtggcatgcttggcgcggcgggtgtcgatctcggcctggaagctggggcgctggatgcatcaatgattgtcggcggtgtagtcgaagcgctgatcctgaaatggggcggcgatattgacgaattgcgcctgcgctttgtgggtgagatttatagcggcggtaccagctcgctgctggaagtcgaaatgcgcggccgcatcactgaaattgatcagggtgaagcaaaacagggggatgacacaaaccacacctatgcgatcaaaaacacctattacaaagagtcagtagacgataagcccctgctggaaatcgacctgctgaacttcatctacaaacgcaacggtaagagcctctatccggatcgcattgcctccgcgctgggcctcggccagtaa

SEQ ID NO: 204603 - DNA, 300 bp, Klebsiella oxytoca
atgtctgttactttaagcaaaccgatcaaacgcggtgatcaggaaatcgacaccatcgttatcaccgacactattaagcaggctggctcgttgcgcggcctgaaactggttgatgtgctcaacttcgactatgacgccgtttccacgctgctgacgcgcacaaccagcccgcaactgacagctgtcgagattgccacgatggcgaccggagactttactgtgctgtgtgaagagatcacgccttttttgacgaaagcggagccgtccgcagccaccgaagcggcgacggcgagcaagtaa

SEQ ID NO: 204604 - DNA, 2736 bp, Klebsiella oxytoca
atggatcttagtattcgcgttgcgttcagcgccattgataaactcacccgtccggtcaacgccgccagtaaagctattggcggcctttctgactccctcaaggaaacgcaatcgtcgatcaaggatctggagaaaagcgcagcggcattcgacaagctacgctcgcaggccaatgaaacggcgcagaaactaaaaactacccaacgggcctttgacggcctcaaccagaaacagcgcgaaggcggccagcttaccgaagcccaggcggctcgtcttgaatcgctgcgcggtaagctctcgcggctgacggatacctataacaaacaaaccacacagctgcgcacggcggcgcaggcggtgcgccagcacggcgttaacctctcatccggcagcggtgcaattcagagcgcaatccggcgcacagagcaatataaccagacactggagcgcgaacgccgccagctggcggccacgacacgcgcccaggcaagctatgagcgcgccaaagaaaccgcagggaaactccgtggcgcaggcatggggatgacacttggcgcagcggctacaggttatgcggcggggtcgttcctggcacctgcggtaggttttgatgaggaaatgtcgcgcgtacaggcgttaacccgcctcaacaaaaactcatcccaactcgccgacctgcgcgcgcaggcaaaaaagctcggcgccgaaacggcctttactacccgtgacaccgcgagcggtcaggcattcctcgcaatggctggcttcacccctgaagctattcaggcggccttgcccggtgtgcttaacatggcgctggccggtggaatggatcttggcgaaagtgccgatatcagctctaacatcctgtcgcaattccgcctcgatccaaaagaaatggatcgcgtcagtgacgtgctgaccgctgcgtttacccgcaccaacaccgatttaaccaatatcggcgaagcgatgaaatacgcgggtaccggcatggctggtctgggtgttgatgttgaacgcaccaccgccatgatcggcgtaatggcgaacgtggggctgcgaggcagtatcgcagggacaggcctgcaaacgacgttctcccgactcgcagcacccaccaccaaagcacaggccgcgctgaaacaacttggtgttaccgtggctgacgctaccggcaaaatgcgaccggcagaagctatcctctcggatatctataaatccgtctcgaagtacggcgccaccgatcagctgtccttcttcaaagatatcgccggggaggaagcggctaaatcattccaggcactggtgagatctgcgggtagcggtgagctgcaaaagctgcttacagatttacgcggatcacagggtgaggcgcagaaagcggcaaaagtgatggccgacaacctcagcggcgatctgaaaaacctggatagtgcatgggaaggcttccgcatccaggtggaagaaaccaccgacgggccattacgtaaactgactcaggggttaagtgacttaatcacgtcagccagtgaatgggtgaaagaaaacccgcggctgacgcagacgctgatccttgttggcggggcgctgactgtctttgccggggcggtgggtattgccagcattggcgccagcttcatccttggcccactggcaaaactccgcctgatgctcagtatgatcggcatctcatcaatcaccgcgaccggcggcatctcgacgctcggcatggcgttctcgggcttaagggtcatccttgcttctctgctggggatccccggcctgattctggcggcgttcattaccgccggtctgctcatctggcgatactgggagccgattaaggcgtttttctccgggctgtttaccggcatcagccaggggctttccccgctgattcagtcgttttctttcctggtaccgctgtttgacgccatcagcgccggagtggcgaaagtctggggctggttcagccagctatttacaccgattgatttttcccgcgatgcgctggataagtgcgccagtgccgggaaaacatttggcgaggtgctgggtaccgccctgaatctgcttttcccccctctccgcttgctgaccgaaggagtcagcttgttgcttgaaaagctggggctaatcccttccggaattgacgcggcacgggctaaggccaacaacctcgaacccaaaaaaccgacgtcgtgggagtgggatctgaagcaaaagaaaatggttcaaaaggcgtgggactggtcacctaaaaaatcagattcccccgttaccgcaggcgcgccgcccgcgccttcgccgctgtccggcaacaccggcacgttacgccgcctgaatagcattgcggataacacgaaggcaaccgccgacaacacgaaagaagcgcgcaaaaagattggccctggtgacattattttcaaaaacctgcctcgtgcgctggcattgcgcggagcctatcaagaggcgcggatctcaccgcaggcagtaccacgcgttgcagctccggcggcaggcggcattctctcggtgccaacggcgacgcaaggcccgctgtcagcgcccgtttccgccccgacaagtggtgcgccagtgtttaacctggtctttaacgaagtcggccagcactcggcgcgggatctggaaagaatggtcaggaatgccgttcgcgatgcaatggccagcaccaacagaagtaaccgtggctcgttccgcgacagagattag

SEQ ID NO: 204605 - DNA, 489 bp, Klebsiella oxytoca
atgatgatggttttcgggatgtttgtttttacgctgcgcacggctccttatcagcagctccagcacgcgcaagaatggcggcatgttaaaaacgaccgggttaatcagtcggccaggtggcagtacatcgggccgggcgaggataatattaccctgtccggggtactctatccggaaattactggcggcaatctgtcgctatctgcgcttgagacgatcggattttctggccgcccctggccgctcattgagggtgatggccggatttacggaatgtacgtcatgacgcagctggagcgaggtaaaaccgagttcgatcagtttggtggcgcaaagaaaattgaatttacgttaagcctcagccgggcagatgcagattttcgcgagaagctgcaatcatcctccatcagcgatgccctggcagaccttcagaccagtgccaccaaagctattaacgcaacaaccaagtcacttaatcggctgctttaa

SEQ ID NO: 204606 - DNA, 1266 bp, Klebsiella oxytoca
atgaaagataagtttggtgggttttatgggcctacagagcaggaaattgatgaagcgtacaaagatgctggcacacttttcgtttttgatacaaacatacttttatcactgtatcgctgtgaagaatctacacgaagacagttcctcgaagtctgggggaatctcaaggaacaagtatggatcccattccatgtatgcctggagtaccaacgcaatagacttgcggtagtacagaacgctcggacttccttaaaagatattaacaagagcctcagtacaaaacttgataaaatgttcactgagctcaattcagatacattatctcgctattcaaatttgcgaagcgaacttgaaactttaaaaacacggttaaaaaacacgctttctgattttaatgaatctaatttggaggcacgcaggtcaagcatcgattttgttaattcacatgatgaccttcgagatagaattgatgagttaacagaggggcgcataggtagtgagcctaatcaagatgccataaataaaataaatatcgctggagcgattagatataaataccgcacaggccctggttttgctgacgcccctaaaaagggcaatgatagattttcttttaatggcattaattatgatgcacagtatagtgatttatatatatggatgcaaatcattgatgaagcaaaagaaaaagaaataaaaaaaataatatacatcaccaatgatgaaaaggaagatttttattatcaaataaacaaccagaatagaggcccaatagagtcgctagttactgaaatgaaacgagaagctaatgttgatatttttctaatgcaccaaatagattcgttcctgcatcatgcagtaaaatcccttgatgcgaagattgatgaaccgtcaataatcgagctagctgcttcagccgcagtagcggcaactccaataatatcaaatgcaataggtggagctattctgggtgccactgccaatacattttattcggcgatgttatctaagataaaaacctccaaaaacagtcatatagacattgatgatttaatttcagaacatgaaaatattcaaaataaaattctattaactaaaaatgaaataaataatcttgatctacaacttgacgatgattcgataagcttggaagaaaaacagagcatttgccgggttagaaataagctacaatcggaggcaacatttctcgatgcaagacttgatgttatcaaagattatattaagagaaatttagatgacctttaa

SEQ ID NO: 204607 - DNA, 1077 bp, Klebsiella oxytoca
atggcaaaatacagtgcagtagtgaccgccgccggacgggaaaaaatggccgctgccgccattaccggccagccggtgggatttgcctttatgggcgtgggagacgggggcggcatggtgccatcgcctgacccggcacaggtcagcctggtgaatgagcgctatcgcgccgcactgaacagagtggttatcgctgaccagtcagccaacattattcgcgcggagatgattatgccgccgcaggttggcggattctggctgcgggaggctggattgtttgatgaggatggggtgtgcctggcggtggcaagtctggccccgtcttataagccccttctggccgaaggttcaggacggttgcaggcgctaaatatctggattgccgtcagcagcaccgcagatatcgagctaaaagccgatccgtcagtcatccttgcaacggttgacgaggtgaataaagccaagagtgaggcgaaagattacaccgatcaggtagtcggcgatctcgataccagtattcagcaggtaatcaatgacgccatcactgcggcgcgtcgggacttctgggaagaggaaaacccgccgggaacggtgcgtttctttgctcaaaatatcgatccgaacgagaaatggccgtggtcacaatggacttacactggcgagaataaaacaatccgcgtcggcaaggccgatggctcaaatgtgggcgtcaccggtggtagcgacaccgtcaccattcagaaggacaatctacccgccgtacagattaatgttagcggggaaaccagtgaactagccgcgcgtgagctcacagcaagaggggcggggaggcacagacaccgggcgggaatggttgcccccggtgatgtatgggatggggattatgttgtcggttctgataacgacagccaccgtacccgtaattacactgattgggcggaagaccatacccatattgttgacgaaccagcgcacaggcatacaacgaccggcaaaaccgacaacctcggtaatggccaggcaattaacgtcgttgaggcgcacaccttgctgatgtgctgggcgcgggttgcatag

SEQ ID NO: 204608 - DNA, 603 bp, Klebsiella oxytoca
atgaataacacgcttcttcctccctctgccagcgcgtggatgcgttgcgccgaagctgccacggcgaagctgtccggaatcacggtagccattcgcacgctgtggacgccgacggcatgcccggttgatttactgccgtatctggcgtgggcgctgtcggttgatcggtgggataagaactggccggcagataaaaaaatagcgtcaatccagcaatcctactggcttcatcgccggaaaggtacgcgcgcagctgtgcggcgagtgatcgaagacatgggattttccgcgacgtttgcggaatggttcgatgtcggcgacgagccgggcacattccggcttgagattgatgtaaatgaagttggccttacaccaaaaacactggatgaactgaatcgcctggtaggagatgccaagccagttagtcggcatatgtcaacgatgacaattacaacccataccagggggaatgcatgggtaggcgcagcgaattttgatggcgaggtgatttcggtatacccgccgggctacaccccggacgacagtatttattttgacagcgaagcgcattacgacggcaacttttatttcagcggaaaataa

SEQ ID NO: 204609 - DNA, 900 bp, Klebsiella oxytoca
atgccgacaattgacctctcgcagctgccgcagccgaccattatcgaggaactggattttgaagaaattctgatcgaggtgaaagcggtgatggtagccgcttatccggcagatcagcaggccgccgttattgccgccctggcgctggagtctgaaccattaaatgtactcgcccaggcactggcatatcgcgagatgttactgcgccagcgtattaacgaaggggcggccgcctgcatgctgagtcattcgaccggtgacgatctggataatatcgcggcgaacctcgataccgaacgcctgatcaagaccgaagcaaccgagacaactgatgccgaaatggaaagtgacgaggcgctacgcctgcgggcgcaggctgcttttgagggaatgagtgtcgccgggccatcggcggcctatgaatactttgcccgcagcgccagcggaaaagttgccgacgccagggcttccagcccggcaccggcagaagtgattattgcggtgctgtccacggagggcgacggtaccgcgtcgccagaactgctcgccgctgttgccgaagcggtaaacgatgaagaggttcgtccattgggtgatcgcgtgacggtgcgcagcgctgagattgtcgattacgagattgacgccacgctgtacctgtatccggggccggagtcagagccgatcatcaatgcggctgatgcatcgttgcaaaagttcctgaaacagaacgataaaaaaatcagcagagacgtggcgcgctccgccatttcagcggcgctccatgtccagggcgtacagcgcgtcgtgctgaatgccccgccggacgatatcaggatcagcgatatccaggcggccaggaatatcggctacaacctggaaaacggcggaacggatgaataa

SEQ ID NO: 204610 - DNA, 369 bp, Klebsiella oxytoca
atgagtgagcgctatcgcggtatgaatgcgaacggcaccgggacgctgacggatgaagatcatgtgtggcagtccgtgggcgatattctgctgacgccagttaatacgcgcattatgcgccgcaattacggctcgctttgcccggatttgatcgacagcccgcagaacgacgtcacgcgcctgcaactgatgagcgccgccgttatcgcgctggctgcatgggagccgcggatcgcgcttgacgctatcaatattcactattctgcttcaggcgcagtaacggcggagctatccggaatgctgactgaaagcatggaaaagagcaccagatcggtaacgttaaggagcgccaaaaatgccgacaattga

SEQ ID NO: 204611 - DNA, 585 bp, Klebsiella oxytoca
atggatattgccgaactgatccgcctgctggagaacatcggccgcaccggcacggtgacggagatcgacgaggaaaaatggcgcgttcgggtacagagcggcgggctggaaacgacctggttgcgctggaacgcgcagcgggccggggcatttaaggtctggatcccgccgtccattggcgagcaggtctggctcttgtgtctcggcgggaacacggatacggccattattggcggcagtctgtacagcaacgacaaccccgcaccgggtacgacgcgtaacgaaatggtagtcacggctcctgatggtgcgcgttttcgttatgacgccgaggcgggcgccttacaggtgacgggtattaaatcggcagcgatcgaggcgtcggtgatcgtcactctggatacgccggaggtgaactgcaccaacctgttgcgcgcgaaaaatcttgatatcaccgaaggcggggaaatgcgcggtgattttaatcataccggcggggcgtttatatctaacggcgtgcaggtggataaccacaatcacggcaaagttgaacgcggtggcgactggacggagggcacccgatga

SEQ ID NO: 204612 - DNA, 459 bp, Klebsiella oxytoca
gtgaaaaaagccgaattgttacgcgaggcgctgatcgccgcaaacacctggtgtaaggccaaccctgaactgatcaccgtctgggtggagaaggggagcattgaaacgcaggcgaccggcgaaccctcgtttatgtatcgctacaccatacaggtgctggccgtggactttccggggcaggtggatgatctcatgctgccgatcatggcgtgggtatggcattaccagcctgatttgctgctcaacccggacaataaccgcaaagttgagtttgacgcggacattatcagcgatgacatggccgatgtgctgtttaaggtgccggtctgggagcgcgtcatggtggaactcgtcaacgggaaacccgttgctacacatctggcggaagaccgcccgcgcattaacggcggtgagtgggaagtggtctttgatccgggctttgagggagcgatgacatga

SEQ ID NO: 204613 - DNA, 396 bp, Klebsiella oxytoca
gtgaaagggttgcttgccgttatcacggtgatctgtgtcctcctggcggtggcctgcatccggttaaccatagaaaccaacaagcgagagggcgcagaaaaagcgctggcagacgctacccaaaaactgaaccagaccagcgatgtactggccgaagtgcgggcgctgcgccaggacgtcagcgagattgaagccagtatgaaagcgctggtgcaaaagcgtaacgaagccggggagaaacgtcgtgaaaatatcaaaactgaactggccggcgatccctgtgctgctgctcttgtgcctgacgctgtcgctgaccgcctgtaccagcgcgcagccgaagtcgccgccggtgatcattcaggagcctttgccagaaagcctgacggcaaaaactga

SEQ ID NO: 204614 - DNA, 552 bp, Klebsiella oxytoca
atgaaaaagggcgttattgcctgctcggtcgccgcgattatctcgctggccgccatgctctggccgcagtcactgcgtaccagcccggaagcgcaactgaagatggcgaaatatgaggattgtcgcaagaccccgtattactgcccggcaggcgtactaaccgtggggatcggctcgaccgggaaagtgcagaaccgggagtatgccgagcaggagatcgcagagcgctgggtgaatgatctgatgcgcgtagagcgttgcattaaccgcgagtttaacggcgcagctgcaccgcagcgcgttttcgaagcgctggtcgatggcgcatttaatgtcggttgtagcgggcttgcctggtacaccaacaggcaggggaagaaggtcagaacgacaatctggcgtaacgcgcaatcggctgactggcgcggcgtctgtgagcgggtaacggattttgttaactcaggcggcaggcgattgcagggactggttaaccgccgggaagagttccgggagtggtgcttgtcagatcctgtgtttaagggggcgaagtga

SEQ ID NO: 204615 - DNA, 282 bp, Klebsiella oxytoca
atggagttaataaaccgcgcctggaattgggccgcatacctctggtcggtgttcctcggcagcgtcggaatgatgacgcaaaaggactggctgacggctattgcggcagtaacaggggtagtggtggcggtgttaggtgaaatgcatcgccgccggatggcccgtatccatgaaaccaataacgtgctgttgaacgatttgatcgacgccattcgcgacgacacggaaaaccggcaggacgtgaaagagctgatccgcactatcagggaggcgccacgatga

SEQ ID NO: 204616 - DNA, 201 bp, Klebsiella oxytoca
atgaaagtgaaggccttacagggcgatacggtggatttgctttgccagcgttattacggcaccacccagggtgtcaccgagattgtgcttgctgcgaacaagtcactggccgatcagatcttcatggaggccgggcaggtggtggaactgccggaggtaagcgcctcggcgacaaaggagacggtgcaactatggagttaa

SEQ ID NO: 204617 - DNA, 498 bp, Klebsiella oxytoca
atgagccttgtagccccccgcacaataaccccctcagcagaggatgtgccggatgtggacgacggcggcgagaaagtcgccgccggtgcgttctggcccgaaatcgtgttgagcgatgcccgtaaagagatgcgcatcactggcgcggtgacaacttcgcggctgaagcatgttgttatcgaggcggtgggccatgccgctgaccagctcgatacctggcggattgaacagcagaacgccgggtttgcatcactagataccgtgccagcaatgggaattaacgggcagagcgcaaaggtttaccgctggcgccgcgcggtttacagcatagcccgcgccctgctgatagaaacgttccgtgatgtggacacgaccggcgacgccggggagaagaaagccgctgcgctggcaagccaggcaaacgatcactggcgtgatgcgcgctgggctatctccgatattcgcggcgaagttcgcaattctgcggaggcattctga

SEQ ID NO: 204618 - DNA, 861 bp, Klebsiella oxytoca
atgctgacaccggcacaacgacattttcaacgcgtcatggctgaacgtcatggcaaggctgaggatttgtccgatacggcgcgtactgcgcatgagcagatcctgcaccgcatgcgcatggatatggccgcgcttaaaaaaattcagggcgagcaggcgaaagccgcgcttaagcgccagatgctacccaattacgaggggtggattgagggaacgctcgaaggtaatagcggccgccaggatgaagtgatcacgcgcctgatgatttgggcgatagatgttcgtgattatccactggcggcgcgaatcgggcgttacgttatcgcgcataacctggcgatgccagaccgatttaaccgcacggcggcgacagctctggtcgatgaaatttgtgatccgatcctggttcaggttaaggccgacgacagcaccgacgtatcgccatatctggcggtgctcgatgaagtagccgagtttaccgcagccagcgatatgccagacatggtgcgcgccaaactccacaaagcacgcgcttttgcactgcgcaacggcacgcctgccgagcaggaaaccgcactagggctgctgcgtactgcactgatcatggatcctggagcaggcgtgaaaaagctgatcgacaaactcgccagccagctgaagaaaaccgctgctgcgactatttccgagggcgagtctactggcgacgatggcgaagaggggcagagtgatagccctgcagcaccaccggttccggcggtgtcggccggaaagcctgcgcctaaagccgcccgtaaaagcacagccaaaaaaccagcggcgcgcaaaaccacaacgaaaaaagcgcctgccgccaaaaaataa

SEQ ID NO: 204619 - DNA, 834 bp, Klebsiella oxytoca
atggcaggcacagcaaaaccacgtaagaaattccgcgttgccgtctccggaaataccgttgatggccgcgaaattcaaccgcagcaccttcgcgatgcggcagcgaattacaacccggaggtgtacggcgcacgcgtcaatattgagcactatctctctatgttcccgaacagcgattttggcgcgatgggggatgtggtggcactcagcaccgaagacattaccgacggcccgttagcagggcgaaccgccctttatgccgagatcgagccatcagatcgcatggtgcagatgaccgataaaggccagaaagtctattcaagcattgagctgcaccctcagtttgccctcaacggaaaagcctatgtggtggggctggcgatgaccgataccccggcgagcctgggtaccgatcgcctgaagtttgccgcgcagcaacgtgcatcggtgatggccttcaacaaccagcagggcgaagcgccaatgtttaccgaagccctggaagcagaggtgatcgagctggccgcccagcgcagtgaggaaggggtcagctggtttaacaagatgatgggaatcatcggcaaaggccagaaaaccgacgatcagcgcttcagtcagatgcaccaggtcgttgaagccgtggcgctctcgcagtcagagcagattgatcgtcttaacaccgccgagcaggagcgcaagcaggacaaagtcgccattgagaaactcaccagtgagctggccgaactgcggcaaaagttgagcaccaccgatgccagctttagccagcgaccaccggcgggcggcggcgcgaacgcgcagctggctgattactga

SEQ ID NO: 204620 - DNA, 756 bp, Klebsiella oxytoca
atggctaattcgatattacaagcaaaacttggttcggtgttgaaaatgctcaatgctaactacgaacaaggggtaaactcctcatcagcagtaaaggggatggcccgtagtgactttataaataattatttaaaaaacgtaataccccaaggtctaaggattagtacgtcaggtgagattatcgacaatcagaacaataataccggtgagcttgatataataattgaaaatggttatttccctaacattccagttcctagtactgattccaccagactttacttcgctgaaggtgttgcagccgttattgaagttaaatcaagcctgaaaggccaatggaatgaagccatttccaccggtagaaagctccataccattactcgaagctttattaacacaactatatcaagccatgatggcccgacgatacatattaataacaatataaaagccactcatcaccttggaatatataaaatgcctccccaatataatctaataaagaaaattcctttttttgtagttggttacactgggtgggagaaattagacacattagaatcgaaactcaaagaaagtgatggcattgtttccggcatacttcaactcgataaaggattctttattggtaatgagagttttaaaaacataaaaataaatgggtcattaagcttattagcattcataaatgccgtatatgaatcatatagttatatcaaaagcacaaacatcaaccttcgatcctatatggaataa

SEQ ID NO: 204621 - DNA, 2598 bp, Klebsiella oxytoca
atgagtgacgcctcttcaatagcatgggcgtggaacgctaaacggcaggccatcaacccgaaccacgccgtagattctgaaattgaatatctcaccccaaaaggcgagcggaagacgctcgcctatggtgatctcgttgatgcagtttaccgttaccccatgcgcccgcgcgaaggggaggcgcgagaagcatttgaccgtaaaggccgcgccagctatctccgccgccgggtgcaaacgctcccggcatttattcgtaagcgcttcgcgcagcatcttgaaaacctcgaacgtaacaagccaaaagatgcggtgcgttggttgtttggtaccttcgagcgtcatgttttacgccgtgttgatgcggtgaacgcacaatacctgccacaaactaaactgcccgcgatccttttcccgctgcgcgatgaattccatctgctgccgtgggccgacaaaaagcgcctgaaacgactggcttataagctcgccaatctgatgaaaagcgagtttatgcgcgagtttgattttcggtatgagaaaacctccgatgtggagttttccacgatctatgcttacggcgctattgctagtaaggctacctcactcaacattgcgatccctggctgggataaatattgcgatgaaacgcttgaggccgaagatgcactgcgcgccattgcacggcttcagaaagaaaaatggtggctgagtaaaatccgccgtatccacgaccgctggcgtgaacacctcatgatcgcaacgggttatgtcagcaaggtggcatcgccttattgctccgatccctgcttcagggagtgggtagcccagaagaaagcaaaccttgaatttcttaatgcgatggagctggaagaccaggacactggcgagcgtagttctttgctggataaggtcatgggtagcgtatccaacccgaagatcgcgcgccatgagctgatggtacgcatgcgcgggtttgaagatatggctaacgaaatgggcctggtcggcatgttctacaccttgactgcgccgtcgcgttatcactccacgcatgtgcagtctggcaagcgaaacgataaataccgcgacgccagcccgcgtaaaactcagaaatacctctgcaaagtatggtcgcgcgtccgtgcaaaatgggggcgcgaaggcattcgcacctttggttttcgtgttgctgaaccgcatcatgatggaaccccacactggcacctgctgttattcctgcgaccggaagaggctgagtacgccacggctattttccgcaaacatgcactgcgtgaagacggtggcgagccaggcgctcaagagcaccgttttaccgtcacgccgattgatgaaaaatttggctcagcgacgggatacatcgcgaaatacatctcaaagaatatcgacggttacggcatggatggcgagttagacgacgagtccggccagccagttaaagagatggcaaagcgcgttcgggcgtgggcttctcgttggagcattcgccagtttcagcagattggtggcgctcccgttactacctggcgcgagctgcgccggttgggtagccgtgagctggtattgcatccggaacttgaagcggcccgcgcggcagctgatgcgccggactggccgggatacaccaacgcccagggcggcccatttgttccgcgagattgcctgcgcgttcgcctcaactacgaatacatcgaggatggcaatgattatggtgacacggtcgccataatcactggtatctattgcccgtattcgggcggtgattctgtcattttcacccgcaccaccgattacaaaattgtgccgaagcgtaagccgtcgccggtcgagaatttgaccttagaaggccgcgcagcggcccctcggagttctgtcaataactgtacggggcgcgccggatcggacgaaaaaccaccgtcagaaacggcggtgccagctgataaaactgcgccagacgacagttcagtgacagaacttccgctgaatatcgaagacttaaggcgatattcacgccagcaaaggcaggagatcacctccaggctgaaaaaaaccggtagcgaaagctcagatcaagccttcacgcgtaccgcgcgcggcctgcgcacatggattgatgacgaaagcgcgctgacatgggggccaaaagttaccgccgcgaaagacatgagcctgacgccagaagaggccgagcagcgctggcgcgagcagctgcggatcgaggcggaacggtgtgcggataactacgcggcggcggttacggagtatcagaagaaaaaagccgaggccgcattgcgccaggcgcagaaaaaagaagcgatgcaaaaacacggcatctccgaagagatgatcgccagcatcggcgcgcagctccgcgactgccggattttcgtcagtgatgaagttgtgcgatcggtcgcaggcggcgcacgcgttcgccacggtagcagcctgctcgcggcggacaatgggcggttgcgcgaagtgaaggtatggcgggcaggcgaaaaagacaaaccaacaaccgaatatatggttacatgtgatttgattaggcgtttgcaaaaagccactaaacaatag

SEQ ID NO: 204622 - DNA, 237 bp, Klebsiella oxytoca
atggcaagtttactggattttttagaggcagtcggcacggagaacattgcctgccagctcattcatcagtgcgtgaccgccgcccagattaaaaggggagggggtacggaagttaagtttatcacttgtgagattacccccactgacctgacaggaaagatgcgccgtaccggattcattgtctggatggatgcggacaaatttgatgcagcactgatggatctggaggggaaatga

SEQ ID NO: 204623 - DNA, 954 bp, Klebsiella oxytoca
atgattaagtcacctctgaaatgggtgggcggtaaaaatcgcctcatgccgcagctgctgaagcacctgccgaaagctgattgcctgattgagccgtttgtaggcagcggcaccgtgtttatgaacacggaataccgtcactatgtgctttgcgatagcaatctgaatctgatcaactttttccgtcaattaaccggccgaccagaagacacaatttctgcatgtcgctgggtatttagcggcgggaataatgccgaggaattttataagcggcgagctgaatttaattcactgactcaaaaagcggacttagatccggatgctgcgatgcttcatgctgcgtattttttgtacctgaaccgccatacgtacaacgggctataccgcgaaaatctgaagggagaatttaactcaccctatggcaaatatgccgcgccttatttcccagaaaacgaaatgcgtttgttcgccgaaaaggccaatgacacaaaagcgcttttccaccatggcgattttcgcgattccatcccgggaaccatgcggctggcgcatgacgtggttatttactgtgacccgccgtatataccggccagcaaaacagcaaatttcaccgcttacggtaagccgttcacgctggacgatcaccgcgccttggttgctactttgctggaggtaaatcgcaagcatggcacgcgatcggttatctcaaacagtgacaccccggaaacccgcgaaatctattcctctttcaagctccacgcattaagcgtccgccgttctgtcagcgccaaaacccgcgatatggctggcgaggttattggcgtgcttcgcgtatacggtcgctgtggtcgttctggtggcggcaattgcgcgtattgcaggccagtacagaggctttccacttatggcgaaatgaccgttgcgggcgtatttgacggcgcggaggaatcctga

SEQ ID NO: 204624 - DNA, 195 bp, Klebsiella oxytoca
atgaaccattcactggaatacatcaagggcgccattgcggcgcttaacgaaattaaggccatcgggttagctgctgccatgcgcgctggagttatccacggaaaagagaccggggatgccgtaagagcaacggtagataacgttgctgatccgctcattaataaatacaaagcgatggcggtgaaaaatgattaa

SEQ ID NO: 204625 - DNA, 567 bp, Klebsiella oxytoca
atgaatcatttaatggtcgatttgataaatatcagcaaaaaacagtcttcacctttgtgcgccattgaagccgtcttttttgagccgtcaacgggccagattggagaaaccttttactctccgatcgatgttcgggcagcaaaaggtttaaagggaaacatcagcatttccgctgcttttgagtggatgaaaaaagactctcactggcgcgccgaattgatgagcgccaccgaagttgaagaggatgtgctgtgtgacctcgcagcttttatcgtcaacaatcttgagcaccagttcgggccgttgtttgtttggtttaaagataccccggaaaagctggtttcactgcggtatgccgtcgagcgcaccgaggtttctggagtcttccccgaaggtacaaaattccgctgcattcgctcccttctcgatctcgctgctgctaccggctatgcgccccacgcgcgccgcgctctggtgcgttacaccatgactgatgcgcgatatcaggccgagcaggtttgcgagatctggcggcgcctgacctccccacactttgaatcgctgtga

SEQ ID NO: 204626 - DNA, 225 bp, Klebsiella oxytoca
atgtcgatcacgtcaataaagttggaaagcggaataagtgatccggattttatggaaataagcgccaacgctcggaggcgcgaacgcgcccaccttctgggcctgctgcgtatttttgtcggccagctgaaaaaggaaagcgccaccccggaagagattttttcatcagtcgagcggtggatcgtcaaccgcgaattaaccaataacgagggtaacaagcaatga

SEQ ID NO: 204627 - DNA, 498 bp, Klebsiella oxytoca
atggaaataaagaaacctacagagcaagagttgcaagattttctcatgcgaaaatatctcgaagaaaagctaaacgaagaatttacagaacatgccagtgccaaacaacgagtagtcgagaaacacaaacaaaatctgaaaaagattaatgctgaagcgttttttaaatttctagccgaaaaaggcgtttcaagaaagtgcgtcgcatgcggttctgaaaaattgtcagttccacagggcatggagattgcaactgaaaaaatgccggaaaatttcaatgaactttcatccgctgaacagggaatgttcattgatgccatgagtacaacttatgttcagtatgtatcctttgatggtattgataatcccataggtctcatgaaaagctactacacagtacattgtctaaattgcggaaacctgaccctctatagaaccaaggcggtactcgattggtttaatgccctgcaagagaagtctggaggggcagatgagtaa

SEQ ID NO: 204628 - DNA, 861 bp, Klebsiella oxytoca
atgccgattcggacagcgactcggatagcgacagcgacagcgactccgattccgacagtgactccgattccgacagtgactccgattccgacagcgattctgactccgacagtgactcggattcggacagcgattcggactctgacagcgactcggattctgacagtgattctgactctgacagcgatgccgattctgacagtgactcggattcggacagcgactccgattccgacagcgattccgactctgacagtgactcggattccgacagcgactcggattccgacagcgactcggattccgacagcgattcggattcggacagcgactcggattccgacagcgactcggactccgacagcgattccgactccgacagcgattcggattcggacagcgactcggattccgacagtgactcggattccgacagcgattcggattcggacagtgactcggattcagacagcgactcggattcagacagcgactctgactcggacagcgattcggattccgacagcgattccgactctgacagcgattccgattctgacagcgactccgattccgacagcgatgccgactctgacagtgactccgattccgacagcgattccgactctgacagcgactcggatgctgacagcgattctgattcggacagcgactccgattccgacagcgattcggactccgacagcgactcggattcagacagtgactcggattccgacagcgattcggattctgacagcgactcggattccgacagcgattctgactccgacagcgattcggattcggatagcgactcggatatcccgcaagccaacgcggataccaataccgctctga

SEQ ID NO: 204629 - DNA, 1002 bp, Klebsiella oxytoca
atgaagaaaatcacgatttacgacctggcggaactttccggcgtttcggcgagcgcggtgagcgctatcctcaacggcaactggaaaaagcgccgcatcagcgcaaagcttgccgaaaaggtgacgcggattgccgaggagcagggctacgcgattaaccgccaggccagcatgctgcgcagcaaaaaatcgcgcgtcatcggcatgattatccccaaatacgataaccgctatttcggttcggtcgccgaacgctttgaggagatggctcgcgaacggggtctgctgccgattatcacctgtacgcgccgaagccccgagctggagctcgaagcggtgaaagcgatgctctcctggcaggttgactgggtggtggcgaccggggcgaccaatccggataaaatttccgctctatgccagcaggcgggcgtgccaacggtcaatctcgatctaccggggactatcgcaccgtcggtgatttcggataactacggcggcgcgaaagcgctgacccataagatcctggcgaatagcgctcgccgccggggagagatggcgccgctgacgttcattggcgggcgcagcagcgaccataacaccagcgaacgtttacgcggcttccacgacgcgcatcgcgagcaggggctgagcgtgccgcaggcgaacattctggctcccggctattcgaaaggcaaagtcgaagcctgcctgcaggagcggtttggcaccgcgaaggttccgttgcagggaatatttgtcaactcaacgatatcgttggagggggtcgtacgttggctgtcgcaggcaggactcaccggcagcgagcagccgccgatgggctgcttcgactgggacccgtttgtctatctgctggggcacgatatcgacatggtgcagcaggacgtgccggcgatgctggaagcggtgtttacgattatcgactccggcgatgccggccagcagcggattgaaattccgccgctactgatgagcagcagctga

SEQ ID NO: 204630 - DNA, 1188 bp, Klebsiella oxytoca
atggctgatagtaatgaaaatttaaataataattgcccctcatgcggtagcaagcttgattctgataaagtatgtgcttgtggctatgacccaagcttggatgtgcaggaggaaagttatgtccctcagtttgcattgacagcaactctggataaagtgtcaggggactccggccctatttttaaagagtctttaggtgaagtttggacattagatacagaagacgttcagcttttcattaaacaaatcgagaaaaaatttaaacttaaaaggaaacttcatggtgtaatcgatgaaaataaaatgccattaagtgcacctatttctttcagtaaatatctaaatcaaaatatagattttaaatcatttgttcagtcaatgatggatagaatgagaggtgaagcgaataatgataaatcaaggctttctggtggggctataatatttattcattacaatgtagataatgataaagaaagtagtggtcgtctttttattatcatggtggatagaaaaggagtctttaattttgataagaatcttattccagagaaattaccatctatagatatagattccttgcgacaagctgtccttgttgatttgactttattcaaagcaagctacccagaaaataatggcgacccttatctgcactttatatctggtcgatctagtagcgaattctttaagcgagcattgggttgtaacccaaaaattgataataatagaagtattgatgaaacaaatagagctgttgatgattttgttaaggtaatgaagttaaagcacatcgatagagttaaagtaaagaaagcagtcgaagctttgatgatatcaaaagcaaaagatcccactgatagaaagttaacgattgaagatatagggaattgtatagagaaaacccttcctgaaaataaagaattaaaagggaagtttgtacagttcgcggatgttaatgaatatgttattgatgattttttcgaaccaagcagattttctggaagtagctttggggaaataaagatttctgatgcggaacaggaatatgaatgtaaaatatctgttgatgcaattagcgaggatgatacatcaaatgcaaaagttatatatgatagagctaatggtcaattaataatacgattgtcgcataatgcagtaactgaaatcgagaaaatagttggttaa

SEQ ID NO: 204631 - DNA, 1116 bp, Klebsiella oxytoca
atgagcgacatgaatgattttgaaacattagtaaatgctatcttatcggctaaaattgaagtcgatagcggctatatgttgctcgaatttgaagaccaatcaattgatattaacataatatctaatttaatcaaagattatggtttagccgtagaacctgaagttgaaagtaaagagattatttttccgttgtcttctggggcatttcgagatgattcaaatatatatagtacgctagattcatttttaagaacatgtatttctttaggttatgttcctaataaatacattattctcactgagaagatttcttcactattagttgtatccagtgttgctaatcatcaaattggaggtaagtttatactctatataccaagtgataatggtggtaaggagttagttattaactcttacgaaagattggactatattataaaagctccctatagcaaggtagttatagactcagttgataaaataataaaggtacttggtgtcgaggatgctcagtctcccgaaagaaaatctattattcgtactgctatatatgatttgattaataacattgagagtaaagatatttcagcgctaatcacaataagcgagagggtttttaaccggtataacgatcttttggagttatatacaaatagattctccgttaacaaattattgtctgaattggaacaaaaaaaccttgagtatacaaccaaaataaatgattttgtttcatctagccagacaaaagcttttgcaattcctggggccctgattgcggtcggtggattagctaaagccagtggcttctgggattctttattgatttttataggtctatttcttgtgtattacataacttctatgtccaatcaagttttatatgaatcctatataactttaaaaaatagtcttaatgactctttttcacggtattctaaatttgatgaaggggtggaagttagggatgcagccaaaaaaatctcattagagctttatcataaaatagataatgcaaaagaacggttggaaaaagttaatagtattgcaaaatggatgctttggataggtggggggtatctagtcttaaaaatgatatttattgatggtaaataa

SEQ ID NO: 204632 - DNA, 291 bp, Klebsiella oxytoca
atggtgtgcggcaggcgcttccggaccttcaacgtggtggatgattttaaccgcgaagcgctggcgatcgaaattgacctgaatatcccggcgcagcgggtcatgagagtgctggacaggaacgtggcaaaccgccgatatccgctgaaaatgcggatggataacggcctagagctggtcttgcgtattctggcacaatgggcagaagagcatggcgtgatgctggaatttatcacgcccggcaagcccacgcagaatgcctttatcgaacggtccaaccggacgtactga

SEQ ID NO: 204633 - DNA, 306 bp, Klebsiella oxytoca
atgtccctggatgagatcgccatgcgcaaagccggattactcgaacaccagatcatcgctgttatgaagtccatcgaagccgaacgtaccgttaaggatgtctgccgcgatgccgggatctctgaggccttgtactataactggaaagcgaagttcggcggtatggaagcctctgatatcaaaaagatgaaagaccttgaggatggaaaccgccgactgaaacagatgcttgcggacctgagtctcgagtgccgcggactgaaagacgttattgaaaaaagctttaaaaccagcgataaagcgtga

SEQ ID NO: 204634 - DNA, 1086 bp, Klebsiella oxytoca
atgaatagtatttttgcaagagaaggagatgaaatccgggttctttcactgttttctggctgtggagggatggactttggtattgaatctgccggaggaaagattgtttttgctaacgatatcgttgaaaacgcgtgtaaaacattagcgaagtattttcctgatactgatgttaagcatggcgatatctctcaaattcaaacttttccatctgtggatgttgtcgttggtggctacccatgccagtcattttcgatggctggtaacagaaagcccagcgacgatgcgcggaccaatctttataagcaatttcttcgggtattgaatatcgttcgacctaagtattttgtggctgaaaacgtttcaggattacagcagttgggcgcaggtagctttttagaacaacaagttaacgcctatcgggctgcaggatatcaagttagtcaccatcttgttaatgcaaaatcttacggtgttccacagtcacgcaagcgcctgtttattattggtgtcagaaacgatctggggcaatattttgaatttccggcagcaacgcatggtaaagcgaccttaaagaacccgcacttaaaaccttatgtttcccatggtgaggctatccgcgatttgccattatggccagagggtgagttttacgaacgacctcacgatcccgaggggcacttctcatggtactttatgtccagaaatcgtaaggccaaatgggatagtcctgcttataccgtcgtagcgaactggcgacatgtgacgttgcatccagccagcccaatgatgaagttaacatggtcaaatcttgaggacggctggaagcagcgctgggatttttctgaagaatatgaacatgttgctattgattcaacccggcctaagctggaacaggctaggcgtttgtcatggcgggaatgtgccagaatacagacgtttcgtcatgattttgagcctattggtgatattgaatctcgatttactcagataggcaatgcagttcctccgttactggccgaaatcatttttcaacatctattttctggtgatgggttgaaaatgaatttgaggaagggcgaataa

SEQ ID NO: 204635 - DNA, 2778 bp, Klebsiella oxytoca
atgagtatatctttccctatttctttagaagagtggaatgcagcactagttaacgccgttttttttgagccttcccgtgcagatgtatttttgagtcgaatcgatactactggaagaatttttgagcaattggctggttctcgtagtaaagaagaagctaagcaaagctttcttgattcatttggtaaggatgaaagaaaaatacaacgttatctcagagatgattcaacgcttgatagtctgactcgaataaaaggcatcccacctcatttttctattctatatttaacgttacttgccgccagtgctgataatgaaactcatgatgaaggagactttagggttaggttttctgtattattgggactgaataggaataagaaatttatttttagagatttgcctagcttatggcggagagttgaacaatggagtcagagtaaacagggttgttctcggttatttttacccgatccccaaaatgaaaagttgattgggtattctaaaaggctttcttttccttgttatagagatgaagttcgtttgcgagccatattggttcgtaataatctgggcagccattcaacatttgagtctgttaataaagtaatacaccagagaattgatggttttagtgaagtattcgtcagtgaattcaatgaattttatacgttattatcaactgcagccatgcagcaggcatatagtagcccgttctggggggctgtgagggatattacgcggcatgaagaaaatcaacaagccagagagaatgggcgtttctgcattcacttagacgctaccgatccgcaacttccagaaatttatctgttaatggatgatgttggtgctcagactttggataccgttaaaactgaatcgttaccagaaaaattggagagttacagtagcatttattatcagaccaacgttaatgctacattaacgagtttactttcatttctacaaaaaagaaaaaaaggcttaattggatcgcgggttggcatggcgctacatgctgggtgtttaccccttttcagggatgattctgggtttatcagttcggatggtcattattttgacgatggcctggtttgtttgattattcgtcgtgaatatgctgtacatatccgcactaggtttgaacatactggcctgactgttatgacgctaggaaaaaatacagattctgaagattgggaagttctagtctttgacacgatgagtaggcaggaattaaccgaacttgccaaattacttcctggtgctgctcgtagatttatggttcagagttggatacctgctcgaccttatatcacaggtgcagcccgttttggacagtcaatattacttaacccagccagtacgccggttattcatatggtgggtgccattggcggggaatatgtaatcagagattccaatcatatagaactggtcagcggcatactaacaccaacacaaggcggtgaaggactatttatttctccggaaaaactcacttcattatcaggacaggcgttttgtcgctatcggttaacgcttgagaaacatgttgaaccgttggtttttgacattcacgtcctcgatcatgcgccggatgctccgtatcgtaaagttgccgaacagcatgactggcttattgatggtcaacggggaacattagtgccattaaacaatgttgagtcaatggagtgtctgaaaaaccaaaaaactacctcactaggcggatcatggtcgctatggcgacgtgatgaacgtgtgcctgtagagagtaaacagtttgatttgcacatgcttcctgccgcatttgactggttagctgaagcactggcactgcgttttcaaaaacgcagtacgctaccatttgatgagcttaatacacatataacgcccgtatcactagcgacaggtattcctgcatggcggttgcgccggttgctttttgcctcaggctggctttgcgtaatagaaagacgacatgcgccgtatccggtggtatcactggcaaaacgtacattatctgtttgtgagacggtacaaggactcactgcccgagtaagcggtatgttgacgaaaagcgagcgtcatcatctgcaaggtttgttgaaagagagtgaacgggtaagacgttggtcaacagtggataataattttgcacttggcagtattgaattgattttgtcaggagccgatcgcgtaaaagatttgcttgaacgattcaattggcagcttttagtcagaaaagatttttctgttggcccattaagtggcgtgctgttatccatgactcaaataaagcaagttccagctttgccacctgatatttatgtggcgttctggcagacaaaaaagaaccaatggtcagaggaaatccagccaacaaatagcgacctgttaatgcgctgtcgggaaaaacaacgtaatcgttattttattcgggcggatacggggtactggcaaactgatagctttgcctgggcgttaatggctcacatcatgaggtcggaaaaaacgcttggcactcaaagtcactatggcgatctcttctggtctaaatcactaattactttaccgatttctgtcactcagtggtggttacatttcgccggtggttgttgtaccgtcagtgatgacggaaggataatatttgctggtagaggggatgaattgtggggaggcgttgagtgtgatgataatgctgttttcccggttaaccgagcggtcactcggcgggcgagagctttggcgctacgcaggataagcagcataaattaa

SEQ ID NO: 204636 - DNA, 2814 bp, Klebsiella oxytoca
gtgtctaaaaaacaacatatcattaaagaaagattgaggcagatgtatctctttggtgcagagccttttgagttgatgaactgcctgaaagaatcgcagcaaaagctgattatggctggtgctaaagcggacaatttgccaaaggttccgaacaagattttacattttttgagtgcattaccacctaaggcccattccattgtgctaacgtggtttcgtactcacgtacaatttccagaacaaggcgatccccaaaaaatcattcatgagattctgctcgcagaaaataacgataaagatatctcatcaccaaaaccgctatggcgcgcaatccttgggttctacgtcactcagccttgccctgacatcgtcgcacaatttcttcgcggtgaagaaattacactaccccataatgatgaccctgatgggtccagcgatagtttacctgagcagtcaacgattagtgttactgatgaagatatcgagcagtgtctattcgtaagtcagggacgtgacatatcgccttcagatcgaataattccggcgttcgttgctgggcttgttgctatgttgaagggggaaacggaagttgcaggtcagtgggtgtcacagttatccaatcacccactgcctttggggcaaaaatttggtaggctcatctcaacgtttggcgtcgttcgtcctcaggaagaggctgacaacggaatagtattattggcagagcctgttgcgccagacgagatcaatggcgatatcgatggagtgtcctttgtcggtaaagtgacgaaagtgcttccctctggcgtattctttgttgcgcccgttggcctgtttattgacgatgaactgcgggatctttcagatgctcacagccatatgctctatcccgatcgtggcgaagttataggatttttaaatcattttacaaataatgtgacccatggggaattaggcatatggcaagcgagacacaagccatccgataaaacggcccagtgtgcattgactgactaccagtctcgcgtatattccgttgtcaaaatcccctatgattccggcgaaccggatgcgattcgtgaatggctattaacctgttaccaacctcaagataaatctcctactatcttcttcttaaccgatggtctggcgctaagattacctggagacattcttgatcctaaaaaatatgattttgacgtacctctggattcttatcgggaactaagttgtgtggaactgcgctctcagtcaatcactatagtgcctcaactccccggattgagcgaaaaatatgattgtgcgcctgccattacatggataaaacggctgttaaagttagactattcatcgacagattttcctgttttcagcaaatcacacttacagcgtttagctcactttatggctgaatatgagtcagataatcgaagtgcgtatttacgtgcattgacgcaacttgagaaggttgcggtttcaagagaatttctggacggtagcattcaacaactgttgacgttgccgacaataaagacgcaaatctgcgcagagaagcaagtaatactggctcagtatgaaagtgagcaggaacaactcagacagacgattgcatcattgatggataagaaggcgcagttggatgcagaaattaaccgacaggaaaagacgctaaaaagcgaaacaaaccgtataaaaaaagcgctacgccagcaggaagctgagctggattcacgaatcaggcaaacctttgagcaagcgtctcaggcgggtatagaaacgttggcacagacggcgttgttgcgaacgatgatcgctggttcggccacacccacacccgttataccatcagaacgaatcaccgaacccgcctcgagccttccgttacctcagtctttactaccgccggaagtaaatgaaataaacagcaaaagagtgctacaggctgcgatcgaagaacaggcagcgattaccggactaagcgaaaatctgttgttcagtttgattgctgccgcaaatgttgtatcagttgtcggattaacaggaaaatatgcccagaaaacggtcgtttctttagccaatattctgtcgggaagcatatggggggaggtctctattcatggtgatctttttagtatcagcgacttaatgaaatcacctgtgctaatcaggagtacaaatagcacgagctctatgacgctgggtgacttcttggagcaccaacaatcaagcgggttaatgactatagtaaaactacgcgggtttaaccggatgccgccggaaacattacttcccgaacttaacgaatgcctgtttagcagtgaatattctgcgggattatgctggaaggatcaaaatcataccttgcggcacctttcgttaagttaccctgtattgtttgtattgacgtttgccgttggtaaaagtacgttcccattacaggggccggttgcccaccagttgcccgtatttatggccgaatatagcagtacacaggttgagcagactgaatactcaccagccgaatatacttcagatattgctcccgcgtgcgtggcctccaaattatggtcttcgttatacgccgatgctcaccctaaagataatcagcagcaaactatgcgggcggtgttaaacgcattgggttattccgacgataaatctcaggcgctggcaatgctggctttcactattgggcgcagtaccacagaaaaaataaccgcagaaattgagccattggctcctgcattgataccttatgttcaggaaatcactcacggtgcatctgtaaccgtgcttgatcatctgttccagctataa

SEQ ID NO: 204637 - DNA, 5997 bp, Klebsiella oxytoca
atgaataacccactggaatcatttgaatcaataagggatttttacatcacctatcttgaaactgcttttcgtataggttcgcccgatattcaggcataccgacgtagcttactggaacagcaaggtacattatgtgcagatctttttctggaaccaatgccaagatatcaggattatggtttaaccatcagtgacttacgtaatgtggctgaaggtgaggaatggttgccagggtttaccgagcaacaaagggacgcatttatcgatctttgtctgggagggcttttgcctcgcgataaatccgactccaccaaaggacgttttaaactttatacccaccagctagacatgctgaaaagaggtgtacagcccgcaatgccgggcatcgttacatcaggaacagggtcaggtaaaacagaatcttttctgctgccagttctggctcaaattgtgaaagaagcgagtggttggccgaaaagtccctcgcttaaatgttggcagccgtggtggcataatggagtaaatactcagcctacgtttatgcgtgaggcagaagcatcagcacggccaaaagccgtgcgagcgctaattttgtatccaatgaacgcactggttgaagatcaaatggtgcgtatgcgtcgggcgcttgattcccgagaagcacatgaagcgatggatttacacttgggtggcaaccgtatcttttttggtcgttatactggcgcaacgaaagtcactggctggttaaaccatccccgaccggggagcgaggaaaaagagaaaaaagagaaaaaacgggtcgctggtaaaatcactgaattgcgcgaatatcttcaatccgtggaagacacgcatcgggaagctgtgcggcaggggattcgggatcatgatgataacctgcaattcaatttccctggtgtatcaggcggagaaatgcttagccgctgggaaatgcaaaaatcacctccggatatactgattactaacaccagtatgctttccacgatgttggtacgagagattgacgatcctatttttgaccaaacccgagaatggattgaacacgatcctgatgcctatttttatcttgtccttgacgaactgcatcttcagcgcggtacagcagggaccgaagtcagttatttgctcaaacatctcataaaccgtttggggctggatcaagaacagcaccgacataagctgcgtattctggcatccagtgcctcactgcccgttgatggccctgaaggtaagaaaagcgttgagtacttatgggggatgttcggtcagcgaggactgcctgtgagtgcagcagccaaagactgggcagattgcgtggtgaatggtgccatggttgctccagcacaggataatacgttgcatttccacggtgacctcaaccacttctgcaatacggtaaaacagctacagggatcctcactgccatctttgcaacactggtcaaacgttgcccgaagtatggggggctatcatgacgagcagtgtatggaaaaactggctcaatgggttgttgtgcaggccgcctgtatgcttgaaaaaggttgctatacatgtgaaaagtctctgcgtgctacatcaataaatgctctggcagcgcgtatatttccctcccattccacaggacgtgaggggattcgtgcattaatatggttacgtgctgctacagatagctggcctgagtggttttcacatccctttcccgacgatattccattgccacgttttcgcgcccatgcttttttacgggcgctggaaggattatatgcagcaccgctaccttccccgtcaagtgcatcaacagaagaaagagagcagcacttttttgccgatctgacggttgagtctggcctgcgttatggcgagcgtcactatgacaacaaaaaatcacgacgcgtagaattactctactgtgagtgttgcgccacactattttttggcggcaaaccctcttctttctcggcaacggatagccgcgtagagcttttacccaacgatcccgatattgatcaactacctgaacatgctaaatcggttatggttgaacgacgttccgccgaagaatatgcgttgtttatgccgaccgtcgatcgattctggcctagaggagaaggaactccagccgatgaggactcttttgggaagtggattaaggctggttacgatccgtttactgcggcgattcaacacacgttatcgcctataagatcgattgaacaaacacatattgcaggctggttctattatgtcccatcgggtgatttttcctctaggaaaagaggccagtcgtccagccagtcaccggggagtgcgctgcctttccagtgtccggcatgtggtacatcatataaatacggtaaaggtaaactatcacctattcgcagttttcgagtcggatttgcgaaaaccacgcagctcctggccagtacgttgatggcggaattacaacgctctggcgatcgggaacggctggtcacattttctgacagtcggcaggatgctgccaatgcggcgctcgatttggagtcaggtcaccatgatgatgttcgccgtgagattgttgtgcgctcgctgaaggaactgtcagcgagtcagtgctcccataaagaagtgaccatacagttagaacaacttaataaacgcagaaaagaactaattagcaaagagattaaagaggggcagctctctgcggatgaagacaaagaattaggacagctttttggcgaaaaacagcggctgagtgacttattgctactgccacaggcagacagcgtatcgctgagcagtatactggagcctgaagcaccaatcgcaggcaacgtccttaatcctctgttggcaacattagttgaagcgggtattcatcctaccgatcgaacggggatatctcctgttcctgagccttcaaaacaaaaacatgatgaagaaactatcacttttgcatggcagcaattatttgaaaaaaacaaacagaccaaatggtgttggaagaaacatccttcctatgaggataatctggacgttgcccggaaggaaatctcccgcgacctaaaacaactggtcggggaaagcgtgttcagtaaaacctattttgcgctggaagaagcaggatggggttatccctgccttcctctggctaacagctgcacgcgtgaacagttggctgtctatgacgctatgcttcgcgtattggcggatgcctatcgagtcgcaccgtcccagtacacaacaacagaaacgcgctggcatgttgcagacgatgtgaagcctaaaaatcgggtgcgccgttttagcgatgagctttgtaaccactccagagccaagacattattgctgattggggactttctggtacacctcaaacgctctggtcatcagggcggcattattgacattggaaaagtgcactttcgtttagtagaggctaccgatcctttctggcgctgtagtcactgtggtcgcgtgcatttgcacaagggggcaaaactttgcacccgctgttatgcgccactacctgaaacatcttctggtaacgcgggggaattacaaacccaaaactatctcggtaaacgtatatcgtatgcttcccgtatcagtagaatgcgttctgaagaactcacgggcatgacggggaatccggcagcgagattacgccgttttaaaagtatcctgattgctgatgatgatgacatattgccaaaagggctggaggacttcgaacctcatcctgagttggatagagccgccagagaggtggatgtactctctgttaccaccacgatggaagtgggggttgatattggcgatctacgcgcagtttttcaggccaacatgccgccgcaacgttttaattaccagcaacgcgtagggcgagcgggacgacgtgggcaggcttttgcatttgtattaacggcatgtcgcagcaagagccatgatttattttacttccgtaacccggaaaagatcactggcgatctccctccgccacctttcttaactactaaactggaaatgatctgccagcgcttagtgcgcaaaatatggctggtggccgcttttaagtggctcagagagcatgtagtggattcggggcagtcgtggcctgttgatggtgacaaacataaacccgacaatcacggagagttttttcaggttcattggctaaaagaaaatcaggcaaactggttgccgcgcattcgtaacgcgctgaaagaaaccatcaacgcgcgtgatgagtttgctcaagcgtgtatgcaacaggatgaaatattctaccgcacaataatccaccctctgacgccggaatgtctaatacaagatattaaatcagtactggacgacgatgctatggcaggaaagggactggcggaagcgttggccgaacagggaaaattccctatgtacggtatgccaacccgaacacgacttctgctgacaaggccggttagtacggacgaacatgatgtacagttcgccagcatggatcgcgatctggatattgcgattcaggaatttgcgccgggaaaatatctggtacaggacaaacgccgttactttaccgcaggctatgccggaatgctgaagcaaagctacaaaaacccggccgaatttttcactgaagctgacgaaccgggagagtgcagggcgatgaccgtttgcccggtgtgcaaagtctgggtactggtgggctcgatgaccgctgtatgcagcgcctgcggtggggtcatggatggtgctgagcaatattcgtgttacgtacccaacggatttattaccactcttgaagataaatctgcaaaagaagactttgaccaaaccctgacggtggccagcagagtatctattgctgaagcttactcaattgagaatgcagtatctgtacctgactctaatgttgccatccagctaaaatcccaaacctgccttaacaggttaaatcgtggtgtttatgcggacaaaaaatggagtggtttcaatgcgatacaaggaaatttacgggttccattcagaaaggcgggagtatatcagccgctatgggcaaaccacgtatggatagacagtaaccttcttgaggctgatttatcacttaaaaaccgctttacccctatgcaggaaagccgaaaatcgttttatctctcggcacctaaagtaaccgatttactggcgttgatgttggtggatactccggcggacctccagttacagtacttgcaaggcgcactgactcctgcatttcgggcggccgcgctatctgcttcttttatcatcgtcaactatgcttcgaaagagctacttgatactgatccggaagaaattgaaattctagagcctcgcgtacaaattttaaaaaacggtatttctgcaccgatattacaaatggccgatcgtctggttaatggttctggattatgcgagcgactacagcagatcgggagctctggctctccgattgttcttgaagtgatgaatgagattatcaatgacgaaggatcctatccactgaaagagtttttagaaccacagcatcgcgacgtatgttttcaggcttgttattactgcctgcatcggtacggtaatcaggcttatcatggcttgctcgactggcgtctgggactggatgtcattcaactgcttttggataaaacctatgatgccggactacgtggagatttttcatcccccggcatcattgactgggcggttaatgccaaacgactggccgaagaagcatcgtctttatttaaggggagtgaagtaaaaatcgtgggaaatatcccgctgataggtattagcccacaacgctgggcggcagtactgcatcctttctggagttatgacggggtttttaaagctaatcctgaacttgaggtgctctcgcttgaggaagatatagtatttacaaatacctttgagctttctcgccgtatgggaactgtgatggcaaaactgtgcacaacacctcgttcgagcgaaaaatga

SEQ ID NO: 204638 - DNA, 1164 bp, Klebsiella oxytoca
atgaatataatgacgttggagcgaacccgcccggcgatcccctcaaagctgggcgtatttcttgcctgcccaatgaggtacttgctggaaagcgagcagcattctttccggtgtttgcctttgcctcctcaggctgctctggggagtgccgtgcacagactggctgacacgttgcaaaaaagtggcgagaataatcctgaatcaatcatacagaggcttgaaaacgactttgtggcgaccttgataaagactcagcaaggagcactggcgctatgggtctgggaacgctatggcattgctggattagtatcgcgtccggcgttgatcaaatacattcgttacaccaaatctcttgttactccggttgctgaacgggttggacatttgccagatatgataaaaatgcgggaaagtgttattccgataggtcgggaaaaactgctgaaaagtacttgtttcgatatgcagggacgtgccgatctcatttaccgaaaagaaaccgggcagatacgggttgttgactttaaaaccggcgaagtgagagacgaaaaaaatcagccgaaagaagaatatttgttacaaatagcggcatatggcatgatggtaaaagagttagctcctgaaatcaatattgaactggaactagccggagtaggggggagctggaccggtgtattggataacagcctgcaagaatgcgtcaatcgtgttcttatttcatttaatgaaatattacctcgtaatacttctttttctgcgcttaatatagctcggccgggtagacattgtattcagtgtgctggccgttgctcgtgcccgatttactcaaaaaattcatgtcatttcaggcaacaattctaccctaacgatcgtcattttagcatcgatattcatgggcgattactggaggttgagatggatgataattttacgactctacgactcctacttcctgatggttatatggcaaaagtatttcatattccgactcgatttattcctgagtctaatgagatgataggttgcgacgttactctgtatggattgaaggtctttggcgttagttcggagaaaaaaatccctcgaaatttttatgttgtggatactcaggaacccagaagatcggcatttcagtttttcctgcaatggaagaaaaaccactaa

SEQ ID NO: 204639 - DNA, 1518 bp, Klebsiella oxytoca
ttgtccagaaaaaaatatttcagtgcgattgtcctgatcgtggtttgcacaacctcgctgtttgccatgctggctgttcgtgaggcacacgatttaaagaactatatggggtacgtcgctgaaaatggaaagtcggcgcttttccatgaagagtctattaaccagaatattgccacccggctttcgcgggaattctatcgccgaatagtcgatgccccctctgccgataccgaacggtcagtaatatgtcaacacgttgaaaccgtgggtgatatttacggattaaatctgttgaagaaagaaaggatttacctcgacggcaccctgcaaacacgcaatagattgtgtaatgagtggggggtagacattggcgcgctatcgataattcacaacgctgatcgcatcgctcagtcgaagtacagcttttcaaattataccgattatacgttcaagaatatcagatactacatagaccttgctcacaactatatttatattaatcagctagttaacactcacgactataccttcaataactggctcgagggcaataatggtagtatcaatattgctcgcagcgcacatacgatttcgattgatgataatgctctgaaagacctgctgagaggggaaaccacactgtctcatatttatcaggatggttatacccgaaataatattatcagcatgcttaccccggtatttctgggcgacaaagtaaaaggtattatgattacagacatcaacattcacgatctggtggtttcgtttaaaacagtcaaccgcccgttgttgtggcaatttctttctttatatgtcaccgacaatgtaaccggcagcaatatttttttccataaaccatatatcaaatcttatgcattgatcagttatgaagactcgctcacccagtattacaccctgcatgtaaaactggatgctaactacatcattattgcgaatttatggctgctgctgctttatctccttggcacctggacattatgccggtatgcccataaacagttaatcagacaaaccttactttccagggataacgtgacggacgcgatgaccgggctatataacagaaaagttattacaccggagctgaaacatagaatcggctcacttgttgacagagttatccccgtcacggtcatcgccattgacagtgacggactcaaaagaatcaatgactctctcggtcaccatatgggcgataaagtgatacagttacttgggatggcgctgggcaatgctattcgtaaaagtgattatggtatccggcttgggggcgatgagttttgtctggttcttatcgattattctctggataaatctcgtgaagtcattgcccgtgcgcaggaacaattacgcgcaattgacccggataaactggtggcattttcctggggggcatatcagctgctgccaggagacacactggaagttgccattctgaaagcggatgagttgctttatcagcataaacggagcaagtaccccgagcgtaactga

SEQ ID NO: 204640 - DNA, 921 bp, Klebsiella oxytoca
atgaaccagaaaatcagtttcaccaacagcaatatcccgacaatctctttgtccgccgtgctttacttcccacccgcatttgatgaaagccgcaagtacccggctattgtggtttctcatccgggaggtggcgttaaggaacaaactgccggaacctatgccgaaaagctggcagaaaaagggtttgtgaccgtggcttatgatgcgtcttatcagggcgaaagtggcggagagccgcgccagctggaaaacccgtacatccgtaccgaagatgtcagtgcggtgattgattacctgaccacactgcgttatgtcgacaccgcgcgaattggcgcgatgggaatttgcgccggtgcaggctataccgccaatgccgcgattcaggatcgtcgcatcaaggccatcggaacggtcagcgccgttaatatcggatcgatgttccgtaatggctgggaaaacaatgtgaagtccattgatgcactaccctatgttgaagcaggttccagtgcccgtaccggtgatttcagcagcggtgagtatgccaccatgccgctggcccccatgaaggagtctgatgcgccgaacgaggagctgcgtcaggcgtgggagtattaccataccccgcgcgcgcagtatgcgacagcgcccggatacgccacgctgcgaagcctcaaccagatcattacctacgatgcttatcacatggcggaagtgtacctgacccagccggttcagattgtggcaggcagcgaggcaggaagtaaatggatgagcgatgatttgtttgatcgcgcctcaagccaggacaagcggtaccacattgttgaaggtgctaaccatatggatatgtatgacggtaaaacatacgtcgctgaagccgtttctgtattaaccccgttctttgaagagacgctgcaatga

SEQ ID NO: 204641 - DNA, 930 bp, Klebsiella oxytoca
atgattaattgcccggatgaaaacacagagatgaaacgcgatgagatagcagatctgatggcatttgtggccgtcgccgaagagcgtagtttcacccgggctgctgcccgtcttggtatggcccagtcagcgttaagtcagatagttcgtcgcacggaagagcggttaggtttacggcttttaacgcgaaccacacgcagcgtggtaccgacggaagcaggcgaacaacttttgtctgtccttggtccaatgcttcacgacatagactcgactctggcctcattaggtgatctgcgtgaccgcccctctggcacaatacgcattaccacagttgaacatgccgcaaagaccatattgttgcccgccatgcgtacgctgttgaaatctcagcctgacattaatgtgcagctccttatcgattacggcctgactgatgtcgtctctgagcgctttgatgccggagttcgtctggggggagagatggataaggatatgattgctgtgcgaatcggacctgatattccgatggcgattgttggcgcaccggattatttatcccgacatggggtaccaacatctgtagcacatttagtcgatcataaagcgatcaatttgtatctaccctcatcgggctccgcaaatcgctggagattaatgcgagggggccgtgaagtcagggtccgcatggaaggacaacttcttttaaatacgatagaccttatcctcgatgctgctattgaagggcatggtctcgcgtatctgccttatgatcaggttcagcaggcaattcaagaaaaaaaactgacccgcgttctggagaaatttacaccagacttaccagggtatcatctctactacccacaccgccgccatgcgggttcggcattttctctgttcattgatgtacttaagtataagggagctgtttag

SEQ ID NO: 204642 - DNA, 1905 bp, Klebsiella oxytoca
atgaagcttgaaacgattcgtttatctggttttcagtcgtttggacatgaaccaaccgagctgagacttgaagatataacatatatcattggtcctaacggttcaggtaaaaccgctgttctccaggctttgtgtcgactctttgcgttcgaccccgcgttaaggcggatccagcgttcagatttccacgttccctttgatgaggaggaggttccgcttgagcgccagctgtggatagaggctgattttctgtttcccgaactcgaagaagacgaggacaacagcaccgtagctcctcattttagtcatatgcgactggacgagccggatggggttccgcgcgtgcgttttcgccttaatgcgactatagggctggatggagatattgaagacgctttggtatatgtcctggaagttgatggagatgacttgcctctgaatgtcgctcaggttccacgcgctgaacgtaatcatatccaggtacactatctgcctgccagacgcgatcccgctgaccatattacttacggtgcgaatgcattactagggcgtttacttcgcgctgttcgttgggacgctgagcgcgaaacgattaaagggctgaccgatcaaataagtgacagccttgcggcaaacccctcggtgaatgctttcagtgagagtttaaaggcaacatgggctacgctgcataaaggtaaattttttgctgaccctaaaattacttttgtagcatcagaaattgaatcgctgttaaggcatctgtctgtttcatttaccccaggtcacgatggctcatttgtcgatttttcaaggctgagcgatggccaaaagtccatgctttacctttctcttgtcttgtcgtctcaggctattggcagggctgttcttgccgaagaaaatgtatcgtttgatcccgataaattgcgtccaccagtcttcactctggtagcccttgaggagccagaaaacagcctttcaccacattacttgggccgtattgttagctccctaaatgtcatgacaaaaaacttggatgcgcaagctctcattgcgacgcatgcgcccacaatgctgcgccgggtagcacctgagttaatacgttatcttcgactgaatgagtcacgagagacgcaggttacttgtattaaattgcctgatgaaactgatgaggcacacaagtttgtgagggaagccgtccaggcgtttccggaaatctatttttcacggctggtagtgcttggcgaaggtgatagcgaagagattgtgctgccacgcttgcttcaggccaagggggtgcccgttgatgagtcagccatcacggtagcgcctttaggggggcggcatgtaaaccatttttggcgattacttacagcgttaaagattcccttttttacactgctcgatcttgatgtagcccgtcatggagcaggatgggggcgaattaagtacgtaaatgaccagttttccaaacgtcaaaggcgtaacaaacttcctgaaccttacggaattccaaaatgggatgatgaaaagcagaaaattcgggacttcgaacattatctcgacatgcttgaagagcgcggcgtatttttctcctacccgatggatttagactttgcaatgttacttgcgtacccagaagcctataacgttgaggaagagaagcccgacaatgcaactataaaagctgttcttggaaaaagtcattacgattcatctcagtacagggatgatgaattagcgctttttaatacctatcaccaacgtttcaagctcggcagtaaacctgcaactcacattgaggcgttaactcagctaaatgatgctgatctacttaaaagcatgccagattcactggataggctagctgatgcggttattgtcaaactcacggaactgccggaatga

SEQ ID NO: 204643 - DNA, 1665 bp, Klebsiella oxytoca
atgattactgttgaagaatggcagccagcagatggattgacgctggaacctaatgcgaaacgtgcagcgaaagctcgtaaacgttgcttggcactgactgccggaccgggggcgggtaagacggaaatgcttgcacagcgtgctgacttccttttgcgaacaggaacgtgtagataccccaaaaggattctggcgatctcatttaaggttgatgccagcaaaaaccttacagaacgcgttgaacgcaggtgtggacgggatctggcttctcgctttgatagttttaccttccacgcatttgccaagcgcatcatagatcgatttaggccggtactcacgggagaatatgccttagatgctgattacaccattgtagacaagaaaagcggggcgtctcgtcacgaaatagcattcggcgatctggttccctatgcaattaaaatattgcaaacgtcaaaaatagcccgaaatgcaatccggcaaacttatagcgacattttccttgatgaatttcaggactgcacaaatttacaatatgacctggtaaagctcgcttttcagggaaccaaaattcgactggctgcagtcggtgacacaaaacagaaaattatggcttgggcaggtgctctggacggcattttccagtccttcacaaaggactttaatgcggtgccgctaaacatgtatcgcaatttccgctcaaaaccaacattgttgcgtgttcagaacgaaattattcgtaagttagatcctgactctgtaatgcctgatgatcaactggtaggggacgaaggggaggtttttgcctggaaatttgaagacagtcaaactgaagctatctttttggctgacctaattgatcgatggataaataaagagcagctacctccagctgaaatagcagtcttggtttcaaagcaaccagatttgtatgctgatcacctcttcagagagttagagcagcgcggaattccctaccgcaatgagcagcaaatgcaggacatcacggtcgaaccagtggctcgtttaatcgttgattacctgtcctgtctttatgcgcagcgggaacctaaagcttggatccgtctgatgaaccaactggttccctttgctgatgaagagattcagaccagcgtacgaaaaggccttgatcaacttataagaaagcatcgtaaggaagtatctgatgcaaaaaaaacggaagcgcccttttctcaatggtggagatttgttcgcgctcttttaaagcatataggtttacagacgcttgttgcattatctcctgattatgagtcccatgagcgtctgaaacaggttattcgcgatgccagagaacgtatcaaagatttattggaaatcgaatctgatctacccctcgcattaaaacgatttgcagatgaccaatctgtgcgaattttgaccattcacaaaagcaaaggattagagtttgattcggttgtcatcatggctgtagaaaatgagactttctttggtaaagaagaagaaaatcgctgcgcgttttttgtcggtgtttcgcgagcaaagagacgccttattttaactcatacgaacaaacgtgatgaaccggctaatgctaagcactggaaagtttttcggactgctcgattagagtattttgattatgttctcccgtttgtgaggtaa

SEQ ID NO: 204644 - DNA, 618 bp, Klebsiella oxytoca
atgtcaaatgatttaattgcactttctgctataggtgttgctattctctttggcgctatgagcccgggagtcagctttctgctcgttgctcgcacggcgatgtccagttcaagacgggcggcattctctgtggcggcaggtatgggctttggtgcgcttatttttgcagttatcgcgttagctggccttcatacactgctgacattggttccatcactttacacaggtctgaagattgtcggtggctgttatcttttatggctttcgttaaaaatatttcgacgtccttcgagcaagtttatcgattccaccgttacacaggaagttagttcctcaagtgcttttctgaccggcgtattcacgcaaatcagtaatccacatactgcactggtatttgctagtattttttccgcaacgctcagcaaaaacattcagccggctatgtatattatcctgcccttaatggctttcacgattgatgtactctggtatgcagtcgtggcctgcgcattatcaacggacgggccacgtcaggcttacattaagtaccgaaattttatagataaattaagcgggggagtcatggccttgctgggaatgcggcttctgttaaagtaa

SEQ ID NO: 204645 - DNA, 261 bp, Klebsiella oxytoca
atgcctggcatgatgatagaactcatccccttcagcagtaacgctcagctttcgggttgtgcgatgaatgagttttacacccagatcatgttctatctgctgtattgctttgctcacggtggggcgatggatctgaagtacatcagcggcttttgtgaaactaccctgctcaacaacctgtacaaaaatattaaggtattcaatcatgttggtatgcacgtgatcacccgttttttaggctgtttaaaactggcattgtaa

SEQ ID NO: 204646 - DNA, 273 bp, Klebsiella oxytoca
gtgtcgcataccatccgggataaacgaaaacttcaggcaagggcaagtaagattcagggacaggtaagtgctttgaagaaaatgcttgatgagccgcatgaatgcgcttcagttttgcaacagattgcagcgattcgtggggccgttaatggaatgatgcgagaagtgattaaaggccatttgacggaacatattgtccatgaaacggatgaaatgaagcgtgaagatgatctgggcgtagtgttgaaggtactggattcctacatcaagtag

SEQ ID NO: 204647 - DNA, 1497 bp, Klebsiella oxytoca
atgaataaccgtttttcacttttcaaccgccatccgttatccgctaaggcgacgatgctggcgataaccctcatcagtggttgtaccgtgggtccggacttcaaaaaacccaccgcagaggcaccgaccgactgggctagctggcgcagcggcgatgcagcgttacatgcgctaccggggggcagtgttgtttcagataaccgctggtggaaacgctacaacgatcctgttctcgatgctctggtagaaaaagccttaaccgcgagcccggatattcgcagcgcgacattacgctttgccagcgcccgtgcacaacagcagataaccgcttcccaacaaacgccaacggtgaatgccaccggcagcgtcacccgaacccagcaaagtgaaaatgcaccctcaacgcgtgcgctgaaagaagcgctgccgaacccggatgaactgatcgatctgatggctgcgccctcgaactggtatcagggtggcctggatttctcatgggagattgacctctgggggcatgtccgtcgtgccgtggaagcctctgatgccgatgttcagtctcaacaagcgatgctggagctggcgcggttaagtattgttggcgatgtggtgaacaactactacaatctgcgcggtattcagcaacaaatcgtgctcgccaaacaggatgagaatgcgctggatgaacgtctgtcactgattcaggcgcgtacacagggtggggcgctggatgagaccagtcaggagagacaacgcagtgaactggcggccactcgcgcgaacctgatcgaccttcaggctcaggaaggtgtggcaatgaaccaactcttgttgctgctcgatgaacatcccggcgcattgcaacaacaattgaagtatcagccggacagccttaaatcagaaaaattgccccctttgcaaatgggcattccatccgaagtggctctcaatcggcctgacattcgggcggcagaagcgaagctgcattcggcaacggcgcgtattggcgtcgccgaagctgaactctatccgagcatcacgctgggcgcacgcattgggatggatacctacagtgcggataattttaccgagtggggaagccgcagctggtccgtcgggccgagcctgaatttgccgctgtttgaccgcggccgccgcaaagcgacggtggtcttacgggaaaccgatcagcagcaggcggcagtggattatcacaaaaccgtgttgaaagcgtggcaggaaattgatgatgcgctgagccgatattcggcggcgcagcaaaaactcatcgagcagcagacgcgtgcggagagtgcaggacaggcactggctctaatccaggcgcgatatgacgggggactcagcaactttattgatgtgctggatgcgcagcgcagtgatattcaggcaaggcaggctctggccatgagccaacgtgacgtcatgacggcctgggctaccgtgaatcgcgcggtgggtaattacccacgctga

SEQ ID NO: 204648 - DNA, 1119 bp, Klebsiella oxytoca
atgctatctgaactgcaatcctggctacgtcatatcagtttcttaatcagaaaagagattctgaccatcgtaaaagagccagcgaatcgtatagtcctgatctcgcccgtcattatgcaggcgttattgtttggctacgccgcaacctacgatgttaatcacgttgattacgccgtactggatcagagccggagtcagtcttccgcgcaaattcttacacatctcgatggaacgggcgtttttaaccggacggcaaccctgacgtcggcatcgcagatcgaaccggtggtgatggacggaaaagccctgatggtactgacgttcccgcctgattttgaaaataaactcaatcaggggcaaacgtcaccgctgcaggtgatcctcgacgggcgaaactcctcgaccgcaggcgcggcagccggatatatcaatgcggtggtgagcgactttaatcagcgccaggcgggaagcgggccaggattaactgtcgaggtcagagcctggtacaacccgaatctcgagtcgcgatggggattaatgccgacgctgattgccgccatcagtatgctgcagacgctgttgttatcagcgctttccgtggccagagaacgtgagcagggaacctttgaccagttgctggtcacgccctttaccccgatgcaattattgataggcaaagctatcccaccggtactggtcgggctgattcagtcgacgataatcctggtgattattctgttctggttccagatccccatgaacggctcactgtgtctgctttatttcggccttttctgtttcaacatagcggccgtcgggctggggctgtctatttcggcggtatccatcaacatgcagcaggccatgctgtacacctttttactgatcatgccgctcatgctgctttcaggccttctgacgcccgttcagaccatgcctgacattcttaatgctctgacctatgccaatccattgcggtttgccattgatctggtgcgccgcgtgtatctggaaggggccgggctgcgtgatgttgcctttgattttgtgcccatgctcgtgatggcagttgtcacaatgccgctcgccgcatggttgttccgtaatcgactgtactga

SEQ ID NO: 204649 - DNA, 1128 bp, Klebsiella oxytoca
atgagtgaatcaacgttccttcgtcgcctggtctcgctgacacgtaaagaaacccgccaactggtccgcgataaaagtaacctcgcggtcggctttttgctgccagtcgtccttattctgctgtttggttatgggatgtcatttgacctgagcaaggcgcgcgttgcggtggtgcaggagcaaaatacggcgcaaagccatcatgtcatcaccgcattacagggcagccgctatctctcagtgcaggaatacccgagtcttgtagcggctcaggcggcactgcagagagatgagattgatgccattgtacgcattcctcctgattatgccgagagcagccagaccggtaacggcaaactgcaactcttgctgaatggcgcggtgaccagcgtagcctcttcagctcagggttatattacgggggcattgggtgtgcagactgccgtagatgcagacaggcagaacgctgtaaccggcacgggggccgtgtctgtcgaacaaagaatgtggttcaacgaagcgggcaacagcacctggtttattgtaccggggataatcgtgcttattctgaccctgattggcgcgttcctgaccgggctgttgattgcccgggaacgtgaacggggcactctggaggcgctttttgtcactccggttcggccactggaactggtgctggccaaactggctccgtatatggtgattggtgccatcgatctggtgatgtgtctccttgcagcgcattatctgtttgcgatcccgattcggggatcgctgctcgctattattacctcttcaatgctgtatctgctggtttcgctggggatggggctgaccatatcgggctttgcacccagtcagtttctggcgagccagatagcgctgctcgcgagcttcatgcctgccatgatgttgtcaggcttcgtctttgatatccgaaatttacccctggtggtgcagatagtcagtcaggttctgcccgccacccattttatgtcactcatcaagacactcttcctcggaggagatgactggcctctctttttcagccagtgcggtattttgctgctttatgcagtcatcctgatcaatgcctcacggctttctcttcgtaaacggctgaggtaa

SEQ ID NO: 204650 - DNA, 1782 bp, Klebsiella oxytoca
atgccgggaagtgattatcaggatgtcgttattgcccgtgatctggtgcgtttgtttcctggcgtcaacaaaaatgcgccggaaacacgtgcgcttgatggcctgacgctctctattcgtgccggagagttaacggccctggtcggcccggatggcgcgggtaaaaccacttttcagcggctgatcgccggactgtatgaacccacgtctggcagcctgacggtactgggtaccgatgtgaaagccgatccgcaatcagtacaaaaccgtatcagttacatgccgcagcgttttggtttgtatgacgatctcagcgtgcaggaaaatctcgatttgtatgcggatttgcatggtgtctctcagcaggtcagacaggaacgcttcgaacggctgttgtcgatcaccgatttggctcgctttacggcgcgtcctgccggaaaactttctggcgggatgaagcaaaagttgggtctggcctgcacgctggtacgttcccctgagctgctgctcctcgatgaaccgagcgtcggggtcgatccactttcccgtcgtgacctgtggaaaatcattgaacagctggttcaggatgaacaactgagtgtcattatcagcacggcctacatggatgaagctgagcgctgcgcgcaaatttacgtgctgaatcagggcaaaatactcgccgagggcaaacctgaaacgctgcgccagaaggcggcgggcagaacctggctggcgctgccgccggcaggaacgaaatcccgtgtgctacaggcgcatttgctggaaaaacatgatgccattgcggacgccgtgcccaaaggtgatgctgtccgctttatctgcctgtcgcctgatgacgaagctaccccgcaggaagtcaatgccactcgccgggaggccgaactggaagacggtttcatgctgatgctacaccaggcacaacaacatgattcaacggcgctttccgggccggtaaaagccgaaatggtctcggccaggagccgcgccaacgacagtgataaacccgtcattgtcgtgaaagacctggtgcgaaaatttggtgattttaccgcggtggcaaatacctcctttgacgtcaaacgtggcgaaatcttcggtctgttagggcctaatggcgccggaaaaacgaccacgttccgcatgctgtgcggactgcttcccgccaccagtgggcaactggaagttgccgggatgaatctgcgcactgcccgcgcaaaggcccgcgcccgtattggctacgtttcgcagaaatttgctctttacggcaacctcagcgtgcgggacaacctgacgttctttggcggagcctatggcctgtccggcgagaaactgaaccatcagattgaggcttccctgaagcaatttgaactcagtccggacgccatcagcggcgaacttccggggggattcaaacaacgtttatccatggcagtggcattgctgcatgaaccggaaatcgtgttcctcgatgaaccgaccagtggcatcgatccgctggctcgccgtctgttttggtacaccatcggtgaactggctaacaaaggcatcaccatgattgtcaccacgcactttatggaagaagccgagtattgcgacaggatagcgattcaggatgctggaaagcttctggcactgggcaccccgaaagaggtccgacaacaggccgggctggatcataccgccgacatgaataccgcctttattgccatcgttgaaaattcccgtgctgaggtcgcaaaacaggagcaccgtcatgagtga

SEQ ID NO: 204651 - DNA, 1023 bp, Klebsiella oxytoca
atgaataaaaaaatcatcgcaggcgccgttgctacggttctgattgtggctgccggtgctgtctggctgttcggtcgacatggcagtggcagtgagacggtaacgctacatggcaatgtcgatattcgtcaggtctcactggcttttgaagagagtggacgtatcagcacgcttttagttgatgagggcgatcgggttcgcgccggacaggtccttgccaccctggatacccgggcgctgaaaattcaggaacaacaagcgcaggcacaactggatgtccagcaacaaaccgtgcgtgaacagcaagcaggcgcgcggcctgaagaagtggctcagtcaaaagcgcagttatcttctgctcaggcgcaattacagaaagcaaccgaagacatgagccgtattcagcgtatttccgccagtactggcggaaagggcgtcagcaaacaggaactggaaaccgcccgtagcaatcttcgtattgcccaggccagcgtgaaagagcgtcaggccagtctgatcctgatggaaaaaggggtgcgttcagaacaacgcgaagcctccgtggcacaggtcagggccacccaggcacagctcgaattgctgcaatatcgtctctcacaggcagagctacacgctcccgtggatgccatcatccgggcccggcttcaggaacccggtgatatgaccaatccacaaaaagcagtctataccctggcactcagccagccgaaatgggttcgcgtctggctcaatgaaagtgatttaggtcgcgtgaaagccggaatgtcggcacagattaccactgactcatttcccgataagcctgtgacaggcaaagtcggctttatctcttcggtggcggagttcacgccgaaatctgtgcagactgaagatctgcgcaccaatctggtgtttgaagtgcgtattgttgttgatgatcagaaaaacgttctgcgcatgggacaacctgcgacagtgaccatcaatactcatcaagagactcagcgcgatgccgggaagtga

SEQ ID NO: 204652 - DNA, 675 bp, Klebsiella oxytoca
atgtcgaaacaccttatctggaatttgtgggtcatgggcagagcacgcagaagcgacggggatatcacccgagaaagcatcctcgaagcagcaggcgaactgattgccgagaaaggaattgcgcagacaaccaataaggagattgctcaaaaagcgggcgttgatctggcggcaatcaactatcactttggtggtcgtgacgggctataccttgcggttctgacgctggctcaccaccattatctggatggcaacctgcttgcagagcttgcagcgtctgatttaccaccagaagataagttagggacgtttctggaaaccttcctggcaaaactgagcaatccgggtgactggcatgggcgagtttttgcgcgtgagatgttgtctccttctgcacaacttggtgactttattaatactgaaggtgccggaaagatacagtcggtcaggcggattgtgggtgaagcggcaggcctttcagaagatgatcctcgtctgctcccctgcatgctgagtgtggtagccccgtgtatgatgctgatggtagcgggtaaccgtatgcctggaccagtacagcacatcgtcgcgatgcagaccaaagccctgacggcacattttaaatgcttctcactggcggggctcaaagcaatacgagaagagaatcaggaccgctag

SEQ ID NO: 204653 - DNA, 651 bp, Klebsiella oxytoca
atgataagacaagttttgaatttctaccgacacaactggtactacgtgggaggcatgatttttgttgccctctcgttttttatgggcttctggggaagtttattcagtcctgttcagatgatcctgatatacagcttcatggcgatgctcgtccaccaggttgaggagtatggctatcccggcggctttccaacggtaacgaatttatgggtaatgggagagaaagatattcctgaccgttatcccttaaacgccaatcagtgcatgatcagtaatacgcttttgacctatctcttttatatcgcggccatatttttgcccaatcttatctggctcggccttgcgcaggttgggttgggcttgtttcaggtgctcgcacacggtattgctgtacctgtacgtataaagcgtctgtacaacccgggactcgctacggtcctgtttctcttcttgcctgttgggatttattacatttggttcgtaacgacaaaccatctggcaagcacgggggacttcgtcttcggtttgttcgccacgttcggtgcggtggttgccctgtttttactgccaattattctgctcagaagcaaacaaacaaaatatcccttttccgaagctgaaatgaacaggggcatcggacaaaggttttga

SEQ ID NO: 204654 - DNA, 876 bp, Klebsiella oxytoca
gtgccgaaaatctatcgcggctacttccagtacgcggggttatttggctttgaaaaagataaagcgcagggcgccgtctggctcgatagcgtcgccgacattgaatacgaccataactggcgggcggcgataaaagattttcgctggctcggttaccccgaatatctcctgcctctggcccaccttggcgcccggagaaacatccccagcgcgcttaatcagctcggggtggaatctcatgccagagataacggaggcttgttgccgtacgatcccgccatcgccttcggttactgccagcaagcggccgagattttacgccagcacgtcgcgcagcgcgacgcagataataaatatcgcttgatcgccaacggcggcgatgacggctatgaacaggacctgcaggagatccatttccgtatggccaactgctgcgaacgtctgatcaaccaggctccgccggcggaaaagcgcgccgcttacgaaaaaaaccttctcgataatctctatctggcctcccgctatggcgataagcgggcctgggaactctttctgcttaatatcgccggcgtaaaagatttagcgctggcgcactcacatttgaaacaggtgcaggaagcggcaaataaaggttcgccggaggccatggtggcgctgtcgcagctgtacggtaacaaacgggataaagcgctttataatatgaaacagagcgcgcgctgggcgcattttttcatcaccttgtaccctgaacatgaattattcatggatctggatgctctccatttcgattctttctggaaacgctggcgctttgcctggtacacctcacgtatcccggattccgagctgccggggcaggtcaactccatggtgtaa

SEQ ID NO: 204655 - DNA, 1566 bp, Klebsiella oxytoca
atgttatccccacctaaaagaattaaggatggtagcagcaagagagaatttatagaaacaatacttcatagtgttgatgcatacaacgaatgcttaaagcaattagacaaaccacttccatcggaggttttactttttgctcctggcatgcattcttatttatatgacaaaaataataaattttatgatttaataacggaagacttatccttggttgagaaaaaattccttattgatggggtgttacgaaaccctggctattccggaattagacttaatgtaaactcggataaaaaagaactttttaaaagccctgctttccgttacttcacttcgttgagacgttctgaaatgcggttaacaaccgctgcaatttcttttcttagcataaataaagaaatcccggcgataagaatgccaaatgctataaatcattactccaattatttaaaaaagcttgaagatattgcgatttctgatgggataaatagcgaaccatttattaataaatccaaagcatttaatactgttattaaaagagcccttggcttcaagttgaggacatatataatagaaaattataatagtttatccttagtttgtgatgtaccattggactgggtaagatttaacaatatacctattatgtttagtcatgaaatatcaagaataaatgccacgccaggcaacgttcttctacaaaacacctcagctttccctcgtgttttagttaaagcatcggacctgaaaaagattttaattattcgttcttttgaacctgatgatcacttaaaattcatattagagaacgccattgaaatattcaagaaacagatgccagatcttgactgtgagattattgatgttagaacggaaattgaatttataaatgctttaaatcaataccaaggttacattcttgttatggactgccatggaaatcatgatggcaatgaaggtaatggatggttaataataggtgaggataaaatagatacatggaatttgaggaaaattgcaaggattcctcctatcgtaattcttagtgcatgtttaacatcagcgctaagcggctctcatgcctctgtagctaatggcttcgttataagtggtgcattaagtgtcatcggaacattgctgccagtaaatgcggtagactccgctgtttttgtaagtcggctgatctataggttttacgagttcccttcttcgctatccaaaaatttcactcacgttaatgtaaggcttttcctttctatttttctcagaatgtcctatgcgagcgatttaataagagggtttgagcgtgaagggttgataccaaatgattcatgggaagaagatgctattaacattaacattaacattaacattaacattaacatatatataaacatgcttcaccatgattggtatgattatgtacttaataaattggtgaaattaacagggcttacgctcgaaggtgtaattagttttatcaacaggaaattatttataaccgagactatgtgctatagtcaaattggttttccagatgcaatcacaataagtctcaaagattaa

SEQ ID NO: 204656 - DNA, 231 bp, Klebsiella oxytoca
gtggcagtggcagtggcagtggcagtggcagtggcagtggcagtggcagtggcagtggcagtgacacgggatgaagcgctgggactaatttctaatgagattgcctcctacactacactggcgggaaacgagagtgcgatacgagagttgggtgatgatgtcttgaagaaactaactattgaagtcacactaaaattacgtcaatccacaatcgtagacttgcaggtgtaa

SEQ ID NO: 204657 - DNA, 258 bp, Klebsiella oxytoca
atgattaactatccaaatattgaaactagctactcaaccgcgcacctggtattcggtggagaggatatgactttatatgttaacaatcgtgcagaggcaaataaaggttatcaacatattaagagtgattatctgaatattttatccgatagcctatcccctcacggattacaaaaagatgaaatactcttattgcgaaacaaagatattgctttttggctcgctaattgtgatttggactttttggaagaagactaa

SEQ ID NO: 204658 - DNA, 216 bp, Klebsiella oxytoca
atgaaaaaattaacccttggcttaattggtaatcctaattccggtaaaaccacgctgttcaaccagctcaccggcgcgcgccagcgcgtcggtaactgggcgggagtgaccgttgaacgcaaagagggtggtttcaacaccaccgatcatcaggtcacgctggtagaccttcacgtattccctgaccaccatctcctcgcaaacctcgctggatga

SEQ ID NO: 204659 - DNA, 1128 bp, Klebsiella oxytoca
atgaaatttctgggaagggatggtcatcttactcaacagctatacaggctagagatctggccaaattatataaaaaacataaaactaaaatttttttctgctaatattcgtgactatttaggatcgcgtaaatcagattcaaatataaatcatggcattaagcaaacagtggaaaatgatgcgccagatttttgggctttcaataatggattgaccgttctaactcattcgtactcggtaggggataaaacaattgtcattcaaggtttatcgatagttaatggtgctcagactactggggcgataggaaccctaaaaaaattacctgatgaaaaagcaatggtccaggctcgttttatagcagttgatagttcctctgaatatttaatagaaaatatcattcgttacaataatagccagaacaaagttgaagctgcagatttcagaagtacagataaaatacaaaaaaggttgaaggatgagttcaattcaattcctgaagcagaatatgagggcggtagacgaggtagtacaagtgatgtgattagaaggaggcccaatttacttggttcgtatacagtagggcaagcattggcggcatttcatggtgatccaattactgcttacaacaagaaagcaggtatttggattaataataagatttatgataaacttttcaatgataataccaaggctgctcatattgtatgttgctatggattagtgagggcgatagaagccaagaaaaaacagctacagttaaaagctaacttaactcgtgatgaagaaaaaaatctctttttcttacgtcagagaggggcaatattcttgacaacttatgcattatcttactgtcttgaaactattttagatcgttcagttccaaatttatttagaatatcttttggagttaaatgcactccaactaaagcaattgaaaattggaagccagtaattgatgcattgattccatttgtagaacatctgaatccagccatcaataatggattaaaaaatcaaagtgacatcgaacaagcagtaagcacattcaattcgctagcaaaatcaacgcgaacatttaattcagctgtttttgatattttcaaaaataagattgttgcgccataa

SEQ ID NO: 204660 - DNA, 162 bp, Klebsiella oxytoca
atgaaaataaaaaagcccgcttcaaaagcaggcttttcaaatttggctcctctgactgggatcgcctttgccaataactggctaataagtaagctaaacctgaattccttttctgtcaagaccaccagaatgaccccctctaagaaatgtatgcacttgtaa

SEQ ID NO: 204661 - DNA, 2472 bp, Klebsiella oxytoca
atgaaaaatataaatgtgacagtgaaagaaactggtgctgaatacaccgtcgatggcaatcaagttaatctcaatacgcagtcagtggttctcctgcacgtcaagcgtgaggatattcgttcatatacccgacaaggtaatgatcttgttctaaaactccaaaacggtgacaccgttacaattaaaaactttttcgttgtggatgagcatggacagcacagtgatttagttcttatggatgatgagaccggcgcgctatggtggctagaaggtgcgggtactgatggggcacactattcgctgattagcgatctttcagaagtcatcgcgaccggtggcgcgggacaaagtattgccggttgggtcatggctggcgcggctttgctgggtattgcggcaatgttcgccggcacctcaaacaaagaccaccactcttcggtttctgaaagcgattctgatgctgacagtgattcagactccgacagtgatacggatgctgacagcgatagcgactctgattcagacagtgattctgattcagatagtgattccgattctgacagtgattccgactcggattcagattcagatagtgattcggatgctgacagcgacgcggatagtgattctgatgctgacagtgactccgatactgataccgagctacctaccgcggcacagaacatagcggtcattgacaatgcgggccccatcaccggtgtgctccattctggagatgtcactgacgatacgaccccggagattaaagggacagcagaggctggggccacgataacgatttatgacggcgataccaaactgggttctgtcgtcgcggatgaaaatggcaactggagcttcacgttaccggagctgagcgagggttcccatagcctgagcgcgacggtgacggacaaagccggcaacgtcagcgagcgttcgccggcgtttgaactgaccatcgataccactgcgccggcagccagcattccgcaggtaaccgacaatgttgcagagcacaccggccaactgcagagcggggatctgaccaacgatgcgacgcccaccctgaacggcacggcggaagcgggatccacggtgacgatctatgacggcgacaccgtgctgggcacagtggttgccggcgaggatggacgctggagcttcacgccagctagtctggaggaaggcgcccacagcctgagcactacggtaacggacaaagccgggaacgtgagcgaacgttcgccggcctttgaactgacggtagacactatagtgaacccggttagcgatctgcaggtcactgataatgcaggagaagacacgggtacactgaacagcggtagcgtgacggatgatgatacaccaaccttgagcggtacggcggaagcaggtgccacgatcacaatttatgacggtgataccgtactgggcaccgcgattgcggacgaggacggacgctggagctttactactgacgcactggctgaaggatcccatagcctgagcaccacggtgaccgatctggccggcaacgtcagcgaacgatccccgatatttatattaactgtcgatcttagcgatgataccgactccgacagcgactcggattcagacagtgactccgactcggacagcgatgctgactctgacagtgattccgattctgacagcgactcggattcggacagtgattcggattcggacagtgattcggattcggacagtgactccgactcggattctgacagcgattcggactcggacagcgattctgatagtgacagcgattcggactctgacagcgactcggattctgacagcgactccgactcggacagcgattctgatagtgacagcgattcggactccgacagcgactcggactctgacagtgattcggattcggacagcgactctgactcggactctgactccgacagcgattcggactccgacagtgactcggattctgacagtgattccgactccgacagcgattcggattcggacagcgattctgactctgacagtgactccgactcggacagcgatgctgactctgacagcgactcggattctgacagcgactcggattccgacagtgactccgactcggacagtgattccgactccgacagcgattcggactctgacagcgattcggattcagacagcgattctgactctgacagtgactccgactcggacagcgatgctgactctgacagcgactcggattctgacagcgactcggattctgacagtgactcggattctgatagtgattctggatttgcccctatatttccagacaccttttatcacttaacccattactggcccgctgccgcagatattcccgtggcgagcgataacccagcgcactatgcggatgccattcgttataatgctcgaacgcctctgcaaggttctttgctgccgttaacccgtctggtttgggcatga

SEQ ID NO: 204662 - DNA, 243 bp, Klebsiella oxytoca
atggctataacccatacgaaagataatcagcttaattctgctcccgtcaaggtcagtaattatattcggatcatcctggccctggcgctatccggccttgcagaattagcctcactcttttttattcaacctctgttacccgttctcgccgtcgaatatgatgtgccggtgagtcaggtgagtatcattctctccgcagaaacggcgcttctggctatcggattggctttgttgaataaataa

SEQ ID NO: 204663 - DNA, 912 bp, Klebsiella oxytoca
atgctccgattgccacctaatggcttcttccagattaaaagagcctgcgacctgcttggaattgaagaaactgatattttattaatggcttcacagggggcgattaacattggtgtttattttagtggtgttagggcggtttatataacacttcaaaacgtaaactatgatgatagtgttgttacgaattccatgttccttacttttgataaggaaaatgatgatcagtttgagtatttagatgagattacaggagctaagtatcaacttggcttagcatttggcttatggaatatagataggtacacaataacttctattttggaaaacggctcatctaatattctttatgaacttggagagtcatttgcggatctttcaatagagttatcagatgattgcgggttgatttcgttagataatcctacaccatatcctcacccagacattcccggagagaaggggacaccagatgagattatctctgagttaaaaaaagtgaagattggaaaggaagacctatatatatcaaggtcatgggttgaaactatttataaaaaaattgaagataatacgccactaccaaccatatattcaagggctaacggattcaataatacggtggatttggctctaaataaaaaacctcatggaaatttaagtcgctttagcaataatcgggaaaataacctaatggctcttatatttacaaaaaataaatatcccgaagactgcaaaaacgaaaatggaatggaaactaacgaggcttgggctcaggcaaccttggatcactgggggtttgttggttgcggatatagtgcgccaagctctgaccatctcaaaaaaatcatcagtgacatgggtaggcctccatcagaaagaactaccgccggtaaactaaggcgttcctga

SEQ ID NO: 204664 - DNA, 786 bp, Klebsiella oxytoca
atgattaccggtgcacggcgcaaaagcctctctctgactggcctgatgtatgcaaaagttaacgctctgcaggcagtgcgccacagcgggaacctgacaaaacctgtcattctgtgggccactgatagtggctctgttgaagtgtatttcgagacaagtaagcgcgcgggtaagggttcggaaactgactatcgggaagatagcgtgtccggcgccggcggtggatgcggggcccatcacaccgccagctataaattgccgcaccgtgacaaaaagggcttgcggtctgaaggtagaccggtctatggttatagcgcaccagcaaaatctggtgccgggattggtctcccggtaatgttatcggcgatacatgacgcgccaagcgtctttttttgtgtcgttagctcagtacacccttttttctgcgatacgggtataatccgtgccgctcgcaaaattatggtgggctgtgtaggggcttcttcggaagcgccggtttccgataacgccggtaagaccaactctgcacagtccaccacccgcaagattggtctcttcggtggtggttacaaaaaccagttatcggaggctgccgccatggctactacccctaaccaaaatccgcaatttgtttggattatcgccgctgttcgccgcgattgcccgacaatcacagcaaaaatccaccatatcatttcagaatcagagcaggaagcccgccgcacactgacacgggatcacgtctgtttctttgcaggccgtatccgtctggaggtggcagcatga

SEQ ID NO: 204665 - DNA, 3174 bp, Klebsiella oxytoca
atggccgaacttaaccctccactgggcacgacgacgccggaaatattcatggacaacgttaaacgcgctgacgagctggttaacggtccggccggaacggttaacgaccgcggcggtgaaccgctcgatacctggcgccagatgatggcgaaaaacgatgaggtcaggcagaacctgatcccgctcagtaagcaatatgcgacgctggcagcggcgcaggcggacatcgctaatatccccgaggggagcaccacgtattaccgcagcccggatgacagcgctcttgcggttgaggtgatgaacgttagcgggacgctgcagcctaccgggcggaaaatgccatctcaggcggctgttgccgcgaacacatccgtaattacagggttggatcttgatcgtgttgatgtatctccagcgtcgctggggactggccagtattatcagctctctacagggacaatcgcgaccaccacggacaccaactggtcggcgtgtgcgccagttgctgtggcaggatattcgcgattaattttgtcaggttcgtttttgtatcgcgccgccgttgcgccgcttctgtttgttgactcagcagggactgttatttctgtccagagtctgggcattcccatgtcctcggataatgtctggtcatcgcgcgcagaggttcaggtcgatattcccgccgcagctgtcagcgcattgatttcaacctatgccgaaccggctgtggctgtctatgcagccgcgcaggctttccgggagtcaggcgttgcactgtcggccagtaagaccaagaaaagagttctgaactggatcgcgaacacctacatgaatatctcgacaggtgccctgacttccagctcagacactttcgcagcagcccgtgttcccgtagcaccaggggatgtcttcacgctcagttgctcgctgaagggtgccccgaatcagattcgcctcatcggcttctttgacagtaacgagaccctcatcggtacgttttacccaggcaccgggagcggcacggtatccacgatcagtaacctgacattccgcgtgccgaaaaacgcggcgtctatggtgattactgcgtactccccgaactccgcaaccgtgctgctgcaggcttccgtcttcgaccgtgcggcgcttgatatccagaccgctgctgacacagccggaaacctggcaaagtcgtctgtgctgcctttctatagcgggcgctactggaaaaacaccaatggtgcattgaccgttgtgaacgacgcgcagttttgcgccttctacccagtacaggtaaccgctggtgatgtgtatcgcatcaagtctaacctgacgacgggaaacccgtctctggtatcgatggtggttttcaaaggcgccaacggtgagctggtaggaactgctcagcccgcgcccgggtctgggtcctttgctgcagcggatatcacggtaaccgtcccggctggcgcggttcttatgcttttgactgcatacagcccatatatagacatcgtctatcaggggagcgctgtagaaaaaatcggatcgtcggtagcgggtatcgctgcaagttttgctcagcaactcagcattaacttttcgaaagggtattactggaacccaacatccggcgccttaacgagcaccaacgatcctaactggcgggcatttgacgccatacccgtttcgcctggtgagtcgtatcgtgtcattgcgactgagtttagcggtagcatttacgtcgtagttttcaaaaatgcgagtggtgcggtcgtaagcaagtctcagctcggtcctggtgggtcttcgatcgtcgctgtcgatgtccccgttaccgtgccggctggcgctacgtccatgtgcgttacggcctatacggataacgtgactgttacgaagaacatcaactataaagccgatctgcgaaaagagattattcaaagggatttcgaaagtggtttgcgcctgttgtcgccgaaaggtctggacggctactactggcaccagaacacgggagtcaggacgctgattaccagcgactgggcatatttctctgtagacccgatcacggtttctccgggtgaagtgtaccggatcatctgtgctgagttttctggcaacccggcaaacgtatatctcgcgcttttcaaagactcatccggggccattgtggggcgcagctatgcagggcctggctcaggtgtcctacagtccgttgacaccaacgttacggtaccagctaacgcggcgacaatgtgtatcaccgggcacagcagaaacctccaggtcattaaagcgggaggtattgtcagcaagctaccgggtaacagcccggcacaaactaccggcccactggattactggaaagggaaaaaaatagtctggctggggacttcaattccagccggaagcggagcgaatgcttatccgtatatgctggcgcagcgtttaggcgctacgattgccaatcagtctgttggctcatcacccatccgtggcggactggatgcctttgccacttctgacgatccatatggctggtatggaagctcttatacccgcgtcacccgcgctttatcgcattccgtcgcgatcaaacagtcttttatcgacaactacgattcgaagtggaagagcttagtcacggggggcccggcgtccctgtcagatacggataaagccaatattcttggctattcgtacgttaacaggctggccggtaaccttgacgcagatctgtttgtcattgatcacggtataaacgattttctgtggattcaggaaagagggggagatgttgccagtctgctgacgcctgcggtcgatacccgaaatatcaatactttctacggcggcataaatacggtaattgactacatcctgagccagaatccgcgtgcccgcattctcgttatcggcttttatgaaaacgaactgcggccacaggtttctcagatgcagttaaaatctgcgcagttgtgggagtatcagatcgtgaagctgtgggagaagacaggctggagccagcaggtgctgaccggaacggatggcacagggaagacaataacccagtactggatgccggataatctgcaccctcactcggatacgactggcaaggcgaataccctgcttacggatattcttgagatggaaatcagatcggttcgttaa

SEQ ID NO: 204666 - DNA, 162 bp, Klebsiella oxytoca
atggcagccgaaaaatggttgagctcgctaacgcgcttggtgttagacctgaatggctttcatctggtcaaggggcaatgcgagaggatgggcagcaacctcaacccccgtttgagagaactggggattcagatgtgttccgactggacgtgctggatctga

SEQ ID NO: 204667 - DNA, 459 bp, Klebsiella oxytoca
atgaccaacgcttacaaactactcagtgccaccgtcgcactcaaaaaagagggcgtgaagaacgactatctgtttgctcaccatgagcttatcagtggggttcctttgggtgggaaacggtctgtgatggtgacatttggcctctatgctccccctgggatccctgtaggcatctatgcctcagtagcccctaagggccaagaacctaaaataggcagcattaaatattccgaaagtttttataccacccttcgatccacccctgttgctaacgataagggggtcttcttgatgacactcgaagtcaaagatgttctttttgagtatgacggcttatatgaggctatcgtccgtgtctacccgtctgaagagatgccttctgaagagggcgagcttgactcaattacgtgctttttctatgtggtgacatcagagggggatcggaatgcgaccgcataa

SEQ ID NO: 204668 - DNA, 303 bp, Klebsiella oxytoca
atgcgaccgcataatcttactgtcgtaacccctgatttcgaaccgcctattgaatcctcgccacctaacaacgatactgaggaacatggcggagggaatggtggaggtgatggcatgctagaacgagtaaaaaaacttgaagaaaaaatcataacaatgagttctgatatcgctgtcataaaagcgactatctgtactaaagaagacttacacaaagagttgaatggacagacatggaagattgttctcgcccttgtggttactgttctaatagcaatcctttccaagtatttcatcaaatag

SEQ ID NO: 204669 - DNA, 447 bp, Klebsiella oxytoca
atgaatactgcagaactccagaagattttagatgagcacaaggtatgggttgagtcttgctgccagcgcggcgatcgggcgaacctgcgtggcgcggacctgagtgacgcgaacctgagttacgcgaacctgcgtggcgcgaacctgcgtggcgcgaacctgagttacgcgaacctgcgtggcgcggacctgccagatctcaccttcgtcattatgggtatggaatacgcaatcactatcactaacggtgaataccttcgcgccggctgccagaaccacaaaatcgaagactggcgacagttctctaagcgagatatcgccgaaatggacggccgccgcgcgctgaagttctaccctcgactgctggatgttatcgacttctatatcagcaaaggcccacgccctgagtggcttaatgaaccagaagttgcggagtgtgaagaatga

SEQ ID NO: 204670 - DNA, 489 bp, Klebsiella oxytoca
atgcaatcgacgataagcgcatcgagcgcggagaagaagaagcaatcttcgtctgggaaaacgtccctggcgtcctcacaagccacgataacgcctttggttgttttctggcaggacttgccggagaaagctgtgaacttgagccatcagggggaaagtggacgcactctggttgtgtgtatggaccccaaaggacaatcgcttggatcgttaaagacgcccaatatttcggagtggcccaacgacgcaagcgtgtgttcgttgtcgcaagtgctcgaaaaggattcgatcccggccaagtactttttgagtccgaaggcgtgcgccgggatactccgccgagcagagaaccgcaaacggcagttgccgcccttactgcgagaggcgttggaacttgtggcgcagatgacaatcaggcccaagcaggacacctcctcgctttcggtggtggaaacacagggggaaacatcgatgctgccgcctgcctga

SEQ ID NO: 204671 - DNA, 822 bp, Klebsiella oxytoca
atgtcacaagacgctttttttcaggagcaaagtgaagttcagccaaagcttaatcctcccatacatcgctggcaggaggatatgccagagaataaccagcctcagctagtgcctccccagctgatttggttaaatacgaaaaatagtatctggatggaagttccacgctacgaaggggttgtctggggggggatgattttgggtgccattatgacattggctattattgttttcatgacggttctaggatggttaattgagcaggagcttaatggggagggaattttaattatttatgcttttggtgatttctttctcattacgctgatgtccatgtttttaaaaatttatttttttgaaccccgagatcagcctatacgactgaacaagcaacgacaggcgatttatactttcaattataaaagaaaatggtggaatccctgggccagatggccagccactgtcaaagcctatcactggcccgatattcacggcgagatgcggttttccagcgatctctataccgggggttttcagctgtttgcttccgtctgtcagccaggaacgctgaacgtgacggaacgcttccagattgccagtggctctcctgctcagctgcagcagctctggagctatctgtgtctgtacatgcaaggcgagtccgtgccggatgaggcggtgaataaagatcgccctgatttctggtgtccgcgtaaagcggataaatggcctgcagaaatggaacgtgaatccactactgcgccggacagtgaactttctgctctccgcgcctgtagcgaactatctgataagacgggttaa

SEQ ID NO: 204672 - DNA, 543 bp, Klebsiella oxytoca; identical to SEQ ID NO: 181112

SEQ ID NO: 204673 - DNA, 555 bp, Klebsiella oxytoca
atgttcgcgcagatcctgcggcgtttgcggcgttccatagtgctccagatagccgggcgtcgcgcagatgacgtggctgatggtcatcaaaggcttaccgtgcagccccggcgagggggtaggggtgatacgcagcgccagatcgatgccgtcatcaataaaatcgagaacccgatcctcaagccgcagacagacgtcgatcttcgggtagcggttaaaaaattccagcatcagcgggtgaatggcaaaccgtcccacggctttcggcacgctgagcgtgagcttgccctgcgccaccgcctggatactgctggcggagtccatggccagacgcgccgattccagcatctccagcgcatgttcatacaccattttcccggcatcgctgaggcgcagcttgcgcgtggtgcggtgcagcagcttgcagcccatctcctgctccaggcgcgagacgctgcggctgatcgccgaaggcgttgcgccagcctggcgtgcgacggcggagaagctgccctgttccacaatctgtacgaacagggcgaggtcgggcagtag

SEQ ID NO: 204674 - DNA, 519 bp, Klebsiella oxytoca
atgcttcattacgacaagtcgactggagttttcacctggctggtaaagcctaaccgcagaattaaagttggcagtgtagcaggctcaatcacacgattcggttacgtaaaaataaaaattaacggcattgattacaaggctcatcgcttggcttggctctatgtaaacggacaatggcctgaaaaagggattgaccacaaggacacaattaaaacccataactggatcgagaaccttcgcgaagctgatcagccacagaacatggctaattgcggcgcccacaaaaacaactccagcggatacaaaggtgtctgcctgcataagccatcaggtaaatggtacgcacggatacggcatgagggtaaacgagtaagtcttggattatatgacacacctgaagaagcatttgatgcctattgcgctgaatcgcgtgacaagcatggagaattttccaacaccgcttctgttgagctgatccccggctgcgccattgacgttgtgaagacggaggcagcatga

SEQ ID NO: 204675 - DNA, 183 bp, Klebsiella oxytoca
atgacaaacaaaaaaatgacacctgccgaaaagctcaaagcatcgcggaagcggtataaaaaaatctggcttcaaatggatatcgctaacgccaagcgatttggcgagaaagaagtgctttccgttgacacctacagatcgccctatgaaacgcgcaagaaaagagggaggacagcagattga

SEQ ID NO: 204676 - DNA, 507 bp, Klebsiella oxytoca
atgatcgcaaaaacaatccccttaccaatcgcaaaggctaggcagtttttggaagttgatggcagtagtgaaagcgggttgaggtggaaggttgatgctagcgccagagcaaaaaaaggctctagggctgggagtcttgataaccacggttattactacgtcaaaatagacggtgtgaaatataaagcgcatcgacttgtctgggccatagcaaatggtgaaatcccagatggcatgacaattgatcacattgatagaaacaccaaaaacaattccttagaaaacctgaggattgcagattataagctccaggctgaaaatcgtagccgtgactaccttaaatcacgcacgaattgcggctccctaactgtcaggaaatctgggcgaattgacgcctcaatctgtataaattccaggagattttataaaagcgggcgagataaagctgagcttattaaatggatggaggaagtgcagagtaaccagatggctcatctacttgactaa

SEQ ID NO: 204677 - DNA, 177 bp, Klebsiella oxytoca
atgaaagacctgttacatagccagcgcgtgatcgagcagttctcactgaggctgccggaaagagtcaagaaagcagttcaggaaaaagcagaagaagaggggttgtcattgaatgcagcgatcgttcagcggttggtttggagcttaaaaaacgatgagaaaatgttcggcgcctaa

SEQ ID NO: 204678 - DNA, 1068 bp, Klebsiella oxytoca
atgagaaaatgttcggcgcctaaaaacaacgaaaccccgaaggctgccacctccgaggtctctaatttaccagttaactacgagaaaactgacatgacaagtttagcaattgcagatcgtacaatcaacgtgcctttctatggcaattctctttttgtagttgagcataacggcgaggcctacacgccgatgaaaccgattgttgaggggatggggctggactggaaatctcagcacaaaaagatttctcagcgcttttacaaaggtatggtggaaatcaccataccctcagttggtggtattcagtcaatgatttgcctcgccctgcgcaagctggcagcatggctgaacagcatcagccccaacaaagtccgtcctgaaattcgcgataacgtcattcgctaccaggaagagtgcgacgacgttctttacgagtactggacgaaaggcgaggttaagaacccgcgcaaggctaaaaagtcactacccggcaaaatcacccctgagcagcaggaagccattaagcagctggtaatgactcgcggcaaggcgctgccgaaagagaatcaggccaaagcgatgatcaccatgtggtcttcactgaaatctcactttggttgcagttacaaagaaatcagcgacgaccagtttaccgaggccctttctatcgctgcgcgcgtacctcttgagggggaatttcttggcaagcaggaaacactgccagcgccgaagtttgacgttaacattccgcttcaatggtggatcgataacaacccgttggttcgcagtggcaacctgtcatttgggaagtctctaacggccccgtcctttgacgtgacgatggagatgctttgtggtgacaactcgacatctgcggccattcgcctgattaacattctggaggaggctggctttgatgtatcagcgccgaaggccgaaattgtagcgatgcgcaaacatctgggtaatgtcgagtacggcatgaaagctatcgcagacgcttgccgccgggcgggaaataaaaccatctcgttccgtggcggaaaggctgaatacgtaattggttag

SEQ ID NO: 204679 - DNA, 321 bp, Klebsiella oxytoca
atgggcccattcccttcaccggctacagattatatcgagcagaggctgaccgtcacggccgcatgtgacatcaatgcgaattctcaggttattcagactgaccgtggttatgttgttctggacttgtccttgaaagtgactcaagggagcgttgtgcttatccgttgtgcgggagagttgcaatttgcaaagctgatggggcagtcgttcatcacagtggaaggagagagcatcgaaggtgaagcgctggaagacgtggaagttctcggagtcgccacgcatgcgataaatgatttgaggcaggatgccagtcctgtttga

SEQ ID NO: 204680 - DNA, 165 bp, Klebsiella oxytoca
atgtccatgattaagaatcctgtccaaaagactatttgcaggaataacagggggggaagcgttttctttatgcctcccagaaatggtgaacgccaggttatctcaggtaacaccttcacgaatatcgccctaaaaaaggaaaacgctaatggcaactcaaattaa

SEQ ID NO: 204681 - DNA, 324 bp, Klebsiella oxytoca
atggattttatcaatgtgcttaaccgcaacctggaaatcaccatccgattgtctcctcaccatgaaaacaatctcaatttgtggtctgaaatcacttttttgcttatcaaataccgtaattcgcaccccaaaatgccagaaggtatcatcatccagatacatagcgcctggtatagtgaccctaccctcggacggctcaacagtatcagggttaaaccattcaacgttttcttcaggcacctcaaggtatctgataaaacgcattccaaaatcacgagcgaacttatgacaatgggcgcgatacacaataaattttttttgtga

SEQ ID NO: 204682 - DNA, 183 bp, Klebsiella oxytoca
atgaaaactatcatcgtaacgctggaaatagatgttcctgaccatgcgaccgaaaaagatatttcagactgggttgatgttgaatatggccagtgtggaagtcgaaaaatggataatccatgtatggccaattatggcgatgcttctgaattgcttgaccacacctggaaatatgagggctaa

SEQ ID NO: 204683 - DNA, 225 bp, Klebsiella oxytoca
atggctattagcacacccatgttggtgacttttattgtttatatttttggcatggtactcatcggctttattgcctggcgctcgacaaagaactttgatgattatattctcggcggccgcagccttggcccattcgtcaccgcgctctccgccggagcctccgatatgagcggctggctgctgatggggctaccgggggcgatatttatttccggtatttcctaa

SEQ ID NO: 204684 - DNA, 636 bp, Klebsiella oxytoca
atgaataaagcaaaagaaatagaagtttcttttactcaatatggaaaggaaagtattcgcgataggataaagagtctttttaagggaagaagcttaaggcgagtatctctcgattgggacctcccatactccacgctcaataattactttgcacgctcagcgactccaagcgtggacgtgttagttaaaatttctgatattgagaatgtgagcctaaactggcttgcaacaggtcgcgaggacaccctagccctagatgagtccgatagtacccaagactgtcgcatacgaacggatatggctagatatgcagaggataatgaaatccttgctggggcaacagcaaccccgctgaaagatgacaagtttatgtcccttacatggtcaatgtttttcgaggcattgaaccatgaggagaaatcacatctaattgatatttacgcaaaaattggagctaaaggcgttttggcattgcttagtaacgtcaatggttctaccacagaattacttaacctttcaccagaggagcaaagacgcttaatgcacatgaatgagcaaatcaaaaaagggtcatctgagactggtgaagacgtagccaagccaggcccgtcaagttccagcaagaaggccagttaa

SEQ ID NO: 204685 - DNA, 321 bp, Klebsiella oxytoca
atggtcggtggtattttaattcacatagcgtttgttgtttgttctttttgggttttcttcgattgtgtgaaacataaaatcggggtttatgttcccgttactggagtggataaggggtatcgaaaaggtttttcgcctgttatctgggctatgggttgttttctggtgattccatttctcatatatatgtttatgagagcgtcgttgattaaagctgcaactacgtatccagtggaaacagataaaagtagcaactttatgatactggctcttctggtgtttgcactttccctatattcatttaaagattttttattttaa

SEQ ID NO: 204686 - DNA, 552 bp, Klebsiella oxytoca; identical to SEQ ID NO: 185357

SEQ ID NO: 204687 - DNA, 678 bp, Klebsiella oxytoca
gtggatgcccgccagctggcgtatttttgccgggagaaacgcccggcgatatgggaagcgccacatccggttgagcgtgccctgcgggcgctggttctgcggcatcaggcgctgacagagatgcatgttcaggaacagaaccggcgtgaaagcgcgcgtgatgttcagttgccgagcatagacatgcatctgctgtggctggatacggaactgaaacgccttgaaaagcagataaaagacctgacggatgatgacccggatatgaaacaccggcgcaaactgctggacagtatcccgggcattggcccgaaaacttcagcggtgctgctggcttatgtggggctgaaagagaggttcagggaggcgaggcagttcgcggcgtatgcgggtctgacgccccggcaacatgaatcaggcagcagtatcaggcgggtaagcaggatgagtaaaatgggccatgtatcgctgcgtcgggcgttgtatatgccggcgatggtgacgctgtataaaacagaatggggcagggagttcagggaacgactggagaagaacggaaaaaatgcaaagctgataatcggggcgatgatgaggaagctggcgcaggtcgcatacggcgtcctgaaatcaggacgcccgttcgatgccacactgcatacgaaaaatgcttgcatggcataa

SEQ ID NO: 204688 - DNA, 387 bp, Klebsiella oxytoca
atgagcgaagcggacgccaaagatctggggattgaggataacgactggatcgaggtgttcaacagcaacggcgcgctgaccgcccgcgcggtggtcagccagcgcgtgccggccgggatgaccatgatgtaccacgcccaggagcgtatcgtaaacctgccgggttccgagatcaccgagcagcgcggcgggatccacaactccgtgacccgtattacgccgaagccgacccatatgatcggcggctatgcccagctggcctacggctttaactactacggcacggtagggtcgaaccgcgatgagttcgtggtggtacgtaagatgaagaatattaactggttagatggcgaaggtaacgaccaggtacaggagagcgtaaaatga

SEQ ID NO: 204689 - DNA, 2034 bp, Klebsiella oxytoca
atgactcaatataatacgggcaatgccgtcccgtcatcagacatgcctgatgcatgggataataacacgacaattgatatttttgttaactcacccgatttgagtgtaacaacgagaaccggaattgagcgcgacactatggctggtatagagcaaaagtctgccgatcagcgcgagcaaatagcagcagatggtgctgctgttgtagaggcaacgcggcagaacctaatacctctcagccggcagtatatgacattagccgccgctcaggctgatattgctaataccccgccggggtcagcgacatatgtcaggagtgcagatggaagctctcttgccgacgagctcatcaataacggcggtacgctggaagccaccggcagggtaatgccttctcaggggtatgttgacagagtaatcaacacctcaacgggcaatggaaatatcactgtcacctttgactctgatggtaacgcagtagacgtccgtgatgattttggcggcgtaaatatccccggcattcctacgcccgtacaggacatattgcagcaggttaagaaaaacgcatcaccgtaccttaacaccttgactgacgccgaaaatgctgcctatgcctccgttgatgagtatggcggtattcatcttcctagtatgcctgaaagtatccagtccatgctcactggcatgaagcaaaatgtagaccgcttaagaaagcgcggcatggtgctggatgccagagattgtgggttgaatgtgaaaaccggagaagatgcccagcgggcaatacagcgggggtatgactggctttcaggtaatggcggcggcactctttatatcccccagggatattttaaactgtcaaaacctatcaccccgcgctctggtgtttccctggtgggggccgggcagaatgccacagtccttcttccttttgggtacctggcagcgatcacttatcagggggcggaaacatatatcgaaaacctgcagttctctgacttcaccatcgatggtgaaaaccagcaattacatcctgtaaatggatatatccctgatattaaggggatttaccttcagtattaccgtaataccaattttgatcgcattaccatccgtaacaccggggcgaccgggctgggagtggatatgccggaccgggtatgtataactcgttgcctggtagagaactgcggaagactggcggaacggggcgcactgggagcctccggatttggtcttgggacgagttttctcagcagtgaaccactttttgccagccaacttataggccgtaataataccaactttggcattttctttgaaccacaacgaggaacaggcacggcgcaggatgcgatcgtcactgacagcagcttctacggcaattatgctggtctggctgattgcggaattgaaggtctcattgcagacaatcttaaccttcggaataaccagtatgggtttgtcgctgagcctggcaccaataatggtggtaatgctggtttccgtggcaagttaaataattgcatcatcaaagccaatacctcgcatggtatgtattttaacaccgggaaaggtgacaccattattggcgaatatgcgataacagacacacacatctcagaaaatggcgaggacggaatcaacatccggtatgccactgaggttacgaactcaagtctgcgagtatctgattgcgatataaacagcaacgggcgacatggtgttaacttcgaagcgggcccagtggtaaatgctgacgttatcaataacagaatctggaataacggtaagactacggccgggaatggagtaaatagcagtcgggcgatgactaaatgcaggatatctaataacagcatacgagatattcaggcaacagctactcagcaatatcctgtgtcaatttctggaaatttaactgacaccgacatttcattcaaccattgtgttggaaatgctcaaaactccttgaaccttaccggcacacaaactcgcgtcaccacaattaacaatcctgggattagctcatga

SEQ ID NO: 204690 - DNA, 345 bp, Klebsiella oxytoca
atgagagcgtgggtaatctcgttgttggtaatagcttcatttgtggcgactgccgacaccattactatgcagtgtggtggtttccgaatggaggctatccctgattctatgttcaagattaatggtcaaactgtcacatcccagaaaattaaaattctcgggaatggggatggaatgcgcgtagatatggggctgatgcccgccaaagacgggaataactacgggtttcagtacatccgccgtccaggtagtgaatctcgcttccttaatgtccagctactgcaaaacaacatggatgcgccgaagatcatcggttccttcccctgcaaaaaggtctctggctaa

SEQ ID NO: 204691 - DNA, 201 bp, Klebsiella oxytoca
atgcgttatctcgtatcgaaaaaagccaccctccggtttgctgatggctcatcggtagagctggttccggggattcaggaataccctgacgcggtggcggcgcactgggcttttgcgcattatgccagccccattgattctgctgagcagtccgatgcaaaggggaaaggcaatgccaaaaaacagcaggcttccgactaa

SEQ ID NO: 204692 - DNA, 948 bp, Klebsiella oxytoca
atgtttactattgataaagccaccacagacgcggctggcgtattcctggtaggcgaacttgaacgccttgaccagaccttaaacctgccgctggtttcgtataaatggtcacgtgatatgccgctgcgcagtgacgtgtcgatcgctgacgaaatctcttctttcaccaacacggattttgctgctgctggtggcgttaacccgaacggtaaaaactggatcggcaaaaactccaccgctattcctggtgctaacctgctgattgagcgtaccgctcagccgctggagctctggggtatggagcttggctggacactgccggagctggcatccgctatgaaagcaggtcgcccggtcgacgcccagaaatacgacggcatgcagatgaagtggaatatggatgtggatgagcaggtttatatcggtgatgccgataaaaacatgcctggcatgctgaacctgccttccgtcacgccgatcgctgcctctgctgcgtggactgccaccactgaccctgacgtcatcgttcaggatattaacctggttctcagcgctgcatgggtttcctcaggttatgccatgtgcccgcgtaaaatcggcctggctccggagttgttcggcctgctggcgagtaagaaagtctcctctgccggtaacatctccgttctggaatacgtgaagatcaacactatcgcgttccaggaaaacggcgaaccgctggagatcgtctccatgaaatgggcgtccggccgtggtgctggcggtgcgcatcgcatcgttgcatacacccaggaagagaagtacatccgcttcccgctggtgccgctgctgagcactccgctggagtatcgcggcatctaccagctgacgacctactacggacgtctgggtcaggtagaaaccccgtacgcgaacaccatcgcttacctcgacgttccggcgtcctga

SEQ ID NO: 204693 - DNA, 519 bp, Klebsiella oxytoca
atggctggaaacgcttatctgttccgtatgccccttggcatcagcggggcgatcactcgcctgcgcgacctgaccactgagccggcaacgctggacccggctaaggtctttacgaagtatggactggctgcgaagtatgacggcgagaaactggtcccgctggaagatggcgataccgtcgatctggttgtcgggttcctggtccgtccatacccgacgcactctcctgaagaccgcgagttcctcggaatcagcgttggtacgggggcggatgtcctgaaacgcggttacttctcgactgctgtaccgtctgctcaggcgtccgccgcggttaaaaacggcaaggtctatgtccgcgtagctggcgccactgccacaagcccgctgggctctctggtgctgaccccggatgccaccgccgctaacactccggaactgaccattgcgaaagtaatgggccctggcgataacgctgcgggtacgggtctgggtcacgtcgaaatcgcttacaacatctaa

SEQ ID NO: 204694 - DNA, 471 bp, Klebsiella oxytoca
atgattggcgcgctggttaagcgttactggttacagctgctggtgctggtgttaatcggcgtgctggcgctcctcgtgaaccactaccgcgacaatgccatcacctacaaagaccagcgcgataaggcgactcgtaaactcagcctggcaaacgccaccatcaaagacatgcagacccgccagcgcgatgtcgctgcactggatgccaaatacaccggagaactggctgatgcgaaagaaaccattgagcgtctgcatagcgatgtcattgctggccgtaagcggctgcagctcaacgcaaactgtcccacgaacggagcgaccagcgccggcggcatgggcgatgcttccggcccccgacttactgactccgctgaacgggattatttcaccctcagagagcgtatcgtcacagtgacgaagcaggtcggctatctgcaggactacatcaaagagcagtgtcttaagtga

SEQ ID NO: 204695 - DNA, 441 bp, Klebsiella oxytoca
atgcaaatcagtgataaaggcattgccctgatcaagcaattcgaaggctgcaaactcaccgcgtaccaggacagcgtcggagtgtggacgattggctatggctggactcagccggtcgaaggcaaaccaatccgcgctgggatgacaattaagcaggaaacggcagaacgtctgctgaagacaggactggttagctacgaaagcgacgtctcgcgcctggtcaaagttggcctgaatcaggggcaattcgatgctctggtgtcgttcacgtacaacctcggcgccaggtcattgtcgacatcgactctcctgcgcaaacttaacgccggtgattacgctggcgctgccgatgagttcctgcgctggaataaagctggtggcaaggtcctgaatgggctgacccgtcgccgggaggcagagcgggctctgttcctgtcatga

SEQ ID NO: 204696 - DNA, 342 bp, Klebsiella oxytoca
atgaaaatgcataacgatccccactcctggacggagtttatcgaactactccacagttggtggcgtggcgaaacgccgatgggtgccgtattgctatcggttgtcatggccgccatgcgaatcgcttacggcggtggcggctggaagaaaatgctccttgagggggcaatctgtggggctctgacccttactgctgtgtcagctcttgattactttaaccttccacagtctctgtcgatagctatcggcggcgcgctagggtttgttggcgtagagcaggttaaggttatggcttcccgggtgtttaattctcgctttggaggcggtgatgcaaatcagtga

SEQ ID NO: 204697 - DNA, 336 bp, Klebsiella oxytoca
gtgaaaacaaatctgattgaaacgcgtcgccgccacctcgttcgggcaaagctggattcaatgatgagaagaacaggaagccatttccagatagtcaaactggatgatggttcgaatttacctgtggagcttgacgaagatattttgacgaaggcactgattaaactttttgaagcgatgatttatgacacccacaaacgcgagcaggcagaaaatttaatttctgaacattattcgaattgcatgggtgtgaataagttaacacctgatggtgtggactttatgaatgcgctgatcgcaacactggctgaacagtcattaaaagccgagggctaa

SEQ ID NO: 204698 - DNA, 189 bp, Klebsiella oxytoca
atgagtgcctatatccgcatcgttctggctttggtgatagccgccagcgtttacgggttatttgtaccaatcctcatttcaatgaaggacacggtagccgtcgcctccggcgttgcactggcgtttctgaccccgccgtgcatctacgcaatttttaagggtctcgttattcccaaggaaaagaaatga

SEQ ID NO: 204699 - DNA, 588 bp, Klebsiella oxytoca
atggaagcattattcccgacggatattttacgtgctgccctctactgcacagcaaaaccggatgataagcggacatacctgcagggggtatacatcacgccgacgcacatcagggccactaatggttcggcattagtggcaatggagcacggggctgataccactattgatgctgtgttcattgtgcgcggggatatcccggaagaatcagaaggcgtgctctttaccctgcacgacgatgggtgggtggctattcatatggatgaagacggcgaaccgttcgcttccaacgtattgcagaagatcgattgcgaatacccggattttagcaaggtactgcctgaaaaagcagagccatgcaaagaattcccgttgttctcagccaggacgcttgcgctgccgtacgaaatgtttaagagcaatttcggcccggttgtgtttaagccctacggtccgacgtccccctgtgaagtattgcttgacccggttacccgccaccttttcggtaatccgttcatggtgattatgccgctgcaggaagatgcattcgaaatgttagaagaggttctggatgaaaatcgactttaa

SEQ ID NO: 204700 - DNA, 225 bp, Klebsiella oxytoca
atgaaaatcgactttaaagattatggcgccgtggccacggtgacgatcaccagcactattttcgagtttcgtaaacataaccgggttgtcgacaccaccctgtttatggttccgggcgtggtcagtgaacggcgcggtagctttttcatgaagacgcacatctctggcaaaacccgtgatgcgctgcgggcctataaaaccgtaaagcgggaggccaaacgatga

SEQ ID NO: 204701 - DNA, 303 bp, Klebsiella oxytoca
atgaccaggttaactctcgtcgttgagtttgaggatggcaaagcgccttcggtacatggaagcatggaggtatttggcggaaaggttgtcgctgtcgcgtttcgggatgctttagaagaaaacggaaacggtgtcactgctggtaaaccgttaatcatcaccctgccaaactatccagaacttggatcacatactgagtggtaccagggatttaagtctggatctgaagggatgcatgaggattgccggagagcagttgtaagctgctgcgccagggcaggtatcgacgtggaggtgaaatga

SEQ ID NO: 204702 - DNA, 354 bp, Klebsiella oxytoca
atgatggatcgccctcacatcaacactgattcactgagcaccatcagcgaatgccttgagcaactggcactggctgaaggaagtatcatcgcaatcgatggtcagcttctcagaacggatgccgatccccagtggcgcaagcgggcagaggtagcccgcaggacggttcatcagaagaagcgtctcatcatggctcggctggcgattctgcgacagcaggaaaaggagcgcaatgtacgacagcatcagcagcacaatgattatctgattgcagagctgaggaagattgtcacgccatcctctttcatccgctgcgctcgtagggcaacagagaaaatggagaccgaacaatga

SEQ ID NO: 204703 - DNA, 327 bp, Klebsiella oxytoca
atgagtgactccaatatgttcgaactggtgaagctgattaaggcagccaaaggcgaaccgtcggcaatgacagacgtcatctgggaggctggctatcgtcaaccagaacgtaccgctgaacaggcggcacaaattaccatcgatacattcttctactgcgaaagcttcagcatgacttcaagcttctggccacgcagctatgacagcgttctgcagaatgagctgatgaaggcggtgattggcgaggacggagagcttgacggcgccgatgcgaccaatattgcaagaagcgtgatcgccgcgggtttcagcaaggaggatgcctga

SEQ ID NO: 204704 - DNA, 504 bp, Klebsiella oxytoca; identical to SEQ ID NO: 185467

SEQ ID NO: 204705 - DNA, 2058 bp, Klebsiella oxytoca; identical to SEQ ID NO: 32296

SEQ ID NO: 204706 - DNA, 651 bp, Klebsiella oxytoca; identical to SEQ ID NO: 102213

SEQ ID NO: 204707 - DNA, 891 bp, Klebsiella oxytoca
atgacgcagcaagccccccaaattcccgccgacgtgcgcgaacgcatcattgccgccgccgccgatcttttcgagcagtcgggccgcgagacgatgcccacggtcgatgccgtgcgccgtgccgcccgcgtggacatgaacgccgccagtgccgtgatgaaggaatggcgcagggcgcagacggcccaggccgcgccggtggccgtagccgtgccggaatccgtgcagcaggccagcagcgccgccgtggcgacgatctggcagcaggcccaggagctggcgaacgaatccctgcgcagcgcacaggccgcatgggaaaccgagcgggcagagcaagacgccatgcggcaagagctggccgaggctttcgagcgtcaggccggcgagctggaagccttgcaatcccgcctggcgtccatcgaggccgccgaagcgaccgcacgcggcgaagctaccgagctgcgcggccaactggccgccgcccaggagcaggcgcacacggccgaggcccgcgcccaggagatcgagcgccgcgccggtgagctacgcacggagctggacagggcgcaccagaccagccaggccgccgccgcccagctcgaccaggtgcgcggcgaactggcgaaggtgcaggccaaggccgaagccgaacaggaagcgcaccaggaacaacgcaaggccgcagcaaccgaagcgcaccgcatggccgaacgcctcaccgctgcccaggccgaacgcgatcaggccacgaaagccgccggccaggcccgcgaggaagccgcacgcatggcagggcaaatcgacacgctcaaagagcaatccgccgcgctgctggcccgtatcacgccagccgaagccaagccgaccaggaagaagcccggcggcgagtga

SEQ ID NO: 204708 - DNA, 393 bp, Klebsiella oxytoca
atggcgttcatcatcgcggcggttctcggtgtcatcgccctggcgtggttcctgcggcggctgttccctgccctgtttgcggcggtgttcgtcctgttcgcgccggtatggctggtcggcggtgcgctgctcgatctgctgcgccggccgctggccttcctgcggccggtcggcctcgccctggcccgcctggtcggcttcgtcctggtgctgccgctgctgcccttcatcttcgcctggtcgttcttcgcggaactgtggcgacagttccggccaaaggccagcccggccccggccggggtcaagccgcccacgccgatgcaggccgccacaaggcgcacggcggacgtgatcgacctggcggcattccgccagcggcaggaaaaagaataa

SEQ ID NO: 204709 - DNA, 2526 bp, Klebsiella oxytoca
atgatggacgttagagattttttggcgagattgtgggccgctgtcgtagcggtattttttggggcgttcgtgctgtcgttggcgaacacggcgcacgcccgcgttttccctgaatgcaacccggcggcagaggccgcgaagttctacggcgcggaagattcggatgcctgggtgaagcgcgtttgtgatgcgcaagaggcggcattccagaagtgggaaaacagcctgcaagccctggacgttgggcagcaggatttggcgatggcgacgaacgccgggaattggcaagcctaccgggacaagtgggccgaattgctgccggtgttgaaggaactggaagccgctgcggtggcgaaccggaacgcgccaggcgcggcaaacatccttagtctgtatcgcaacgatttgggcctgttcttgcagaatgcgggccttgcctcggcgggcagcctggacgatttcagcgcccggattctggcgggcctggacggcgaacggccagcggcggcggcaacggctggcgtcaatgtcgtgcagcaatccgtgacgcgaggcgttgagttcggcaagggcatcgggacggcacaagcggaaacgattcttgcggagtatcgcgcccaagttcagcagcgcggcgcggaacgcatggaacagctcggcggctcgaccgtgagcggctatttcggcggtttcggcgagcgcatcaaggcggctttcggtggctggttgttctacctggtcacggtctgctttgtcggcgcgtggctggcgcacaagcgacggcagaaccctgtgacggtcggcacggccgttggtctggccttcctcgttccatcggtcggcatgttgcttctgttcgtgttcgcgccattcattccgggctggttcatcctcgccgcgacggtcgccggaacagtggcaacgtatctgaacgcgggccgggtgttcggctggctcgcgggcctggtcggcgcggagtctccgacaggaaagcggctgcgcatcctcggcgcaacgattgaaaacctgcgcggccaggtgcaaccgtccgggccagttgcggccgccggtgcggcggtcgcggcggtcgataacagcagcacgcatccgctgggttcgcacggctcggcccgttggggaacggtcgatgaaatccgccagggcggccacctggtcgcgcctggtaagccgggcggcttcgcccttggccgggtgtcggatgcgcccgccggcctcgatcagcgtttccgctttaccggccatgtcgtgaccgtggccccgaccggctccggcaagggcattggcgcggtgattccgaacctcctggactatcccggatcggccctggttctcgacgtgaagggcgaaaacgcggccgtgacggctcgcgcccgccgggcgctcggccaggccgtgcatgtggtcgatccgttcgcggtcaatggcgacggcgcggccgctttcaacgtcctggatcgcctggacgtgtggaacccggattgtgtgagcgaatccgccacgctggccgattgcctagtgatcggcagcgagaaagccgaatccaagttcttcgatgagtcggctaaaaacctacttcaaggactgatgcttcacgttgttagcctggatgagccggaacggcggaacctgggcgagctgcgccgcttgctgaccacgggtgaaggcgagtttttcgacctcctgggcatgatggccgccgacgaaacggccgccttcggcatcccggccagggccgcgaataccatcatgggcatggccgacaaggcgcggggagacgtgatttcaacggcccgcacgcataccgccttcttggacgatccgcgcattgcagcggcgctatcgcgctccgacttcgacctgtccgcgatcaagtccgaattgatgacggtgttcctggtcatgcccgccaaccgcatcggcccaaatgcgcgtttcctgcgcttgtttgtcgggtcgatcattgccgcgatcacgtccagtaacgtgcagccggcgcaccgggtcgcgttcctgctcgatgagttcggccagctcggctacatgaagcagatcgaggacgccgtttcactgctgcgcggctacggcctggccttctgggtgttcattcaagacctgtcgcagctcaaaggcacctatcccaagtggcagaccttcctggcgaacagcgccaaaagcttctttggcactgacgattacgacacggccaaatacatcagcgacagcctgggcaaagccacgattgagtttgagacggaaaacaccggcaagaacagcggcagcggcctatcaggcggcggcggctcgatgaaccggggcaagagcaccggcacaagccagcaattcaccgggcgcgaactgctgacgccggatgaagtcatgcgcctggggccggagcatccgattgtcctggtgcgcggggaacgcccctacctgctcgaccggctgaactacctggccgatgccgaatatgccgggctgttcgacgcgaatccctaccatagttga

SEQ ID NO: 204710 - DNA, 222 bp, Klebsiella oxytoca
atgaacgccaggagagaagatacccgccggaaaatccagctcggcggcttggtcataaagtccggcatggcgggctatccggcgtctgtgattttgggcgctttgaccctcgcggccggtgcgctaaatgggccaaacgctgacgctacaaaagcacgctttgaggcggcaggcgatgaggctttttccgatgatggagaggacggcggcaaccgttcctag

SEQ ID NO: 204711 - DNA, 252 bp, Klebsiella oxytoca
atggcacgaaagacgttatccgaacgcaaggccgacaagctggccgaactgaaccgcatcaaggcagaactggccgaattggaaagcaaggccgctgaacgcattggtaagattgcccttgccgctggcctcggcgatctcgacatagacgacgcttcattgcggaaggagtttgaggctgtcgcctcgaaatttcgcaaaagcgaaggcaagcaagctgccccgatggcggcaacgaatagcgcagattga

SEQ ID NO: 204712 - DNA, 3351 bp, Klebsiella oxytoca
atggcgatctaccacttgaacacgcacacgataggacgggcggccgggcatagcgccgtggccgctgccgcctatcgttccgcgtcgtcgctggtagatgagcgcaccggagaagtgttcgatttcacccgcaaaggcggcgtgttgtcgtccgagatagtcacgcccgcaggcgtgccggttcccgagcgtgccgccttgtggaatgccgccgagaccgccgagaagcgaaaagatgcgcgagtggcccgagagtggcgggcggccctgccgcatgagctgaacgaagccgaccgtaaagagctggcaacgcgcatggggcaggctatcgcagaccgctacggcgtggccgtggatgtgtgcattcacgcaccagacaaggagggcgacgaccggaattttcacgttcatatgctggcgaccacgcgcaccattcaggccgatggaacgctaggcgcgaaggccgtcattgagctggcgaacaaagacaggcagaaagcgggcattcctggcacaagccagggcgacatcatcgagattcgccagcagtgggccgagctaacaaacgaggcgctagagcgggccggaatcagcgcccgcgtagatcatcgcagctatgcagatcagggcgtagaactcacaccaaccaagcacatcggcagcgatgccgtggcgatggacaggcgcggcctggaggccgaccgcatcgacattcacaacgccgaccggcaggagcaggcgcggcagattgtcgagcggccggagatcatcctagacaagctcacggccacgcaagcggtattcacgcgccgcgatattgccgcagagctgaaccgctacattgacgatgccgaccagttccagggcttgcttgccaggctggaaaaatcgccgcttctggtcgagatggaaccggccaacgggcgcgacccggcgaagttctctacccgcgaaatgatcgacaccgagcgcggcatggtggacagtgccgagcgcctggcgagaaccggcaggcatggcgtttccggccccatcacgaacgcggcgattgacggcgcaggcaccctatcggcagagcagcaaaacgccgtccggcacgttctcaagccgggcagcctggccgtggtcatcggcgacgccggcacaggcaaatcgttctcgatgaaggttgcacgcgaggcatggcaagcgcagggcttcaacgtgcgcggcgcggccctggcgggcaaggcggccgacgaattgcaggcgggtagcggcatcgacagccgcacgctggcatcccttgaatttgcctggaagaacggaaaagacaaactcacttcccgcgatgttctggtgatcgacgaagcgggcatgatcggcagccgccagcttggccgcgtgctgaaagccgccgagcaggccggggcaaaagtcgtcctgctgggcgacgacaagcagcttgccgccatagaggcgggcgcggctttccggggcgtggtgcagcatgtcggcgcggcagaaatcaccgaggttcgacgccagaaagaggcatgggcgcgtgccgccggccaggagcttgcgcgcggttccgttgccgatggcttggcggcctatgccgagcgcggccacgtcaaaatccacgacagccgggacgccgcccgcgacagcctggcggccgcttatgtcggcgaccagggcaagggtagccagatcatccttgcgcacagcaataaggacgtgcaggcgctcaatgaagccgtgcgcgaggcccgcaaggaacgcggagagctgcgcggcacggcccgctttatgaccgagcgtggcggccgggaatttgccccaggcgaccgcatcgtgttcctgaaaaacgaccgcgaccttggcgttaagaacggcactcttggcaccgtcgagcgtgccgaagatggaagcctggccgtgcgcctggacagcggcgaagcccgccggttccaggccgcgcaatatgccgccgtcgatcatggttatgccgtcacgattcacaaagcccagggcgttaccgtcgatagggcttacctgctggcgacccctggcatggataggagccttgcctatgtcggcatgacccggcaccgcgaggcggcgaccctgtttgcaggagccgacgacttcacagaccgccgcgccggccgcctggtcgatcatggcgcagcgccctacgagaacaagccggagaaccgggccagctactttgccactctggaaaacgacaacggcgaacggcacaccatttggggcgtcgatcttgaacgcgccattgcggccagcggcgcgaagcgaggcgaccgtatcggcctggaacatggcggctctgaaaccgtgcgcctgccagacggcaccacggccgagcgcaacacctggcacgttcgcggcgcggccgagctggccgccggcaagctggcccaggtgctaggccgcgagcgtccgaaggaaagcactttggactttgccgaccggcgcggctttgacggtgaaagcgtggtgcgccgctggctggaacgtgggcgggcgaaggtggccgagctggccgggaagatgcgcgacggcctgcgccgcaacctggaacgccacggccgccccgacctcatgcccgcgaccgacattgctggcacgccaaccgtgcagcggccgcagcagaacgagcgcacgccagaggacgagaagaagcgccgggcggccgagatcgcggcgaagttccggcagcaggtcagcgaggaacgcggcgagcaggcagcgccgcagcagcggccccaggccgagcgcccggcacccgacccgctggccggattccgcgccggtgtcgagcgtgccgaggcggcaggcggcggcctggccctggacgtggcgaaggcacagcttgccgtcgcccaggagttccacgcggccgggaaagacccccggcaccattcggcggccatcatgcaggaaggccagcagcgggcctttgcgggcctggcgcagccgtcccaggccaaggccgagccggagcgcctggcggccgtccaggtcagcgaacaagaccgcaagcgggcagagatgaatgcacgccaagaagtcagccggttcaagacgctggcagcaggccgccgcaacggcattgccggttacaccgaccgcagcccgtcgaagtggcaggcattgccgggcgagctgcgcgagcgcatcgagcggttcaatgccatgccgaaagagcgtcaggccgtcgagctggacaagatgcagcgcgagcttgccgacaggtatgcacgcaatccgcaggaaatcacgcgcagccgacagcagcagcgtgaacaggagcgcggccgcgatggcgggcgcgggtattga

SEQ ID NO: 204713 - DNA, 390 bp, Klebsiella oxytoca
atgagcaccgaaccgacgaacgaagaacttgccaagagctatgcaacgaagatcgagcaggcccaggagcgccgcgaggcgaaagaccaggagcggctagagcggcacggccaggcggccgcgctggcatcgcagaacatcgaggccgagcaaccgcaggccaagcaggcccagggcttcgagctggacgcgcagaaccaagacagcgcagagcagcgcatcgaccgcaacgagatcaacggccagcaggcaaagacgctggcaaaggaattgaaccgcgacaacgagagcggcgaccaggtgaagcaagccagggcgcgggaaatcgccgagcggttcaaggagaaggcggcacgcgaccgggagcagtcccgcagtttcagccgctaa

SEQ ID NO: 204714 - DNA, 219 bp, Klebsiella oxytoca
atggctacttccaatgttaccggccgggcagaacccggtatatcgaaatattgcatcaccttcggcgtatcgctggccgcgctcatcctggccggcggcgtgctggtcttttcctactggcagcacgtcgagctgctgcatgagggcgaccgcgtaggcacgcgcctggaacgcttgggcctgatcgaccgggagggcgcacagcatgagccgcgctaa

SEQ ID NO: 204715 - DNA, 936 bp, Klebsiella oxytoca
atgagccgcgctaaagcctggcggcgtgccgcccttgcaacctacatcgccgccggcgctgcattgaccctggcgggctacaccgtggcgaccacagccgcgaacgccaacaccctgcgcgacacgcgggagcgcatcgaggacttccagcgcgagcaaaccgccattgccgagaactcgataagcgcggccagtgtgcggcgcggcaccctgccccccgacacccggccgcctgtcgcgccggactggcccgccctggccgagcgcgccatgccatccgtggtggccctggcgggcatcgacaagccctatggcaccggccagaacaatcacgcctggcgtattcctggcgttcaacagaacgcggctacggccgccctcacccgcattcgcgcttggcatcgggattggccgaaagaggatgccaagcggcggcagcgcatcatctgcggcggcgtggccgtcgaaggaaacaaggtgctgaccgtggcccattgtgtcgaaggccaggaagcattgcgcgtgcgcaccgctgccggcgagtggcgcgaggcccgcgtgatcggcgcggacatttcccgcgacgtggcgctgatcgagatcgagggcgaccccctgcccccgattccggttgctggcgtcatgccccgccaggggcaggacgtgatggcgatcggttcgccaggcggctacggcttcgccgtgggcgtgggcatcgtggcgtggtatggccgcgatgccgcgatgctttcccccgatgatttcatgctggtgacggcttcaatcatcggcggcaactcgggcggcgttgtcgtgaacaccaggggcgaagccgtttcactggtgagctatggctatggcatctacacgcagaccgtgccgatagaccgcgcccaggcagttgcggccgagatcgagcgccgcgtcgtgcggtaa

SEQ ID NO: 204716 - DNA, 339 bp, Klebsiella oxytoca
atgaaacttcgcaattccttcccgctggcggccgtggccgcccttctgatcgcttcgaccgcgcacgccggccaggatgccgacgcggcccgcttttcgatcatggcccctgtccaggcggcttatgacgcctaccaggtcacggcgagccgggcgcagaacacaatggacagcatcgaggccgagctacgcgaacccggcttgtcggccgagcggcgcgagctgctggcggtgtcgcttgccacccttcgcgcccgcgaggcggccgcattggagaggctgcacgctgaatcagccttggcacagttgaagatggcagactggaacgcgagccggtaa

SEQ ID NO: 204717 - DNA, 207 bp, Klebsiella oxytoca
atgagccgcccgcgctacacgctcgatgagctgctggccgaatccgactattcgcagccgctaccgcccgaagaacgggaatgggtcgatgcgcccgccgttggccgcgagtggccggcctgcgaaaccttggaaggcgaggggctggccaacatcgccagttccgacgatgacggccgcgacggtggatctcatcgccaggaatga

SEQ ID NO: 204718 - DNA, 180 bp, Klebsiella oxytoca
gtgatgcctaaccaggctgccaccatcagcgccgccgttcctgcggacgtgaaagccgaagctgccgccgtcgcggcagcgcacggcatgagcctggccggcctggtgcgcgagctggtggcccgcgtggccgcccgcgaagctgaaacgctggcctggctcgatgaggcccgccgatga

SEQ ID NO: 204719 - DNA, 1158 bp, Klebsiella oxytoca; identical to SEQ ID NO: 32311

SEQ ID NO: 204720 - DNA, 1578 bp, Klebsiella oxytoca
atgcaggtactggtcgcaatcggtggccacggccagcggcaattcgctggcctgcttgaggctggcgaatttcgcgggcggcaccaggtagtcctcgaagtccttgaactggcgcgagccttgcacccagatgtcgccggagcgcagcgcgttcttcagctccgacagcgcgcacagttcgtagtagcgccggtcgatgccggtgtcggtcatcaccagcttctgccagcgcggcttgatgaactcggtcggcgcgtcggtgggcaccttgcgggcgttgtcgctgttcatgctgcgcagcacctcgatggcgtcgagtacgtccttggcggcgggcgcggcccgcaacttgagcacgtcgagaaattccggcgcgtagcggcgcagcgtggcgtagctctcgccgatgcggtgcaggaaatcgaagtcctcgggttgcgcgagccgctgcgcttcggtgacgctctcggcgaaagcatcccaggacatgacggcctcgatggcggcgaacggatcgcggcccgcttgcttggcctcgatcagcgcctggccgatgcgcccgaacagccgcaccttggcattgatcgccttgccggatgcctggaactgctgctgatgcttgttcttggcggcattgaacagcttgcccaggatgcggtcatgcaggtcgatgatttcgtcggtgacggtggccatgccctcgatggcgagcgccaccagggtcgcgtaacgccgctgcggctcgaacttcgccaggtcggcgggcgtcatctggccgccctcgcgggcgatcttgagcagccggttctggtgaaccagccgctcgatgccggagggcaggtcgagcgcctgccacgccttgaggcgttcgatgtgttccagcatgtgccgcgagttcggtttgaccggggattgccgcagccaggccagccacgtcgtcttgccgttgtcgcggcgcttgagcagatcgtcgaggcgacggcgatgcacgtccgtcagcggctcagccaaggcgtcgtagagacgccggttggcgcgggtaatcgcttcggcgctcgcccgctcgacggcgttgagggcgggcacaatgaccgactgccgccgcaggtgctcgatcaaggctctggccagcacgatgcccttgtcggtttgcatggccagctcggtcagcaactggacagcctgccggtagtggccaatcgtgaacggctggaagccgaacaccgtttgcagctcgaccaggtgctcgcgtcgggtctgctcacgctgcccgtactcgtcccagctttcgatgccgaccttgagctggttggcgaccagtctcagcaatggcgggaacggtggctcatcagcgccaaggatgacgccgggaaagcgcaggtagcagagctgcaccgcgaagcccagccgattggccgggccgcgccgctgccggatgatggagaggtcgctttcgctgaacgtgtagtgacggatcaactcatccttggtgtccggcaacgccagcaggctttcgcgctcggcggcggagaggatcgaacggcggggcatgcggtttccttcttcttgaaaacgtag

SEQ ID NO: 204721 - DNA, 567 bp, Klebsiella oxytoca
atggcactgatcggctatgcgcgggtatcgacggcggaacaggacaccgccttgcagacggatgcgctacgcaaggcaggctgcgagcgcgttttcgaggacacggcttccggggccaaggccgaccgccccggcttggctgatgcgctggcctacctgcgcgacggcgacgtgctggccgtctggcggctggatcggctccggcgctctatgccgcacctaatcgaaacgataggcgcgctggaagcgcgaggcgtcggcttccgttctctgacggaagccatcgacaccaccacgccaggcgggcggctcatcttccacgtgttcggcgcgctgggccagttcgagcgcgacttgatccgcgagcgcaccaaggccgggttgactgccgccgccgctcgtgggaggaagggcgggcgaaagccggttgtcaccgccgacaagttgcagcgagcgcgggagcacatcgccaacgggcttaatgtccgagaggccgctacacggctcaaggtgagcaagacggccctgtacaccgcgctgcaatccaccagtgcagccgactcctga

SEQ ID NO: 204722 - DNA, 252 bp, Klebsiella oxytoca; identical to SEQ ID NO: 149248

SEQ ID NO: 204723 - DNA, 396 bp, Klebsiella oxytoca; identical to SEQ ID NO: 149247

SEQ ID NO: 204724 - DNA, 537 bp, Klebsiella oxytoca; identical to SEQ ID NO: 149246

SEQ ID NO: 204725 - DNA, 852 bp, Klebsiella oxytoca
atgaaagacaagagcgccgccgctggcctgctgctgggatatgcccgcgtcagcaccgacgaccaggacttgaccaaccaacgcgccgagctgcacgccgcaggctgcacgcgcatctttgccgagaagatcaccggcaccaggcgcgacaggcccgagctggcccgcgtgctcgatcacttgcgccctggcgatgttgtgactgtgaccaggcttgaccgcctggcccgcagcacccgcgacctgctggacattgccgagcgtatccaggcggtcggcgcgggtttgcgcagcctggccgagccgtgggccgacaccaccaccccggccggccgcatggttctgaccgtgtttgccggcatcgccgagttcgagcgttccctaatcatcgaccgcaccaggaacggccgggaagcggccaaggcccgaggcgtgaagttcggcccgcgccctaccctcaccccggcgcagatcgagcacgcccgcgagctgatcgaccgtgacggccggacggtgaaggaagcggccgagctgctggccgtgcatcgttcgaccctttaccgggcgctggcgcgtggcgaggaagtgacaaagaccgaggcccgccgacgtggtgcgttcgccgaggacgcattgagcgaagccgacgccctggcggccgtcgatgatgaacgccaggaagaaggccccgcgttcctcgatggcgacggcccggccgccgacctgccgccgccgccgtatcgaacgcagagcctgccgcaaatcctggcggccctccccgatgacgagctggcgagctggcccggtgagctggccgaccaggagcgggaacggcgtattgcggctaaatga

SEQ ID NO: 204726 - DNA, 222 bp, Klebsiella oxytoca
atgagcaaagcagcaaccacactcagcgccggccgcccgagcgcacgcacggacaaatccaaggccgccacgcttgccagcctggccgacgacgccagcatgaagcgggtcaattttgaactgtcggccgaccagcacaccaagctgaaaatctacgcaacccggcagggcaagaccatcaaggaactattgaccgagtatgtcgccagcctgccggattga

SEQ ID NO: 204727 - DNA, 1014 bp, Klebsiella oxytoca
atgacaaagaagcagcgagaagggcagggcgcgcagcagatcggcgagatcatgggcgacctactggcccaggcgcagatcaaagcggcgttgccgcccccaaagcgccaaaccaagaagatcacgccggccggcctcatcttgaccgagcgcgatcaaaagctgatcgaggccagcgcggagattgccactacccccccgagtggcgaggacatggctttcactcatgccgtgctgtgccaggttggtttgccccgcgccaaggtggaaggccgcgagttcatgcggcagtccggcgcggcttgggtcaatgtccaggccggctacctggacgaagggcatggcccggttctgcaacctatcccctatggcgtcatgccccggcttggcctggcgtgggtttccaccttcgccgtgcgcaacaaagagcgcgaaatccccatcggtgacagcgccgccgagttcctgcggctcatggggatggagagcgacggccgccgctatacgaccttgcggaagcagatgcacgccttggccgccgctcgcctgcaactcggattcaaagggcgtacctacaacggccagccagtgcagcagttcgatgcttgggtggcgaacaaggacacgcagcagcgcgccctatggcctggcgtcatgctgctgtcagaggactattacggctccctgatcgaaagcgccgtgccgctggacaaccgcgctttgcacgccctgaaaggttccgcactggcgttggacgtgtacgcctggctggcccatcggctgcaccgcatcgagggcagaggggtaacgctgcactggaagtcgctgcgcgagcagttcgcccaggaatacaagggcaaagacccggacaaggatttcaagaaggagtttttgccggtgctgcgcaaggtgctggccgtctatccgcaggccaaggtgaagcctgtcaccggcggcgtgctgctgatcggctcgccaccgcccattccctacaagggcggccccacggtttag

SEQ ID NO: 204728 - DNA, 681 bp, Klebsiella oxytoca; identical to SEQ ID NO: 30073

SEQ ID NO: 204729 - DNA, 1566 bp, Klebsiella oxytoca
atggctatttttcatcttgattttaaaattgtgaaacgaagtgagggcaaatcttccgttgcgaaagctgcctatcatgctcgtacacgtataacagatgaaagaacaggtgatacgtatgattatagccgccgtactgatttatatgggcatttcatcttagctcctgctaatgctccagaatatatcgtaaaagactctacagccttatggaatgaagttgaaagagtcgagcgtcaacaaaatggtcaaacagcccgttattttgacgttgccattcctgccgagttaaacaatgacgacaagaaaaaacttgtccttgagtattgccagaaaaatttcgttgataaaggcatgattgccgacatcgcttttcatgatcttgatagcgacaacccacatgctcacgttatgttgacattaaaaaccataggcccggaaggttttggcaaaaaggaaagaagctggaacgacagaaaaatgtctattttttggcgtgaatcatgggcatctatggctaacagctacctcgctgccgctggctcgtcagaacgtattgaccatcgttctcttcaggcccagcatgaagaggcattagaaaaagcggcggtagctttagataatgaagaaaaagcgttatggcttgccaaggccgctgaaacaaatcgccctgcgatgaaacgtatccacagtgccaaatggcgtagtaaggctgctcaggagcaaagagccgcagaacaggctgttcgtgatgctgctaaacaagaagctgttgaagtctacaaaacattcagtgaacttgaccttgaaattgttgttgatgtcagaagctttacgattacacatcttgctgaaccagaagagattgttttaccagaaacgcgatccagctcttcaaccgatgaagaacaaaatcaagaaaaacgtaatctctccgagatttcgtcagaaaaacatagacctttactggtagcaccagctactcatactcgtatgcgtggagtcaaatcttaccgtgataaaacaaaagtcagtaaggttgttgctggtattccgccatcaatcagtatttctgattctggtacaaatactattctgaaaacatccacctctcaaaacccaaacagggcatccagaagcgcccctgaccgtgcaagaaagcataagactactccacgtcaggataatatttttaaacgtttcacaactcttgtcatagattttttcaagcagaagttcgtatgggctaaaacagacaaaattaaagttgatattatcagtgaggaacatgataaacgtattgctgaaaactacgtctttgacgaggtattaggccgtcatgtttcacgtaatgaatatgaacaacgtgctaaattcaataatgatgaaaaacaaaaacaaactgagatctgcgccacgaaaccagcggcaggtgaaatttatcgtttcccaagtcgtgtgaaaaaatctgaacaacccagtaacacaccagactacatacctacactctcatctggtaagcgcaatgggccaaaattaagaccgccgggtttcccccaaaaataa

SEQ ID NO: 204730 - DNA, 240 bp, Klebsiella oxytoca
  misc_feature (26)..(35): n is a, c, g, or t
atgaaatcattttgcatgattgcaannnnnnnnnntcaggagagcaaaaggttactgactggttggaatcgtacttttgaagctaagggcttttatgtcaatccaacgtacttcgcttttagatacgcttttttgatccgtaatatcatctccatcataagacaaatcgattttatcggttcgacgcgatccttgacagccacttatttcaatttttgttataactgcaccttccagtaa

SEQ ID NO: 204731 - DNA, 651 bp, Klebsiella oxytoca; identical to SEQ ID NO: 150876

SEQ ID NO: 204732 - DNA, 492 bp, Klebsiella oxytoca; identical to SEQ ID NO: 142394

SEQ ID NO: 204733 - DNA, 516 bp, Klebsiella oxytoca
atgaaactcatgccttttaacttcgacaggatgcctgacggtcgggtattcatcagtaacctcgctggctttcatcattttgtaggtgagcaggaatttctcgatctggtaaacggtcatatcagtcaagaacagtcctcatcgcttgaaagcaaacttttcatttgcggagatgaatcctcctccgttaccccttatgcactaagttcggcttttgccaaacgactcatgaatgaactggcggtcaggccaatcttcatgattgtaccttctcttcgttgcgatcatacttgtaaatattgccaagtcagcagggcatcggtcactgctgatggatatgatctcaaccctaaactgataccgcaaattgtcagcaccataaagaaactaggtacacctccctacaagatagaagtacagggcggtgaaccacttcttaggttcgatcttgttcagtcaatctatcacgagtgtgatatttcattgggtagtgatgctttcgaaatggtgatgtag

SEQ ID NO: 204734 - DNA, 186 bp, Klebsiella oxytoca; identical to SEQ ID NO: 195819

SEQ ID NO: 204735 - DNA, 186 bp, Klebsiella oxytoca; identical to SEQ ID NO: 150912

SEQ ID NO: 204736 - DNA, 231 bp, Klebsiella oxytoca
atggacttctcccgccccggaaaaccaacggataacccgtttattgagtcatttaatggcagtctgcgggatgaatgcctgaacattcactggttcctgtcgctggaagatgcgcaggacaaactcgacaactggcgcagggaatataatcatgagagaacgcattcatcattaaatgacatgactccggctgaattcatccgaagcctccggaaagacgaggatctctga

SEQ ID NO: 204737 - DNA, 579 bp, Klebsiella oxytoca
atgacaacaacattctcccccgcgtttttacacgcactctctttcattcgcgcccgcgagggtgtttatgttaatgaccccaccgacaaaggcggcgaaaccaaatacggcatttctgataaacgcgacggtcttgccgatggcaaaaccgacgtagatggcgacggcaaacccgatacccgaattaaggacctgaccgaagaacaggccgggcagatctatttccgcgattactggtatccggcttactgctcacagtggcctgatggcatctccctttttgtgttcgattccgccgtccaacacaatcctaaaaaagcggtccagctcctgcaggatgcggtcggcgtcaccgctgatggcattatcggcccaaaaacccgcaccgcagtagcctctgcagatgctgaatggctcctgactcgctgcttcctgcgtcgctcccgctattacgccgacatcatcaaatcaaatgcctctcagggtaaatacctcaatggctggtttaaccgactggatttactggcgagcgcctgtcaggaggtcattggcggtcaggtctcggttccccggagctga

SEQ ID NO: 204738 - DNA, 387 bp, Klebsiella oxytoca; identical to SEQ ID NO: 204688

SEQ ID NO: 204739 - DNA, 2058 bp, Klebsiella oxytoca; identical to SEQ ID NO: 32296

SEQ ID NO: 204740 - DNA, 651 bp, Klebsiella oxytoca; identical to SEQ ID NO: 102213

SEQ ID NO: 204741 - DNA, 681 bp, Klebsiella oxytoca; identical to SEQ ID NO: 30073

SEQ ID NO: 204742 - DNA, 930 bp, Klebsiella oxytoca
  misc_feature (605)..(614): n is a, c, g, or t
atggacaggcgcggcctggaggccgaccgcatcgacattcacaacgccgaccggcaggagcaggcgcggcagattgtcgagcggccggagatcatcctagacaagctcacggccacgcaagcggtattcacgcgccgcgatattgccgcagagctgaaccgctacattgacgatgccgaccagttccagggcttgcttgccaggctggaaaaatcgccgcttctggtcgagatggaaccggccaacgggcgcgacccggcgaagttctctacccgcgaaatgatcgacaccgagcgcggcatggtggacagtgccgagcgcctggcgagaaccggcaggcatggcgtttccggccccatcacgaacgcggcgattgacggcgcaggcaccctatcggcagagcagcaaaacgccgtccggcacgttctcaagccgggcagcctggccgtggtcatcggcgacgccggcacaggcaaatcgttctcgatgaaggttgcacgcgaggcatggcaagcgcagggcttcaacgtgcgcggcgcggccctggcgggcaaggcggccgacgaattgcaggcgggtagcggcatcgacagccgcacgctggnnnnnnnnnngtgcagcatgtcggcgcggcagaaatcaccgaggttcgacgccagaaagaggcatgggcgcgtgccgccggccaggagcttgcgcgcggttccgttgccgatggcttggcggcctatgccgagcgcggccacgtcaaaatccacgacagccgggacgccgcccgcgacagcctggcggccgcttatgtcggcgaccagggcaagggtagccagatcatccttgcgcacagcaataaggacgtgcaggcgctcaatgaagccgtgcgcgaggcccgcaaggaacgcggagagctgcgcggcacggcccgctttatga

SEQ ID NO: 204743 - DNA, 321 bp, Klebsiella oxytoca
  misc_feature (292)..(301): n is a, c, g, or t
atgatcgaccaggcggccggcgcggcggtctgtgaagtcgtcggctcctgcaaacagggtcgccgcctcgcggtgccgggtcatgccgacataggcaaggctcctatccatgccaggggtcgccagcaggtaagccctatcgacggtaacgccctgggctttgtgaatcgtgacggcataaccatgatcgacggcggcatattgcgcggcctggaaccggcgggcttcgccgctgtccaggcgcacggccaggcttccatcttcggcacgctcgacggtgccaagagtgccnnnnnnnnnngccgccacgctcggtcataa

SEQ ID NO: 204744 - DNA, 195 bp, Klebsiella oxytoca
atgacaacgacgcttattaccctgatccgggcctatgaggacctgacgcatttaaacgcatcccaggcgcacttctacagcagccccgcctggcgcgaaggcccgcgacaggccattatcgacaggatcagcgtcagcgtaaaaacggttatgctgctgagcgacagcgcgattgatggcctgcgaaacggttga

SEQ ID NO: 204745 - DNA, 132 bp, Klebsiella oxytoca
atgttatttggccaatggttgggtcaacgtgaaattccggacccgtatcgtaagagcgaggaggctttttcctctgtgtatcaattgattgaacaagccggtttacgctgggttgaaaaattagtcgcataa

SEQ ID NO: 204746 - DNA, 216 bp, Klebsiella oxytoca
atgaaattagctttgatcggtactggcaacataccgctgatgcagtggatcctagatggcaagggcgatgatgcgattatcaacatgtcagcgctggcgcgtcggcttggttgtagtcgttccagcctacttgatcgcatccatacgcatggaattgacagcgctatcaggtactacctcagcgaacagcgacaacgaaaaatcaaaaccaaatga

SEQ ID NO: 204747 - DNA, 276 bp, Klebsiella oxytoca
atgccttcactgctcttagaatccctttttcccctggtgtttatcatgctgctcggatggctaagcggtaagctgggctatacccgccgcgaggatgcgtccgtactggccacggtggtcattcgtttcgcgcttcccttccatctttttatcggcgcactgaatactcatcccgataagataaaaaacttcacctttatggcggtgttagtcatcggtctgatgggggtcatatatcctcacgctcctgatctcacgctatgtttttcgtcatga

SEQ ID NO: 204748 - DNA, 1137 bp, Klebsiella oxytoca
atgaaaatttatcgtccactgtggaacgagggggctttactgtcccctcaacagttccagcagcaggctgactgggagtcttttcgcagcacaggcgttgcggctctctcttcgccgttttcatggggggttgagcgggttgaattcgatgagaggctgctgggctcgggtctgattcagatccctcaactgcggctctggctgcctgatggcacgctggtggatacggccgtcagcgatctgccgcctgaacctcgggaactggagttagcgcagcattcagatgcggtcatggtgatgattgcgctgccgctcatgcagcccgggctgaataatgtgcagcgggaatcggctatgaccgagcggccgctccgctaccgtgaggagtgggtgaatgttcaggatgcgtttggcagcgaggaggagtccgttgccgttgcccgctttaacctggcgatccgttttgaccatgaagataacgcgtcatggcagtgctgcgcgatcgcgcggttgatccgcgatcgacagggatggtgccaggatccgacatttattccacccctggcattgttctctgccagtccggtgatgcgtgaaagactggcgctactgaatcgtcagcttcgttcccgccgtcagcgtttgatgtccatgcgccgcgagagcaacgaacgcctggccgatttcgctgtggcggacgtctctcttttctggttgctcaatgcgcttaactcccatgcgcgcgtgctggtggagtttgaacgttctcctgcccgtcatccggagcaggtgtgggcagagctcgtccgtctggcgggcagcatgctgacgttctctctcgacagcgatctggatgccattcccgcctatgaccatgcagaacctgaaaaaacgtttcctccgctgtttgaactcatcactgctttgctggaggccagtttgccgtcccgagtggtcgcactggagatgtcccgaccggacgagcagacgtggaaagccgcgctgcacgacgctcgcctgcgcgaagacgccgatctctatctttctgtccggtctgatgttccggcctggcaggtagctgagaaattccctgcgttaacctgtacatcccgaccgataacaacaccgggaagctga

SEQ ID NO: 204749 - DNA, 828 bp, Klebsiella oxytoca
atgaaacttaacgattacgcaactatcatttcttgtattgcagcttcagcttcagctttggctgcaatttatgcgatcaatcaatcaacactgcagcgaaggttgtcatataaacctcaactacatataaaggattacgttgaaactatttacatgttaaatacaccttattttgatgatggcttaagccctcagaaacatattggccattacgatttaacactgataaacatcggaaacggagcagcccaaaatatagaatacaaatgggaatatgatttcaaactagcaatgaagaacaccacaaaactattcaacactttaaataagaaaaacattgcacagaatgaaaacaatcaaaactatgatttttattataaatttaaaacaaatgaaagtgatgagctcattgtatttaagaggtatgataactatatagagtacccaacaaaatacagctaccaattacaatacatactacctcagcaacataacccaaaaatagtaagcattaaattaccagcaattattaatagtattatttttaatattgtaaatttaaaaaatcaatcagataggaatacaaacttgataagcggcccaaaattaaccatttcataccaagattcaggtggtgcgcttattaaagaaagttttgaaagtaaattcatatttgaaccaaatcactcagatagaatgcatatcgagcgagaggtaaggatccagttcaagaaattggacagcagatggacaagacgtttacttcagagtgtacgcaaaagctacgtggattttataaatacacatgatttcaataaaaacagatag

SEQ ID NO: 204750 - DNA, 696 bp, Klebsiella oxytoca
atgagtaaagtaacttggaccgagcccaaagtattggtagataaattaaataatacatctatagaatgtcatgtttgtggccgtataacaaatcacaaatctttggctcaggtcagctttagtgagacctatcactctgaggatgaatatgaaaactcaatcacaggatataaaaccctcgaaattttacaatgccaaggctgcatggaaccaagtctaaaaactgaaacaagtaataccgaagatatggacttctcaacttatcaaccaaatataaaaattgattattaccccaagcgcaaggaattaactcaattcgaacattcatacagattacctactgcactctgtgacttatacagcgagacaattatcgctataaataataattgtctaaccatcgcagggatagggattcgtggtttaatcgaaactatttgcaaagaagaaaaaatagaagggaataatttattagaaaaaatcgataatctttttaccgaaggaaaaataagcagcgacggaaaaagtatacttcactcattacgaaaactatataataaatcagcgcatgactcatataaaccatcgcagcagcagcttcttgtttcattggacattttagaattactgatgaaacagatttatgtacactcatatgatgcaaaaattcattttagtgatgagaaaaacgtataa

SEQ ID NO: 204751 - DNA, 921 bp, Klebsiella oxytoca
gtgaatgctgtaaactgccaaggagtcatgggaaagggtattgctttggctttcaaagaaagctttcccaataatttcgaagtttacaaaagagcttgtggcactggtacaatgaaaattggacaggttttacttgttgaagaaaagggaaagataatcgtaaactttccgactaaggatagttggagaaaaaaatcaacttatgattttatctcgcaaggccttgaatctttaacaaagtccatagtcgaaagaaaaatcacatcaatatcaataccacctttagggtgtggtaacgggggcctcgcttggaataaagttgaagctcttattttgaaagcttttcaaggtttagataatgttgaggtggtaatttacccgcctgcaactaataatcaactgtcaaaaaataaaaatattattaatgctaaacatcttttggttcactatgcctatgggaaattaaaagttaagcaaaaatactccctttatacagttttttatatttgcgaatgtattgagaaagcaaatcttttcttattcgattttaaacatgggcgaccatattcttctgagttagaaaatgttatgaaggatatagcaaaccttaaagtcgagttgcaggacgattttgactcttttattgaagattatattaatactcatcaatccaaagagttacaaatcgagtttggtaagctaatttcaactttaaagccaagtatcagtttgctcaatgagctcaaaaataaggttgattatacagatagcgtacatgtaatcacgagaattgccaatgaaaaaaatcatggcttgcatattgatgatttcaaagaaaataaaaatattgtgcaacaattaattaaaaatggattagtaaccgaagatatctttaacgaactaaaaataaaaggaagttag

SEQ ID NO: 204752 - DNA, 582 bp, Klebsiella oxytoca
atgaacgaaaggaaaaaaatcgaagatcaggctcttctctatcatttaacatgtatggataatctccctaatattttagacacaggattaagatcccgtgcgtcagtaaaaggcgagtttgttgatgtggccgacggggaaataataacaggtcgcgaagctttaaatttgcaaacaatggttccctttcatttttttactaaaaatccatttgatggaagagttttgaaagaccataaagaaaaatcattttgcattatttcggttagacgaatatttgccagtaaaaatggatggaaaattattcctaaacatccattatccgccagttctgctgtcagcctcttagattatgaacaagggatgactcaaattaactgggagcttatgaatacaagggattataaaaatgcagaatgcaaatctgtatgtatggctgagtgtttatcaagtgtaacggtcgagccggaaaatttttgttgcatctatgtcaaaaatgacgacgaaaaaaaacatgttgaagacttgataaaaaaacaagggttaagtatatttgtaacagtcaactcttatatgttctaa

SEQ ID NO: 204753 - DNA, 486 bp, Klebsiella oxytoca
atgcttattaaacctgttttaattgatactaatctcctcctgctatatctagtaggtttgttctcggaaaaagctatttcacagtcaaaaagattgagtagctatagtatcgatgatttccgcttacttaaaaagtttcttgatggcttacctaaaatattaatcacaacgaacatagctacagaaatcagtaacttgattgattttaacggtgagtcattaaaaaatttctacgctatttttgatactttccttcagctaccgcaagtcgaagaaatacctttagaaagtaaattaatttcctcaagaaatgacttttcaatttatggtttgactgatgctggcattaatagtttagctaaaaaatatttaatacttactgatgattcaagattatacgcatattattgcgataatatctgtacttcacctgatccaaataccgaaattattaatttttatcatattatccaagcaagttggtaa

SEQ ID NO: 204754 - DNA, 279 bp, Klebsiella oxytoca
atgctttcaatgaaagaagcttacggtttcgttgcgcagcatatcaaagacttatatgaatcagcttacgacattagattagaagaaatcgatcatcccacgccaatgatcgatagcgagattgaagtaacggtcagtttccttttgccagcgacagcgtcggcttctggtattggttctcttttggctgtttcagctgcacaaaaccgcattttcaaaaaagtagttataaatgctaaaagtggtgatttcattagcttgaaaatgctgaagtcctaa

SEQ ID NO: 204755 - DNA, 1110 bp, Klebsiella oxytoca
gtgaaaaaaactcctccatttcaaataccgccaccaagaaactggcaagactttgagagtttatgctgcgacttgtgggcgagagtatggaatgatccaaacactcaaaaaaatggcaggggcggccaaagtcaacatggcgttgatatttttggtagtccatcaaatgcttatggaaaatattatggaattcagtgtaaaggaaaggataattacagcggaagcatccttacaattagtgaactaaactcagaagtagagaaagcttcaaatttcctgcctagtattgagtgctttatcattgctacaacgtcagtaaaagatgctgtcattgaaatgagggcaagagaaataactgaagaaaatagaaagaaagacagtttcacggttcatgtatttggatgggctgacatagtagaaaaattatccgaacatccagaagttatggataaatactattcttgggctgtaccatctaacgatccgaacaaaaagctttttgaatcatggtatagagatgccgatataaaaaatctgcaaaaaaactccaacattattccctttcagctttttaatatcaggtttactggtggctttttaaacacccttcattcgtatttgatgaaaattgaaaccaatttaagagcacttccttcaaactctgcaagccaaaaccttagggaggctattgttaattttaaccatgttgctactgacgtgttgaaatcgtgccatgaatttgaaaatagatacgatattgagtctgatgtttacacttactggattgataccaaaggtcatccatatgataagcaaggggagttcattgagtttaaaaaaggagtccttaaggttcttttttacaatcttgtgaaagctgccaattatgtaatccacatcggtaattctctgcacttcgatagcagtcgaacattggattttataggtttcattgagaactttaactataattatccgcttttcggagaaccgcacccgtccccagagtactacccgctttactcggttcaagaagtggaagaggttagattttatcagggcttagaaaatattaaacaatatgttcatgaccaagtatacagcgactaa

SEQ ID NO: 204756 - DNA, 195 bp, Klebsiella oxytoca
atggctacgaccctcaccccgtcacacccgcagtttgtcttcgtgtttgccgccgttcgtcgcgcagaccgtcagccccgtatctgtatgctccgcgccgtcgccggggatgaacaggccgcacgcctttccctcgtccgcgattacgtcctctcgtttgccggtcgtctgccggtgacggaggtgcgcgcatga

SEQ ID NO: 204757 - DNA, 1734 bp, Klebsiella oxytoca
atggctgcagatgaactgaatccgccgctgggtacgacgacgcctgaaatattcatggataacgtcaagcgggccgatcggttagtgaacggtccggccggaacggttgacgatcggggcggagttccgctcgatacctggcgccagatgatggcgaagaatgatgaagtccggcaaaacatcattccgctgagtaagcagtatatgacgcttgaagcggcccaggccgatatcatcaatatccctgaggggagcaccacgtattaccgcagccctgatgattccgcgctcgctattgaagttatcaacaacggaggaacacttgaggctaccgggcgacagatgccttctgtcgttactatcgggaaaaaattagatgagcggattccactgggggatttcaaaccatcatatttcccactatggtatgacagaaatggaaaagtcattgtctggtgcaaagatggatatccagatttctcgggtttcggggaaaacgcacaaagcatcgtagcagccatccctaacgagtgggcccagtatcatcttcggcagttcgactttagtccctcgtacttccctctctggttcgacagaaaaggcaaagtcctggcgtggagtaagaacggcacggtggattttgtcattggagagagcattcagagtcaggttaaagaactggttggcgcaaattcttcgagttcattcattgaaggcgatcagtttaaatttatttttaagcggggtcgcatcgctgcgggcgtagcaggcagcctcaatgtgggatttggtatggattcatggggagaaaagagcaccataccgcaggcacttattaatatcctgggtggaggatacaaagaccccgggtatatcagttgctctaccaggacagatggggttatggccggaatcactttggtagtcaccaactttacgaaatatgacggtgataatgaaaacaacaatgtaccgcctccgtacggctcaggccctgacgggaacgcctactggaataacaatacggtggggactctgacctggacgaatgttacggccactgacctgtcattattttattttgacagcacgggtaattttactgtcgctatcgacggtggagcacctgtgactatcaccggaacaaatagcggcacggtaaaaaaatacgacattacaggactgactgcgactgcacatactgttgttgtaaccagttcagggacgggtgttgtttccattctctgtatgtatggaaaaaatagcgccagaaccaacggaatcaccgtttctcgcatggggaatggtggggctatggcaaaagactatttgcactggcaggactatattaccccgattgttactcactttgacctcgatttattttttatgattctcggtaccaacgatttcaggaaaagcgcgggtatcgctgagtttgtcaatgggctacaggtagttatcgataaatacaaagcggccacgccgggaatttgtatttgcctggtttctgcggcgcaaagcaacgcaaccggaatgcctgccttatctgaatatgatgaagccatgcgtacgctggcaatcgagaataacgttaattttatcagcctctaccagttgtttccaaagacgtacgataactccggtggcgcatgggctgacgcattgcacctgtcagaccgtggcgcatatgtactggcgcgtaaaatcaaaaacgaatttttccaggagtaa

SEQ ID NO: 204758 - DNA, 4101 bp, Klebsiella oxytoca
atggctgcagatgaactgaatccgccgctgggtacgacgacacctgaaatattcatggataacgtcaagcgggccgatcggttagtgaacggtccggccggaacggttgacgaccgcggcggggaaccactcgatacctggcgccagatgatggcgaagaatgatgaagtccggcaaaacatcattccgctgagtaagcagtatatgacgcttgaagcggcccaggccgatatcatcaatatccctgaggggagcaccacgtattaccgcagccctgatgattccgcgctcgctatcgaggtcattaacaccgccgggacgcttgtagcaactgggcggaaaatgccctctcaggaatctgtcaataaagccatcgaagatttgttttttgctctgaacacacaaatcagtctggtgtccagtgaaagtaaggatatcgatgagctgtatgtcaggaacagaattcgcgatctcgacactgcaatttcagggtatttgacgcctcttgactacatcagacagtacggctctgaaatcgagtattcaaaatctcataccagcgatgctatttttaagcttgaatctctgtccctcgcgggtgctgcgcgcctcagtaatttcaagatcgtcgattccctgggcgtggcggttagcatttctgtgctggaaggcgaatcaattacaggcccggtcaggacctcaagctatgtggagttcgccctaaatccggccagtttccatgatatggggatcaacactgataccgggtttaccattgtccgtattgatgttgctctgggcggcagtctcccgtccgatacaacccgaatcatccgcgaccgctccggtcgttttgcggcttacacaccaggtaccatatacggtgggactaccgaaggggtgacatattctgcatcggtaaaaggtttgttgcttaaattaagcaacaagacaatcacagacgctgggtttgcgcttacaactgaaggcgtgatctcgtacattaaagaaaacctgacgggtttcgtgttctcacaactgacagcagattcagtatcaacgccgttctgcaatgttttccgcgtggcagcgggtactgtaactgtaacgtctaatggagtggctgactcagacaaaacagtaatgtgcgtgggcacattttatgtcagcaaagtctcatccaaaactaaaacatcagcccagcttgccgtctctcgtttagctgaggatgttgcgaccatagaatcggtcgtcgagacggggaaaatacgaaccctggcgcctgagaatgacggtttcactgtaaacatcgcgaatgtggccacggtcggaaatgccgcattactgtcggttgacacaatcgcagacagccgttttgtactggacaagttcgcgctggccaatgtcgccagacggaccatattgcggatggttgacggtctcggcaccgcacaggaactcgtattcctggaaggtgagtacaccgacgcacagtcgctttactcaccatacgtcgatttcatcttcgagccacgtgaattttataacgtgtttgcagacactgataccggttatacgtccatggatatcgccgtgacattaccgggtacgctgccgtctgataccactcgaatcatccgcgaccgggccggagtatggggggcttatacaccggtgacgattaaatccggcaaaggtataacctataactcggccacaggtcggcttatcctgaacgttcctaacgcggaaataacggtcgcaggatacgacctttcccagaaagggatcatttcctatgtcattgataacctgtccgggtatcgtttcagtcagctgagcgccaccgtttctgccagaccgttctgcaatgtcttcgtgctggctgcaggaacagtatcggtcctgaccgatggtgccgctgcatccgataaagtggtcactgtgtcgggacggctgttttctaagcgctccggctccggcatgaacagcctgtataaacgtctcatctgttctgtgtctaataatcttgatgtcgtcaccgggttgcgcccggtatacctgaaatgcaaatttggtcccggagaagttatttctgaagactgcctggttgtcaaagatactgccggggtggtgtatccgtgtcagtgggatggtgagcaggatttcaatccacgccgcaatgcaacagccggatactggcctgatggctcgctgcgatgcggatcgctaatcatttttgacaatatccaggccaatagctcgaaggattatgtgcttgaagcgcacccggccccccagacacgcaacgttttctcgcggtgtacccgggagacgcagacaagcctcctggtgaccgcagatgatggcacgcaggcgcgttttgacagtgttgtcggctggctgttgtacaagctgaatcgcgacggaaagacttatagctatatctgccagcatctactgattacacgcgtttctggttcagcaaccacatacagttgcggctatgctaatgcccggtatcgtgtgttaagcgatggtcctctgttcaccgaagtagagaccacatttaaaaatttcgtgcaaccggcctatcccacagtcgataaacagtacctcgaaatgaggtaccgcactaagatctttaaaaatggctatatcaaggttgacgcgcagcaccgtctgctgatggacctcccggataacaccctttacggcagcgaatgccgtgttcaccttgattcttcggaggctaaaacctaccgcgcggggtataacagcatctggacggacaatgctgtcagacgcagtatctcactgcactatgcaaatggcgatgtccgacgggatgatggtgagattaataccctggcccaacgcccgtcagtcattaacattaccaccacgtcgtcatatacgcgtgcagatgtgggatgggcgcaattcagcagctcgatactgggtgcacctaaggactgggcatggacaatgggtttttccatcaacatgaacgaaccggaatccgataatgttgtcctgtctaatctggagcataaccctgtcaccggatttgcgtcggcggtgtcgctgtatcctcgtattcgcacagccgtgatcatggctaaactggcaaatctgatttccggtatcgtgtcctggtctgaactggatgcatcaaccactgacacagccaatggggcgttcaatactctggcaggatcgttagtccgtcatctctattcaggccagggctctttcgatgctgagtacgcgaaattcgatgcatgggccactgctatgtacggtgggatagaaagcattcacatggggagcgcagctgaatacaagggattacagttcgccagcaggctcgtccttccgcaactgaactggttctatcaggttgcattgataaaaggcgatacagcgaaagtggcggagttgaaagtggccattgcaaatatggcatctgactgccataacgctttcggagggatcgggaaagctaactcgaacttttacgcagcatctcatcgggcgtggggtcttgcagttatggcggggcttgacccgagcggaacttacgcggctgacatggatatggtggatggccagttctcctcttcggactactttgaaggtgttaccaatattattacggataacccgcgggagaatgttggtggtatgcgttacctgcattaccagatgtatgcgtataacaactatttgctgggatgcagagcggctgaccggactccagtaattgacatgaagacgtatatgcttaatgccatttctgcttacggtggtctgcgtgaaattgatttttgtgtcgcagagtcacggcgggggaacccaaccacagtggcgtttatgctttacccgttgttgcattcaggggatgtatcttgtctggatgcagctgacagagtgttgaacgctttcgaggaatacgcgggttctagtacgtcaggacaaataaaactttgggatttgaattttctgtcagtaatcaccaccagtttttctgagtatacattcgcctgcaatattatggcagatgtgtggatgcagtactggcttgataataaccgataa

SEQ ID NO: 204759 - DNA, 558 bp, Klebsiella oxytoca
atgcggtttcccgcccggttctctccgttacccacggtgctttccgctgagcagttacagacgctacgacaacaatccccctcggcggagccggggataaaacagactcagcagcagctggcgcagcttttacagctaaaaccggactgggctttgagttatggtactcatctggcgcagcaggcgctgacgctatggccagagcaggcgaaaccgctggcgcggcaatggcaacagcaggtcagcgccgccgcgcttcccgtggagaatctcagcggctggcaccagggaatgacgcagctacagcagttgacgaaccggcttaacgcactggatgaacagaaggggcggtatatcacggtgagtgagctgaagtcagcggtgtttgccataacgcagtcgttcagccgtaccgttccggcggaagagcagctgcgacaactctccgcacagccgcgcaatcagccagggtctgcggcgcagcagaaccagacggagcagcatctgcaacaactgattgcccgctatgctgcgctgaaacaaaaaacggcggaataa

SEQ ID NO: 204760 - DNA, 552 bp, Klebsiella oxytoca
atgaaatactatttcatctccgacgacaggatgtttttgtcaggtataaaagaaataacaaaagactttttaggttcatctctgtttgttaatttaacagaggagatgattaatttttctcccaccagaggcgatgttgtcgttttagccgttaataataatgattatcgcagtatgttaatgcgaatagcatacaaaagaagctgtcggcttctaatattactcgatatgccagtaatagagacaacccacacatgtttcccttggttggcacctaagcgaatggaagtcaatgatttcttgctactaattcaaaaagcaaagatgtcttccatttatcgtgccagaaagcagacttcacaaaaaataattaatatatttacgtgcttaggcaatggccaaccggtagaaacggtagtagagaaccataatctctcggcaaaatacatctaccaggccaaaagaaatacattatataaatacggttttatgcgttgtaatgctctggcagttttagtctgtcgggatatgcttgaaatgcacaatttttag

SEQ ID NO: 204761 - DNA, 573 bp, Klebsiella oxytoca
atgaaaatgaaccgtcttttaatggctacattggtttcttccgcgctgctgtctaccaacgcactggcggctgacggtactatcacgtttaacggtctggtaacagcaagcgcgtgtactaccgtggcaggcgctgcatcaattggtggcaccgcctcaaccaacgcaactatcgctatgccgaatgtcactgcaagtgccctgaattccgcagccggcaccattgctggtcacactccgttcaccattgaactcagtggctgccagtcgaccgcagcgctgaacaatgtgcgagctctgttttcaacaactagcgcaccagccagcgattctaacatcatggctaacgtcgcaggggctggtgctgctgacgatgttggtatcgcaattctgacccctggcggtactcaggtagacctgaacggtggcccatccgtatctccgggtgtagctttacctgcgactcctggcgcgatcactctgtcatatgtcgcggcatataaatcactcagcaccagcgtaacgaccggtcccgtacaaggtgtgaccgattacgttctttcatactattaa

SEQ ID NO: 204762 - DNA, 2082 bp, Klebsiella oxytoca
atgatctcacctaaagagtgggatgatggtgtagcgaatttacgtactagctactcaggatattactatcaaacacaattaaaaaagacttataacagcggtattgacgataaaatctcgagcgcctatataaacttaaatagcgtggcaggattgggcccatggcgattatacagtatcgactccctcagtcgtgatacgcaaggtcaatgggataacaaccacgatcgcctgtatctgagccgcgacttcgctcccgttcgcggaaccttcgccatgggcgatctctataccaaaacgaaaagcagcattttcagctcaattcccttgcgtggtatctcattgaataccagtgaaaatatgatgctggataatgagtttaattatgcgccagtcattcgtggcgtagcgcgaactaacgcacggatctatgtgcgccagcgcagtaatattatttatagcgcaacattaaccccaggtgagtttgcaataaatgatatttatagcgcccaagtgggtgcagatttggaagttaccgtagaggaagctgatggaacaaaacagattttttgggttccctatacttctttgcctaacttattacgtcctggcgcactgcgctatgctacggcaattgggcaatatcgagatggagccgacagctcagatcagccgtggcttggaacagctaacattgaatacggttttgaaaaacttacgcttaacagcacattactaattgcagaaaactatcaatctgcagctacaggtgcagcctggaacgtggggagtatcggtgccttctcttttgaatttgctaatgcaacctatcgagatatatggaataacaatgtatcgcataatggttccgcacttcgcctgctatacgcaaagcaattttctgaaacagatacaggtctgcagattctgggctatcaataccgctctgagaatttcctcgacttttccgaatttatgagccgctataactatgaagatatagacggctatgattatggtgacaacggctggaatcgtcggcgccgtagtcgagtagaaatgaatattaaccaagggttaggaggtaaaggcagcctctatttctcatttagtcaagatcgcttttataacaccgcagacaagagcacatctatttctggaggagcgggtaccaacattggctctgccaatatctccttaacatggacatatactaaagatagtaatttcaatgataatcaactgaatcttaatatcagtattccattgaactgggggagaaattcagaatcaatgggaacagtcaattatggtctgactcgaaatagtgataatcgctataaccagacattaggttattccggtaccgtgctggacaacagtctaaattattcagcaaacctccagcgtgataccgaaggaaactatagcgagtcgctttccgcaggttacacctccagccttgcggcgataaatggctcagtaggccataatgacagttctatgcaattttctgcgggtatgagcggcgggctgctggtttacagcggaggagtgatgcttacccctgcgttaggtacaacgattgggattattgaaactcccgatactagcggtataggtattaactcaaacaataatgcaaaaacggattactggggacgtgccgttgtgaattacctgaccccttatcgttataacaccctcacgcttgataccactcatgcggaaagcgttgagttaaaagagaccacacgtaaagtagtgccatctgaaggcgcagcagttcttctgcgttttgcgacgcgcacgggccgacgcgcaatggttaaaataaaaagcgcgaaacaaattcccctcggcgcgccagtgtatatcgtaggtgaaaaggaagaggctggtatcatgggaaataaaaatatgatttatttaagcgggttagatgcacttaaaccacaaacattacagatctcatggggagatagtagcttgcagcaatgccagtttactttgcctccagcgaataaagaacaattagaacgcaataactggtataaaacaattatcgctcattgtaagtaa

SEQ ID NO: 204763 - DNA, 735 bp, Klebsiella oxytoca
atgaaacggacctcattgactcttaaaaaaagtattgtgttgttatttattgcactgaccagccattcggtctgctcagcaattcgcccacaacttacccgggctatcgcctatgccgaagataaagagacggcaatagagatcattaatgacgcctccactaactatatggtccagtcatggctggaagatctcaacggcaaagatgataacattcctgcgatcctgaccccgccaataatgaaacttgatggtaaaaaagagggtaaactgcgtctcgtcgtcatccctgcacaaatcccacaagaccgggaaacggtgctttggcttaatatacaagaaattccgccgaaagcgaaaaccggcgtcaataataaactcgtagttgcgatccgtagcaggctaaaggtctttatccgtcctgcaggttttaattatgaagatgctcgtgaggcgataaataaagtaacgtggtcggtagaaaaggaaggggggaaaacctggctcaaggcaaaaaataactctccttattatattagctttggtaaactggcgttaaaaaatggtactaaagctgagatacaacttgaagacaaatatcatatgcccgcgccatttggttcgcaacgttatgcggttcctgccagtatcactggtacggttaaaatcatttacagcgcggttcatgattttggcggagcagggaaagaattatctgcggaggtcgtactttaa

SEQ ID NO: 204764 - DNA, 1296 bp, Klebsiella oxytoca
atgtatagaaacatattttcttctgctattttttttgccattactacagggatatgccattctcaggttgtcaccgagaatatattctggacaggtggagaaaatgcaggccaattagctggaatctgtatgtataccattccagacaacaaaccactatcacaacccaaaacattagttgtggataataatctccctttaaattcagttatttattcctttgaacatcatagttttttagatttttctgttacttgcaccgggactggcttaggtaactccaatccagctatcacttctcataccagtggatatacatatcttgtatatgggattagtttctcaggagagagtagcacatctccgttttataattttacaaataatagtggcatagcaattagatatacttttcgttttaatcaaggtgctccagtaccctgtcaaaactgcgttcccttccccgcatctggagagagttcttttggagcctattatgcggcgacaagattcgaccaagcttataaatttgatggttttgttagtaacggttacgagtctggtaaaaaaaaatctcaggaccaattttccttggagtattttgtaatcatatcgcaaaatgacggaaaatattatttttcaagtaccacaccaattactcaatctttttcggtaaaggcggatttgattaaaatagacgacataccatatgatggcactcctttaaaaaccaaatatagctccggcatccaggtttacgctaataccgtttatagcaattccagttttgatatcggtaatggcggcataaccatcgttcgcccatcctgccagctaaaaaccaaagattataatatccccatgaacagctgggttagtatcgatcccagcgtcagcccgggagcattcccagcatatggcggtcaaattcccgtaaatattgaaatggagtgttctggtcaagtagacgatacgcaaatcagctttgaggatgccaatagcgctacaccaagacaggatgttggtctgtatgatacggcaggcggtacgcccatcgatggcctcgctatccagcttttacacaataacgctctggttccaacagataagactaaaacggtgattagcggacttggcgccaccaaaaccgtggctgacagtatgcctttatttgattcaaccagtattgttaatttttctgcccgctatgttcaaacaggcgcaatcaaaatgaacggtacagattacactggcccggtaaccggtaagctgaatatttgggtgacctataattaa

SEQ ID NO: 204765 - DNA, 234 bp, Klebsiella oxytoca
atgtcagaacttactctcaccgaatccgaagtgttaactgaccatactgacgtaatttgctccaccagcattgaacgcatcatcatcggacgtagtaatgcacctaaacaaattgatacactgatacaacacgttgccgatatatcgacgctgaccagcagtatcggcggtaaaactgttctggactgggccatgaagatgagatgttttctattaagtactttcaaaaggtaa

SEQ ID NO: 204766 - DNA, 492 bp, Klebsiella oxytoca
atgaaactttctctggccgtggaagccgatgccatcaacgtactggccctcaatatgggccggatcgctgtagatattgacgggattgaactggccgacctgatgaatgtggtcagcgataacggttattcacttcgtgttgctgatactcccggaaagctggttgttgaagatccgctaccacgtaccacccgtctgaacgggatccagtgcagcaccgcgcatattaccgaagacgacaacaccctgctgtttacattgtcacatcaacatgaagaccatggtgacagtgaatggataagttataccggatccggctatctgatttatctggattcctggcagtacccggtactccagcttaagaagcggggattatcgaagccctgccgtcggctaatcgtgacgctgatacgtctccacgccatcagaattatccatctggatgctctgggcgaattgctgcccggctttgccactttcgactggtag

SEQ ID NO: 204767 - DNA, 606 bp, Klebsiella oxytoca
atgaaaaaggttcttctctctgctgcgatggcgactgcgttttttggtatggctgcggcaaatgctgctgataccaatgtaggcggcggtcaggttaatttcttcggtaaagttaccgacgtctcttgtactgtttccgtaaacggccagggcagcaatgctaacgtttatctggctccggtgactttaacggaagttaaagcgccaggcacacaagataccttacttaaaccaaaaactttcaccatcgatgtatctgactgtcaggctgctgacggtacaaaacaagacgatgtgagcaaactgggcgtgaactggaccggcggtaacctgctggctggtggaacctccacacaacagggctacctggcaaatactgaagccgcaggcgcggaaaatatccaactggctttatctaccagcgatacgatcactaacaaaattatcccaggcgatgacaaccagcctaaagcgactggtgacgattccgccgttaaggatggcgcacgcttcacttactacgttggttatgtaaccagcaccccggcaacggttaccaccggtgtggttaacagctacgcgacttaccaaattacctatcagtaa

SEQ ID NO: 204768 - DNA, 1059 bp, Klebsiella oxytoca
atgaccagaattagcgcgatagacctcttttgcggagtgggcggattatcacatggattaattcgtgcagggataaaagtacatgctggtgtcgatttggaccctgattgcaagtgggcctatgagaaaaataattctgcttcatacatacatgcagacattagcacagtttctggtaaggatctcttacgactatggggggatggtgccattaaactgctggctgggtgtgccccttgccaacctttttcttcctatcaaaaaggtaaaaaagctgtagataataataaatggaagttgttagacgaatttagccgattggtggttgagacgcaaccagatttagttacgatggagaatgtgcctcagcttcgtgaccacgagatattcttaaatttcaggagaacccttaaggcaaatggctaccatatatggtcagaagttgtaaattgccttgactatggtgtaccgcaaaaaaggcaacgtctagtccttctcgcatcaaaattcggtgagattaatttagatgaaccgacccacgctaataattatttgacagttcgtgatgctattagtcatctccctcctcttgaggctggtcagattgataaaaaagacccattacatgcttgtgctaaccttactcgaataaatttagaacggattaaacagtcaaaacaaggcggcacttgggaagactgggatccgagtttaatcgcaagctgccacaaaaaagagtcagggaaaacttatacatccgtatatggtcgaatgagttggaacactcccgctccgacgatgacgactttatgctttggctacggaaatgggcgttttggtcatcctgtacaaaatagagccatatccttgagagaagcagctatatttcaaagctttcctgaaacatatgaatttcttccacatagtgaagaggtcagttttactcgattaggccgtatgattggtaatgctgtgcctgtaaggctaggagaagtagttggagaaagttttgtaaaacacatacaaaataaactggacggacatagtaatggaaaatag

SEQ ID NO: 204769 - DNA, 1980 bp, Klebsiella oxytoca
atggaaaatagtacgctggagcgaaagaatactgaaactgagcatatttacaccatgcaagttggtttaagtgttttgggacatcttggtataaacctttacagtaatgttgcagcagtgttaacagaggcggtagccaatgcatgggatgcagatgccactcgtgtggatatatcactcaatgaaaacgaaattattattaaagataatggttttggaatgactgttgatgatatgaataagagatatctttatgtcggctatagtaaaaggaacaaaccagaattgagattaaccccgatgggtagaaaaccgatgggccgtaaaggtatcggtaagctttcattattttctatagctaatagtgttgaagttagttcttttaaagatggtcagcttcatggccttatcatgcatgctgatgaaattcaaaaggaaatagataatggtggcagcaactatcatcccactcctttagatgtcgaatttttaacgatagatagtggcactcaaatagttttaagagaattaaagaaaaaaagattatcattgacggcaagcgcattaagaaaaaagattgctcgtcggttcagcgtaattggcagtgaatcgtttaaagtctttgtcgatagtactgagattactataaaagacagggaagacttgtctaatctacaatttttttgggatatggactctggaataaattttactcgtgtatgccctgagttgaaaaatagcacaaaactacctacaaacctagagaaggccccaaatccagcttgggtaataaaaggctggatcggtagtgttaagagttctggtcaattaaaatctccagaagggaatcttaataatattattgtattatcaagagggcgactatttcaagaaaatatcttggaagatataaatgatggcggcttatacacaaaatatcttacaggtcaactggaagctgattttctagatacagatgaagaagatgatattgcaactagcgacaggcaacgtgttgttcaggatgatgagcgttatcaatatctattagcattcttaaaacaaacaatgagaaaaattgctggtcaatggtcggcatggcgtgaggagacaggtgtggaagaagcaacagatgctaacccaattttatcaaattggctcgattctctggccggtggctctcaaccccatgcaaaaaaacttcttgcacgcattgaatctttaccattagacgatgactctaaaaaaagagaattatttaaacatgccatttttgcttttgaaagattaagaattcaagagatgagcgctgagctagctgacgacatggtccttgatgcttcaaaacttcttccactattggcaaagcaagatgaccttgaagcaacactctattatgaaattgcaaaaagtagagttgatgtgattaagcaatttgaaaatcttgtcgataaaaatgaaaaagaaaaagtattgcaaaaatatttgtttacgcatctttggttactagatccttcgtgggaaagggccaatggcacagaaagaatggaaacaaatgttcagaaggagtgggaagatatagatgcagatctaagcgatgatgagaaaaaaggcaggcttgatattaaatatcgaaatgctgctggagttcatctcattattgagctgaaaagagcaagtgttaaaacgtctgcttatgctttaactgggcaaggtgcaaaatacaaacaagctgtcgagaaatgtgcaagaaaagcagagcctaataaagagcctcatgttcaggttattttcgttctgggtgaggaaatcagcgatattgatcgtgggcaaaaatgggtggactcaatgatggaaggtgtaaacggacgtattgtttattatgaaacattgattgatggagcactccgttcttatggtgattatctacaaaaacaggagaaaatagcccagatagtaaagcttgtaagtcaattataa

SEQ ID NO: 204770 - DNA, 408 bp, Klebsiella oxytoca
atgaaattaaagctggatttctccgggctaactgaaattgcgcaaaaaatgatgcctgaaggcatcgattttacacttagttcattgatgattgattcagaaaatatcgatgttaattttgatatgagcagggagattgagcaaagctccagagatgatcacaaaaacctgatcggtcactacttatctgatttggcaataatcggttatctattaacctttaatgagcgcaagattcttaataaatatggtgcatggatggaagccctaatttcagaggaaataccaccattaacatccgcccaacgtagatttattaacgtccataaagggctagaagaggttgaaagtgaatttgaaagaatatggattaaagtgattcaggtaaggagtgcgttaaaagtataa

SEQ ID NO: 204771 - DNA, 708 bp, Klebsiella oxytoca
atgagtaaaggttatttcccccgctcgcgtgcaaaacagcgggatagcgctcactggatttccatgtcagatttaatggctggtctgatgatggtttttctttttatttcaattgcttacatgcattacgtccgagttgagcgagataaaattaaacaggttgctgtcgcctaccagaatacacaagccgcactttatactgcattaaatcatgaattctcgggcgatctcaaccagtgggacgccgaaatagatgaaaaaacactcgagttccgcttcaaatcgccagaggtactttttgaggtggggagcgtcggcttgaaacctcagttccagaatattttaacggacttcttccctcgctatttgaaggtgcttgaaaaatttcgtagtaatattactgatattcgcattgagggacataccagtagtgactggtctggcgccacgacatctgacctcgcatattttcgcaatatggagctctctcagggccgcaccacggctgtactgcaatatttatacaatatgccagcagtttctaaccaacgcccatggataaaagatgtattttctgctgtaggttattcttcagcacatcctattctagatgaaaaaggaaaagaagaccctgagcgttcaaggcgcgtaacatttaaggcagtgaccaatgcagaaattcaaatccagaaaatattgcaggagtaa

SEQ ID NO: 204772 - DNA, 1590 bp, Klebsiella oxytoca
atgatctctgaactttttagcgatatatcaacacgaattttcgtcattttgatccttatagtttttatttttgccatttttttggataaggggggaaagcgaaagcgctttgttgagtatgcgccgaccttaatgacctccttaggtattttagggaccttcttcggggtggctatggggctgctaaaatttgatactggcaatattgatctgagtattattcacctactctccggccttaaaacaggttttgttgccagtatctttgggattactgccaccattatcttcaatgcacagagtgcctggcgattcaaagaaaactacgacgaagaatatataaaacagaatgaaatctatcattctgttattcagcaaacagagctgctaagagagattaaaagcggtttgctagatcctacagatggttcactgtctgcagaaataaaaaaattgagagccgatctcaatgtgcataatcgtgaatttgattccgtattgtggaaaaaatttgacgagttttcttcgaacgtatctaaagtcgcgggtgagcaaattattgatggcttacgctccgtggtacgtgactttaatgatcatatttttgagcaatttggtgaaaacttcaaagctttggatgcatcagtaaaaaaacttgtggactggcaggcaacctataaaatgcagcttgaaatcatggataatcaattcaaaaatagcacgcgcgcgataaccaacatagctacaacgctggacactattcaggcaagatgcgccagcattccacaaactatggaagctttccagtctctgatgcaacacaatgaaagtcagctatatgaactcgaaaacaacttagaagccttcatcttaatgcgagatcaggcgatcatggccattccgatgttaaaagagggtgttgaaagtgtgagtggcatcatgctcagctctgctgataacttacaaatgctactggaacaagctggccagcgcatattatttaacactgagcgtattagcctatcttcagaaaataatattgagaaaattaatcaatttgttcagagagggatggattcactggaacagatgagcattcaactgtttaaaatgggtgacagcatgaatattaaccttgaaaaaggggcacataaagtcagtgaggaaatggttaatggaatgcggagtatgcttgcggcaatggaaactgcgacccataaaatcggtgaagagtttgcggcaagcaatgataaagtccgcacatccgttgagattagtgtacaacagttgagcgatagcttgtcatcaacgaacaaaaaaatgatgtctagcatggaacatggttatcaggactttaattctatggcagggaaatccattgccgcatttaatgacattattgctcagcaacgtcagaaatttgaaacggtaacagagcaagaaattacgcgcgagctggaagtgatggggaaagctctgcttcaaatcagccaaggctttgttaataattacgagcaactcattaagaattatgaagaaagaataacacaacttgaatccgatttagcaccttcagggactttagcatga

SEQ ID NO: 204773 - DNA, 1029 bp, Klebsiella oxytoca
atgaaaaagaacaaggttacgattctgctcaataaccgtcctgaaatgattggtgaacctattcaggctgcaaatgagggcatcaaattactgcttggtgcctggagcagggatccctgctggcaggaaaacttggaggtagagatttggctggctagtgggcagcggctttacgtttttaaggatcttacatctgtttcagtgctgacggacattagctgcgttacgcaggacacctctcaggagactatggaagaggtgctctatcgcctgttgtgtagcgaagcgccagacagcacacgcttctaccgcccgcaaatgataattttgagtgatacgctgggcaatggcgatatacttccccttgaggaagccttcaaacactcagtttacactaattcctggttcctgttggcgggccgtggggacgacaaaatgctgtttctgccttttatggggggagtgttcagaattgaagagcttaacccgcatcaggcctgtaatttcatctgtcaagatgaactacctgaaacgacaatttcgttgcctgagcggtattgtgcagtggctgagcgcctgcaaagtgcagctgaacagggtcatgtggatgcacaactccaactggcggggatgtatcgccgtggactgggggtacaaaggagtcttcagaatgcccacaactggtacgaaagggccgccgaacaaggtaataccagcgcaatgttcgagctgggggaactatactggctgggtctgatgggtattgcgcataaagtggaagcaagaaaatggtatgcaaaagcggccgctgagggaaataccgaagcgcagtataggctgggtattatctgcaaatttggccttgggcaacccagagatccctcagccgcgtttgactggttgcatgaagccgccagtcataagcatcagtctgcgcagcaagcgcttcgtcagcgcagatctagagcccttaacgacgaatccttgtttcgaatatccttaacggcccccttgatacatcaccattga

SEQ ID NO: 204774 - DNA, 1521 bp, Klebsiella oxytoca
atgaaaatcattaagtgcaaaacgctggatgggcggcccgttgagtatgttgacagcgatgagccgtcatcaggcttgatgaaggaagtatacttctccccggaccgaagttacgtggtagccttttttaaaaaagagcctgacccagccggtatgcaccgcctgaccaaactgaccggcgaataccgtgagcgcctctataactcccctagcgggcactactggaagggcctgttctgctggccagacgcgattgtgaagcattgtgggcgtaccgggatcataatgccggtatatcccgaccattttttctttgaacacggttcatataagcaggacatgctgaaatggagaacaaaggaaaaagaaggaaaatggttcgcatccaataaaacccgacaactgctcgatcaacgtgaacttggtgattggctcaattatttacgcatctgcctgaagttgtcacgcgcaatccgtcgtttacacttgactggcctggcccactcagacctctcctacaaaaacgtgctgatagatcccgtaggggctaatgtctgcgtaattgatattgacgggctggtcgtccctaaactctttccacctgatgtggtgggtactccagattttattgcaccggaagtggtgaacactacgggcttggaaaaaacagatccgcagcgcatcttacccagccgtctgactgacctacatgccctgtcggtattgatctacatgtacttgctgcatcgccaccccctcaaagacgggaagaagatcttcgatattgatgatgataaaaatgacgattttctgaaaatgggaaaaggtgccctgttcattgagcatccgacagataacactaacagtgttaattgcagtaagctatccaaaggccagattccgtggcatgacacccaaaagcgcccttatacgctgactggtccgtatctgtcgaagttgttcactcaggcatttgttgattatttacacaaaccggcccagcgacccggcgcagcagactgggaacatgcacttgtggagaccatgaacctcttactaccctgctctaacgcacagtgtcaggaaaagtggtttgtcttcgatagcagccagactaaacccggcacctgcccattctgtcagactctctacgacaaagagattccggtattggatgacctgatgtttttacgtaataaccaataccaccgcgaaaagaagcgcattgtgggatgggatggattttcacttttccgttggcatatcaacggattgtttggctacgatgaaaatacttcaactgaagactcaaagcgtttggcctatatacgctgtcacaaccagcagtggttactggtgaacgaaggcattgtaaacttgcaagatatcacaacgccatcgtcgccgaaattaatcgctaagggcagctacatccgtctgcaaaatgggctagtgctgagctttggtaatgagaatggtgcgcgtaaaacacgcatcacattgacccgagcaaaggcgtaa

SEQ ID NO: 204775 - DNA, 1347 bp, Klebsiella oxytoca
ttgattgtcgccagaatttatgaaaatggcgatgagcatgtgaaacaaaatctgttagaggccatggagcgttatctgcgaattgaagcgaaatcccccatagcgcaataccgtttaggtaaaatgtatgaagatggacgtggcgttgagaaaaatgaattaaaagccaaagcgttttaccgcaaagccagcaaaaaatacaaactagcggctgaagccttaaaaaatctaagtctccatgatattgctagcgaacagaccagaataatatcgttagatgagtcaaagccatcgcagaattttgcccattatttagaaactaacaagatgtcttcgcctccagtttccctattcaatgcacaatatgtgcaggtagatacccatgggcagcagactgccagcgttgaacaccaccatactgtagtcagagaaccaaaaaatatctctccccctattcaatgggagtgccgtgagccggaaccgggacaaaagtgggcgaaagaacatcaggcacataaatgcgatccggcgctgggcatgtactttgcgcgccgccggggacgctcgcatgagcatgatgcaaagttttgcgatgacgacggtgatttctggcaacatgaatcagggtggactgtgctggtagtggcagacggtgcaggaagcgctgccttctcccgggaaggctctcaccttgccgtaacgaccgtcatagacgagtttcaacagtggttcacccgggaacgggccagcgagttggatgcacttctcggggactggcaggaaaaacacaacgtgttttatcaactgttctattacaagtattacgatatctgcaaaaaaatcatcaccaaaatacatgcgctggcagatacagagtctattaacatccgccagtttgcgacgacactgttggttacggtgagtaaaacgattgcagggaaaacctacctgaccagcctttggattggtgacggtgccatcgtcgcttacttacctggcgcatcaaggttattgggtgcagcagattcgggcacctatgtcgggcaaactcgattcctagatgccagctacttacagcagcatttcgcatccagtgtctatctcgccgccattgagcaggttgaagcgttgattctgatgacagacggtgtgagcgaccccaaattcaaatctgatgtagaactgatagatgcacaatgctgggatgatttttggcaagagatcgcacctgaactagcaaaagaaacgccagatctagctcttctcgaatggctgcatttctttgaacgaggctatcacgacgatcgcacgctgctcatatcacgttatcagggaattaatacataa

SEQ ID NO: 204776 - DNA, 636 bp, Klebsiella oxytoca
atgcgtcgcttacccatttatctattactggatacatctggatctatgtcaggtgagcctatcgaagccgtcaaaaatgggatgcagttgctagaaactacccttaagcaagatccctatgcacttgaaacagttcatatttcagtgattactttcgatgcatctgcacagcaagttaccccgttgactgaagtggttcagttccaggctcccgccattcaggctgggggacaaacatctttaggtcgtgccctggcattactggccgatcgtatagatgcggaagtgaaaaaaaatacgccaacggagaaaggtgactggaaaccgatggtattcctgatgaccgatggtgagcctacggacgactggttcgcgggtttacagcgtctgaagcaggttaaaacaggcacaattgttgcctgtgctgccgggatgcatgccaataccaatgtgctacagcaaatcactgaatgtgtggttcaattagactctgccaatgcagacaccattcgttcgttttttaaatgggtaacccagtctatagcggtcagttctcaacatgtagatgcaaaccatgatgttggcagcttgggtgatcttccgccaccgccacctgcaatcaatgtgattagctaa

SEQ ID NO: 204777 - DNA, 282 bp, Klebsiella oxytoca
ttggaaaagatccaggcgactgcggttaaatatatcaagctgggagagggaggcgaatgggaacatgagtgcctgacatctggcattattaagtttgggtaccacaaaacgccccatcagatgtgccttgagggaaagtgggaggatgtgaataaagtctggttagaagaaaggaaaaataaccagtccactgccaccagtgatgtcagacagataaggacgttttacaccgccacccccgatatactcttcattacgttcagccaggggttattgcattga

SEQ ID NO: 204778 - DNA, 264 bp, Klebsiella oxytoca
atgaacaagcgcaactcacagcatggcaatagtgcgggaagtatctgcatcaccgcgcaagataatttgccgaaagtcacttggataaataaacacgtcgggatttgttgcggcttcgctatccatgtactacctcgcagggttggtaaaaagcgttatcaaattatgaaagatggtaattccttcggaattgactttgctttatcggaagcgcgcaagacaatagaccggattataaataacaaccgtttcattagtcattga

SEQ ID NO: 204779 - DNA, 270 bp, Klebsiella oxytoca
atgaatgaaccagtctggttagcagtagatcccgccaatgagtcaggggatcgcaccatagtgacggcgctggtttaccgcataaccggtagtcagcagtaccacacctgcaccctgattgatttcagggcgttcatccttgatgcggatgtgccggccttcaggtcatgcgtatccggcgtgggccacgttgaccagcatatcaggaggggcgggcttgtacgcctgcaactcccttcagaaagacttaaagaggtgttgccatcctga

SEQ ID NO: 204780 - DNA, 687 bp, Klebsiella oxytoca
gtgtttccagccgagcgcttcgcgggtcagcgcgatttccgcgtcgcccagcggcgcgccgtgggagtcgtgggtaccggctttgttcggcgaaccgaaaccgatgatggttttgcacatcagcagggacggtttgtcggtaaccgcacgcgcttcttctaccgcgcgtttaatcgagtcagcatcgtgaccgtcaacgccgcgcaccacgtgccagccgtaggcttcaaaacgcttcgcggtgtcatcggtgaaccagccttccacgtgaccgtcgatagagatgccgttgtcgtcatagaacgccaccagcttgcccagtttcagggtaccggccagggagcatacctcgtgagagataccttccatcatgcagccgtcgcccatgaacgcgtaggtgaagtggtcaacaatgtcgtggcccgggcggttgaactgcgccgccagagttttctccgcgatggccataccaaccgcattcgcaataccctgccccagcggaccggtggtggtttccacgcccgcggtgtagccgacttccgggtgacccggcgttttagagtgcagctgacggaagttcttcagctcttcaatcggcagatcataaccggtgaggtgcagcaggctgtaaatcagcatggaaccgtggccgttggacaggacaaaacggtcgcggtcggcccatga

SEQ ID NO: 204781 - DNA, 264 bp, Klebsiella oxytoca
gtgcagggcgatgccgttggcaatcgcggtcataccgaattcacgcacgccgtagtggatatagttaccggcagcgtcttcgttgatggccttagagccggaccacagggtcaggttacttggcgccaggtcagcggagccgccgaggaactcaggcagcagcgggccgaaggcttcaatggcgttctgggacgctttacggctggcgattttcgccgggttagcctgcagcttcgcgatgaattcgttcgctttcgcgtctaa

SEQ ID NO: 204782 - DNA, 684 bp, Klebsiella oxytoca
atggctcccggaggcgatgctgcgcatctgtccgggctaccgctcgcacacggcgatgaacccgtagcccgggcaaggcgctttgcgccgcccccggggagatcgcaacaggccgcatcggatatggctcccggaggcgatgctgcgcatctgtccgggctaccgctcgcacacggcgatgaacccgtagcccgggcaaggcgctttgcgccgcccccggggagatcgcaacaggccgcatcggatatggctcccggaggcgatgctgcgcatctgtccgggctaccgctcgcacacggcgatgaacccgtagcccgggcaaggcgctttgcgccgcccccggggagatcgccacaggccgcactagatatggtttcccggaggcgatgctgcgcatctgtccacgctaccgctcgcagacggcgatggacccgtagcccgggcaaggcgcttgcgccgcccccggggagctcgccacagggcgcattggatatgatttcccggaggcgatgctgcgcgtctgtccgggctaccgctcgcagacggcgatggacccgtagcccgggcaaggcgctttgcgccgcccccggggagctcaccacagggcgcattggatatgatttcccggaggcgatgctgcgcatctgtccgggctaccgctcgcagacggcgatgaacccgtag

SEQ ID NO: 204783 - DNA, 2160 bp, Klebsiella oxytoca
atgtccttagtcacgaataagtctagttctaaagatgaagatgagcttgatttcggtcgcttgattggcgaaatcatcgatcatagaaaactaatagtatcgattacagccttctttactctgttagcgttggtttatgtcgttttttcgacaccaatctatcaagcagatgcattgattcaagttgaacaaaaacaaggcaatgctatattaaataatttaagccaaatgctccctgacagtcagccgcagtcagcacctgaaattgctttaattcaatctaggatgatattaggtaaaactgttgatgatctaaatctacagacaataattaaaaaagcatattttccaatttttggccgtggttttgctaggctcctcggggaaaacgaaggttcaatatcaatatcaagactctatgttcgtaatgtcggaaatgattcagttaagcttagattaaaagtgcaagatggaaaacattatgaaattgagtataataacaaaaaaataaatggttatattggccagttgtatgaaaatgatgacttatccattaaaattgataagatggatgctaagcctggtagcgagtacaatatatattatgaaagtcgtctcaaggctataagtgatttacaaaatacgctttcggtagctgatcagggtaaagatactggtatgcttacaatatctttgaccggtgaagagccttcaattatagaaaaaatagtagagagtattagcgataattacttggcacaaaatatagctcgccaagctgctcaagatgcaaaaagtttagattttttaaataaacaactaccgcaagtcaggagcgatctggatattgctgaggataagctaaaccaatatcgaaggaagagtgactctgttgatttatctttagaagcaaagtcagtattggaccagatcgttaatgtcgataatcagttaaatgaattaactttccgtgaatctgaaatttcacagctatatacaaaagagcatccaacatataaagcgttaatggagaaaagaaaaactttgcaagaagaaaaagcgaagttaaataaaaaagtatcgacaatgccagaaacgcaacaagaaatattaagattaagtagagatgttgagtctggacgagccgtatacatgcaactgcttaatagacaacaagagttgagtattgcgaaatccagtgcaattggcaatgtaaggataattgataacgcggttactcaaccaaaacctgtcaaaccaagaaaagtcttgattgtgctcctcggttttgttttcggtggtgttatctcaatatgtattgtactgcttcgtgttttcctgaggcgtggaatcgaatctccagaacaattagaagagttaggtattaatgtatatgcaagtgttcccgttgcagaaattatatcgaaaactaccaataaaaaagggacttttacgaaaaaacaaaatgactttgataaaggtttgcttgcagtagttaacccaacagatttagctattgaggccattcgaggtttacgtacaagcctacattttgcaatgatggaatctcgaaataatatattaatgatttctggagccagcccaaatgcaggtaaaacatttattagctctaatttagctgcaataatatctcaatcaggtaaaaaggtcctgtttatagatacagatatgagaaaaggttacgcgcataaactctttaatgttcagcctgaaaatggtttatctgattatttatctaaaagaattgaattagaaaaagtgataaaacaaacttctattgcaggcttagactttatctctcgaggaatgataccacctaatcccgcagaattattaatgcatcatcgtatgggagattttcttaattgggctaatgaacattatgatatggttattttagatactccaccaattttagcagtaacagatgcagccgttattggtaattacgcaggaacaactttattagttgcgcgatttgagttaaatacaactaaagaaatgacgatagcatttaagcgctttgatcaaagcggaatcaatgtaaaaggttgcattttgaacggaattgttaaaaaggcaagcagttattacggatatggctatcatcattatggttattcgtataaagaaaaataa

SEQ ID NO: 204784 - DNA, 1782 bp, Klebsiella oxytoca
atgaatctcagcagcacaattaaatccattcaagatatcatgcgcaaggatgatggcgtcgatggcgacgcgcagcgtcttggtcagctcacatggatgctgttcctcaaagtgttcgatcaacgagaagaggaatgggaggatagcaacccatcgtataaatcccctttgccagaagagtgtcgctggcggaactgggctgcctataaagccgatgttgacggcaaaaagaaaccacagatcgtcggtagtgaactgatcagcttcgtcaacaacgagttattcccgactctaaaagagattgatgcctacaagagccctcagcacaaagtgatccgtagtgtttttgaggatgctaataactatatgaaatccggcccgcaaatgctggctgtgatcgagaagctggaagaggctatcaattttcacgattttaccatccgcgccaatattggtgatgtgtacgagcaaatgctcaatgacttacgtggtgcaggtaatgcaggggaattctatactccacgcgctatcacggcctttatggcggatagagtcaatccacgcctagaaaagcgtgagacagtcatggatccagcctgtggaacaggcggcttcttgaccgccgccatcgaccacttccgcaaccaactcgcgacaataaaatcaccgcgccctgaagataagcgagttattgaagagttaatccacggcatcgaaaagaagcagttgccgcacctgctctgcaccaccaacatgctgctacacggtattgatgtacccagccagatcgagcacaaaaacacgctaggtaccagttggaatgaatggagtgccaacgataaggttgactgcatcatcaccaatcccccattcggtgggtatgaggatgatggtgtgggcagcgactatcctcccgacctacgtacccgtgaaaccgccgacatgtttatggcgctcatcattaaaaagctactgaaggaaaaaggtcgcgctgccgtggtattgcccgatggatttttatttggcgatggcatcaaaggcacgctgaaaaaactgctgctgcgcgactgcaaactacacaccattatccgcttacccaaaggcgtttttgcaccgtataccactatcaagaccaatctgctgttcttcaccaagggcagcacggtggacgatggcaccgaacacttccacactgacaccatctggttttacgaacacccctaccctacgggctacaagagctactccaaaaccaaacccatccggctggaagaattcgaacccgagcgagggtggtggggctcggaggaaaacgactttgccgatcgcgtagaaaacgagttcgcctggaaggtggatttcaaaactaagcgcgaaaaggccgaagcagcagcgcaaccgcactggcaaatcgccgaagaactcaacaacaaagccagcgaattggatagccgcatccgtgatatgcgcgattctattaaaggtgtcagcgataaaacccagcgccaagctgtagatgatgaaattgaaattttgcgctacgaaagtgagggtctacgcttaaaagcccgtgatgcccaggctgcgggtgatcgccactattggccgattttcaatcttgacctaaaaaaccctaataccccagaaaaagaaagttttgatcccgacgaacttttgaccaaatacaaaaagttgctgggagagattgaagaaactgaaaatcagctcaaaagcgagttggccgcggccctagctcaccacttttctggtgaggatgcttga

SEQ ID NO: 204785 - DNA, 1944 bp, Klebsiella oxytoca
atggacgcgaaacaatttttgtctgaatttggacatgtggctcatgcaccgggaggggttgcgcggctgcgagaattgatttatcaacttgcaataacgggtagactaaccagccaagatgaaaaagatagcgatgcggacgaagttctcaacaacgtcgcccgaatccgtcagcagcttgttgccgcaaaaaaatataagcgctcaccaaaattggagtcatcaaatcttgtcccaccagccattgatctccccctcaattggcgctggagccgactactagatcttggtgaaataaatccacgcaaccaagctgaagaaacggccatggccacattcgttcccatggctggagtttctgaaaaacattcaaaagaaatatcaggtgaattaaaaccctggtcaaaaatacacaaagggtatacccattttgccaacggtgatgttcttttggcaaaaatcaccccttgttttgaaaacggtaaagcagctgttgtttccggcctcgaacatgatatcggtgctggctccacagagtttcatgtttttcgctcaattagccagtttattcatcctggttacgtgtacctgttcttgcgctcacctttgtttcgggtaaagggggaagccaatatgactggcacagcaggacaaaaacgcttacctacagattacttcgcgctttgtgccatgccattaccccctacggctgaacaatcgcgcatagtcgccaaagtcgatgaactgatggctttgtgcgacaagctggaggcgcagcagcaagcccgccacaaactacaaaacgcactgcgccagtccatcctgcaagcagtcggcagcgccagcagcccgcacgaacttcaaaccacttggactcgcttggccgacaactttgggtggctgtttcatacaccagaggatgtgaaagagttgaggaatctaattttccagcttggaatccaaggcttactcgttgaccaatgtgaaactgattctgagaaggcgattgcattcgtacgctctgtgcagacaaagaaggatcgattagtaaccagtggagtgattaggagggcaacttcatttcctaccgtcgaagaaagagaagtgccttttacactgccgcgtggatgggtgttttgccgactgggagaggtttcaatttgtagagatgggcagcgcatcccattgtctaaatcggagcgagagcctagacgcggagaattcccctattacggtgcgtcgggtatcattgaccatatcgatggctttatatttgaagaagatcttctactcattggcgaagatggagcaaatcttgttaatcgaagcaccccaatcgcatttattgcaacgggtcgctactgggtaaacaaccatgcacacgtgcttgacaccgtcaatggcgtcgccctcagatatcttgcgctgtatatcaatgcaatcgatcttaagccctatgtaaccgggacagcgcagccaaagatgaatcaggagaaaatgaatctgatagttgttgcagtgccacctcctgaggagcaagcacgtattgtcgaacgcatagataagttaatgcacttctgtgacacactggaaaagacactttttaatgcagtgaaaactgtcgagcgggttgcaatatctgccgtcgccagcctcaccgggatcgccatcgaacaagaagaggaacccatgaaagccccgcaaaccgagctgatcgctccactacgtttgggcatagttcccgacatcaaaacccaagcgccgctggctaccattcttgcccgccaccacggcgaaatgagtgctaaggatttgtggctccgattcggcggtgaaattgatgccttctacgcacaactgaaaaccgaagtggcccacggctggattaaggaaccggcccccgccgaagtgcgtgaaaaaccagccaacatggtgagtgcctga

SEQ ID NO: 204786 - DNA, 1737 bp, Klebsiella oxytoca
atgcaactgcttcgcatccgtatcccaaacttccgcaatctgcgcgatctcaacattgctttcgatacccacttgcagcctgccgatgcaccacccaaacccatccgcagccacgccctgattggtcagaacggcaccggcaagtccaacctgattgaggcactaatcaccatcttccgtgatgtcgatctcgatcgtgaagcagcattcaattacacactggaatacagtattcacggccatgttgtgcgtattgaagccgattctgccaagcagaagcgtccctatgtatgggtagatgataaagctgcctcacagggctttttgctcaaaaaccgcgagttactgccagcacatatttttgcctattactccggtcgcaatgagcgtattgaagcgctgtttcatgaacatgagcgacgctttaatcagcgccaggaaatcaccactaacgaagtcctgtccgaacaacttctggagaactttactggctccgacgcggatattcgtgcgattgaagaagccaaacgtcgccgtgaagtgcggctgaagcaagtgggcgatgaccgtctgcgacgcctgttctattgtcgcggtggacacagccaactggtacttctggcttgtctgttatcggacgaccctgtgtttcagaaggtactaaagaacctgcacatcgaatcgttagaatccgctctcttcgttttaaaagagccgcaccggctacgtgaaaagcgccgcaatggaaagttcgaagtgcaggaactgaatgaaggtgacccacgcttttggtatgctcgcagcaatgtggtcagcgagtttcttgacaagctctggaaggttgcttgggcccccattgaacaggagacaaccaaacagattgattttcgtggtcgcacagagaagcaaaagcagctgtacttgtttgtgtcaagccaagaaaagcttaagcaattgggagagtcgatcggcagcaccgacagtttctttcgctacgctgaaggagcctatattggtgatctgatcgatgaaatacgtattgtggttaagaaacgtgatgaacatggtggtaaggtaagttttactcacctttctgaaggtgaattacaaatactcaccgtgcttggtttgatgcggattacccgtgacgacaattgtttgttcctccttgatgaacccgacacccatctgaaccctatctggaaattgcgctacttcgacgatattgaaggggtactaagtgcggatgatgcatcgctgctacagagcgagtcgcaaataattattacaacccatgatcctatgatggtgggcagtctgaagcgtgaacaggtacatatactgcgtcgcgatggtaatatcactctggtagatagtccggaagaacatccgcaaggaatgggcgtaacagggttgctcaagagtgagctgtttggcttatcatccacgctggatatcgaaaccgagcgccgcttgtttcggcgcaatgaactttttgcactcgacgaaagaactaatgatcaagatgatgaactacgccgtttgagtgtggagttggcagatttgggcttttcaaatgcggatttcaaagaccctttctatgcgaagtttgtacgacgaatggccaaacataccaagttccacaaaccaattcttacgcctgaggaacaagctgaacaggataaaatcgccgactcaatcatcgatgagattttacgtgaggatgatggacaatga

SEQ ID NO: 204787 - DNA, 852 bp, Klebsiella oxytoca
atgatcttcatcgacttggaaaataagcttccaacggatatggatttgcatcctgatgttcgctggagcgaggctgattggaacgcttggcagaaagagtctgttcgcttgattggtgagcttgccaagctcaatgcagcaggccaaatcaaagaacgtaatgaattgattgataagcaaagtggccactggggaaagttgaaaccatggcttctcgtactatcgggtggaaaatgctggtttactgaagcgcgagatattgcttcgcatttagacgtggagcattttcgccctaagaaggctacgcgtaatgttaagggacccgaacgagatgggtactggtggttggccttcgactatatgaacttccgaattgctggcactgtacctaatagaaagaagggtgcgtggtttcctcttcgctatggctcgccatgttcaagttatgcgcgtcgctgtgaaggagatgagattccgcacttcttagatcctacaaatgcttatgacgttacattactcgcttttgacgaagaagggaaagcggtgcctgcaccaggtatttctcgttgggataatattagggttagacgtaccgtagaccgcttaaaactctccgaacatcaagccttggcagaggaacgtcgtaaggtttggcaaagaactacgaagctgataaataagtattttcaggcactggctagtactcgaacttctgccgctgcccgtgagcaagtgaaggacacagcacgtgatatactctgccttactaagcctgaaaccgaactttcatcggtggcgaaatggtgcgttcgcttacgcaacgatccacaactttcccggctggttgggtaa

SEQ ID NO: 204788 - DNA, 1170 bp, Klebsiella oxytoca
atggctatttgtaaaagaaataactgtacgctctcaattggtgaattacctgatgagcggaaactgcgcttatgcccaaaacattatcagggtaagctatctaatgcagctaaaagagcccaaaggtgggggctgacgtgtcagtacccatcctgtggcattagtctgtctggtactcgtaatcaacggtattgctgtattgagcatcgtaataaagacagaaggctcgtagatgacgatgccattgtcagtctggtaaaacattcttactggatcaacgtggagtctatgctgaagaataaccccctcgggctggggagtatcaccggtccggctgatattgcggaactcatcaggttatacgagcgtaaggcaagccaccagaaggcgtataacacgctaaacggatatagggtttgtgactcatccggtggagcagtaaaacgtccaatcccctggctggagctggaattatgccatatttaccccaattccaaaggaggtgccaatactacatgcaacatcattatcgctccatcattgattaacagaatgatgaaggactcagtacctgtttgtatcaccagaagaacattctgcggcataaaagcagcaggttcattcttgcctgttaaatctacactattgaaatcgctcacagagcaatacagccaggttgaagttcaggaggctttaaacccagttaaacatattacatttgcagaccctagtgtatcacgcatgctgtttggtacagatatttatgcttatccacctttactaaaaattttaaaggaggaatcatcgcgcctggaactctgggatttaagggaatctattaatcatattgaaagtagtcactggctgtttgctggccctgcaaatgagttatttgctgtcgctgcttttcatgccatgttaaatggagatgctgataacttacttgagatattttccgggttgcacgaagacgtaatggaacgggccaggcaaaaagagactttgaatcatgcatattaccaaagcactctggaccagtatatgtcccatcattttcgtcttgacttgcataatcaagaagcctgctttttattttacaacacatttttcacagtgccaccattggacaaacatggggctttaatcatacctcatcaattctcatgctaa

SEQ ID NO: 204789 - DNA, 135 bp, Klebsiella oxytoca; identical to SEQ ID NO: 133840

SEQ ID NO: 204790 - DNA, 750 bp, Klebsiella oxytoca; identical to SEQ ID NO: 133843

SEQ ID NO: 204791 - DNA, 1128 bp, Klebsiella oxytoca
atgaataaacattcaatgttatttgatgctgcaaaagcttatggaagaatactcgtttcagaggtctgtgtaactcgaaaagacaatgttaataaccttataaaaagcaaaatcaatcgaagcccttggttttttttcgtagtaataaaaaccagatatgagtatcagcacgtacaaataaccgaattggttgagaatgaatattgttttacggaatatgaaaaaaaaataatgtgggatggcatttttgaatctatccattcaagtactataagaggtgaaaataataatccttttttagccgtggaagaagtaaagattttagatccaatgcctctagctagagatactttgggaagtcaatcttcatttcagttaggaaaaggaggctttggtgtggtagagcgagttcagttgcaagatggaagttttgtcgctcgaaaaacccttcaattaaaagacgatcaaaagcaaaatgacgatttaaaaaggcgtttcaaaagagaggttgagtatcaaagtagctttaaccacccaaatatagtgaatattttacaagcagacttaactggacatccaccttcatttatgatgccacttgcaacatgtcatctagggggggaaggcaacgcaggactaacttttaactatgatacaaaagtaaaagcgtttttaaacacgcttgctggcttagaggaattgcataacaaaggtcatgtacaccgagatattaagcctggaaatattctacgatttgattatcctgatggatcttatatatatgcggtatctgattttgggttaatttcaccatcagacagaagtagtactactaatattacttctacaggtagtgcttttggcaccgaactatatatgccaagagaatgctatgtgtatggttttagtgtggctaacgctcaatctgacatctactcattaggcgtattgcttctatttttatttagagaagacggtgaaactctcggatgcccctatgatgaaagaaaatctgcaggtgcatttggagacatcatatctaaatgtacaaaaagagaaccgaaagataggtatgactcaattgcacaacttaggactgcgtttaataatgtagcaagaggacggtaa

SEQ ID NO: 204792 - DNA, 588 bp, Klebsiella oxytoca; identical to SEQ ID NO: 133845

SEQ ID NO: 204793 - DNA, 294 bp, Klebsiella oxytoca; identical to SEQ ID NO: 133848

SEQ ID NO: 204794 - DNA, 468 bp, Klebsiella oxytoca; identical to SEQ ID NO: 133849

SEQ ID NO: 204795 - DNA, 381 bp, Klebsiella oxytoca; identical to SEQ ID NO: 133851

SEQ ID NO: 204796 - DNA, 210 bp, Klebsiella oxytoca; identical to SEQ ID NO: 133852

SEQ ID NO: 204797 - DNA, 1017 bp, Klebsiella oxytoca
atgacaactctaaaacatcatttactcaccagccccttagttgcggaacaggcgttcagtttgctctctacctcctcgtctaaaaaagtgacgaaattggatgtggaaaaatggctcactgtctcacttgcaaaggtgatggtaagtggccccaagatgtacagagtttatacaatccccaaaaaaaatgggggcaaacgtacaattgctcatccgtcaagagctctcaaggtgatccaaagaggattagttgaattcttaaatgataaattacctgtacatgatgctgcgtatgcatatagaaaaaatattagtattaaagataatgcgcttcaacatgtgacaaatccatattttttaagaatggatctcgctgacttctttaatagtattgatgttaatctatttgaggagcggattgagaaacataaaatccaactaagcgcagcagacaaagcattaatccgtcgttctgcgttttggagtcccaagaagacaaatacaggaacccttattctcagcataggtgcaccttcatcgccattaatatcaaatttcattatgttttcattcgatgaaacgattagttcaatctgtgcgcctctgaagatcacatatacgagatatgccgatgatttatttttttctactaagaataaaaatatactttttaaaatcccaagcctaatccaatatgttttaagtactgagtttggtaaaaaattaacgattaatgaagttaaaaccagtttttcatctaaagcacataacaggcatattgcaggagttaccattactaataatgacactctatctttaggtcgagagaaaaaaaggataatatcgtcaatgatccataaatactccctaggaaaatctgacgatattgaactggctaaactacaggggctcttatccttttcgaaacatatagagcctttatttatcgaaagaatgatgaaaaaatactcagttaacttggtagataaaataatctctggtcaatggaggaaataa

SEQ ID NO: 204798 - DNA, 627 bp, Klebsiella oxytoca
atgtctttaatcaacaaagaagaagcacattcagtctgtcaaccctactaccacaccctaacttcagttttcgacaatgtttggaaaaattggcttcaaaacgatgtcgcacgacggttgattgataagcgtgttcgttcagctgttctccgcaatgacgcattgtttttccttaaagacagtattgaaacttctaatcttaaagggatcaaatatgtaaaaatgccatatcaggtaggctttctgattcaagatcgatattttgtaaggattaagaaaggtgataagagccttcgttcttccaattaccctactcaaagagccttggattttcataatcctgaaatggacatgtttggaggattagttcgtttagagctactctacatacttagtgacgatggtgtaggaattgataaaattgttctcacgcagcgcaatggtaagtttgttgcgtgggcaattgatttaacagatgaaaatctgtacgaaatgcctatatctaagcttgaattgaacataccccaaccacagcctgttaagacggtttccccagcaaaaagtgttgtgaaaccaagacgggctagaaagacagaaccgaaggtagaaaatggtcgtggagattaa

SEQ ID NO: 204799 - DNA, 1089 bp, Klebsiella oxytoca; identical to SEQ ID NO: 99047

SEQ ID NO: 204800 - DNA, 1095 bp, Klebsiella oxytoca
atgactatattaattcaggattcattacgtcgagccgttgaagctgcctccggcggtgcgcagactgtactttataccagcgccggtgatccgtcgtttgtgaatattattccaaagtttgatgtgtctacaattgatccatctttgggggcagggactcatccggcatttattgtgaatggcgtcgaggttgatcagttattcgttgggacatatccagggagcattgtaaatggtcagttactgtctctgcctgaccgggctccagctatatctgttccatacaatgacggcatcagcctcgcgcgggctgcaggtcctggctggcacgtcatgactaacgctgagtgggctgcaatcgcattactatgctattcccagggccattcaccgcgcggcaatacaaaatgggggttgtcatctgacaatatcagtgaaaaggggcggcgggttgatggcatgacggccggggcagagtcagggaccggtcttacgctaacaggttccggtcctgtcagctggcggcacaaccgtgactatgcaggcattgcagatttagcaggcaacgtttgggagcaggtgacgggagtccgtttctgtggtggtgagctacagattatgacgaataacaatgcggcgatgggctctactgaccattccctgtcgtcaactgcgtggaaggcggtaagcggtgttgatggttcactgttgacgccaaccggtacggggaccgccgggacagattcctgggtgccgactacgaccaattccgtgcgaatcgacacctcggggacaggaaattacacactgatttacggtgagaatacgctgttcaccagtgcccgaaatcctggcgctacgccggtatcagaagctgcgctaagggtgttgcgcaaactaatgttgttcccgctggtgggcctggtttctgatgattcgctgtcgtactcaaaaggaggcgaggtgatgacactacggggcggtgcatattcgaacggtacaggcggcggcgtcaatgcgctactcgctaaccgtgggcgcacgtctgttggccaggctaactctggtgtccgtccggtatattacaagccgtaa

SEQ ID NO: 204801 - DNA, 378 bp, Klebsiella oxytoca
atgaatcaacaggatattgaacaggtggtgaaagcggtactgctgaaaatgacggccagcagccagccggacgacgccgttcatgagatgggcgtctttgcctccctggatgacgccgtcgcggcggcaaaggtggcccagcaggggctgaaaagcgtggcgatgcgccagctggcgattcacgccatccgtgaggcgggcgaaaaacacgccagagaattagcggagcttgccgtcagcgaaaccggcatgggtcgcgttgaagataaatttgccaaaaacgtggcccaggcgcgcggcacgccgggcgtggagtgcctctctccgcaggtgctcaccggcgataacggcctgacgctgattgaaaacgcgccctag

SEQ ID NO: 204802 - DNA, 741 bp, Klebsiella oxytoca
gtgtttaaatcctggaatatctatctatattttttcgtggcatggttgttggtaattacgttctctttaataacaaaatccgccctattatctataattttaattttctacacaggcttgattccttttattttcgcaatcctttttatatcaagatcaatcattggaaaaaaactagagagcataaagaaaaaatggcactttgctgtatatctttcttgggttatatttatatattctatttttgctcaaaagtgggcttcagaaaccttgaatgatatatttcagattaatgcagattaccttagcattacctacaagttactcgcattcctttttgctccgttcggcatcgtctatcaagcatatatactatctggagtttggtcattattcatatttattagcctcgtcttatccactatcctaccattatttctaatctttaaccttcattttaaaattatcggaaaagcacttggcgtattttccctgatttttatatttatatcatgctcagttccaatgctatcaactatgatgttgcatcaagaacaattgataatcaaatttgcactttgggctgatttcaacagtaaaaacttatgtactgattcttgggttaataatacagaaagtgtccttttcttggatggaaacaaagtactagcctaccaacctaataatcctgaaggctatcatttcacagttgaaacgtgcaattacaataaaactttttag

SEQ ID NO: 204803 - DNA, 975 bp, Klebsiella oxytoca
atgctgcgtttttcaaaatattttttgatactactttttttgcttaaacttcccgacgcatttgctgccccctcgtatcaatgcaagttttcaacaggttcttatattccgaatattccacaaatggcggtgccgagtgacctcccggatgggaccgttctctataagtcttcagaaactcaactccagcttgaatgctcgtatgatcctggcaacggaatgtatacaactggtatcgatgttctctattccactacctcagcatttgatgctttgcaaagtgagaaaaatggtataagactgattatttatataaatgatcagcctatctctaccaggtctcagagtgttcgcttcgataaaacatctccgggttatatttctacagcgaacgtacctgtcagaattcgttttgaagttgttgttgacagaagcaggggtactatcccggagagcggacaattagccggtggttcttacgaatcgatatatttttatcttagaactatcgatactccaagagcagttgtcggcttcaaaacaccaagaatcacggccatcccatgctcaatgaatatgacgatttcgccgaatacgttgaactggggagcgatacaaacttcaaagcttgaaagtggtcaggatttttctaaaaacttttccatcattttaacaaaaaagagttcatgcaccataaacagctcagctccatttggtgtaaatgtctggtttgaccgggctggacaaaaccttaattctgatggttctcttgatttgaataatggtaccggacttagcattaaggacaattcaggtaccgtagtggcatatgatacatattatcagatccctgatgttaaggtagagtcagttttaaccagaaatttcacagcgcagatacaaaaaaccagtggtaaagatctacaaacaggttcattcaacactgtgctagtaataagaatgaactattattaa

SEQ ID NO: 204804 - DNA, 4911 bp, Klebsiella oxytoca
atggcgctggtcggtattaataacgaaaacgagttttactctaaccactatctgggcgaagtctttaccagcgatattcgcgatgtactggaaccctggattgagcaggaaaatgccgctcgcgaagctgaacgcgcagcccgtgagctgggcaaagaggttgaggcgggctaccgcgcaccgtggaaccagcttaacagcctggcgacagagtttttccgtaaactcactgaacatgaaaaacagcgccagatcccacagcgtcttgccgatcagcgcagtcgctggcagccgctgttaaaggcattgggttatgaactcaatccgcacattcagatgctggatgacgatacgcctttgccggtactggctcgttacaacagtaccgacggcagcccgtggctgtggattgttgaagcacatgatcaggatgaaggaacgctggatccgctggcgctgtcgctgctgaccgcgcagttcccggcagataccgataaacataagcgcgacagcctgcgtaaaaaagccaacggtgaatatcacagctggcaggatctgctctccacggttgtcttcacacaaaatgaaccgccgcgttttgtgctgctgctcggtaaccgccagctgttattgctggatcgtactaagtgggcgcaaaaccgtctgctgcgttttgattttgaagaaattttaagtcgtcgcgagatagataccctgaaagcggcgtcggtgttgctacacaaagattcgctgttgccaggcagtggtgctccgtacctcgattcgctggatgacaactcgcacaagcatgcgtttggcgtgtcggaagatctgaaatatgccctgcgtgagagcattgagctgttgggcaatgaagcgatgcgttatctcatcgacaacgagctggcttattataccgggaaacgtgctattaacccggatgagttgagccgcgaatgcctgcggtatatgtatcgtctgttgttccttttctacatcgaagcgcgcccggaactgggctatgcgccgatgaccgccaaaacctatctgcaaggttacagcctggaaacgctgcgcgatctggagatgatcccgctgaccagcgaagaagatcgtaacgggcgttacttccacgatagcctgaatatgctgttcaaactggtgcgtgacggctacagcggcggcgtgaaaatgcagagcgacctggagagcggcgaccggatcactattcacagccaccagttcagcgtgccgcgtctggaaagtcatctttttgaagcgaataacacccgtattcttaaccgtgtggtgttccgcaacgaaaccctgcaacaaattattcaggcgatgtcgttaagccgcccgggtaaaggacgttttaatcgccgggggcgtatctcctatcgccaattgggtatcaaccagttaggtgcagtgtatgaagcgctgctctcttaccgaggattctttgccagtgatgacctctacgaggtgaaaaaagccggagaagagtttaacgagctggagacgggctatttcgtcagcaaagacgagatcggcaaataccacgacgacgagaaggtctacgaaaaagacggcagcctgcgtattcatcgtaaaggcagctttatctatcgcatggccgggcgcgaccgcgaaaaatccgcttcttactacaccccggaagtgttgactcgctcgttagtcaaatatgccctgaaagagctgtttaaagagcagattgatccgattaccgatctgcacgccaaagccgatgcaatcttaaacctcaccgtgtgtgaaccggcgatgggcagcgcggcgttccttaacgaagccatcaatcagctcgcggaagcttacctgttccacaaacagcaggcggaaggtcgccgcatacctcaggatcgctacacccaggagctgcaacgggtgaaaatgtacattgccgataacaacgtcttcggcgtggacttaaacccggtggcagtggagctggcggaagtgtcgctgtggctgaacgccataagcggcgatgcatttgtaccgtggtttggttaccagctgcactgcggcaactcgttggttggggcgcgacgtcaggtgttcaacaagagtgagctgacctacaaaaaagcgaaggatccgagttggcttaacagcgaaccggttgaactggcgatgaatacgccgcgcgaagagaagcagattttccacttcctgctgccggacagcggcatggccaattacagcgacaaaaccgttaagcagcgctatccggatgatttcaaagcgttggacagctggcgcaaagagtttaccaaaagctttgcaccgcatgagattgtcgatgtgcagcgcatcagcggcaaagtggaagcgctctggaacacgttccgtcagcagctgaaagccgagcgccagaaaaccgccgacaattactcggtatggcctgcggaaaacacggctcaagttcgctcttctttaagcagcaaagatgaaaccttcagaggccgcctcgaagataacagtacctatcagaaactgcgctgggtgatggactactggtgtgcgctatggttctggccgatcgacaaagtggatgaactgccggatcgcggtatgtggctgatggagatggagacgctgatcgacggtattgtcgtcacggaaagagtcactgaaaccgcagaacaggccaccggtgagctgtttgcctacgagggcatggtgcgtgaagagtcatcgctgttttccggtgcaggccgcctgaaaactgaagtactgttccgtcatttgccgcgtctggcgattgttgatgcgctgaagaagcagcaccgttttttccattgggatctggaattctgcgatctgttcgccgagcgcggcggctttgacctgatgctcggaaacccgccgtggttgaaagtagaatggcaggaagcgggtgtgctgggcgactacgagccggagtttgtgctgcgtaagctgagcgcctcgaagctggcgacgttgcgtgttgatacctttaacgccattccggcgctggaagatgcctggcgcagcgagtatgaaggctgtgaagggatgcagaatttcctcaatgcacagcaaaattattctgtactggcaggccaaaaagcaaatctctataaatgtttcttaccacaggcgtggcgtttgggggctgaaaaaggtgtggcgggattcctgcaccctgaaggtatttatgacgatcctaaggggggactgttgcgcacggcggtatatccgagattgagggcgcattttcaatttcataatgaacttagtttgtttgcagaagtacatcacgcaacgatgttcagtattaatatttatgggtcacagcaagctataccttcatttatcaacatgtcgaatgtttatgctgtcagtgcgatcgatgcatcgtttgaacataacaatcaaggacctgttcctggtattaaagatgaacaggaaattgacggaaaggtaaaagtattctggaatattactggccaccgttctcgtctcattaatgtgggtttacacgagctctccttattcgcccggctttatgacagcgaaggaacttctgcttggcaggctcgtttgcctgcattgcatacacaacaatttgtgaatgtcatggagaagatagttagttgtggtaattttttggccgacaataagttttataaaacaattgatgttcattatgacgaaacacaagcacagaaagatgggtttatttgtccaacggtgaaattcccatcaacttctagtgattttgtgctttcaggccctcatttttatattgggaatcttttctataaaactcctagatttgttagtaagttaagtagcgattttgataatttggatttagaagttatacaggatgattatatcccacgaagtaaatatatcgtcaataaggataggtttggctttttatcaagtattcctcaagtgaaatttgatggtatagattatcctattactgatttttatagattagcacaccgaagaatgtttggccctacggcagagcgttcactcatcaccgccataattccgaaagagatttccaatattaatactgtagtcactacggtatttaaaaatacaaacgagttgactaattttgctactgcgactcattcattggtatatgatttttatctaagaacatcgggtcgttctgatctttatggcgcgcagttagctagatttccttatatagacgtgcagaaagctatagttttaggtttagtgcttaatgcgttaagcagtttccataatgatctttgggaggactgttttgacaaaaaatttaccaaatatcgttggagccgcaatctcccacaactcccacaagatttcttcgccaacctcactccagaatggcagcgtaattgcgcgttacgcactgattacacccgccgtcaggcgctggtggagattgatgtgcttgtcgcgcaagctttggggttaaccctcgaagagctgctgactatatatcgcgtccagttcccggtaatgcgtcagtatgaagccgatacctggtacgatcaaaacggccgcattatctttaccccaagcaaagggctggtgggcgtcggcctgccgcgtaccgcgcgtaaagcggacctgaaaaacggttttgtctttaccgtcgacagcccagactggaccggcggcgattgcaccgatcaagccatcggctgggatgatgtcaagcatctgcaaaccggcactgtcagcgtcacttttgatgactatacccgcagcgatgaaggcgagcgccgaaccgtcatttggcaggctccgtttatcaaacccgaccgcgaagatgattataaagtggcctgggcattctttgcacaagataaggagagcgcctga

SEQ ID NO: 204805 - DNA, 2232 bp, Klebsiella oxytoca
atgatccctaatctgaatgaactgacggatactccgattgcccgaaccaatttgatcaagcttgaagaagatcagctgacgactatccagcgtctcttggcccctatatctaatatctatacgatagactttatggttcagcgctttactaaagagcgaaaagaaaaatccgctgattactatgcgcgaattcatcaggaggtaaaatcttgcgtgcggcagaagcttgggctggaagccgggcaggaggtaaaatatgaactgcattgcttaccaaattaccatcacgtcttttttttcctggcgcctgcaactaacccgaacagtcaggctcataggacgttggcagaacgtattgaaacgctttgtcagcaactcaccgctgaaaatcatgacctatctcgcctgattcagggattatttagcctgcatttgaaaatggtaatgctggaaaaagccagtgagcgcttttcggtatcgccgacttacttcaactcaacgctttaccttaacgcttgtctgagtcagcccgtcacacaaaaaaaaggcatcggggtgatggaagcctttgagctcgacatttatgcctcagaatataatgaactcgcttttaccctgcacaaacgaaaattcttggtcgaaccggcggatgagatgcacctatccctggacgataccagcgtgtggtttagcatcgataatcgtcggcttaaagctcggcgcaaacttgatgcccgtgatagcaaactggatttttttcgtgagcgcagcggttatggcgaatgccaagcctatacctataacgtggtcatgaatgctgcctgcgagcggctcagtgaactagagatcccccatcaacctatcccatttcaggctacacacgaggtcaatcagtttgctaccgacctcgatcaacagctggctaatacgctgttggtggttaataacggcgtcgaattcagcgtcacgcaagaagcttatttctttgatgcattagccaaccagttccccgggtatcaactctggtctctggcatcgcttaaacattcccgacaaaccggatttgctgagctgcctgctaatacatctattctggtactcaatgcggtagaggaagaacgaagcaacagcatccggcagcaagagaatgaatctgttgagtacaatgatttctattcagcctttgccgacgcccgaaaacaacctgaactcaactgggatatttatacccagcttaagttagatcgtttgcaagggtggctaaatcaacaaccactgcctgtggttttacaaggaatgaacattgatcgtaagttgctggatgcgattgattttattaatgaacaattgataagcaaccctgctcaatacgaaatcgaacttacgaaaccacacagtcgtctcaagtcagcagttaccttattgaaaagtaaggtacgccgaacgaaaactgaactatggttcaaagagagcttactcaatcaacatcacattccactgccagacttggcgaacgggcactataccgcctatgcggtacgcaaaacgaaaagtaatatccacctgcttgggtatgttgaactaaaaatagagcacggccaacttagggtggttgataccgggatcgtcgaaggtgaattcgagtatctatctgttgatcatccagctctgggacgactaaagaaattattcgataaaagcttctatctctacgaccatacagcagatgtgctgcttaccacctataacagctcccgcgtgccgcgcctgattggcccggcgcaatttaatatcgtcgattcatacgcttatcaggaacaagaaaaagcgctggcggagcgtcaaggtgataaatttaacgggtatactatcacccgctcagcaaaattggagcaaaacgtactgccctatctgatatcaccgggccgctcgaaatacgactcgttgactaaaactcaaaagatgaagcatcaccatatttacctgcaaccgcatgagaatggagtgtttgttctggtaagtgatgctcagcctacaaatcctactattgcacggcctaacctggtagaaaatctgctgatatgggatgcccaaggtaaggccgtagatgtatttaatcacccgttaactggtgcttacctcaatagcttcaccctggatatgctaaggagcggcgaaagtagtaagagttcgatttttgccaagctttcacgattgatggttgagaactaa

SEQ ID NO: 204806 - DNA, 4710 bp, Klebsiella oxytoca
atgagaaaaagctggactataaaggaagattgtaagctgcttaccttggtacgtcagcacttttccgcgttggtcagccataaccggctgaatgccacaatgccatttagccagcagcttcacgatgcatttgactcacctgatcgcgatgccgcagcattgttgtatcgactcgaacaggcaaaaatcctgggatttgccagccgtcctggaggcgatcccactaaacagcggtttcgctgtctgataaacaatgatttggcgctatacgattatagcctcacctttcccactctcaaaaaagcattgcatccagataccgttgcagcagcactaaaccacttcacgaatagcaatccacacgaaccactgtccaatactatcaatgaaattgcaaaagccttgcatctttcctccatgcagatagaaaagcttctgatcgacagtggccaaataaccatcaatagttaccgtgagtgtgagcgtgttggagagataactatcaataataatctgcaagatcttatctccaggcaaattcctgacataacgctggttgaagatattaacgcttgccgcgcccaagtctctcaactttaccacgtgcatgaacgtgatggtgctgaggtcatattcagttccgatggtacgggattcggcaaaagttatggcgtaattcaagggtatgtcgaatatctagagtgtttcgccaaaaaccaaaagtcagatgatctgtttcccgaaggtggctttaccaacctgctgttcatgtcgccgcaaaaatcacaaatcgacttggatagcagccagaaagacaaaattctggcttctggcggcgaattcatttgcgttctctctcgtaaggatattgccgatctcgacttcatggactgggccacgggcttgaaaaatcgcgaccgctatattcagtggtacgaaggggcgaaaggtagcaaatatattggcagcgcaatgcgttcgctcaattaccatgtctcacaaattgatcgctgtgaagagcagttaaaaaagctgacaacatacggttctcaggataccaactacgaaagagaaattcttgaagagcagctaaaaaactgtcgtcatagtatccgcaatacgattgagtcagcctgtaaattactatttggaccagatagtgaaaaagcttccattaaagagtacattcgtcgcgggctccaggcgcgccaagagcgaatgcaacacgtggagacagcacgaaaaccaagcaagtctgaactaagcgtacacgaagtctacttcgagcttatcaaacaggtattgcctttcgaagtttgccagtaccgcccgtcggtgctattaatgactacaaataagttcgacacatcaacttaccgactggcgcctcgtcagcgaggtgaaggcgtgcgttttgagtccgtaggtttcgacttgctgattggcggcaagctgactcccaaagatccacagatcagcaccgttgcggcagctggccataccgggcaggttgcctatcttcgtgatgaacacttcagaagtaatccagactgcccttttcgccagaaaaatattcgctttacggtaatcattgatgaactacatgaagcctacacccgtcttgaagaaacatgccatgtaaagctaatcacacaggaaaataatctggcgcatgttatctctgtcgcgggacgtattcacaatgcggtactcagcctggagcgccggaaaaagcccaaagaagcgcaaacgacctttgagcaagagatggtcaaattcatcaccatccttcgagatctactggcgaaaaagtgcgaattatcacccggtacgacgctgggctcgatactggagatgtttcgcgaccagttaggagcattcgaagttaacggcgacgccgccgaacgcatcatttccattacccggaatgtgttcagctttaaccccaaaatgtacgttaatgaagaggggctgaaacgtattcgtatgcgcaacagcgaaggcgacataacgcgcaccgagctgtattacgaagtcgaaaatgatgccagcgacaccaatcccaccctgcacgatctgttccaattggtctccgtcatcctcgccgcctgttctgatatcaccaaccgacactttaagcgctgggtaaaaaatggtggccaggataactccagcagccagaatacacccttgggccaatttgttgacgcagccaataatgtagctggagtggtgcgacatatcttcgatcgcaccaccgataaaaacttgttgattgatcatttctacacttatctgcaacccaaaactgtattcacgatgacgccgatagttgaactcaattacgtgaacagtggagccgagcgtacaattattctggcgttcgagatggatctggtacaagagttgcctgaagccatgctgctacgtttattaacgggcacgcacaataaagtgattggacttagcgccaccagtggttttagccacaccaaaaacggtaacttcaatcgtcacttcctggagcgctatagccgtgaccttggctatcgagtcattgaacgtaaaaaaacagatatcgatacgcttagagcactacgcgcgttgagagccagtatccgcaacgtcgacttcagggtgttcgatgataagcagttaaaattgaccgatatctaccaaaattgtgagatctatagcaggacgtatgacaactttttcgacgcgctgaagaaaccgctggagtacgacctgaaaaatgcctataaacggcgtcagtaccagcgggaacttgaagcgttattgcttgccgcctacgagggtaaaaacagcctgattttgtccctttcagggacatttaagcgggcctttatcagcgcctggcgcactcatcaatcagcctggcgtcagcagtacagtatgcactcccggtgcgatgaaaaaacggataacgataagaaacatgaccagatcctgacctttaccccattcaaagggcgtcacacagtccatttagtctttttcgattcaccactggctaatgtcgaagatattaggcaagaaacctatctccagaacagcaataccgtactggtatttatgagcagctacaaaagtgcaggcaccggcctcaactacttcgtgaaataccatgacggcgatattaatgatatcaatgcaccacgtctggatgtcgattttgagcgcttagtgctcatcaactcctcgttttacagcgaagtaaaggacaacagcggcaaccttaatacattacctaactacgttaccgtgcttaaacactacgctgatgacgatattaccgtccacaagctggccgatttcaacgttaatttcgcccacggcgaaaactatcgcctgttaatggccgaacatgatatgagcttattcaaagtcgtcgtgcaggccgtagggcgagtcgagcgtcgcgacactctattgaaaacagaaatctttttacctcgcgatgtgttccgtaatgttgcattccagttcgccgctctcagtgaagatagcggtaacgaggtagtatcagaaagcatgtccttgcttaaccaccgcctaatggaggagtgcgaaaagctgagtcagaaccagtcatttagtgatgcagaacagcggtatgcgtttgaacaggctatcgtagaaaatggtcgccgcatcgatgctgttcataagcgagtcctgaaaaccgactggataaatcaggtacgcgccggcaaccttgaatatctcgaattgtgtaatttattccgcgattctgactcctttaccgatcccatgcgttggctggaaaaacttcaggctaattccttgtatgccgccaatcggcaaatgcagtcaatccaccacgccctgtttatcgaccgccatcagggcaaccaaactattttactttgccacaaacgcggcccggatggacttgtccacagagattattccgccctgtcggatttcgctggcggcgcaagagagtaccggcctgagctcaccctctttccgcagtatagaaacgatgtcgattttacccccggcaacctggtcggcgagttgattcgtgaatgtgacaacatccaggaaacggcattcaaaaaatgggtacccaaccccaggctagttccgttgctcaaaggcaatgtcggtgaatatctcttcgataaagtgctaaaaagctatggcgttaccccactttctgatcaacaggtgtttgaacgccttgaaccgctagtatatgagttttttgaccgctttattgaagtgggtaacgacctgctctgcatcgacgttaaacgctgggcgacgcagttggatgatttaacgcgggcagaagaaacgcttgagaaaagcaacaacaagattcgccagatccgtaatatcaccagccaaaaggcagatacagaggggcagaaacagcttcaggctgtgctgtcaggccgttacgaacgcattcgatttgtctatctgaacgtcgcctacagccagaaccccaataatctgatgtggcaagataacgtggatcacacgatccactaccttaacctgttgcaaaccgactaccagtactatcagcccaaaaatcgagagagcggacgagctcaggaaaactcgaaactgagcatgacattggacattaacccaatgttactaaccctgctgggtgtagaaaagttgccgactaaaggaaaagtctcatga

SEQ ID NO: 204807 - DNA, 624 bp, Klebsiella oxytoca
atgtctggcgatattaaagcagcatttgatagcaatttaattgcaactcaggcgggaagcgctcaggtatttcattttgatatgactacccgtgagtttatcggtaccgaggaaatttatattcatgtcggtgttgggcttccggcgttttcctgtcttgaagaaccgccagtacaaaatgaatatcaggttgctgttcgttcggaagataattcatcctggtctgttaccgaagattatcgcggtatcaccgtctatgacattcagacgctggccagccacgttattaccgagcctggccccatacccgatactgtaacaacctctgcaccattaacccgatacgacaagtgggacggttctgcatgggtaacggatgctgctcaacagcatgctgcagatgtcgctgctgctgaaactcaaaaaaaacagatgattactcaggtctcagacgaaattttaattcttatggatgccgttaacttgaatatggcgactgatgatgagaaatcccgtcttactgctttgcaggcttatcgggtgctgcttaaccggatagatacatcgcttgcacctgatattgtttggccggttatgacaactctggaggatggtaatgtctaa

SEQ ID NO: 204808 - DNA, 1095 bp, Klebsiella oxytoca
atgcttatagctttttcttttccaattgcaagtattacaagtacgcatttatcattaatggaaagagactcaaaattcaattcaattgcaaaggttgaaatattttcatcagtcacagccttaatattaggtgtctctgtctcatatattgggggcggagtgtatagcctcgttacccaaacattagcgtattcatccttaagtgcggtcggactattcttttataccagatggataccctcggcatacttttcatttgctgaggttaagggcatctttaaattcacttcaaatcttgtgttatttaattttgttaactatttttcaagaaatagtgatcagataataattgggcgttttttttcatctactattcttggccagtactcacttgcttatcgaataatgctcttcccaattcaaaatatcacatttgtattaaccaggtcgttatttcctttgcttagtagaaaccaaaataatagcaaatattcattgtcattatacttgcatgtacttaagactttggcaatagtgatacctcctctgatggttggaatagctatcgttagtgatgactttgttaaggtcgtattgggtgataaatggaatggtgtagctattttaattttatatttagcaccaactgctatattgcaatcgtttattagtactactggttctgtttttatggcccaaggaaggacaaatagattattccaattgtcattgtttaatgcttttttacaagttggtgcgtttattttaggtgcgacagttagtgttgtttttattataaaattatatttcatcgcaaacctaattatcttttttccaaatatatatttcgctatgaaactgttaggtggaaaatggcgtgattttttatttgtttcttacaaaccgctattatcagttttgttaatgcttgttttgctattgtttttgaaagactacttaaaaacgataacggctttcccttcccttcggttagcaattttagtttttttaggcggtgtaagttatattagtttcctttcacttttagagcgtaaaaaaccgcttgatataattaaagatctcaaggatatgtaa

SEQ ID NO: 204809 - DNA, 429 bp, Klebsiella oxytoca
atggatgtacccattcttggcgccataaccgaaatcagttccccaattcttaacgttctggagtttaaagccgccaatttcaaaattttgcgctccataataaatcaaccccgtcccgcgccagccatattcgtcgccaatccagtagcgtggcccggccccagcaggaatatcagcatagtacgccacgtccgcgccgctgagtttgggataacctgtaccaatcagacggatgttatccgtaatttccaggtcaaggcacaggccaaacgggtcgtcaggattgacaataacaccggcagcgcgaaacagattgtcatgcacgccgtcctgcagtttgatttcgacattatccagtacaacccacacattactgcggtgaattacggcttcggaaataataaattgccgcttcacatagtcagatga

SEQ ID NO: 204810 - DNA, 777 bp, Klebsiella oxytoca
atgaaaaaaataaaaaaaggggatgagccgaatttattatctatatataaaagggaaaatcctaacagtgattggaagaatggcttcagacaaaatgctggagcagaggcaaatcagtcagttcgagatgctctaaaaaaagagcaatttggtttatgcgtttattgtgaaatagatcttaaggattctggaggaattggatttgatgatttcagggtagaacatttctttccggaaaatccaaaggcaggcgaatcaagaggtgatggtataaattatgctttgcactggccaaacttatttggatgttgtactggagggaacgtaccacatgtagtagagagcgaggaaaggtatagcaacccacatactcattgtgatgtacccaaaatgaataatgattggacagcaattatcctcgaccccactgtagatataccagcatttccatcgctttttgagtttaatgaggagggaactatttctgtatctgatagttgcccacaagaaattaaggaaaaagcaaataaaactattgaatacttaaaacttaacacaaagaaaattgaaagatttagaagcgccacaatccaaaaaataagagatgaattactttcatttccagaagaaaatcttcctgcagttttgaatgagttatctgaagcttacctttgcccggataataacggtaagctatctccttttttttctacaatcagatggtatcttggtccagctgcagaggatgttttacgacaatcagaatataatgattaa

SEQ ID NO: 204811 - DNA, 729 bp, Klebsiella oxytoca
atgaaaattgcagaattccagttaaatctaaataatgtcgatggcaatatcgttagtgttgttaaaaaagcaatatataaatttatgagcatcgacaatataagaatgaaagttgataaagataacgtatcaatcttacttgacaaaaaaggtatgactatttctgcaactgacctttctcagggtgaaaaagctttattttccttagtcagtgatattagccgtaggcttattcttctaaatccaggaaaagggattgacgctttaaaaggtcatggtgttgtaattatcgatgaaattgatttacacttacacccgaaatggcaacaggaaatcattggacaactacaggatacttttcctaacattcaatttattataacaactcatagccctcaggtattatcaaccgcaccgagccattgcatcaaagttattcgtaatgatgaaaatggaatactaaatattgtcgaacctgaattctctctcggttccgagtccgatatgattcttgaagatatatttcttgtaaactctcgcccggaaaatattgagcaagtaaaaatgcttaaccggtacaaagatttaatagaactcgataagtgggatacggatgaggctgaagatttaaagaaggagctcgataaatgggcgggtaaacacgatccagtaatgaaaaaactgcaaatggatattaggcttcgtgagtttagaagagggaaaaaataa

SEQ ID NO: 204812 - DNA, 555 bp, Klebsiella oxytoca
atggtatatgctgatgatgatgtcatttatggaaatgattggttaaaaattctagttgattgctttaatcgatatgataggaaatgtgttgttgcttccagagtgagaataattgataagaatatttttggtgttacaaaatcatattctagttttgatatttcaaatagtgaaaataaatttaatgagtcttttattattacaggtgtgggaggtgctattttaacaaagaatctgattgatagtcagtatttgaacgatgatagctttattgtagtagcgcctaaaacagatgatatttggataagtaaaattatagaactttcaggaacgtcggtgatctcttgtcctcaggcattaagccaagttcatgaaatccaacattcaaattcatctctaagttcacaaaatacattgttttcaaaaaaatatggcccattaaagtattttgttaaaatgcaagagcgaatgttctcatatttcggcttgctcaaaacaaacaatgatacatcgcttaaaaataccaatatacacttccataaaaagctaaaataa

SEQ ID NO: 204813 - DNA, 192 bp, Klebsiella oxytoca
atggaaatctctccccggctcgcgctgcgcttagccgggctacaggtacacagccgtctgctggcccgtagcccgggcaaggcgctttgcgccgccccggagctcatcagaggccacattagatatggtttcccggaggcgatgcagcgcatctgtccgggctaccgcatgcagacggcgatgggcccgtag

SEQ ID NO: 204814 - DNA, 525 bp, Klebsiella oxytoca
atgactgaagaagtatataaagatgtttcagaggatctgtctgagtttgtcggaacgcattttgtttacacctatgacaacggctggaagtatgagtggtatgcgcgcaacagcaatacctgcgactaccgtattcaccagggacttgtcggcgggcgctgggtcactaatcagaaaatgaatgccgtacagtttgcacccggtattttcaaggttgactggcacgagcctacggggacctgtgtaagcttgttgttcgatataaggagaaaggtaattcacggcacgatcttcttcccgcaatggatcgctggagaaggacagcatcctgagaaaacaatctgttaccaaaacgaattcattgaagacatgcatcgctttcgtgacgaaggtccggcttatccttatgtgattattcctgaatttgcaaaagtaacgtatatgaaaaatgaagggcctgataacgacgaggtgatcaatatgccaccaggtcagctaccttctgatttcttcgatgataaatag

SEQ ID NO: 204815 - DNA, 498 bp, Klebsiella oxytoca
gtgactcggactccgacagcgactcggactctgatagtgactcggatagcgacagcgactcggactctgacagcgattctgactctgacagtgactccgattctgacagtgattcggactccgacagcgactcggattccgacagcgattccgattccgacagtgactcggatagcgacagcgattcggattccgacagcgactcggattcagacagcgatgccgactccgacagtgactccgattccgacagcgactctgactccgacagcgactcggattcggacagcgattcggactctgacagcgattccgattctgacagtgactcggactctgacagcgactccgattccgacagcgattcggatagcgacagcgattcggactctgacagcgactcggattcggacagcgattcggactccgacagcgatgccgattcggacagcgactcggatatcccgcaagccaacgcggataccaataccgctctga

SEQ ID NO: 204816 - DNA, 1083 bp, Klebsiella oxytoca
atggccaaatttttgttatatcccttcgtgtttctggcatttagctttggtgccgatgcgaaagagtgtcatcttgctcagaatggtaaaggcggcacaatgacgctgaacggcggttccccctcctcaccgcagattttcgcttctgtcgctggcgatagaggaggtattccaaaacatgaactgagcacattcaacgcgctactcgatcacgatctgtggtcttattgtgacgcgggaaatgatggtgttggctttttcgttaacaccaacccaaactccgccatcgtttcagagaacggtcgtgcactctttcctacaaatgttgacggcatttactatgctgtaaaaatatacagcaccggcggtggcggtggatattttccgcaacctaacgctggcaactggacgcttgtagatagcggcgatagggcttactgggatagtaaacagatcaaggctgatgtcacactgtatcaagaagtctcttttcctggaaaccttaacggcgttagcacaattacccccaaagactccaggtcgctggggctaattcgaattggaacggaggattctgatgacaataacccgtgggatattcacgttactccatccagctttagcgtacaggtcatggctgctacatgtcgttccgcgtcggtcaataacggaaccaataacgtcgattttggcgatattatgttctcagcattaaaagacggacgctggacggaaaccccttttatattaaggctaaacggatgcaacaatactgtttgggtacgaatgaagctcactacccctaaatcggaattaaacgcagccggtaactggacgctgatgacaaatacgctcacaggcagcgatgcggcaaccggcataggtgtggagttaatttcgaaattcactactgcagatggtttaaacctgcagcccggttcagaaatatggtctccgccaactaacgtaggcaccgcccagtcatatgactatagttttaatgcctatctttcccgaacatccggtgagttaaaacccggcagatttaaagcgataggtacttttaccatcgattatttttaa

SEQ ID NO: 204817 - DNA, 711 bp, Klebsiella oxytoca
atgaataaagacgatcaatatctattatttgctctttctactcccatggaaatcctgaaccaggattgctcaccatcccattcatcgccaaaaatgtatgaggggatgaagtttttcgatcttgcttcttcatggggaattgaaaaccgtgatgaattaattcagaccgtttatcgtatgaccgatgacggtcatgccacacagcttgctggtttttattctaactggttccgtttttcacctcaggagtggcaggagctagtttgtaatgaactgggcgacaaaggccgcgcgtttgcgcagtttgtcgctgatacggcgatttgctgcggtgaaggcgggatccgtgcctgggattatgtccgaatgggttttttgtgtcgggtgggggtactcaataaatggctaaccgaagaggagagcctgtggttgcaatcacgagttcatctacgggcgctgcatttttatagtggctgggtgcagtattacgccgcctattcgttggggcggctgtactggcaatcgcctgaagagggcgaactggggcaattgcaaatatttctggcgcgtaaggaatatgacaagtcaggtgaacagatgttcagggggctggtgtcacaagaagacagcttttatgccacgctgccgtggcggccattagcggattatcccgagtgcccggaaatgctcaaggacgttagcgatctatga

SEQ ID NO: 204818 - DNA, 1419 bp, Klebsiella oxytoca
atgaaaacatgttgggaagttcttggtattgagtataccaatgatgtcgaagttattcgccggacctatctggcattgttgccgtcgttccatcccgaaagcgaccctaaagggttcaaagagctgcgtcaggcctacgaaagcgctctgcaggaggctaagacgccagcagcgccggtggtggcgttagatgaaagcacgcagcagatcaacgaaatagtagaggggtttcgtgatttactggccagcgatgagcaccgttttcaagcggaagcctggcagcgttttatccataaaatcaacacgctgtcgattaaacaagtggagaggctacgctggccgctgtacaccattgccgaagatacgtggcccgtttcatatacttgtttgcggctgctggccgatcggcttggttgggagcggcaggatggcggcgaagccattgataatgaaacgctggaaaacttgctatataacgttcgtcgtggcgatttgtttgactattcgcaactgctgacgctaccgattgaagtgcaaaaccggaccatcgagttttacgctgccctggaaggctcttttttcagtcatccttcatttttttcccattttatcaatcaacatggtgcaatggttgtgccggatgacgcgatatttcagcggcgcctactgcgctggtatagctctctgggctgggggattgcggaattactccccgtcgctaagatgtggcgagaagccgagccgggtaatagcagcccgcaatattatgaatttgctcagcgcgtttattgcggtgaaggcgatactctgctgcccgaactttgcgctctgtggaagcgccaaccgtccacgcaggtgggtagcctgctgctgtggtggtgccgtcggaatcgtcctgacgattatccgctggtggtgatggtactggaaaaatacgaacagcgtgatggtgacggtaaacctctgccagtcttccccggtaacagcgcgcgtacacgcctgttatgggcagagatgttgcacagcggcgagttatcgccattgagccatagctttgtggcgcatcggctgaataaatccgctccggtgatgggaaaagagcataaccagcatccgcgctggcccatctatcaggttgccgaatgcctggcaagtgggaaggcgccgaaagcctcccagcttgtgccattaatgcaacgactcacggcggacgatgcttgcccattagaaatattgattattgattcgctgaccgtgacgcaaccggataatgtctatgagatgaatgaaaccacggaggctgaagcgggtcagagcggcaagacgccgggcagcggcatcctgcacgcgcttaaagtcatcttctatatttttatcatcggcggttttattgccaaattactgctcctttttagataa

SEQ ID NO: 204819 - DNA, 1692 bp, Klebsiella oxytoca
atggacaatgcaaatctcgctattggtattgatcttggcaccaccaatagtttaatcgccgtctggcaaaatggcgctgcgcatcttataccgaataaatttggccaatatttaacaccgtcggtaattagtcttgatgataataaccagattctggtgggcaaacctgccgtttcgcgtaaaacctctcatccagataaaacggtatccttattcaagcgggcaatgggtagtaatacttgttggcagctcggtgatgaatcatttactgcgccagaattatcttcgctggtactgcgctcattgaaagaagatgcagaagagtatctccagcagccaattcataacgtcgtcatctccgttcccgcttattttagcgatgaacaacgcaaacatacccggctggcggcggagctggcggagctgaatgccgtcaggttgattaatgaaccgacagcagcggcagtggcctacgggcttcatacccgacaaaatacgcgctcattaatcttcgatcttggcggcggtacattcgatgtcaccgtcctggaatatgcctttcctgtcattgaagttcgcgcctccgcaggagataactatctcggtggggaagactttacccgcatgttgctggaagatgcacttaagcgctggcacttagatatgcagcaggtcagccgtagcgcgctggcagccctttatggcctgctggaagaagctaaatgcagtggacagctaccgctgacgtgcgtatggcagcacgatgaacagacacgggaaatcagctggtatgaagatgaactggagacgctgtggctaccgttgctaaatcgccttcgcgctcccatcgaacaggcactcagggattcactgctgacgccagagcaaatagacagtctggtgctggtcggcggcgcatcccagcacgcgctggcgcagcgtattgccgtacgcctgttcggcaaaatgccgtataaaaattacgacccgagcactattgtggcactgggagccgccacgcaggccgcctgtcgcctgcgccatgaagatattgaagaggtgatcctcaccgatgtctgcccctatacgctgggcgtggaagtttgctcgcagaacgtagacggtatcttttcgccgattatcgagcgcaataccactgtacccgtgtcaaaagtcgaaacttactcaaccctccatccggatcagagcaaaatcgatatcaatatctatcaaggggaaagtcataaagttattaacaatattctcgtcgacagcctgactattgaactcgtacgaaccggaattattcagtcattagatgtgcgatttagctatgatatcaatggcctgctggaagtggatgttatctttcctgattccggccagagggtatcgaaagtgatcaaccgtagtccgctccagcttagtcagcagcagattgacgctagtcgcgcacgccttgaggcgttaaaaatctgccccagagacatgctgattaacagaacatttaaagcgcagcttgaagagaaatggtccagagcactaagcgatgagcgacagtggattgggcgtatcatcatcgagtttgaaaacgcattgcgggagaacgatgcgcaggccgccgacaaaatacgccgcgaggcctgcgatgcgcttaatatcgtgctccacgataatcgcgagcttatctaa

SEQ ID NO: 204820 - DNA, 702 bp, Klebsiella oxytoca
atgaaaaatattaatgccctcatagggcagggcttaactcaccctgtagacagccagagagaatttattaccctacacaaacaggaagttcgaattgattcacgagtatttgctcatcgtattgggattaaatcaactaaccttcatgcacttattcgaaaacacaaaacagaacttcttgaactgggaacactgcccacgtttgaaacagcggcagtgaaaaagggaggggctcgcggaattaaacatgagcgctgctttttgttgaacgaagctcaatttgattacatgtgtcgtgttgttcgtgggcgcgatcctttgcgaatgaatcaatttaaactcgatgtaaccaaagcattttctaaacgccgtaccgttgaaccccttcgtcgcgaatatttgcctggttatcatgaaagtcgtgatggtcttaaggctttgggggcgcagcgtcatcattacatcaatttggctcgagccgaaaatcgcgtagctggcctgtcggatggtgagcgtggatccgccgacgagcagcaattagggttgctggtagtaatacagaaaattgaacaagcggcttttaacgaagcggtgcataacggaatgagtccgggggatgctgtacgggaagtcgcacgcagaatggatacatttgcgtcattactcagcacaaaatcgttactggggggagaaaatgtttaa

SEQ ID NO: 204821 - DNA, 576 bp, Klebsiella oxytoca
atgtttaactcaattcaacctccctgctcacctgcagttcgcgctgtatccatatattgcggctgtaatcacattgcagggactatacgcaaaaaacagttgcgagagtctggctccttagtctatgttgaaaaggcaccagcaaaatctggtgccgggattggcgtcctgataacctgtatagtgccgacacgcactaagcgtgtttttttgtcggcaaaattcctgcacacccaaattatggtgggctggatgaggcttccgaaaggaaggccggtgtctatacaggccggttacgccaaccttgttcagctcaccaccagtctgagattggcgtctcttggtggtgaatttacgattcactgtatagaggctgccactatggctactactcctacccaaaatccacaatttatctggatcatcgctgctatacgccgcgatatcgaatccgtcactgtaaacatcttccatgtcaccgcaatatctgaacgcgaagcccgtcgcactttagtgcgtgatcacgtttgttttttcgctggccgcatccgtctgacggaggtggatcatgcgtaa

SEQ ID NO: 204822 - DNA, 219 bp, Klebsiella oxytoca
atgcgtaataactcatttcccacagtcatcaccgagaatccttatctgctcgatgaaatgacctacgaaacagaatgcgtgttggcaattttgcggacaattaacgatgtcagtgatccacacaccaaaagttacctcgtagatgccgcggaacttattggtactcagttgttgaaaaagctagagcacaacgcacgtctggaagatggtgattgttaa

SEQ ID NO: 204823 - DNA, 576 bp, Klebsiella oxytoca
atgccatttgagccagtccttattgagcttatcttttttgccaccctcttcaactttaaccggagcctggtcaacgttcataaccacttcaaccgcatcaaaaccgagcttttcaccgagcaaataatacatctgcacacaggcttcacgatcgtataccacaaccatgcctttcatctttttcggcataacatggctggtaaaatgctcaacaatatcattactcaccgcagccatgcgtctgggggatttcagcatgatagccagcttgccggcacgtctggacaatgccgctttttcttcttcatccagattgttttcattaacgagttgctcgaactcttcgttgatggcatcacgatccactcggagttcagccaaccgaggttcgaacttcaccgggttagtcgcgccgtcacggatcgactgcttatagctatagcggctcatatagcggccaggatcttcttcggcaccgaacaacttaaatgtattacgatcaatgccagaaatcggagtacccgtcaggccatagaaatgggcattgggcaatgcccagcgcattttctcgcctaa

SEQ ID NO: 204824 - DNA, 429 bp, Klebsiella oxytoca
atgccagggcccccagtctttaactcgggcattaatggcaccataggcaaaggttttaccttcgctggcaaagcacagcaagttggtgacaaagaaagattcaacgtttttccagtagtactttttgccgcccataaagtcggcggcaccgtcttgccaggtcacgctggggcgcgttgcggttttaacttcgcccactaccagtggtataccgttcacatacaggacaatatcaaaatagacttcagtggccgcgatatagtggacctgctgtgccaccacaaagtggttgttctctatattgtcaaaatcaatcagattgatggtgatatggtcgccattctcgccaaacggcaaggttttctcagccatcaaccattcctggaagttttcattggcctttaccagaccggtatggcgggcctctaa

SEQ ID NO: 204825 - DNA, 1113 bp, Klebsiella oxytoca
atggtgaagtttggcgatatcgctaaacatatctctatacgtgttgagccaagtgaaaccgaccttgaaatctatgtcggtttggaacacttagattctgatagtttaaagattaagcgccatggtgtaccaagtgacgttgaaggacaaaagctattggtgaagaagggccagataattttttgtaaaagacgtgcttatcagcgtaaagtggcggtagctaattgggattgtatttgttctacagatgcaatgattttggaagccaaccctgataatgttattcctgagtttttgccattttttatgcaatctgatttatttgtaaatcgagtgattgctcattcagaagggtcattatctccaagaatcaagtggaagactttagaaaatcagttttttcaaattccaaatactgaagaacaagaaaaactggttaaactctttaataaaataaattgtgtttctgcattattagactcattaagttcagcaattccaaaagatgatctttttttacaaactattaaccaagatgagaataagatagagatcggtttactttctgatattgttaccagtggaagcacacccaaaggcggctctaaaaactatcttgattcaggtataccttttatccgaagtcagaatatttatcctaacgagatagtttggtctgatattgcatttatatcagatgagatgcatagggaaatgtctagatcctcattacaagatggtgatgtgttactaaatattactggagcatctattggtcgttgcgctgtctttcgaggggataaacaagcgaatgtaaatcaacacgtttgcattattagatgtaagaaggacatggttaagccagagtttttatgtgcctacttaaattctaaatatggccaagtacagataaacagacttcaaggtggattaagccgagaagcattgaatttttctcaagttcgttcaattttaataccgaaactaaatttagttgaacaagaaaaaatgtcgaatacattaatgtacttaaactctattggcaaagaagttaaaaataaaagtaacttattgaaactttttttacgtggcttatacaataacaaggtatag

SEQ ID NO: 204826 - DNA, 306 bp, Klebsiella oxytoca
atgttgaccttctttattccctatagcataaagcctcataaactggagcagcacgacgtaaaaaaggataatgaatttatggatagccccccgattgcggacgttgattttacaatgctctggaaggaaagcggttatacgataaaaaattacgttaaacccgcctctgataatcgatttataacgccgcagacaaggacaaacgccatgactcccgagatattactattgcgtgggaaaatcaatcaactttctgaaattactgaatatattgagttagaactcacagataaccctcaatggtaa

SEQ ID NO: 204827 - DNA, 288 bp, Klebsiella oxytoca
atggcaactatgagaggctgcagaatggggtgtaggcttgccagcaggctcatgaaagaacaggggttgctgagttgtcagcagcctacccaacggtataaacgtggtagtcatgaacacatcgctatcctgaatcaccttgagcgacagttagtagtgacagagcctaatcaggtgtggtgcggtgacgtatatctggacaggaaagcgttaggcttacctcactgttgttctcgatctgttcgcaaggaaaccggtgagatcgacaatgtcgttctcaccggctag

SEQ ID NO: 204828 - DNA, 234 bp, Klebsiella oxytoca
atgtcgttctcaccggctagcagactgaccatcaaaacactgggaatggcatgggaaactcgcggtaaactagccagggtgaagttccatagcgaccaggacagccattacacatgcaagtcgttccggcagttactatggcgttaccggatcaagcaaagtatgagccgacgcggaaactgttgggataacagcccgatggaaagcttcttcaaaagcctgaagaatgagtga

SEQ ID NO: 204829 - DNA, 177 bp, Klebsiella oxytoca
atgggtatgaatgctttagttatatttatagctttaatatatgccattattggggggctgtttatggcggttgcagtctggctttttttcaaaagaataaatactatcagtcgcttttgtctgacttggttatcatccggtttgattatcattatcctgctttttatcttccagtga

SEQ ID NO: 204830 - DNA, 663 bp, Klebsiella oxytoca
atggatttttatttcgtgtcggatgataattactttgttttgggtgttggaagctttttgggtaaaattagtaattttgacaagaaaatttgcgttaatgtgaaagaaaacctgtcggggtttacaccttcgcctggtgatgtggttgtttttgcaattgctgattataaaatgttacgaatgatgatgaaatggaataggttgactgagtatcgcctgatcatcatgttgaaattgagtgttagtatccgaccattaatggaggttactccaaaaattattccatgggatatatcactacctaagtttatccgtactttacatgaagtgacaaagaaagaaatccgctggatatgtacatctgaacgtgttacggatatttgtcttcagctcggcttgggtaggtctttatctgaggttgctacccagttttcattatctgaaaaatatgtgtatgctatgagaaggaatgtttttgctaaactaggcttgaataattgcaatagtgctctaggtactttaatttgccgtgatattctggaggtgaggctgagatatagccatgaagagtttaaaagaactgggcgggtaactaccgtgcgatatttgtctgattattcgcgatttgcggatattattcatacccgagagctttataattga

SEQ ID NO: 204831 - DNA, 1011 bp, Klebsiella oxytoca
atgcagggggaacgaagattgaagctcagggggcgtgaagtcaacgctaccctgacgatgcgcaaaaatgccccgtggctggcggccattcgctacctctattacaacccaacttctgcgaaaagcagcgggacggaaaatagtagcgctccgctgaccgagacaaaagtagatttccacggctggcccgatctccagcttcgctgcgcagagtgctggctgtgggggcaaaaatatggtcgtatcgacggcgattttacgatcagcggcgatactctgaccctggcgaacgggctggtggataccggttttggccgtctgacgagcgatggcgtatgggttagcgccccgagcggcgtacggacctcattaaaaggtaagctgcacgggaataaaaccgatgattttgtaaacttcttcggcgtgtccacaccggtaaaaggatcgtcgttcgatattgattacgatctacactggcgcgcgccgccgtggcagccggacgttgcttcgcttaacggcattcttaaaagccgtctcgggaagggagagtttaccgatatcagcaccggacacgccggccagcttctgcgcctgctgagcgttgacgcgctgctgcgcaagctgcgcttcgactttagcgatacgttcagcgaagggttctatttcgattcgattcgcagcacggcatggattaaagacggcgttctgcataccgatgataccctggtcgatggtctggaagcggatatcgcaatgaaaggctcggtggatcttgttcgccgccagctggatatgcaggccgtggttgcgccggaaatctccgcgaccgtaggcgttgcggcggcctttgccgtgaacccgataatcggtgctgcggtctttgccgccagtaaggtgctgggaccgctatggaataaggtctctattttgcgctatcgcatcaccggtcctatcgatcagccgcaaattaacgaagtgctgcgccaggcgcggagcgacaaaaagcaatga

SEQ ID NO: 204832 - DNA, 939 bp, Klebsiella oxytoca
atggaaaccttaatttcaacttctcgccaccgaaaatctagtgcaaagcatgacaccatcttggcatctacacaaagtgatcgtgcaagattgatctactctgctgcgttcagaagattgcaacaaaaagcacaggttttttccttagaaagtaattcagcagtacgatctagactgactcactctatagaggtttcgcacattggtcgctatattgttgcagcaattattgagaaaatagctgaaagttctgacatagataatgaaattaaagagttttggcaaaagaatagcttgtctttatcaaatatagttgagactgcatgtctaatgcatgatattggaaacccaccttttggtcattttggggaggcagcaattgttgagtggagtaaatcagactcagttgaaaacgcattgaaaactgcacttgctgaaactttttcaaaaaaaatatgccaaaacttactttctgattttatacattttgatggcaacccacagggtttaagaataataacaaaattacaaggtgatgatggatatttcggacttaatttaacctacacccaacttaccgcatttataaaatatactttttgcccagatgaattagattcaaaaaaaccatttagtaaaaaaataggttatttctcaactgaaaaagacgtaatggaaagtgcatggaacaccttgaagatgaagaaaaattctcgtcatcctcttggctttttaatggaggcatctgacgatatctcatattgcatcagtgatatagaggatggtattgaaaaaggaataatcactgtaaaacactttagtgacttcacatgcagccgaattgaacaactaaaaataaaccacaaagatttcgaaatcgaatgtgatgaattaatatcatgcttaacaattccatacactctgcttctgctgatgtaa

SEQ ID NO: 204833 - DNA, 3516 bp, Klebsiella oxytoca
atggacagcaatactcaaggattcacttcatactggcgtaataccttagctgatgccgagtctggaaaaggggcatttgagcgtaaagatgaagattcattcacacgatggatggaagtcgatcggggaagactgggtgaagagatcgtgcaatcgttcttcgagggcgaagacgagcaggttaaaaccgtcgaggtgttgttacggccgcaggtgtggatccgcctgttaaagcatggcaaggaacgtacggcaggcgcaccaagtatagttacgcctctggtgacttctgcactgttgaaccgcgaaggctttttattccctacatcgccagccaccattccccgtgacctgctcgaacctctccctaagggtaccttttctattggtgaaatgccggaatatgacaggtacaaaaccacgcatgattcaattacttttggtcccagtaatgaggatgagctgcttgttgagactgatgatcaacgagtggaacgatatgctcgttatcagcagttgtggcaaaagtaccttaaagacactgatgaacttttaaaaaatgttgctggcagatggctcgcatcacctgagcaatatgaaccagctggatatggctacattattaaagccaaccagcctggaggggccagcctccatatcctgcctatgtacgatcatctgctgtcgtgcaaaaaagaggtgccattgctggcgcgctttgcctcgaaagataagtttcctgttgagccgctccttgccagtaatgccatgttcagtgagcgtctggggcattctggtgataaatttccgctggctgtggcgcagcgcgatgcccttagccattacctcactcaacagccgggcgatattcttgccgtgaacggtcctccgggaaccgggaaaactactctggttctttcaatcattgctactgagtgggcgatggcagctttaaacaaaactgaaccgccggtggtgattgcgacatcaaccaacaatcaggccgtcaccaacattatcgaggccttcggtaaagattttgctaccggcactgggcctatggccgggcgttggttacctgaagtaaaaagctttggcgcttacttcccgtcttcgggacggagagccgaggcggtaaaaaaataccagacggaagacttttttaatcgtgttgaatcccttgaatatgttgaagatgcccggtgcttcttccttgaaaaggcaagggcagcttttcctagtaaggaatgtcattcacctgaacaggttgtggatctcttgcatcagcgtttggttgaaatctctgcagagcttgagcaaatcgagcctgcgtgggatgacctcaacgcaattcgtcaggagcggcatgccatcagtgacgatctcgaacagtatattcaggataagagaacgttactgctcaatagcacaaatgaaatctcgctattaacgcaaggcaaaaaacagtgggagcaatatcgagccggtgagtcgatcatgtacactctcttctcctggcttcctgccgtgcgtactaagcgtcactatcaaatgaagctgtttttggaggctacgtttggcgaaagaatgacagcattccagggatctcagcctgatggaattgatgcctttatcgatggattgattgaacaagctcataaagagcaggctgggtatcaacagcaaattgatcttgctgaggacatttcccgacgtgaaagcgaagcagctatacgctggcacgatattactcactcgctgggaaatccgggcgaaacagagttgagtctgcatgaagccgatgagcttgcagatacacagctccgtttcccggcgtttctgctggcgacgcattactgggaaggccggtggctgatggatatggctgctatcgataaccttcaaaaagaaaaaggtcttaaaggggcgaaggccattaaagcccgctggctgcgtagaatgaaactaaccccttgtgtcgtgatgacctgctttatgcttcctcaccatatgctcatcagggagcatgttggcggcaagaagtttgatgatggctatttatataactttgccgatttgctgattgtcgatgaagcggggcaggtgttgcctgaggttgcggcagcttcttttgcactggcgaagaaagccctggtgattggtgacacagaacagattgcgcctatctggaatagcttgcccggtattgatatcggcaatatggttgaggagaacattcttccgggaggtacgcaggaagaacttactgaagcttatgccctggtgtgtgactctggaaaaagtgctgcatctggtagcgttatgaaggttgcacagtttaattcccgctaccagtacgatccggatctggcgagagggatgtacctttatgaacaccgtcgttgcttcgataacatcattggctactgtaacaccctctgctatcacggtaagttgcagcccaaacgaggggaagaaaaagagacaatatttccagcaatgggatatttgcatatcgatggtaaaggtatgcaggccaatggtggaagtcgctataacgactttgaagcgaagacgatagcggcatggcttgcagtgcacaaagaggaaatcgagcgtcattatggcgaacctctacataaagtagtgggggttgttaccccattttcggcacaagtcagtacgattaaatcgtcattacgtaagctggatattaattgtagtggcgatgaaaattcgctgacagtcggtactgtccattcattgcagggggcggaaagggcgattgtgcttttctcccctgtatattcgaagcatgaagatggcagttttattgacagcgacagtagcatgctgaacgtcgccgtttcacgagctaaagacagcttcctggtctttggtgatatggatctgtttgagatccaacccggatcgtcacctcggggattgctggcgaaatacctgtttgcttccactgataatgcattgcagtttgagtttcaggagcgtcaggatttaagtacctcacaaacgcagatttcaaccctacacggggtggagcaacatgatgcgtttctgaatcagacttttgaagccattaaccagagcattactatcgtttctccatggctcacctggcaaaagctggaacaaacaggttttctggcatcgatgtctcaggcgcgcacccgtggtattaatatcactgtagtaacggataaaacgtttaatacagagcatgcagattttgaaaagcgcaaagaaaaacatcagcgcctaaatgaagcattggaaaggttgaatgaaatgggcgtcacgacgaagctggttaatcgtgttcacagtaagattgtgattggtgatgaggggcttctctgcgtcggttcctttaactggtttagcgctacgcgcgatgagagatatcaacgatacgatacgtcgatggtataccgtggcgaaagtttaaaaagcgaaattaaaacgatatattctagcctggaacaacgtcagttgtaa

SEQ ID NO: 204834 - DNA, 123 bp, Klebsiella oxytoca
atggataaatccaacgttaaaaccagtttcaacaaaaatatatcctttattagtttattccaaggtattagcagcctcagtgacatatttttctttatcaagctaatgcgtaaaattttttag

SEQ ID NO: 204835 - DNA, 252 bp, Klebsiella oxytoca
atggaacagaatgaaagattttgtcaggcttgcggaatgccaatatccgaacgggatgtcaatatagccagcgagcaatattgcgcctggtgtagcgatgcggagggtaacttgaaaccctgggaagaggccgtaaatggcctggctgagtttctagactcatggcaaaaagtcggcactgaagaagcacggaagcgggcaaaacgttatctgacggcgatgcccgcctgggctcataaagcggacgagtga

SEQ ID NO: 204836 - DNA, 3837 bp, Klebsiella oxytoca
atgcaatttgtaacaaacggacctgatattcctgagtctcttttgcaggctcatgaagaaggtcgggtggtatttttctgcggcgcgggcatctcataccccgcacgtctgccgggttttgaagggttggtcaaggaaatttaccgactaaatggaacaaaaccttctgaacttgaacaagctgctttggatcggggccagtatgatgccacattagatcttcttgaacgtcgtttacccggtcagagaattgccgttagacgggcacttgtgagtgcactgaaaccaaacacccgcatcaaaggtgccgttgatactcagactgcgctgttacatctggcacgtaatcatgaagggtcgctaagactggtcacgacaaacttcgatcgcatttttcatgtagcagccaaacgaactcgtcaaaccttccacgaatattcatctcctatgttacctattccaaagattagtcgatgggatggactggtctttttgcatggattgataccaaataagcctgatgatactgccctaaatcggctagttgttaccagtggcgatttcgggctggcatacctgactgaacgctgggctgcacgttttgtaagtgagttgttccggaactatgtggtttgttttgtggggtacagtatcaatgaccctgtattacgctacatgatggatgctttagcggctgaccgtatgctgggtgagaacaccccgcaggcctgggcattaggtgattgcgaaccaggacaggaagagcaaaaagccaatgagtggggggctaaaggtgttacccctattctttacaatgttcctgctggtagcatagatcattctgccttacataataccctgcatgcttgggcggaaacataccgtgatggggtccaggggaaagaagcgatagttgtcaaacatgctcccgcacggccacaggatacaacgagacaggacaatttcgtcggacgcatgctctgggcattatccgataaatcaggattacccgcgaaacgcttcgctgattttgatcccgttccttcactggactggttgctggaaacattcagtcttgagacttttgggcatgaagatttaattcggtttggtgtccctcctcaggaagaggaggatactaagcttcgttttagtctggtccgacgccctgcgtcttacacacgtgcgccttatatgtgtctggcatcacgaggtgtagccaatagccaatgggatgatgtgatgaatcacattttccgctggctgatacggcaccttgacgacccccgactgataatctggatagctgagcgtggtgggcaacttcaagaacgttgcgtttttttgattcaggatagattggacagactagctacgcttgagcttgatggcaacaccgctgagctggatagaattagattaagctctcccaaagcagttcccggccccctaatgcgaattttatggaatttactactcagcgatcggctgaaaccaccgggacataatcctgacctatataactggtttaggcagcttaaaagggatggtttgtccactactatgcgttttaaattgcgtggattacttgcaccaaaggttttattgagaaagcccattcgttgggattacgacgtaagtgatcctgatacaccgcttagcatcaggcacttggtcgactgggaactggttctcactgcagatcatgtgtactccactctgaatgaacaggatagtgacaactggaatatagctttacctatactgctgaacgattttcaacagcttttgcaggatgcactggatctgttgcatgaacttggagaagctgatgcgtttaaggatcgttcatactgggatctaccatctattaccccacactggcagaatcggggatttcatgattgggtgagtttaattgagttactgcgagattcatggctcgcagttaaggctaatgatgtcccacgcgcggcaatcattgcatatggatggtttgagcttccttatcctaccttcaaaagactggctctttttgccgccagccatgataactgcatcccttacgaagaatgggttaaatggttgttaagcgatgattcctggtggctgtggtgtgttgagaccaagcgggaagttaatagattgtttgtgttacaaggtaagcatctgagcggatttgcgcaggggaatcttgaaacagcaatccttgcaggcccgccacgtaatttgtaccgggatgatcttgaagatggaagatgggaatatataactgatcgttctgtctggttacatcttgctaaattaaaagcctctgacctaaatctgggagcattagcaacgacacgactggaagaaatatccaacagatatccaacgtgggagttggctgacaacgaacgtgacgagttctctcactggatgagcgggacaggcgacccggattttgaggacagccgagagattgaatctgctcctcgaaaccgacatgagttggtcatatggttacaaaagccagaaccagaacaccagtctatgtacgaagatacctggcgagatgtttgccgtacacgattctttcatagcgcatatgcactttgcgaactggcgaaaagtgatatttggctcactgagcgctggcgtgtagctctccaggcctgggcaactgatgatcttgtttcacgctcgtggcattatgttgcacccatagttcagaccatgccagatcattatctcaaggagattatccatagtgtggcatggtggatggaaacggcttctaagtttataaaccaccacaaagatatccttatcgggctctgtcgcagaatactggcattaccacttgaagctggtaccgatgcgaatattgtcatcaatggtaataaatcatacagtccggtcgatgctgcgataaatcatcccatcggacatgttactcaggttctggtgaacctgtggttcaaacaagagccaaatgataacgagcaacttcctgattatcttaactctattttcagtgcgctttgtgatcctaatatcaagcgatttgttcatgggcgagtgatgctaagttcacagctcattgcacttttccgtgtagaccgtccttggacagaacaatatcttttaccattttttagctggaccaatccctttgaagcgaagtctgtgtgggaaggctttctctggtcgcctcgcctttaccaaccattgatgaatgcttttaagtcccaatgcctcgatagcgcaaaccattatgcagaacttggtgatcatcgtcagcaatatgcaactttcttaacatacgcagcactaggtccgacagcagattacactgcggaagagtttcgtgccgcttttgaagctctcccaccagaaggtcttgaacaatgtgctctggcactctatcaagcgcaggaaggagctgctgataagagagaggattattggaaaaatagagtccttccgttgtggaaacacatctggccaaaatctcggaatctgcttacatcgcaaatgaccgtttcactggcccggctaataattgctaccggcgatgaatttccttcggctttgaacaacgtaattaattggctagtacctgttgaacacccttactacgtcgtgcatcgtctgcatgaatccggcctatgtacccgttttcctgtcgaagcaacattgctactgggatccatcattactgatgataatcggcaatggttatctaatgaatatggtgcttgcctgaatgacattctccaggcagcaccaaaacttgagcaagacgcacaatatttacgtctaagagactattacaggaggaacagtgcctga

SEQ ID NO: 204837 - DNA, 555 bp, Klebsiella oxytoca
atgaaaagctactttatttccgatgacacttttttcctttatgggatccccgttgcgacagagggcgaagccgctgcttctgtgtttattaacctcaatgaaaaggaaagtctgaaagcgttcgagcctgctgcgggtgatatggttgtggtggccgtaaaccatcatctgagcagaaagaaaattctgcaaagatcgatcatgccattttgtcgggtggtgatcatgctggatatacccattaacagcagcgggatgattgagttcccttgtctgatatcaaaaacgatatcttcactggaattccgtcgttttatggacatggccaggaagattcccgtcaagcgagggacggtatcaaaacgggtacttagcatttttaatcagcttagcgccgattattcatctcaaccccaggttgcagacttcagcgtatcgatgaggattatttaccgcattaaacgcaatgtttttcaaaaatacgggctactcaactgtaactctcagggcatttttgtgtgccaggatatgctgagaatgaaagtcccggtctga

SEQ ID NO: 204838 - DNA, 606 bp, Klebsiella oxytoca
gtggatatttttcttgtgtcagatgatacctactttttaatgggtatgcagaattttactgccagtttaccatctatagggtctgttacattttctaagattagtagatgggatagggaacaaaatcagttaaatcccgagtcaggagacgtagtgctggtgaatattagtaatatttatttgcgacgcaagtttattcgtttacctgccatgtcgaattgccggttagtgataatggccagacttaacggcttgaatcccattatttgcaaggcggtattcccacaaattgtagcgtggaacatacagcccagtgagttaattaatttgttgcgtcggattatgggggacgcattaaacaaacatcatgtccccaagcatacaatggaagtatttgatttgcttgtaaaggaatactctcttgccgatatttctgacaggatgcagatgaatgaaaaatacatctatgctattaagcgacgattcttacaacaacttgggctggggaagtgcaattcatcggttgcatctatgttttgtcatgaaattcttcatatggctactggtgttgacaaattaaatgctgaggtaagaatgaagctttag

SEQ ID NO: 204839 - DNA, 708 bp, Klebsiella oxytoca
atgcggtttatctctttcttattgcgaaatttattatgcgcaggctttgtggtgtgcttattacctctatcctcattttcagttctggcagatggtggtatttctgtggtcggaacgcgttttgtttatcctcaaggtgaaaaacaactcagcatcaaagccaataacacctctacaacggagtcatttctggttcaatcatggattgaaaatgaagttggtgcaaaaacgaaagattttatcgtgactccgccgctttatgtcagtaagccacaaaaggggacatcacttcgtctggtttacactggccctgaacttcctaaggacagagaaaccctctattattttattactaaatctattcccgccgttgaaaaagataaaacagaagggaaaagtgtccttgttattgcaatggcaacccgacttaaggtgtttgttcgcccgaacgggcttaaacctgatgttagtgaagctccctcaaaaatggtgttccggaaggcagggaaaaatctggaaataagcaatccgacgccatattacgtgactatgactgagcttagtgcaggtagccagacgctgaaaaatatcatggtaccaccaaaaggaaagataacggtcaaccttttggtagggaataaagtctcattccggactgttgacgattacggcacgttttctccgttacaacataaaacgatgatgtaa

SEQ ID NO: 204840 - DNA, 2589 bp, Klebsiella oxytoca
atgttgatgacccttcctccgtttgttggtgctgaactttatttcccgtcttttctgatttctcaggatgaggatgctgttgctgacctgtcttatctcacgccagcgggggctcagctccccggaaactatgatgtggaattgtatctgaatggcacatggctggctgagcgcaagttgaagtttgtccctgttgactcgttaacgtcttctcatgctgcgctgctctccggggtggatgttcatgacgatactggcctggtggcgtgtctgactcctagagactggcgtgatctgggtatcagaacagacgctgtcccggcaatgagtggtattccggaaacagaatgcgtgtccccagggcgctatatcccgcaggcttacacatcatgggatttcgatgaaagacgcctggatatcagtattccccaggcgatgcttaaaagccgccctcgtggctggatccccccggaacgctgggatgagggcgtgaatgctctgatgcttggatatcgttttaatggcagtaacagtcacggtacttacagcaacaaccataacctttacctgaatcttaatagcggtattaaccttggtccctggcggctaagggataaccgcacctggagcagttattccaccagtggtggcggtaaaagaaaaaactgggaacgtctgaatacttatcttgagcgggccatcattccctggcgcagccagttgcttattggggaagcttccactgaaggggatttatttgatgcgttctcttttcgcggggtgaaactgtccactgatgacagcatgtatcccgatacgatgcgaggatttgctccggttgtccgtgggactgcggcaagcaacgcacgtatcagtattcgccagaacggcagccaggtgtatcaggcttttgtaccgcctggagaatttgtcgttgatgatctttacccggtatctacagggggagatctggaagtgacggtaaccgaggctgacgggacctcccgtacatttatcgtgccttatgcttccgtcccgttgctacaacgcgaagggcgtgtgcgctggaatgtcgtggctggtcgctatcgcagcaacagtaatagttacagcgatcctgaatttgctcaaggaacactacagtggggattgccttttaacgtcaccgtttatggtggtttgcagataagcgaaaaatatcaggcgggcatgctgggaagtggcatgaatatggggttctggggggccgtatctgccgatatcacccatgctgagagcaaacttgcggatgatacccatcatgaaggtcagtcattgcgttttctgtattcacgggccctgagttcactggggacaacgctgaatctgacgggatatcggtattcaaccaaagggtttcatacgctggatgaaaccgcacttaagggaatgaaaggctggctgtatgactatgacaaggtggacagcgaaggccggccggtgaagcgtccttacacagactattacaatctgtataacacaaaaaggtcgagaattcaggccagtatatcccagaaaatatgggagtcaggttcaatatacctgaatggcagccggcaaacttactggaacaacagcagcagcactgactctctgatggtcggatacagcgacatgattgggcctgtgaactacagcctgtcatggagttacagcaaagccagcaaccaggcaggagcggatcgcatggcatacctgtctttctcactgccattcagtgctcttatgcctggtgcttcagatgagcgtcaggctgcaaggacacgcctgactggcagtgtcagcagtaatgatgatggtcgaagcagctatatggtgggtatgaatggttcaatgctggaagactacaaccttaactggaatatccagcagggatatgagcgtcaggggcataacagcaacaacggaggtagcggaaacgcaaatgtcaactaccggggcacgtacggggaggcgcaagcgggttacagctatggcagggattataaacaggtgagctatggtctgagtggtggtgcagtactacaccgtaacggtctaactctgggacaacagccaggtacgaccagcgtgcttgttgcggcccccggagcggcagatgtgccggttatgaacgggacgggcgtacgcactgactggcggggatatgcgttactgccctacagctcagcgtatcgtgagaaccgtgtcgaacttgatacacggcatcttgatgatcgaaccgagctggaagaaacggcaacccgagtagttccgacacgaggtgcgctggtccgggctgactttaaagcacgcagtggtatcagggcgctggtgaccttgttacataaggggaagccgttgccatttggtactacggtaacagatatggaggggaacagcagtatcgctggtgatagcggtgaagtgtatctctctggtctgaaaaaaaacggtgtgctgaaggcccagtggggaataaatgataatcagaagtgcactgtacgttacaggttgtctgaatcgcagatgaaattatcactggcacatttttctgaagtctgtgagtag

SEQ ID NO: 204841 - DNA, 549 bp, Klebsiella oxytoca
atgaaattaaataatactgtacgtacaacactaattgcagcttcgctggctctgatttccggaagtgttttcgctgctccggtcactatcccggttgcagtaacatttgacggtgtagttcgtgatgatacctgtgcaacaactgttgtcgggactggggggactgttgaccttgggatcatcagcaacggttcttttagtggagccggctcaactgggccggagaagaactttaatattcaactcagtggatgtggcgcgggtctggcttcgacgcttgatgtctggtttggtggtgcgaatgatgatactgcaacttcatcgctgaagaacatgactggctctgcaaatattggcgtacaggtactcccggttgggggaaccgctctggtgccaaataatgctgcgtcgacagcttcgtttacaggacttgttgctggtgcacctaatacgctgactctgactgcgcgtacagttcaggtgggagcgacaacgcccacggccggtaacctgagtgttcctggaacccttaatatcgtatatccataa

SEQ ID NO: 204842 - DNA, 798 bp, Klebsiella oxytoca
gtgaaaaaaattgggttttgtattttactcttcatctggtctggaattgcgaacagtaatcctgccgttatctggagtggggatttaggtaatactttatattttactggcaatccctcgcaacaatatcaaactttaaccgggacttgtgttgaatcgccggtttggggtaactgtgcgtccactccggtatcaggaggtaactgggcaacggcaacctgcacgatatctggggtaggtaatgttaattttaatacagagtatattatcgacggacgcgggtatatagttcactggtatatggatctcctggggacttggtctcccaccaatttttcttcacatactgatacaacttatcaccggctatatattgatactatatatcgtggtcggtcgacaggcattcatacaccaatgcaatgtactattatggccagaaattatgatggtacaatttcatcaaattcgatgacatgggttcttgtgtcagcggatgtcatgactgtttatatgagtaaaccggcccccatcacatcctcaaaatatgaaacggttggtttcgttactacgctgacgagtacttataccgtgggtaatgaagtaatgagttataccatgtcaggaccatgcagctcatgggatccgcatcttgaactaccagattcttcaatccatcggccatctgatggtgcatttgctctccctgccagtggttctaatttgattatgaagtttactcccggaaccgcaggaccgtattcatgtgtggctaattttacgatttatggcccctaa

SEQ ID NO: 204843 - DNA, 348 bp, Klebsiella oxytoca
atgccggaacgctccgccgctggttacctgccgccggtctggtgtggcgcatggctttttccccacactgtgcatccgcgagcgcataaagctgataaaatggctaccatccatgaagcactggagaaatgctgcgcggaaaattcggtgttttaccaagatgaagtgagcatcaattgcaacccgaaaatcggttcaggctggcaggttctcaggcagcaaaagcatgtgatgacaatcggtcagaatgaaaaagattatctggcagggcattgcacaatggtacaagcaaagtcagttacatggggggaggcagcaaaaactcagccctatgtatcagtctattaa

SEQ ID NO: 204844 - DNA, 606 bp, Klebsiella oxytoca
atgaatatttttcttgtgtcagatgatacctactttttactgggtatgcagaatttgactgcgaatttaccacctgtggagtctgttgctttttttaatgtcaacaaatgggatgcaaagcggaataaactaaatccaacttcaggggatatagttttgatgaatgtcagcaacattaatttgcgtagcaggcttattcgcttacctgtcatgtcggcttgtcgacttattataatggtcaggtttaatgggatgaagtcctttgcttgcaaagatatgttcccacaaattattgcctggaacacgcagcctaagcaattgattaatctgttgaatggggttgtggagtatgcatttaacaggcatcagatccccgaaaaggcaaagcaaatatttgatttgttggtgaagggatattctcttgttgatatatcagacagaatgcggatgagtgaaaaatatatttgtgctgttaaaagacgcatgttgattaaatttgggttgggtaaatgtaatgcatctgtcgcattggttttttgccatgaaatactgcgcatgaataaaggttttggtaaatcaactgtcatgaaaaaggtgggttcttaa

SEQ ID NO: 204845 - DNA, 1245 bp, Klebsiella oxytoca
gtgaaaggactaatgaaggctatagcatgcgtgggtgtgttagcgggaacagtcctgcttgcgcctcaggcggcagcaggaacacgtacagagaacatttactgggctatgggcgatgcggcaggccagctggcagggacctgctatatcgattacccggaagaaaaaccgctgtcggtaccccggacactagtggtggaccagaacacgcctgacggtacggttctgttccagtggggatatggcgaatttatgtcggacaccacgattcattgtacgtctactggcatatcgaacaatcatggctatttatccgatggcgcaagtggttcgggttatacctattacgttaactggaccctgccttacgatggagtgaacccttttttttcaacgacagacacaggaataaagttaaaaatactggcgcgatttaatgcggcatgtgcgtattttgattcatctcccgcctatataactgaacatggttcaacaacatgttttgctgccggaacagaggtaactgttaactctaattacttaaatcagacagttcaggcatattattctgcaggaaggtaccattttccggccatttcaggaagcatgtctcttcgtgctgagctgataaaaaagggggttgtttcttacccgaattcttcgctggccgtaataaattttactatgatgtatttagctgtggggttaactggcggtggtggcatatataatcagaacgctttaaccagtccgaatttctggatagtgcctccgtcctgccagctcagaaccaccgattacaccattcccatggggcgctgggctgctgacgccatagctcatatagggacgccagcatatggccctcaggttcctgttaatctgtctctggaatgttccggcgctgttgaccatgttcgtttccgctttgaagataccggcacctcgctttccggtaataataatatcagcctctacgacacaaccggcgggaataaaattgacggactggagatagagctgctttataacggcacaaaggtgaatgttgataacaccactcttactgataccggtagccacggggtggctaagacttctccggcatcactcccgctgtttgactccgtcagtacggccgcatttcaggcacggtatatgcagaatgccccggtaactcaatccgggacaaattataccggtcccgtgaccggcaaggtgaatatgtatgtgacttatgattaa

SEQ ID NO: 204846 - DNA, 228 bp, Klebsiella oxytoca
atggaggaaaaggatgcctgcaaaattcattcatatcacgtcattaccgataatctttatctgggatatgacatccggttgttgctggaagatatggctggcgaaaaagaagagcgttatgcctcactcccggacagcaggataaccctggaagaatggatgtctctgcaaatgcattattgcagggcgtcttttcagcggttagtgaggagcagtccattaccgtga

SEQ ID NO: 204847 - DNA, 390 bp, Klebsiella oxytoca
atgtcaggggcgattaacgatgaactggcgcggaatctcgaagccgcgggcttgtggcggcgggcggcagacaggtggctggaggtgatgttgtcgtatggtttgtcagatgctcagcgtgagtggatcagacgacggcggaagtgttgtctgtcggcaacgcagcctgttgttgtaaaggacggtctgaacgtgatggaaatcctgaatgcggcaaaggcggcacaaaaaaggatggggctgagtcaacctggtggcacggcattcggattcaaggatcagaaacgcagggataaaacggttatcagtgacagttgtcagacggaagaaacggatgctgaacttctcatcagagaatattttctgcagcggggggaggcggagctttaa

SEQ ID NO: 204848 - DNA, 792 bp, Klebsiella oxytoca
atgacttcattttatctgctagaaaacgagattgaattttactactcagaacgattactaagaaatcgcgtcaatggccgagagataactctaactccgttaagttgtaacattcttttagcattatgcactgatgatgaacctgtgttgacacatccccaaataatgcaaaaagcctggggtgaaaggcatcgtgaagttcaatacgccacttattatcaaacattattaatgttgcgtaaaagcatccgcgaaatagggattgaatatgaagtggtcaaaacaattaccagaaaaggtttaactctgaatgtcacgtctaactttaaggaagaaaaggcagaaagagaaattagtgatagcgcaaaaaatcaacttgagcatcctgaatcaggaaaaaaaaatcgccttccctatatattaaacaccatgataataagtgttactattctgctattagcttttatctccatttacccacacttatttttccagcaacgtatattacgtgggcgtaatccattttttggtaactatgtgcttgcaggtaaaactgaaaaccaatgcatgtattatttcaataaagatacaagcagtcatttaaaacacaattattttatttcccagaatgcatttctttgcgaaagaaacacgagattgtttattaccacttattcaacagcaaaaaccgtgagtgctattcgttgctatttaccttcaacctcacacgacgaacactgtatcagctactatttcccgttataccaaccatcaccagcaggcggcctataa

SEQ ID NO: 204849 - DNA, 372 bp, Klebsiella oxytoca
atgaaatggtttcactgcgcgttctttcaacattatttggatcttaatgagcgggccagccggcgtgaatactggtggtatactttcgtagtggcgattattttcgccgggagcgggcttctctcattcatattgtctgataaccccgaggatgtggcgccggtgatatttgcagcgatgagtttagccatattatccccttcctggtccttactggttcgccgtctacatgataccgggcgttccggatggtggggaatactgataatcctgccggtggtgggttggctgatcctgctggttttcctgctgaggaaaggtcaggagtgcgaaaaccgatatggtccaccgccgatttatttttttgaataa

SEQ ID NO: 204850 - DNA, 540 bp, Klebsiella oxytoca
atgaaatatggttctcttttcagtgcactgttactaggttctgccgggcttgtattttctcttgccactcaagcggcagataaaactcaaattgttaaaattctggatggtaaggctagcgtcgaattaccgattgagtttaccagaatgccgaatgatattcttaaaatagcctatgaagatgaggaccgtccgcaggaggcgtggtacgtagaaagcgaagattgtgatgtattcattacattccatgttgccagggaaaaactggaagaagatcaggtctcgaaagcaaccgatgctatgaaagcagagttgagcgaattttcgcctgcaatatcgcaggtgaaagttaatagtcatcaagtgggacgtctggagttcaatgttccagacgatgaaggtaatggatatatgtctaacatgctgcaggtttcatcttttaatggaaaaatgatgtttgtgacgtttttcgtaacaaacaaactggagagtaaatacaaaccagcgggtaaggctgcgctctcttcactgaagtactaa

SEQ ID NO: 204851 - DNA, 543 bp, Klebsiella oxytoca
atgaaaattggaaatctttttagtgctctgttaatcagttctgccggattggcttttacagcggcggcgcaggcggcggataaaacccaggttgttaagattctcggcggtaaggcgactatagagctgccggttgaatttgttaaaatgccgcaaaatctgcttgccgaaaaatataccgatgagagaaatcgtcctcaggaagcctggtatgtggaaaatgtggacagtaaagtgacgcttgccttcagtattaacccgaatgcgattaaagaatctgaactttcaaaagtttctgcggctctaaaaaatcagttaagtgtattatcaccaatagtctcacaggtgaaaatcaatggccatgaaatggaacgcgttgaatttaacgtgccgattgatgaggaaggaaattatctctacaacctgatgcagctttcctcttttaaaggaaagatgatgtactcgacgttcaacgtgacaaacgatcttgagagtaaatacaaagcagtaggtgaagcagcactttcgtcgctgaagtattaa

SEQ ID NO: 204852 - DNA, 381 bp, Klebsiella oxytoca
atgaatgaatttaaaaaagtgatgtttgaaaattatttcaatatgaaggggcgagcttctcgacgtgagtattggatgtttacacttgttgttggtgttgtgtctatgatcatcgacattatatctgggaacgtttttactcgcgacagtacaacccacttagcaattagctctatagtcagtttaatatttctgtgtccagggatttgtgtgatggtcagaaggctccatgatattggaaaaaacggaagatgggcttttctgctttttgttcctttggtaggtcccatcatactgttggccttaatgcttaataaaagtcaggagggcagcaatgaatatggtccttctccgctggagcaaaaaaatcaggctggataa

SEQ ID NO: 204853 - DNA, 390 bp, Klebsiella oxytoca
atggggctacttaaaaagtcagggtttggtgagtattttagattaaaaggtcgcgcatcgcggagggaatactggaagtttgttctctttatcagtgcaattttacttgtagtcgatatctcagctggggtgaaatttagctacgataaccctgcccggtattttgctaccacagtcttaaattttatttttttatggccttctatttgcattctggtcaggcgattacatgatgtcggcaaaaacgggaaatgggccttgcttattcttgtgccgctggtaggcccacttatcctgttggtctttacgcttaagaaaagtcaggagggaagtaatgaatatggtccttctccgctggagcaaaaaaaatcaggctgggtaatttactaa

SEQ ID NO: 204854 - DNA, 231 bp, Klebsiella oxytoca
atgactgggggaaaggtaaaagaagaaagtcgtcttttcgagataattattgacagtgtatattcactcccaatcaataggagaagatattcgcaatccagcattctctctttcgttacggcgggcatggattttaagtctccatcatgtgtttgggaggtactcgtaaaaaggcagaaagcgacctttatgcgtacgaatacaaatttgatgcttatgaccatgcgataa

SEQ ID NO: 204855 - DNA, 504 bp, Klebsiella oxytoca
atgcgcaatcgcgcccatcccgatggcgaccgcgtcctgacccagcgcctgcgaatcttcacccgtggagaaggcattgaagtacttggtgctggtcttcagctggctcaggttcaccgcgtcagagtctttcaccccgtcggcgacattaccgatggtattgcccgccacatcgatctcgtcattagtgaacttcggcccgttcttgatggtcagcccgtcactgttcatcaccgtgtcgccggtggtcagcgattcgaacgccgcgttatccgccagcttgatggtcaggtcgcccttctcatccagctccgtcagcacgttacccgccgagtaggtctcgccctcacccgtcgccccgccgccgaggatacgcatcgtctcacccagcttgcgcttggcatcgtcaccctggttggccgcaaaggtcagcggcgactcggtcagctcgccgacgctgttgttcaggccttccagtgcggtattggtcgcgtacagctgtga

SEQ ID NO: 204856 - DNA, 1485 bp, Klebsiella oxytoca
gtggaagtacttcgtgccggtgttgtagatgttctccaccgaatcgcccaggttgctgatgttctgcgtgttctgcgcgatattggtggtgttggtcgccacctgatcattggttgccttcagctgcgaaccattcaccgcatcagtactgccgtcttccagcttcccttcagccacattggtgatcttgttcaccgtggtatcgccgtggctcgccgagaaggcccctttatccgtatcccacagcagggcatcgttctgcagcccgccgacgttgttgttcaggttctccaccgccgtgttggtcgcaaacagctgcgaaccgttgaccgcatcggtgctgctctcggacagacgacccgccgccacgttggtgatggtacgttcactgcccacatcccccacgcttacggtgccggtcggcttcgctccggcgaaggcatagtcggtaccgttaatgctgacacccgccgtccctgctgccgcttccgttaccgatccggcacccagcgccacatcgttggtattgtgcgcgatagcgcccatcccgatggcgaccgcgtcctgacccagcgcctgcgagtctgcacccgtcgagttggcgtggaagtacttggtgcctttctcattaatggtggtcaccgtatcgcccaggttggtgatactggtggtgttggcctccacgttctggttggtcgcaaacagctgcgaaccgttcaccgcatcggtactgccgtcttccagcttcccttcagccacattggtgatcttgttcaccgtggtatcgccgtggctcgccgagaaggcccctttatccgtatcccacagcagggcatcattctgcagcccgccgacgttgttgttcaggttctccaccgccgtgttggtggcgtacagctgggaaccgttgactgcgtcggtgctggtctcagacagacgacccgctgcgacgttagtgatggtacgttcactgcccacatcccccacgctgaccgtgctggtcgggttcgccccggcaaaggcgtagtcggtaccgttaatgttctcacccgccgtacccactgtcgctttcgttaccgagttcgtccccagcgcgatatccccggcgttgtgcgcgatagcgcccatcccgatggcgaccgcgtccagacccagcgcctgcgagtctgcacccgtcgagttcgcatggaagtacttggtgcctttctcattaatggtggtcaccgtatcgcccaggttggtgatactggtggtgttggcctccacgttctggttggtcgcaaacagctgcgaaccgttcaccgcatcggtactgccgtcttccagcttcccttcagccacattggtgatcttgttcaccgtggtatcgccgtggctcgccgagaaggcccctttatccgcatcccacagcagggcatcgttctgcagcccgccgacgttgttgtccagactctccagtgcggtattggtcgcaaacagctgtga

SEQ ID NO: 204857 - DNA, 561 bp, Klebsiella oxytoca
gtggaagtacttggtaccggtgttgtagatgttctccaccgaatcgcccaggttgctgatgttctgcgtgttctgcgcgatattggtggtgttggtcgccacctgatcattggttgccttcagctgcgagccgttcaccgcatcagtactgccgtcttccagcgccccttcagccacattggtgatcttattgaccaccttgtcgccgtgactggccgagaaggcccctttatccgcatcccacagcagcgcatcctgctccaggccgccgacgctgttgttcaggttctccaccgccgtgttggtcgcaaacagttgcgaaccgttcaccgcatcggtgctggtctcggacagacgaccggctgcgacgttggtgatggtacgttcactgcccacatcccccacgctcacggtgctggtcggcttcgctccggcgaaggcatagtcggtgccgttaatgctgacaccctccgtacccactgccgcgcccgttaccgaattcgcgcccagagcgatatcgttggcattgtttgccaccgcgcccataccgatcgccactga

SEQ ID NO: 204858 - DNA, 1485 bp, Klebsiella oxytoca
gtggaagtacttcgtgccggtgttgtagatgttctccaccgaatcgcccaggttgctgatgttctgcgtgttctgcgcgatattggtggtgttggtcgccacctgatcattggttgccttcagctgcgaaccattcaccgcatcagtactgccgtcttccagcttcccttcagccacattggtgatcttgttcaccgtggtatcgccgtggctggccgagaaagctcctttatccgcatcccacagcagggcgtctttctgcagcccgccgacgttgttgttcaggttctccaccgccgtattggtggcatacagctgcgaaccgttgaccgcatcggtgctggtctcggacagacgacccgccgccacgttggtgatggtacgttcactgcccacatcccccacgcttacggtgccggtcggcttcgctccggcgaaggcatagtcggtaccgttaatgctgacacccgccgtccctgctgccgcttccgttaccgatccggcacccagcgccacatcgttggtattgtgcgcgatagcgcccatcccgatggcgaccgcgtcctgacccagcgcctgcgagtctgcacccgtcgagttggcgtggaagtacttggtgcctttctcattaatggtggtcaccgtatcgcccaggttggtgatactggtggtgttggcctccacgttctggttggtcgcaaacagctgcgaaccgttcaccgcatcggtactgccgtcttccagcttcccttcagccacattggtgatcttgttcaccgtggtatcgccgtggctcgccgagaaggcccctttatccgtatcccacagcagggcatcattctgcagcccgccgacgttgttgttcaggttctccaccgccgtgttggtggcgtacagctgggaaccgttgactgcgtcggtgctggtctcagacagacgacccgctgcgacgttagtgatggtacgttcactgcccacatcccccacgctgaccgtgctggtcgggttcgccccggcaaaggcgtagtcggtaccgttaatgttctcacccgccgtacccactgtcgctttcgttaccgagttcgtccccagcgcgatatccccggcgttgtgcgcgatagcgcccatcccgatggcgaccgcgtccagacccagcgcctgcgagtctgcacccgtcgagttcgcatggaagtacttggtgcctttctcattaatggtggtcaccgtatcgcccaggttggtgatactggtggtgttggcctccacgttctggttggtcgcaaacagctgcgaaccgttcaccgcatcggtactgccgtcttccagcttcccttcagccacattggtgatcttgttcaccgtggtatcgccgtggctcgccgagaaggcccctttatccgcatcccacagcagggcatcgttctgcagcccgccgacgttgttgtccagactctccagtgcggtattggtcgcaaacagctgtga

SEQ ID NO: 204859 - DNA, 294 bp, Klebsiella oxytoca
atgacggtgaaagttgagtgggaaaccggtgtgggagggtctaaaggttttcctggatttgctaatacagataagtacttagaatgggaaaaaaaaatcaaagctcaaaaccggaaacatagccagacagtatctgttcccgattataccaggcaaaaaacctgcggaataaaggtccactttttaccctgcgatcaaataaaagtcaccaccagctgctacgactacggcaacccaaattatccgattaaagatccgatcaaaatggaggaacccaaagtatgtccacaatga

SEQ ID NO: 204860 - DNA, 378 bp, Klebsiella oxytoca
atggaattgtccggctttgctataataaaaggaatacttgacgagtatacatctttaataaaactaccaaaagataaatttttatctttaattttaaagaataataaaaaaattcgcaataatcatttgcacattgaaagaagattatttaatcgactgccaggaaaacatttaaaatcatactctaccgcaatagttggtataccgtataatcacaatgattatagcgatgatttgtttgttgaaaaatttgagagtatttctcgcgaaaaagaactatcgttaagaatgcatttaattgttgactttgtttcaggtatgactgatcagttctcgatggaaatgtatcaacttctcaaaggtatcaaggtgaagtaa

SEQ ID NO: 204861 - DNA, 669 bp, Klebsiella oxytoca
atggataaattccagcagttttatacccatatacaaaaacatccatttagtttggtaaaacatcttattggtttaagcatcaaaaaaaatgagctaccacaagatatttcgctgcaattaagtaagtatagatatacaccgcagtcttttatagacgatcgttcaggcttaacgctaccattcaaacaatttaatgaaaaaacactatatgacataattgaagatatgaatggaaatgaagaattggcatttcattcattagtcaatagtttcggtagctcttatcattttccattaattgattttggtaaagttgacagaggagttattgatgcaaatcctttacgagaattatcagagcactggaaaatgtcatttttcgtctacaatagcggaagatctttccatgcatatggtaatagattaataaaatcttcagattggattgcatttatggggagtctgcttctgttgaataagccaagcggtttcaaattaattgatgaaaggtggataggacatcgtttgatggccggttatggggcacttagatggactaataatagttcacactataaaaagaacccaacatttgtcggttacttaagttcttccggattagaatggatgcaaccagataaaatatcttctttgttaccacaatattga

SEQ ID NO: 204862 - DNA, 300 bp, Klebsiella oxytoca
atggaagtacttggtgcctttctcattaatggtggtcaccgtatcgcccaggttggtgatactggtggtgttggcctccacgttctggttggtcgcaaacagctgcgaaccgttcaccgcatcggtactgccgtcttccagcttcccttcagccacattggtgatcttgttcaccgtggtatcgccgtggctcgccgagaaggcccctttatccgcatcccacagcagggcatcgttctgcagcccgccgacgttgttgtccagactctccagtgcggtattggtcgcaaacagctgtga

SEQ ID NO: 204863 - DNA, 393 bp, Klebsiella oxytoca; identical to SEQ ID NO: 179675

SEQ ID NO: 204864 - DNA, 177 bp, Klebsiella oxytoca
atggagctatcagaaggcagttcagtgacttgctataacaatactgatatgaacgatattctgactgttggaaatgagtacctggtcgaaaaaatactggatgatgatttgatgacgctgggcggcgtgtcagagccggtctttatctggcggtttatctctccttccctgttttga

SEQ ID NO: 204865 - DNA, 273 bp, Klebsiella oxytoca
atgagcctgttcgcacagaaacgccgccccgagaaggtccgcacctatacggcgttcctcaggctcagctttctgaaagactcgggttttgtatgcgctgcgacgcgcgggaggtttgttgcgggtataaaaaagcccggcgatgccgaggctgttttattggttggctttagcctgtctgcgcttacggcgcgcaaagtagtcatcagctgcgtgatcgtactcttcgcgggtgtaccctttttgctcagggtatttagcgatgagcattag

SEQ ID NO: 204866 - DNA, 195 bp, Klebsiella oxytoca
atgctaaaaaaatacttcgttgcttttcagatcttaaaacatggccagccacctctttatggctctgctgttctaaccgatcatgacggtgttgaaccagatgttttcttcaacaaagtagcaagagaaatagccaaaaaacatatggtattgcctgaaggggtaatcatcacagcattcaatcgggttaattaa

SEQ ID NO: 204867 - DNA, 1002 bp, Klebsiella oxytoca
atgatcctctttccgatgactcaggagcaaaagagtaaagtcggtacgccgataatcccccgcagcaaagtcgacccaactcaatcagccaggccggttagcaagatgtttcaggatatcgaaggccggtatctgaacataaagcgcaggctaaaggcactatttgaccaaaggcttacagggctgcagcgagaggcgaacgcacatcagtcgtggatgatgtgcaacaacgagggatccgacccttcgctgtatcaggtcaatgccggtaagttcatctatgacatgaccgccgctgagctggccgacctgctgcaggttgtgcagtcgattttggatgatgagcttctcgatggcggcaaccagaacctatgggcgatggactacgtcattgcggagtatgaccgcggcacgctaaacgccttcaccaacctttcggtgcagtcgcagatgtacgccagccagacgacgctacaacagcttttaagcagtcccggtcaccttaatcaggtggctgctgccaagctgacaacgttcagcgactggaaggtcatcagcgacacagcccgtggcgatctgaccaatatcatcaccgatgcggtagcccgtggagttaacccacgtgaaacggccagcgtcatcagcaagcgcctcgatgtgtcgatgtcgaaggctaagaccatcgctcagactgagcaggtcggcgcgcttcggcaggcacagtggaatgaaactgactgggccgctgaccggctggggctgaataccggcctgctgtggctgtcagcacttaagccaactacgcgcacctggcacgccagtcgtcacggcaaagtctacaccactgaagaagtgcgggacttctacgctgagaacggtaaccggtacaactgctattgcagccagataccggtgctactcagtgacgacggcagtatattcaacgaagggctggctgataagttaaaaaaagagaggataagctggaagaatggagcataa

SEQ ID NO: 204868 - DNA, 573 bp, Klebsiella oxytoca
atggcactcaccgataaacaagaaatgttttgtcgcgagtacctcatcgatttaaatgccacgcaagcggctattcgggcggggtacagcgctaagactgctaaccgcattgccgctaagttgttgtcaaaagttgacatccacaacaggatcgccgaactcaagagtaagcgcaacgaggatgtgggcatcgatgcagattatgtgttgcgtcgtttggttgaaatcgaccagatggatgttatggatatccttaacgacgatggcagcctgaaggctatcaacctctggccaaggtcgtggagaacgacgctcactgggctggatattagcactactatccagaacttcgatgaagagtcggccgagaccatcctcaaaaagattaagtggccggacaaagtgaaaaacctcgaattgctgggcaaacacgtccgagtgcaggctttcaaggagcaggttgaacagaaggtaactgcaactcatagcattatgcccgttccgacctgcgataacgttgatgaatgggaagcggcagcgcaaaagcagcagagcgaggttcttggtggatga

SEQ ID NO: 204869 - DNA, 408 bp, Klebsiella oxytoca
atgcgaacagatcttgaatacttaaaaggaatgctctctgtattccttaactcagatagcaccttcattactactattcagcttagcgaagctggatatgacattgaatctgagaaggggatgtttcactacatgcagttgattgagcaaggttttataagcaataggaatatggaaactcgtgatccaagacgtttggggtacatgtatcacttaggcggtatggcagcgcttgacgtagacattagactaactacagacggtcaagattttgctacagcgcttgacagtaaagatgtttttgcacgattgaaagagataagtaacgaaccgcttgctgtcatgaaggatgtaggtgtagagcttctaaaatcctacgcaaaaaagaaatttggtctttcagattaa

SEQ ID NO: 204870 - DNA, 474 bp, Klebsiella oxytoca
atgagccgattaatagcaatcatctgcgctgtcattatctgcctgttggtttccatggcttgggcgattaaccactaccgcgacaacgccatcacctacagacaccagcgcgataaagccactgagaaactcagcctggcgaacgccaccatcaaagacatgcagacccgccaacgcgatgtcgctgcactggatgctaaatacaccggagaactggttgatgcgaaaaagcagcttgatgatctgcagcgttgcgttagtactggtaagtgcgggctgcacatcaacgcaaaatgtcccgcgaacggagccaccggcaccggcggcatgggcgatgctaccagccccagacttactgactccgctgaacgggattatttcaccctcagagagcgaatcatcacaatgacgaagcaggtcggctatctgcaggactacatcaagactcaatgtacgacatatccattaaattga

SEQ ID NO: 204871 - DNA, 141 bp, Klebsiella oxytoca
atgaatcagctcgccatagagcgcatccgggagcgctggcaaaagctccgcctcttccggcaccgcaacacagtgatgaccgactattgcatcctcagaaattacatccgcatctatcagaccctgggagagaaagcatga

SEQ ID NO: 204872 - DNA, 627 bp, Klebsiella oxytoca
atgcgtaaaccagcacgtcgtaaatgcacccactgccgcgaatggttccatcctacccgtaacgagcaaacagtttgctgtatcgcctgtgcggcagaggttggcaaagctcagcgcgagaaggagcgtgctaaagcgttggccaggcagaaagcagagcggaccaaagcagaaaaggaaggtcgccagcgccgccgggcgaaacgcattgagctgaagacaaagtcacagtggcgtaaagaggcgcaggcggaattcaataaatatgtgcgtcttcgtgatgccggtaagccctgcatcagttgcggcagactgccggagcagaaactgggtggaactatggactgcggacattaccgcacccgcggcgccgctcgtcacctgtctttcaatctgcacaacacggcagcgcagtgcgtttattgcaaccgtgaccgcgccggagctcaaaaggcattcgagcaggggcttatcgagcgaatcggaccggcagccgtcgatgttctgaacaacgacaacaccatccgcaatttcgacatcacatacctgcagcgcatcaagtccatattcacccgcaaagcccgcgcgctggaaaagcgacgcggccgccgtcaggaggccgcatga

SEQ ID NO: 204873 - DNA, 585 bp, Klebsiella oxytoca
atgaatcacacactgagcgattcacagttggaagaaatgattaaatcggctgttaattcatccggcccgctaccgccagacgaaaaattctcgcaactgatttcagcgttgcgagagctacaggaacgccgcaaggccgatatgaacagcgagccttatggtttcacagatggtgaccgtcgcgggatgatttacaaacctgagcatgccgatcggctgaacgagccgctgccggtctatcgccacgcgcagctagcgccggaacgcgaccaggtacgcagcgatcacgccgagtggtcacaggctacgttcggcaacgtcggcccgattggcccgctgaagcacctgagaagagaagttaaggaagtcatcgctaagccgcatgatctgaccgagtgggctgatatgcaattcctgctatgggatgcgcaacgccgtgctggcatcactgacgagcaaattacccaggcgatgatcgaaaagttagcggtgaacaaacagcgtgagtggccggagccgaaagacggagagccgcggttgcatatcaaatcgcagccagcaacgcaggaggtgaaaggtgaataa

SEQ ID NO: 204874 - DNA, 192 bp, Klebsiella oxytoca
atggctgctacaatcatggcaattgttgcaacgcagtcgctatatgtcatgaggtcttcctatgccagatgtatttacattttccgaaatgctttcaacagtcgcgctggcaatatctttaaccaacgccgtctggttgttctttttttggttaacagtcaagaggatgtaatggcgattaacaccctctaa

SEQ ID NO: 204875 - DNA, 189 bp, Klebsiella oxytoca
gtggaacagattcaaggtgaaggtggcactgttgttggctttggtcgcattcgtaagcgttcagtgctggggtgcggtatgagcagaaacggcattcgttcactggttatcgcgctggccattggtgtggttttctgggctggtctggctgtcgaaattatgcatttcacgggggtgttcaatggttag

SEQ ID NO: 204876 - DNA, 756 bp, Klebsiella oxytoca
atgactgagcgcgggatgatttttaacgctgagatggtgcgtgccattctcgacggtcggaagacgcagacccggcggattatgaaagtgcagccgaagccatcgaaatcacgaccaggggatttttggttttcatcgaaaaaattagaaagcatggtgcacgtttctgaccttgcgcctggcaactcacctattgccgattatcaccttttcattcaggagcattgctgcccgttcggagcagtcggcgaccgcatctgggtgcgtgaaacgtggggagtagtcagccacgaattggatgaggatggtcgaatccaaccatggacgccagaccggccggctacggttattcatgaaatgccgtttggcaacggctattactctggtcacgccatttatgcagctgatggcgatttcacctggggtgatgacgatggttatgaagatggtcgttcgtgctggaaaccttccattcatatgccgagagcagccagccgcattctgctggaaataaccgacgtgcgagtggagcgtctgaacgctatcagcgaagaggatgcgcgagcagaaggcattattgacggtggctgtctgaattgcggggaacctgagccatgcggatgcgctaatccagagcctgacgctaccgatgcttttgcctacctgtggcaatcaatctacgggcaggaaagctggaatgctaacccctgggtttgggttatcgagttcaagcgcgttgaaggtggtgcagcatga

SEQ ID NO: 204877 - DNA, 630 bp, Klebsiella oxytoca
atgggcatgagttcttcagctgaactcgttcattggctttcatcacaaggcacgatccgaggctccaagtccaaagaaaaaattaatgaaaacaggcataaagctgcggcgttatggatttcaggtctgtatagcactcccgaattacttgaaatgtttaaaggccgtctgggtatacagcgcaagggatctcttcttttctggttccggcaaaatggatacgtaagaaactccgagtcgcccgacgctccgaagaatccgcgagcaattttgagagaaagagccgtggagttaaggaaagccggccagcacacaacccgacaaatctttgatgaactctctcccgagttaggtatgaagaacgccggggcgcttggacgatggtttaagaggaatggaatagaaccagaacatccgcgacagccaaaaaagagcgtaaaaaaaccaaaaccgataaatccccgagatcatctaaaagagctatgcactgagatgtgggcatctggtgagtatactggcaaggatattcagacgaaaatggcgggtagatttcccttcgcaagtctcggtgcgatgtatagtcacttcacaaaagttggtgttagaaagggaagtaaagagagcgactga

SEQ ID NO: 204878 - DNA, 258 bp, Klebsiella oxytoca
atgaataaatcgtggatggaaaaaaacctgattgccgtaccgattgaagaagtctccacaccaaaaaccggccgcgtggctcgcgtcgattactggtggctagtgaaagatggccaagtcttcaaaacgaagtacagcaatacctttcagtgcagtaaagaccgtcgagtcgtcgacaagatttatgaggaagcaatccgcgaccacggcttttcagcggtcaatatctcaattgcttacatcgagcagaggttttga

SEQ ID NO: 204879 - DNA, 153 bp, Klebsiella oxytoca
atgcgtaacaaatatccaggttgctgctactactgcaaaaattgggtcgccaaaggtgaaggccattttgaacgcttcgcaggtcgattccgagtcattcacgccgaatgcgtgctaaagcaacgccaggaaaaatccgcggccgcagcgtaa

SEQ ID NO: 204880 - DNA, 483 bp, Klebsiella oxytoca
atgagaatgatagcggccgttggccgaaattttgaaataggcagaggaaatgagctgccttggaaatgctcagcagatttgcgtctcttcagagagctgacgcacggattcaccgtgatcatggggagaaaaacggctcagagccttggaaaacctctacccggtcgacgcaatgtcatgttgacgcgttcacaaggtattgaagttccgcaaggcatccagatcgcgtcagtcgaacgctgtttgcgcgagttccccaatgcctgggttatcggtggcgccgtcgtgtatgaggtgatgcttccgcatgtgacggaaatttggttaagccacgtcaatgttgaagtgccggacgcagatgccttctttccatttgaagcaatgcgtcagatgggttttgaagcggttgatacggcgaatgaatttgctggtgatgagaagtcaccatcgtttaaacaaattgtttacaggaagttgaaatga

SEQ ID NO: 204881 - DNA, 651 bp, Klebsiella oxytoca
atgaaaattggcctttgcggtgcgcaaggaacaggtaaaacgacgctggcgaaagcttacagtgagatgtcgggcattccatacatcgacgccaaagtcggggattatctcagcgatattggcgtcgatttatcacgagatgatatgcctgttgttgagcgcatgaaggtacagctaatggtggccggccacatcgcgagtattacggaagcgccaggtctgcacaagactgggtttatcatagatcgcacgccgatcgacgtcatggcgtatacccacgacattgcagccaaacactacaaaaacgatgaagtgctggaattatatgcccagactcacatggtctgtctggatgcggctgcgatgaatttcaatctgtgcctcatgctacgacccggcgtccaactttccccacaagaccattgtcgaaagcaaagagcctcgctgcagccgttctacgttaaccacatcaatatgctcatggcttcgatgatcctgtcattctcgcaaaaggtgattggcgatggtttatcccggtttgcgtttatgcgggacgatgtcattgatctggaactccgtgttagtgctctggatgaaatcgtcgggagcattgcttcaaattctgttatgaagtgcgagccttgtcattga

SEQ ID NO: 204882 - DNA, 408 bp, Klebsiella oxytoca
atgtacagcgcagccgaagagcttgatagaaaagtctcagaaacccttgtggacattatcaaaaaacagactggtggattgatgacgacgaatgaagcgaaggcggcgattcattcggtgttctgctctgtcatgggtctggttggggtcgatgttgctgagcttcttgaagaggcgatgaatacgatagagaaggagcgaccttcgccgtttccgctctatatgaaaaccgccaatggtgcgtacatcaccgtatcaccagacacttcagcaagaaaggtcagtgtaaaaattatggcgagcgagtaccgcacaatggattacgagtgcgacagcgcgagcagcacgattaaaaaggcgcttgaagtggtgcagttacttatcaaacagggtgcaaaacgactatga

SEQ ID NO: 204883 - DNA, 354 bp, Klebsiella oxytoca
atggatatcaagcggcttttccagatgaagagaccatgtcctgactgccctttcctgaagagcggaggtatagatcttcatgagggacgtctggaacagattaaaaatgacttactggcagacgatcagagaccgtttcagtgccacaaaacaacctactcaacaggcggaagatatgacgacgacgaggatcgatatctaccgtcaggaaaggaggcttactgtgccggcgcaatggctttcttgtatgccaacagaagaatgaatgttccgatgcggcttggcatcatctatggcgctctgaatgtcgatgatttagaagccacaatcccgttaatagacaccagtgtctaa

SEQ ID NO: 204884 - DNA, 783 bp, Klebsiella oxytoca
atgaaagaattaagcatcaccacagcaacgatgaccagcatggatattgccgagctgatcggaaatcgccatgacaaggtcaagcagtccatcgaaagacttgtaaaacgcggcgttataacttctcccccaatgggggaaaagcccacggcaggccgctccgcgacgtttttcgtgttctccggggagatggggaagcgagacagcattatcgttgtagctcagctaagtccagagttcacggcgcgtctggtagaccgctggcttgagcttgagaaggctgtaaaagaaccggctctgccacgtacctataaagaggctctgatccaccttgttgctcaggttgaagaaaatgagcggctgactgaacagaatgaagcactggatgaagcactgagtatcgcccgccctaaagccatcctcatggatcgcttagccggaacgtcagagcaactctatggtatcaatgaagctggtcgcattctgggtacgtcaggggctgttatggcttcctgtatggatatggttggcaatgtctttgctaaaagaaaatactccaccaccccgcgccagtttgtgaagcaattcattgatcgcgagtacggccgcaacgtaaccagcatcggcggcggtcacatccaggcgaagtttacgtttaaggggctttgctttgtcgctctccacctcgtaaaacgcgggatcatcaccgtagacgccattccatatcgtgcatgtcgcgatagtgttaaagctgccatggtaatgagaaagtcagctgcctga

SEQ ID NO: 204885 - DNA, 435 bp, Klebsiella oxytoca
atgtgcattcgctgtgaagaacgtaaagcaaagaaagaagtagtcctgagccgcgctaacgaaatcgctgatcttgccatcttagctactggcgaaatcaacaatattcccgatgcgctgcggatgacatctcgttttgaggcgttgggtagcgaaggtcttctggagcctgtgaacttgttcctcctgatcgcccattttgccaaccagagcaaagcgctggcggctgacaacaagcgacttcatgagactctgaattatatgacgatgagcgaaaaagctgcgccggcggacggtaataaaatgtcgaatgaagaggctctgcgtatcgtcgaaacggtcgtgaatacctttgagctggctcaggcacgagcaatggaaggcgcgaatgctcagatccgggagctgaagaatcgctttgggattaataagtaa

SEQ ID NO: 204886 - DNA, 342 bp, Klebsiella oxytoca
atgctgattagtgaggttggattagtgatactgacgctacaacaatttaaagaactgcaatgggttaacgagaactgggccgaagagatttctagcatcagctatacccataagcaaagttcgattgagaagacaaaattggttgttttatgtggtggccggcataaagctggttccgtgtttattgtcgtgcttgagcagtccagtacagttgaggggaactaccgtagcgactggtctcacgctacgtattacgacaatcttcctgaagcagctacggcgttcaatacgctatgtgaaacggctcgaatagagaaagcctggtacgacactaataagtga

SEQ ID NO: 204887 - DNA, 381 bp, Klebsiella oxytoca
atgtttgtagagggtctggctttgtatttggcgaagatggggattggcaaagtcggctccactatttttgctgatgcaatgccacaagatgctaaaagcgccgtgatggtgacttcaccaaccagcggcattgaagtcgatcatgaacttgccggcttctatatggactcagtgctgattgttgtgcgtgatatttctctatcagccgcacagaggaaaatgcagagtattagtgcgcatctgccagcaaaagagatctcttcgggtagtgttttcttcaagatgctgcgaccaatgacattgccagtcgtttacccgcgtaatgatggggcgatgttcgagatcggccttccagtggaatttgctggttatatgttgtaa

SEQ ID NO: 204888 - DNA, 1545 bp, Klebsiella oxytoca
atgagtatgtatgaagtaggcaccataaccggtgccgcaaatcaggtgaaagtgaccggtgtaacgactaagtggtcgcagacagctcttggcgttcaacagggttccattcttgtcgtgtatcggaacgggagcacggacttgtacgcgattaaatccgtcgacagtgacacgcagctgacccttacccgaaacatcacgacagcgttctctggggcgtcctatggcatcatcacgtcagagacagccagcacctccgcatttgcaaaccaactcgccagcgccttttctctgtggcggagtgttgttgaaggatggtcgaccgcgctgacgtcgacaggcaacattacaatgactgatcctattaccggaacgtcagttactgttcctgctattaaggggatggccagcattgccggtgggaataattttactggaacacagagtgtggatagcgacgacgccggttttattctcggcaagaacgctgatatagggctggttaagaaaaacggaacatggggaaaactcatggtcgggaaatctacgcgattctctgttgtcaaaagcgctaatgaccggatatctgctacagatgtccagaccgaaatatttggtgttaatagctctggcgatgttgatattttggggaatattaatggtaagaaaaacgccaacttcacggatggaggtgttagcgccagaagcattgagctttcctatacaacaccgtttatcgacttccattatgggaatagcacggcagactatactcaccgaattattgcggatgacccggtcgcattagggttcgagtgcagtattcgagttgccaaaaatattcgctctcagcagggtattaaagccgatttatatgtgcgtgccgctagtcgtgccggcatcatagcacagtacgacaatgatccctctgcgaatttaggggatataagggttgctccgcaattaaccactcaatttgctacggtaggggcggactcgaacggtcaggcaggggggaatttttggtttgaagagcatgtcggaaacaaccaccgtctcgttacccaagtcaaagggtatggtgcatccgtacaatactggcatcatcgcagcgacggaatgatctggaatagtcagcgaggtgatgtagcgtgggccgcaacttcagacaaaaacctcaagcatgatattaaacccacagatggattacagtcgctgaaaaatatcaatgccatgaaactagttactttcatctataacgatgacgagagaggacgccagcgtcgaggtgtgattgctcagcagcttcagaaaattgacccgtgctacgtgaaggtgagtaaaggtgtggtaggccgcccagccataaaggatgatgaaggtaatgaaattgaaccagaacatcaggaggtaattgaaaaacttgtgctggactccaatcctttattaatggacgctctaagtgctatccaggtattgtcgcgggagattagtgaactcagagctgagaacagagatttacgcgcatttgttcattttgaatag

SEQ ID NO: 204889 - DNA, 1284 bp, Klebsiella oxytoca
atgagcgagttaaattatctggaaaagctgctggatggcgttgaggttgagtggttaccgcttggtgatttaactgaatacgagcagcccactaagtatctggtaaagactaaaaattatgacgatagttatgagactccggtactgactgctggtaaatctttcatcttgggttatacagatgagaaaaatgggttatatagagggagtattaacccagttattatttttgatgatttcacaacagcaagtaaatgggtttgttttgacttcaaggttaaatcttcagccatgaaaatgattacttcatgtgataaaaataaggtttccttaaaatttgtttattattttctaaatacactaaaaagtgaattggtcgaaggtgatcataaacggcaatggataagtaattattctaataagttagtccccatcccgtgccccaacaaccctgaaaaatcgctggctatccagtctgaaatcgtgcggattctggataaatttactgcagttaccgctgagcttaccgctgagcttaccgctgagcttaccgcacggaaaaaacagtacaactactatcgtgaccagttgttgagttttgatgaggagcaggaaaaacctatttatctggaaaaattgctggatggggttgaggttgagtggttgactgccgctgagattttcaacattaaaaatggctatacgccatctaaagctaaaaaagaattttgggaagatgggaatatcccttggtttaggcttgaggatatacgaactaatggcagagagcttaatgattctattatgcatgtgaatcaagcaggagttaaaggcaacctttttcctaaagattcaatatttatgtcaacgacggcaacaataggagagtttgctttggtcaaaataccacatttgaccaatcagcaaattaccaatttttcattaactagcagatttaaaggaattatagatataaggtatttattccatggattccatcactttggggaatggtgcaaggaaaacgctaacaaaagtggcggtttatccattataggaataaaaaaattatcatcgtataaattcccaattccttgccccgacaatcctgaaaaatctctggccatccagtctgaaatcgttcgaattctggataaattcgacacactgaccaactccatcactgaaggtctcccgcgtgaaatcgagttgcgccagaaacagtacgaatattaccgagatttgctgttcagtttccctaaacctgattccgtaacgaactga

SEQ ID NO: 204890 - DNA, 156 bp, Klebsiella oxytoca
atgtgtccgtcttccgcgcccaattcacaaatgatatcggctccaatctggtcactcagagagattgctgatagttttgtcgccgacgacatccagttcaaaattgcattcatgttaataccattaattagtttattgcttattagtatgtcttaa

SEQ ID NO: 204891 - DNA, 231 bp, Klebsiella oxytoca
atgggtatgctgaaagcacagatgagcgctatatacatccttcccatcttcgcctttggttttggcatagtgaatgccgtacttgtgagagaatggaatattatcagggtcgtctttgttcaggatgatacgaacgtagttttcacctggttgcattttttgcagatcgcttccgcgattgccacgtgcgtttttcgcaacttcttgacttttcttcagaaggttcattaa

SEQ ID NO: 204892 - DNA, 354 bp, Klebsiella oxytoca
atgattgataaatatcgtttggatgatttacgttttgaatccggggaaaaaggtgaactcgctcgctgggttattcagttgcaaacatacttggatagtgagcgccgcaaagttggcaactctccggtaattacggatagatggattccggtaatcgagcgaatgcctgagacgaataaatttgtgctggtgagtaatggtgtatgggtaggtcaagggctttatgacgataacgagcatctcgaaagtgacgagcactggcaggacgagcatcgtgaatttatcaacgtacttcaccacccggtaacccactggatgccgctgccagcagcgccaaaacaggagaatatttaa

SEQ ID NO: 204893 - DNA, 978 bp, Klebsiella oxytoca
atgatcctgattcccgatgacgaaccggagctgagtctgcccgcagccagtgaggaattcctgccggcgctgtcaggtgagaatgccccggtcagcccggcccgggcctacctgctttcactcaattcccaccgcagccggcagaccatggcctcgttcctgaacatcgtcgccgttatgctcggagctgcctccctggagtcctgcagctggggcagcctgcggcgccatcacgtgatggccgtgaccgaactgctgcgcgacaccggccgggccaccgccaccgtcaacacctatctttcggcactcaagggcgtggcgaaggaagcctggatgctccggctcatggatgtggagagcttccagcatatccgggcggtccgtaacctgcgcggcagtcggctgcccagcggtcgggcgctgccccagggggagatccgcgccctgtttgccgtctgtgaagccgatcgcagctgcctcggggcgcgggatgcagcgatgctggcggtcattctcggctgcggcctgcgacgatccgaagtagtgagcctggatttgcgtgacgttgtcactcaggaccgtgcgcttagagtgctgggtaagggaaacaaggagcgactggcatatgtcccggccggtgcctggcagcggctgcagatctggatcgatgagatccggggcgagaccccgggcccgctgttcacacgcatccgtcgtttcggggatgtgactctaaaccggctaaccgaccaggcggtgtaccatatcctgcaggtgcgccagggtcaggccggcatcacgaaatgttctccacacgatctgaggcgaaccttcgccaccgcgatgctggataacggggaggatttaattaccgtgaaggatgcgatgggccacgcgagcgtcaccaccacccagcagtatgaccgtcgcggggagcaacgcctgcaggacgcgcgggatagactcaaccttatttag

SEQ ID NO: 204894 - DNA, 1797 bp, Klebsiella oxytoca
atgttcatactcttcgccgagcgaaaagttggggaacagcacgggccggccgcgcaaggcgtgctggcagccgtgcagaccctgcgtgagatgaacgccgacaacctgcgcaaggtgccggccgatgcacccacggccttcatcaagccgcgctggaagccgctggtgatcaccccggaaggcctcgaccggaaattctacgaaatctgcgccctgtccgagctgaagaacgccctgcgctccggcgacatctgggtcaagggctcgcggcagttccgcgacttcgacgactacctgctgccggccgagaagttcgccgcactcaagcgcgagcaggccctgcccctggcgatcaacccgaacagcgaccagtacctggaagagcgtttgcagctgctggacgagcagttggccaccgtcacccgcctggccaaggacaacgagctgcccgatgccatcctcaccgagtcagggctgaaaatcaccccgctggatgcggcggtgccggatcgggcgcaggcgctgatcgaccaaaccagccagttactgccgcgcatcaagatcaccgaactgctgatggacgtggacgactggacgggcttcagccgccacttcacccacttgaaggacggggccgaggccaaagacaggacgttgctgctgtccgcaatcctcggtgatgcgatcaacctcgggctgaccaagatggccgagtcgagccccggcctgacctacgccaagctgtcctggctgcaagcctggcacatccgcgacgaaacctattcggcggccttggccgagctggtcaaccaccagtatcgccacgcctttgccgcccactggggcgacggcacgacctcatcctccgatggccagcgcttccgcgcgggtggccggggcgagagcaccgggcacgtcaacccgaagtacggtagcgagccgggacggctgttctatacccatatctccgaccagtacgcgccgttcagcacccgcgtggtgaatgtcggcgtccgcgattccacctatgtgctcgacggcctgctgtaccacgagtccgacctgcggatcgaggagcactacaccgacacggctggcttcaccgatcacgtctttgccctgatgcacctgctaggcttccgcttcgcgccgcgcatccgcgacctcggcgaaaccaagctgtacgtgccgcagggcgtgcaagcctacccgacgttgcgcccgctgatcggcggcaccctgaacatcaagcacgtgcgtgcccactgggacgacatcctgcgcctggccagctcgatcaagcagggcaccgtcaccgcctcgctgatgctgcgcaagctcggcagctacccgcgccagaacggactggccgtggccctgcgcgagctgggccggatcgagcgcacgctgttcatcctggactggctgcaaagtgttgaactgcgccgccgcgtgcatgccggcctgaacaaaggtgaggcgcgcaactcgctggccagggcggtgttcttcaaccgccttggggaaatcagggatcggagcttcgagcagcagcgctaccgggccagcggcctcaacctggtgacggcggctatcgtgctgtggaacacggtgtacctggaacgcgccacccaggggttggtcgaggccggcaagccggtggacggcgagctgctgcaattcctgtcgccgctgggctgggagcacatcaacctaaccggcgattacgtctggcggcagagccgcagactggaagacgggaagtttcggcccttacggatgcccggaaaaccttag

SEQ ID NO: 204895 - DNA, 2967 bp, Klebsiella oxytoca
atgccgcgtcgcttgatcctctcggccacggagcgggacaccctgcttgcgctgccggaaagccaggatgacctgatccgctactacaccttcaacgactccgacctgtcgctgatccgccagcgacgcggcgacgccaaccgcctcggcttcgccgtgcagctctgcctgctgcgctaccccggttacgcgctgggaaccgacagcgagctgcccgagccggtcatcctgtgggtggcgaagcaagtccaggccgagccggcgagctgggcaaagtacggcgagcgcgacgtgacccgtcgcgagcatgcccaggaactgcgcacctacctgcaactggccccgttcggcctgtccgacttccgcgccctggtgcgcgagctaaccgagctggcccagcagaccgacaaaggcttgctgctggccggtcaggccctggagagcctacggcagaaacgacgcatcctgccggcgctgagcgtgattgaccgggcctgctcggaagccattgcgcgagccaatcggcgggtctaccgcgccctggtcgaaccactcacggactcgcatcgggccaagctggacgagctgttgaagctcaaggccggcagcagcatcacctggttgacctggctgcgccaggcaccgctgaaacccaactctcggcacatgctggaacacatcgagcggctgaagacatttcagttggtggacttgcccgaaggcctgggccggcacatccaccagaaccgcctgctcaagctggcccgcgagggtgggcagatgacgcccaaagacctcggtaagttcgagccgcagcgccgctacgcgaccctggccgccgtggtgctggagagcaccgcgaccgtgatcgatgagctggtcgatctgcatgaccgcatcctggtcaagctgttcagcggcgcgaagcacaagcatcagcagcagttccagaagcagggcaaggcgatcaacgacaaggtgcgcctgtactccaggatcggccaggcgctgctggaagcgaaggaaagcggcagcgacccctatgccgccatcgaggcggtgattccctgggacgagttcaccgagagcgtcagcgaggccgagctgctggcccggccggaaggcttcgaccacctgcacctggtcggcgagaacttcgccaccctgcgccgttacacgccggccttgctggaggtgctggaactgcgcgccgcgccggccgcgcaaggcgtgctggcagccgtgcagaccctgcgtgagatgaacgccgacaacctgcgcaaggtgccggccgatgcacccacggccttcatcaagccgcgctggaagccgctggtgatcaccccggaaggcctcgaccggaaattctacgaaatctgcgccctgtccgagctgaagaacgccctgcgctccggcgacatctgggtcaagggctcgcggcagttccgcgacttcgacgactacctgctgccggccgagaagttcgccgcactcaagcgcgagcaggccctgcccctggcgatcaacccgaacagcgaccagtacctggaagagcgtttgcagctgctggacgagcagttggccaccgtcacccgcctggccaaggacaacgagctgcccgatgccatcctcaccgagtcagggctgaaaatcaccccgctggatgcggcggtgccggatcgggcgcaggcgctgatcgaccaaaccagccagttactgccgcgcatcaagatcaccgaactgctgatggacgtggacgactggacgggcttcagccgccacttcacccacttgaaggacggggccgaggccaaagacaggacgttgctgctgtccgcaatcctcggtgatgcgatcaacctcgggctgaccaagatggccgagtcgagccccggcctgacctacgccaagctgtcctggctgcaagcctggcacatccgcgacgaaacctattcggcggccttggccgagctggtcaaccaccagtatcgccacgcctttgccgcccactggggcgacggcacgacctcatcctccgatggccagcgcttccgcgcgggtggccggggcgagagcaccgggcacgtcaacccgaagtacggtagcgagccgggacggctgttctatacccatatctccgaccagtacgcgccgttcagcacccgcgtggtgaatgtcggcgtccgcgattccacctatgtgctcgacggcctgctgtaccacgagtccgacctgcggatcgaggagcactacaccgacacggctggcttcaccgatcacgtctttgccctgatgcacctgctaggcttccgcttcgcgccgcgcatccgcgacctcggcgaaaccaagctgtacgtgccgcagggcgtgcaagcctacccgacgttgcgcccgctgatcggcggcaccctgaacatcaagcacgtgcgtgcccactgggacgacatcctgcgcctggccagctcgatcaagcagggcaccgtcaccgcctcgctgatgctgcgcaagctcggcagctacccgcgccagaacggactggccgtggccctgcgcgagctgggccggatcgagcgcacgctgttcatcctggactggctgcaaagtgttgaactgcgccgccgcgtgcatgccggcctgaacaaaggtgaggcgcgcaactcgctggccagggcggtgttcttcaaccgccttggggaaatcagggatcggagcttcgagcagcagcgctaccgggccagcggcctcaacctggtgacggcggctatcgtgctgtggaacacggtgtacctggaacgcgccacccaggggttggtcgaggccggcaagccggtggacggcgagctgctgcaattcctgtcgccgctgggctgggagcacatcaacctaaccggcgattacgtctggcggcagagccgcagactggaagacgggaagtttcggcccttacggatgcccggaaaaccttag

SEQ ID NO: 204896 - DNA, 564 bp, Klebsiella oxytoca
atgataagtttatcaccaccgactatttgcaacagtgcccgtaaaaccacccttctggtgctggccgccgccctctgcgtgcccgcgttcgccaccgccgcgcccgtcctgacggcgggtttttcgccgtctgacgggcgccctgctcttgaaatcgtgctcggcgccataaacaacgccaggcagagcattgacgtcgcggcctacagcttcaccagtaagccggtcgcgacggcgctcgccggtgctaaccggcgcggcgtggccgtgcgcgtggtggccgacgaaaaggcgaacagcgaccgctacaccgccgtgacgtatctgataaaccagggcgtgccggtgcaccttaacggccgttacgccatcatgcacaacaagtttatggtgatcgacggcaaaaacgtccagaccgggtcgtttaactacacggcaagcgccgtttcgcgcaacgcggaaaacgtgctgctgatcgaggatgcgccgcagctggcggaggcgtaccagcgagaatttaaccgcctgtgggatgagggcatcccgctgaatgccctgtactga

SEQ ID NO: 204897 - DNA, 432 bp, Klebsiella oxytoca
atgacgatgaacctgcacaccccgacaaccgcccctaaagctgcaccggcgaccagcgtatccccgctggagcagtcaggctccccaaaaacgaaatttcctgaaatcaaaaccgtcaaaacggcggtggttaaactgatcagcgacatcgagggcaacctcgatcagcgtctggtatatcgcgaggccgtagagggattgtgccaggaggcggccaaccggataacccagtgcatgcattcacgcagtacagggcagacgctacgtgatctccgcgagctgctgtcggtgacgctggacaccattatcgtggtggagtttgaaggggagcagacccgtctcaactatggcggacgttcagcagaagacgtgatcgccatgctgaaagcgctgcatcttgaaggacgcaaagcctggctggaagtggagtaa

SEQ ID NO: 204898 - DNA, 966 bp, Klebsiella oxytoca
atgacgatgaacctgcacactcagacaaccgcccctaaagcttcacaggcgaccagcgtatccccgctggagcagtcaggctcctcaaaaacgaaattttccaggggcaaaagcaaagcccgtgctggcgcagtcaaaacagacctttaccagacagtaacggacagcatcattgcagccctggaaagcggcgttaagccgtgggtgtgtccgtgggttcgcaacggcgcagcggtgggattaccggccaacttcagcaccggcacgacatacagcggaattaatatcatgctgctgtggtgtagtgcggcaaaacagggttttcaggacgagcgctggctgacctacaaacaggcgcaggagctgggcggccaggttcgtaaaggtgaacacggcacgacggccatcttttacaagacgctggagaaagaggacgaggacggggaaatcgaaaaaatcccgatgctgaaagcctttaccgtgtttaacgtggagcaaatcgacggcctgagcatcgagagcgtgccgcagccggttgccggtttcgatccgctgccgcaggcggaagcactcatgacccggagcggggcaaaaatcaccgagcagggcgtaaaggcgttctatcgtccggccaccgatgaaatcgtcctgccggagcggttccgcttcgcggacgcggcgaacttctacgccaccggcctgcatgagctggttcactggacgggtgcagcgtcccgcctcaatcgtgaaaaaggcaataagtttggctctgaggcgtatgcgtttgaggaactgatcgccgagctgggcagcgcgtttctgttggcggatttggggattacgggagaggtgcagcatgaaagctatatcgcgtcctggctgaaagcgctgaagggagacaagcgctacatctttaaagcggcggcagcggcctcaaaagcgcaccgctggctgatggactgctga

SEQ ID NO: 204899 - DNA, 1074 bp, Klebsiella oxytoca
atgcatacacgaacaaaattacctgcccctctcgcagctgatgtggcggctctcattaagaatggcatggattttctggataaggcacgtgaagagttcgaggccaaacagtacaaacactcggtagttagtttctggatagctgtagaaattttgctcaaggtaccccttgccagcgaacactggacgctggtctgcagcggtaaaaaagtatcgcgtaaaagctaccttgccggtgattttcagtcggtgtcctttgatgatgtctgtacccggttgagggatatccttgaaaagcccctgcctaaagaaaccgaagctgtgtttaataccattcgcaatcaccgaaaccgtgtagttcatttctttcatacagcttttagtgattctgaggtggagaccattctggctgaacaggctcgggcatggtttgcactgaaccgactaatgcgtgaagactggcaacagcattttgcttcaccacacaactgggcactggcattaggtgaaacacaactcctgcgaggcaacgagttttatgccgaagcccgtctgaaacatatccagcccgagctggaacaacttgcgactgagggcgctgaatttcatccctgcaccatttgccacaagccagcagccatcatggaaattcttgccgtcgggaagaacggtcctaccgtttatgagcaaacttgtcgcgtctgttttcactcagagcgccatgtaaagtttacctgtcctgagtgtgatacagaccaggttctgccggtggaagaagaagatgacgataccttcatctgccgcacctgtaacgcagaactctcaaggtataacttgcttgatgaggagaattttcgtcatgtggacgaaatgatgtatcccgatggcctagcaaattgcgctcactgtgagggccatgaaacggtctgtgtgtttggcgagaacttcctgtgcacacgatgtcttgagatccatacaggctatgatacttgtgaaatttgtgggactccctgtgaagcaatgggcgagacaatgaggtatacgggctgcccacattgtgcggatgaagactga

SEQ ID NO: 204900 - DNA, 150 bp, Klebsiella oxytoca
atgcacctgttgtatggccttgttcatccgaagatcctgcaatggctgatggtgcatgagaagtttgagtgcaatgaggtcaacaccaaagtctttgccctcgatgtggtggccagccagcaactaagatttatcctctatacccactaa

SEQ ID NO: 204901 - DNA, 447 bp, Klebsiella oxytoca; identical to SEQ ID NO: 201940

SEQ ID NO: 204902 - DNA, 225 bp, Klebsiella oxytoca
atggcggacgatgtctgggcttatgcaacgggagaacgcggcgctgagcgagcgcgtcacgggcttgagcaggcaggtgcagagtttgagcgatcagctgcgccgattgtcgcaaggctgaatggcatcgaggcgcaccgggagcaggagcgcgcggcgcagcaccagaaagcgctggagctggaacgatcgcagcggcagaaaggttttgagcttggaatgtag

SEQ ID NO: 204903 - DNA, 528 bp, Klebsiella oxytoca; identical to SEQ ID NO: 14800

SEQ ID NO: 204904 - DNA, 345 bp, Klebsiella oxytoca
ttggcagaaaagcgcaacaaaatgctcactatgtgggtgacagaagacgagcaccgccgacttctggagcgctgtgagggtaaacaactcgcggcctggatgcgccagatatgcctggacgaaaagccctcgcgtgctggcaaacttccatccatctcgccggcgctgcttcgtcagcttgccggcatgggtaacaacctcaaccagattgcccggcaggttaacgccggtggcggtactgggcacgatcgcgtgcaggttgtcgccgtgctgatggccattgatgccggactcgagcggctgcggcacgccgtgctggaaaagggggcagacgatgatcgttaa

SEQ ID NO: 204905 - DNA, 486 bp, Klebsiella oxytoca
atgaacagtcttttaacgctggcgaaggacttagagcagaaatcgaaagcgcagcagcagactaccggcgagatgctgaaagccgcattcagcgagcacgagaagtctgtcagagcggaactgagcgaaagcgagaagagaatcagcgccgccatcctcgaccacgaccggaagctgtcctcagccatgagccaacgcacgaaagggatgctgcgtatgatcagccagacgtggctgaccatagtcctggtctccgcgctactgatcgcctcgagcgcgggcattctgtggtggcaggggcaacagatactcgacaactacacgaccatccaggaacagaagagcacgcaggccatgctttcagagaagaacaacggcgtccagctcacgacctgcggggaggagagacgccgctgcgtgagggtgaacccggaagcgggaagattcggagaggattcgagctggatgatactggcggggaaatag

SEQ ID NO: 204906 - DNA, 531 bp, Klebsiella oxytoca
atgcagggaatagttaagacagtgccgctgttatgttttttactgctgggctgtgatccggcagaaaaagaagcaccgcgcggcagcgggaagaccagctacgtagcggctaatctgctgggctataaccatatggcaggcacgaatatcaactggttctccgtcaacggctaccggggacacgccggagggtttacctgctgcatatcgctgccggaaaaatggcgacccaatatgcaggtggtagtggagtgggaggttaaccctaacccttttccgaaggatctcccccacttcgatgatccaaactatgaacattatatggaaaaatataaggctacctttcgtcagtataaagcggtagccactattcccgaatatgaagattcctgcggcctgcaggtgcatttcttgccctgtcagcagattaaagtaacggccacctgccacgggccgacccatcctgaccacccgattaaagaacctttcgatctgccggagcctgcccagtgcccgccagaaacgccatga

SEQ ID NO: 204907 - DNA, 999 bp, Klebsiella oxytoca
atgcgccctgtggtgagctccccgggggcggcgcaaagcgccttgcccgggctacgggttcatcgccgtctgcgagcggtagcccggacagacgcgcagcatcgcctccgggaaatcatatccaatgcgccctgtggcgagctccccgggggcggcgcaagcgccttgcccgggctacgggtccatcgccgtctgcgagcggtagcgtggacagatgcgcagcatcgcctccgggaaaccatatctagtgcggcctgtggcgatctccccgggggcggcgcaaagcgccttgcccgggctacgggttcatcgccgtgtgcgagcggtagcccggacagatgcgcagcatcgcctccgggagccatatccgatgcggcctgttgcgatctccccgggggcggcgcaaagcgccttgcccgggctacgggttcatcgccgtgtgcgagcggtagcccggacagatgcgcagcatcgcctccgggagccatatccgatgcggcctgttgcgatctccccgggggcggcgcaaagcgccttgcccgggctacgggttcatcgccgtgtgcgagcggtagcccggacagatgcgcagcatcgcctccgggagccatatccgatgcggcctgttgcgatctccccgggggcggcgcaaagcgccttgcccgggctacgggttcatcgccgtgtgcgagcggtagcccggacagatgcgcagcatcgcctccgggagccatatccgatgcggcctgttgcgatctccccgggggcggcgcaaagcgccttgcccgggctacgggttcatcgccgtctgcgagcggtagcgcggacagatgcgcagcatcgcctccgggaaaccatatccaatgcgccctgtggcgatctccccgggggcggcgcaaagcgccttgcccgggctacgggccagcagactgctgtatacctgtagcccggctaagcgcagcgcgagccggggggaggccgccatccggggcgagttaa

SEQ ID NO: 204908 - DNA, 618 bp, Klebsiella oxytoca
atgtcccccgctcgcgctgcgcttagcggggctacgggctcactgccgtctgccataccgtcgcccggacagatgcgcagcatcgcctccggggaattatgccgaactgcgctctgctcccgggggcggcgcaagcgcctgcccgggctacaggtccaccgccgtctgccataccgtagcccggacagatgcgcagcatcgctccgggaaattatgccgaactgcgctctgctcccgggggcggcgcaagcgcctgcccgggctacaggtccaccgctgtctgccataccgtcgcccggacagatgcgcagcatcgctccgggaaattatgccgaactgcgctctgctcccgggggcggcgcaagcgcctgcccgggctacaggtccaccgccgtctgccataccgtagcccggacagatgcgcagcatcgctccgggaaattatgccgaactgcgctctgctcccgggggcggcgcaagcgcctgcccgggctacaggtccaccgccgtctgcgaacccgtcgcccggggaagggccgcaatcagatctccggggtatttttaaagcccatcagcatcagcatcggctcctgctgcgcccccgccgggtcgaaatga

SEQ ID NO: 204909 - DNA, 498 bp, Klebsiella oxytoca; identical to SEQ ID NO: 164782

SEQ ID NO: 204910 - DNA, 210 bp, Klebsiella oxytoca
atggcggtacacagcaaggctatcaggttattgcggacagtgtactcagtgccagaacggtacgccctggtggtaaagcaggacaacaaggacaggctactgatgctctacgcagggctcatgagcagcaaccacccactaccggatatgaaggatacgaccagacacatccgtatgacgatgatttttgacatgggtatggatcagtaa

SEQ ID NO: 204911 - DNA, 819 bp, Klebsiella oxytoca
atgcaaaggctgcattctacacacaggaagcatttttcctcacaggaattgaccgctcaatgcataatgaaagtaatttggtcaatggtagtgtctcacctaaatgggaaacgacaatctcaagaaaggcgtgaacccttagagctttaccgaatttatttttacgattgccctcctcttgacatccaaacaagatatcctttacctgaccaaggaaataaaacacctggcagaaaaaattttaaactcgaagactcctaccaattaagaacccaattacatgaagagcttagaaagaccaggaaaacagctctgcgcctggggcatcttgtggacaataagcgctggcaattaaaaaccttctctcttgatgctctcatgaaaggagaaaagctctgggaacaacttactaatgatgatttctactatgatataaaacagaaacaagtagatatcaaacttgggatggatataaccacccttgcttatgaaaaattagtggacgtaattgttttggtcgcgggggattctgactttgttcctgctgcaaaacatgcaaggataaaaggtatagattttatactggatccattgcggcaaaatgtaaccccttcattgtcagagcacattgatggggtgcaatcatatagtttgatttctggtctggctgacgcgctacacgcagagccatacccggtaccagactggtgggaggccagaaaaaaagggaactcaaaaagaggcgctcgcgaagcaaagcgagaatatggaaaaacccaagctgaagccgccaaaaaccataataaacacaggaattaa

SEQ ID NO: 204912 - DNA, 327 bp, Klebsiella oxytoca
atgaaaatgatagctctgggagtactggctgtagtggctctgtccggatgtgcgacaaaacaatacccgcaggtgccggcggttaccggcgaagaatctgcggctttagattgcaaggcaattaaacaagagatcgccaagacccacagtgtccaacaggaaattgagtcaactggcgagtttgatggccgtacagttcttggcgttctcggagattttggcatcggcaacgggatggccaaaggtgaggctcgtaaaaaagcccaggccagactgaatcagctggaagctcttaaatccattaagtgcgagggagacaacagctag

SEQ ID NO: 204913 - DNA, 1140 bp, Klebsiella oxytoca
atgaaaaaggcacttttagcgtgtgttattgccaccagtctcttggctggatgcggcccgaaggagctaactcctgagcaaaaacaggaggttggtaatcttcggagtgaactggctcagacagaaaaagaaatagccgaggcgacagcgttgcgggagcagtattctggtggattaatcaaaaaccttacagttgctagacttgaagtcttgggaacaaacaaggctttgttagagcagcgtattaatgccatagagtcgggggctaaaattgaagtatcaataagcagtgtaaaaccaaaccctgaagcagctacggctttaaaagcagaaattgataatctggacaaccagattgctgatgcaaaaaaagaagcaagccaatatagcggtggtctactgcaggcgctgaaattgtctgctattgcgacgcaggaacaaacgagggcgatgctccagcaacgatatctttctgctacgtatgggttagctgaagtgaaagtacctagtgagcaagcaagcgaagtaacaacagagaaacaaacagataaagtagtacctaatccctccagcacgccgttactcccagcaggtgaggggccatttggtttagaagccggtttatctaagaaaaatattgaagatatgatcggagaagaacttaagctaatggcgaataatgtaaatctttatactgctaattctttaccaaaaaataatgccagttttgaagcatacggattgttaatttcaccaaccgtaggtctatgccagataagagctcttggaaaagatattgatacagatagttatggctttgctattaaatcaagatttaaagagctcagtgaatcactatcttctatctatggtaaagcagcgcaaaatgattttctcctttctggttcaatatggaaagaccctagagactggatgatgggattgtataaacatgagcgatatttgtcagcagaatggaaagggacagcagataccccactaaagaataaactaagttctgtatctatcgaggctagagcaaatagttctgataaagggtacattttccttcagtataattttaataactataatgtctgcgaaacagaaattgaagcgtcgaaaaaaagctctctctaa

SEQ ID NO: 204914 - DNA, 2991 bp, Klebsiella oxytoca
atgagtaataattttggtaattattacattgaaattgacgctgatgtcttaccgttcctcaaggggatggacaaggtacagagcactcttgatgctctttcggctgattcgaaaaatggcagtaaagcctttgataatttgagctcgtccgcatcgagtgccggaacctcatttaatgaacttgctgtctatgcccgctcaatggatggctctctaaaatcgcttaacaccaatgtgaacgcgatcaccagggccatgcaaaatgccgggacgagtaccgcaggcgtaggttcggaattcacaagagcggaagcgatacttgaaagtcttggcaaccagttggccgtcctggatgaggcgcaggaaaatggcgcccgtagtgctgctgtgctagcggcgcagttgcgtgccggctcgaaagccactgaggaagaaaagcagaagattggcgaattgactggtcggctttacgatatgaagactggcgtcgataccggggcgaaaagtcatggcacttggaaaaacagcgtgcagcaggctggttatcaggtgcaggattttatcattcaggtgcaaggtgggcagtcggctttagttgcttttgcccagcagggatcgcaattagctggcgcatttggtgctggtggcgcagtagttggggctgtgattgccctcagttcggttgtcgctggcgcgcttattacgtcgcttaatggcggaaaaaacgccatggattcactgaaagatgctgccgaaacgatggataaggtgatcaccatatccaaccagggggtggcggcgctgtctgataaatatgccgtgctggcgcgcaccaatgctgatgtggcaaccattctccgtaaccaggccctcctggagtacaacaatgcgattgcaaaaattccaaaagcaattagtgatgcatccaactcttttgtcactctcggtgagcgggctgttgccgcgctgggtggcgcttctcccagcattaaaaagttcaatgatgagcttgcggcgcttgaggtaactgctggtaactggggggatgctattcagcaagccaacagtaaaggtcaacatgcctctggtattgttagttcactttctgccactgttggatctctttcctctcggttgagcattagtcgtcaggcggcatttgatttagctaaacaactttcagacctgagcaacaacccaacgccagaagccttacagaaggtcattgtcagccttcaaagcatgaagacctcaaccaaagaggggcaggacgcagtagcagggctggttggcactcttaatgacttgtggattgccgctctgaatgccaaacaaagtatcgatagtgtatctaaggctactgataacctcacggcaggacagaagaatctaatccagcaatctgagagaagcctggctctgtccaagcttcagggggaggctcgtgcacggcttcaggctcagtttgctgcagaagattccgggtttgcgaaagacgacccacacacgaagcaaatggagaatgacgccgcggcgacatatcgtaacacccaggctcagaaggatctcaagtcacagcagacagcgggtgctacagcagcagagtctatcgcccagaagctggctaatttgaagcagcaggcagagttagccgccggctcaacacaggagcttagccgtgaatcagcgatgctgcgggccgaacaatcccttggtaaatcagcatcagccgatcagatacagcaggccagaacctacgctgccgccgtttgggatactacggcagcattgaaggcgcgcaatgccgtaccagagcttaaagagaacgcggactatacagcccagaaatcgcagcttgagatgattaagggcgccaaagacgctcagggaaatttgattatctcgcagaagcaatacaaccaggcttctgagcaattagagcagcagcaccaggttaatctggcgaaaattcgagccgggcaggttgtgacacctcagcagcaggcccagggggaagttgacccggtacagcggcttgccaaccagcacgcccaagagctggcgcttattcaacagtttgaaacccaaaaggggcagctcactgctaacggtcttgcgttgatgaacgcagccaatacgcaatatgagcaggcgaggattgccgctcaatgggagatattccgcaaccaaagcacaacaaatgagttgatggcatcggcggtcgatgggttcgccagtcaggcggccaactcgttagcaggcctgattgatggaacacaaagcgcttcggaagcgttcagaaatctggggagcgctatcgctaatagtgtcgttcaggcgttggtagaggtgggaatccagtacctgaaaaatgccgcgatggcgatgattgccgataagatgacatccagctcatcacagcaggccggtgcgcaaaccgctgccgcgtgggctcctgctgcggcagcagcctccatcgctacattcggtggcgcagctatcgccggtatagccggcatggtagcagcgttcgccatcggtgccgctctggccggcaaacgaaaaaatggcggaacggtaggtgctggtggcgcgtaccaggttggcgaagggaatatgcctgaactcctgcagaccaagaacgggttaattatgattcctggtgaccgaggccgagtgttcagcaataaggatgttaccggtagttctccgacgatccagaaggcgtctacgggtaaagaatacctaccaacttcatcagcatcatccagccaatcgggagagaactctaagcggccgatacaggtaaatatccagctgatagatcagacaaccggcagccagcacaacatcactggcactgacgctttccagcaaggtgacgtggtaactgttactggatttctcaatgacgtggatacaggcggcccaatgtccacagcgatcgcagatgcgcacgggcttagacggcaggcaaggggagccttttaa

SEQ ID NO: 204915 - DNA, 198 bp, Klebsiella oxytoca
atgcctttactatggcgtgagacaacagagctaacaatacaggagatacccaagctgaacggtgaagtgctcgataaccatacccactacaccattcgcaacggtctggcacaggcgctagaggccaaagagcgccaccgccgcaggatgaacgtaccggcctaccggtggaagaatcccgccgcgtcgcgcagataa

SEQ ID NO: 204916 - DNA, 1077 bp, Klebsiella oxytoca
atgtcagtgaaaatctatgcgatgtacaacaacaaaggcggcgttgggaaaacaacgcttggcttcaacatagcgacacaatacgctgatgaaaacccaagtacgcaagtcttagtcatcgatttatgtccgcaggcaaacatctctcagtatttgctgggcggaggtgatcgagggtatgaaaccaaccaagaactacagtcatccagaaccaggaaaaatgttgttggatttttagactggttactggatgggaactccgatttcaccagtattcgtcgccccttcaaggttcctgtgcatagatacaacgaccacatcagtgagaacctttttttgattgctggtgactccttccttgaatcactgactctcgcactgaactatgctgtcataaatcctgcaaacagatacgcttggcgtgagtacatgacggcaattcgtcgcctatgtcacttggagcacgatactgatcagtatgatgatttagtggtcttcattgactgcaatccgagtttctcaatttatacccagatggcgctcctatcagcggataggcttgttgtgccaatgatggctgattacagctcgttggagggtatgaaggggatcatgatgctgctgtacgggcattacccatcctccgcagcccagacgtatgctgagaagtttgtgacgttccatagccaagcggctgacaaccaacttgaattaccaaaaatggatcgattcattttcaataactacacatcgaataatggtgtagccacagcttatgattcaatcaaggaagctctaagtaacttcgcttttgagcagtatgccagcttccctgacctgttcactcctcgtagccgatcaattagaacgcggggaagatgggagcaagaatacctctctgaagtaaaagatttccatacttcaggtaaggtatctgcgagtctaggaatccctctgttcaaactaccagcccaaactcactatgagatgccaaatggtgaaatcattaatgtcgttcgggaaagatatcgtgaagctcgtgaacacattgatgagctcgttgggaagttttgctaa

SEQ ID NO: 204917 - DNA, 957 bp, Klebsiella oxytoca
atgacaaagctttttatagacacgaatatctatcttgatttttatcgagcagcgagtgacaggttatccttattcgaggaactaaaaaaactgagaggtacccttatcatttcagaacaaggatataaagagttccaaagaaatcgaactgtacaattaactaagctgagtgctgaaatagagagaaccacatccacctctatatataccacagcagtggtaaaagatatggctgagcataaggaagcaatccatcttcaatcacagattcgcaagctcggacaagcattgaagatgaagattggggtaatgctagaacctaagccgggggacgaccctgtgcttgatgcatatgaagatctaattaaaactagtccacctatactaacgagagaagatttgattgccaaagcggaagtgcggaaaattttagggaatccgccaacatcacccgataggcattcggtctgcgacgagctattgtgggaagagttgatttatttttgcgatgaggatttaataatcgtatcaaatgatagggcgttcacggaaaataaaaaaattcttagggatgaattctctaaggcacatcctggaaaaaatctggagatcgtcaagtccgtgagcgaagccttgagtattttaggtaaagtttcagagcgcttagaagcgacagaagatgaaatgcttttcaacataaaacaactcacatcgaagacggctgatgttataatggagattgcaattagaaagtcatctccaataattttaaagaaagatcaagaaagattaaccttgaaaattaaaaacgtcagtcttagccgagaaaactctgataaaaatgatcttcttgatgcaatagacgaactcattagaatgaaactaattaaagaggttggcagtgatatttatgaactaaccgagaatggtctcgcctatgaaccgttcgataaataa

SEQ ID NO: 204918 - DNA, 861 bp, Klebsiella oxytoca
atgatcgtatgggccgggcttgtctcgtacatcaacgttctggtaaataagggctactttgggaaacactttccagaagaatgccctgacggacgagggtgtattggtacaaatgaaaatactttcaaagctgcgctacagtcggaaataccaaatttaggatggccattgggtgtcgatcctgaagatgaaggctggcatggctacaggtcaagaacacaaattacgttcattccagactatctggacgttatggatttactccaattttgctataagcatattgctcttcctattgaaggcaatgattaccactcgtactatggtcacactcatattgatgattttgatgtcgatgctggcagaaatgaatttcacgaaagagttaatgtcatttttgcccgaaatggtatggcctacgagcttcagaaatcaggagaaattatccggcttcttagccctgaattagttcaaatgatgtccactgtgagtgttcctgcggaagttgagctaaagaaaatacttgctcgcgcaaatgctaaaatcgttaattttgatgttcagattcgctatgacgctgtgaaagaactctgggacttttgggagcggctgaaaagtgtacataacccatcaaataagaaaagatcagttacgcagttacttgatggcgcaaccgatacacctgaatttcggaatattttggaagatgaagctaaatatttgaccgacattggtaaccaatattttatacgtcatgctgaaatgaatcaggtgaaaattcaagagagtgatcatattgagtacttatatcatcgcatgtttagtttaattcatctgctcatgaaaacttttacccattaa

SEQ ID NO: 204919 - DNA, 486 bp, Klebsiella oxytoca
atgtgcttcgcccaggtcttaacccacttaccctcactagaaatggaattttgcatgtctaaaaacctcgatttatttaaccagcagacggcggaaatctttgcgatgttatgggaaaattttcctgtaccgcaggtgattaaatatgaaaaatttaatgccgcactgcccgatgactactttgaccaacttaactcaccagaaatgaaagcactgaatcacttgcgtagtgtggttgagggcacattcacttttcttagtgaaaacggctacattctctacggcacagaccaccagacctgtttccacgatgttcgcctgactgagaaagctctcactgtgctcaacaaaaaacccgaagcgcttggcggtaatgaaacaatgggagataaaattatcagtgcggtgaaagacggaacgccaggagttattgccggtgcagtgacgaacttgctgactctcggcgtcaacttggtaacaagctga

SEQ ID NO: 204920 - DNA, 1041 bp, Klebsiella oxytoca
atgaagcatacaaaagccgagatagctaaagtaaatggtgaattctctctgagcttacttagctttgacatagttcacattaagaaaacattagagcacaaaagaagcattaactattactggaacactaaaacaaaagaggttatttgtggttcaggctcactgcaaaatcatcataacatcccatctgtagctcatttatttcattacaaaaaaagagcttgtgaccttagccgtgaagaaatccagcttggcgactctgtatgtgtattattcaacacaactgccgcactttttcttttcggaacgattgttggcatcgataaattaaaaaaaggaacttattttcacatattacctcatgacaaaaacttccctttccagcttaatcaagttatcaaagtaaagcatcagaaaaataacatttaccttttaaaagatggcaaaaatgaacgctacgagtacatggcaacaaaaaacatggcttttgcgaaatatcaataccaagttgattttgctgaaatcgtcatatcatatattaatagcacgcagattataataaactatgcatcagataagaataaaacaataaacgaaaaaactattttagagtgccataaagctctttttgcacatatttatgattgggctggtaaatacaggaatcaccctgttgtcgttggcgataaagaacgtccgacaatggagcatgatgaggtaaaaaaatcattgaaagccagcctcagagcatgtacaaaaaaagaacttgaaaaaatacgctcaaaagagcaactggtgaataaattaacaacccttcatgctgaacttgcatggattcatccttttcaagatggtaatggccgctcaatacgactatttcttcaaatagtagcagctactatgggttatgaatttgatatggagaaattagatggaaatattaagaataaacgcgcgtatcattatgcagtcaggcgtgcaatacacaatagcaaggggaatttgattgcccttatttcaagggcaatcaaagaactttaa

SEQ ID NO: 204921 - DNA, 183 bp, Klebsiella oxytoca
atgatgaccgagccccgttgcattgcacaattactccgcagagaaagccctagccaggttaacttcaccatcactcacggtcggggacgtaaaggcatcattatccgcacccgtgagccaaacattttgtccgtctttgttaagcgcattatcaaaatgataaggatatccaaatggctgtga

SEQ ID NO: 204922 - DNA, 708 bp, Klebsiella oxytoca
atggcgagaacgaaaggtgcagtggcaaagggtgtggataacaaatccgtgcgagcattcttgttaatgcatagatcgttagctgagttacctcagattgtggaggattgcatatggggggcgatgggtcaggaaaaggaatcgcgaggttatagtggagaacgaatagtcgcgatcttaaaacagcttgattacattgatacttccacggttcatcaacagatgtgggattacaatatctcgcaaggtgatgagacagccccttccagaagaaacacggagcgtatgacaaaagtgctgaggtgtgcgtcggacgctatttatcatcacgccagattgtcacgacgaagcgagtcaacacatcaagaaattttcaatttgactgacgatgatcgggaacaggtacgttcctgggtcaagtcatgcgaatggtggaaggtcaaaggattactcgattcttgcgggaagagaatggtacgccatcaacttccgatattaggatatacaggggataatctggtgggattaacaaccttaatgcctataacaatgaggccaccgatacgccttccttgccccttcaatatcaatgaacgcatcatcgaccatcagccagcaactatgttcaccgtcaaaggtagcaaaaacttgcagccacttattgaggagattggtttgcactatgctcggttacgaagtgcagcttga

SEQ ID NO: 204923 - DNA, 504 bp, Klebsiella oxytoca
atgacaaagaagaccgctcagagagccgcagacagcgatttacaggcgtttctgagagaagccgccgacaggttcaaaccggatgccgccgtgctggcagcgcgtatcgataccgccgtccataggcacacagccaccagcaccacgcagaaatttagcgccccggcaccactagcattacagcagctacaggaatggatattggaaggatggcggtacgatatcggcatccctcagtcggtctacgttgctggtacaggaaacatgagtatcacactacgcaaaccgatggagctggtggagaaggagattgccgacctgaaacgacaagtcgaggacgcttaccacaacgaactcgccgcagcgctggaacgcgaggttgataaactgattcaggacgccgccaacgaggcacagcgccgtgcagaggaagccgcagcagcagagcgtgatgctatgcgccaacgcatgagagatatgctattaaccagggcggctgtatga

SEQ ID NO: 204924 - DNA, 210 bp, Klebsiella oxytoca
atgtacagtttgtcaactcccggccagcgaccttcgctgaacaccgaccagaggctgaccaacaagtggacgatgctcataacggtctccatgatactgattacattatacagtgtttcaaacatttgcggtgaaatgcgcaattggattctgttgagttctttgtgtatgagaaggttggagaaagaccactttgttaagccggggtga

SEQ ID NO: 204925 - DNA, 1287 bp, Klebsiella oxytoca
atggtatatcgtgaacattcttggtttaggaaacgtggttatcttcattttgacaaacccatttccgaggaacatgctttaaatatagtcactgatccttatgcagttgcgactcattcttttttgcctttcattacttttacaagcactacttttaaagtacaaaaagacaaaggcaccaacgctataaataaaacaattaaagaaaggccaatagcttattcctctcacgttgatagccacatatattcttattatgcatcaatcctcaatgaactctatgaagaagaattaaagaaaaataacattacagataatgtgctggcttttagagcattaaataaaagcaatattgaatttgcatatgatgcttttcaggaaataaaaaaaagaggaaattgtagtgctgtcgccttggatttatcaaaattttttgacactcttgatcattcgtttttgaaaaaatcttggtgccaactacttactgctgagaagttgccagaagatcattatgccgtttttaaagccatcacaaaattttcaaaagtagataaaaatgaagtttatgaattgatgggtcttccaaaaaacaatgctaaacatacaaaaaaaaccagaaagcaaatttgttctttcgaagattttagaaataaagttaggcagagcaatttaataatacctaacaaggctaatttcggcataccgcaaggttcgccaattagtgctcttctatcaaatatttacatgcttaatttcgacactgaaatgaaacaatatgtctcgtcattaggtggcgcttattttagatattgtgatgatatgctttttattgtccccacccatgaaaaaaataatgtcgctggtgaagcagagaaaagattattcaaactaaaagtgagtcttaatatcaaaaaaacagaaatcagagatttttttgtaacgccaaacaaaataaaatgcgataaacctcttcaatatttaggatttatatttgatggtcacaatatattcttaagatcatcatctctctctcgctactcggataggatgaaacgaggtgtacgacttgcgaaagcaaccatgaagagcaagaataaacttcgcaactctaaaggattaccaaataaagaattatttaaagaaaaagtttatgctcgttatgctcacgtaggtaaaaggaattttctaacatatgggtatcgagcatctcggataatgcattcgaactcaattaggaaacaattaaagcccctttgggaaagattacaaaaagaaatccatagatag

SEQ ID NO: 204926 - DNA, 579 bp, Klebsiella oxytoca
atgagccgcacctttgcatactgccgtgtttcgaccagtgaacagacgaccgaaaaccaaattgtagccatccgtcaggccggttatgacgttccagacaatcgtgtcgtatccgaaaccgtatccggtggtgtgcaggcgatgcaacgcaaagcctttacagatatggtgacccacaaactggaagacggcgatcggctggtagtgctcaagctggacaggctggggcgtgacaacatcgatgtgcagcaaactatagcgatgctggtggataagggggttgacgttgtctcgcttgatctgcccgtgcgtaatcttgccagttcggaaggaaagctgatgctgcaaatgttttcggcttttgcggagttcgaaaagtcccgcatcattgagcgcaccaaagaaggtctggcaagggcaaaggctgagggtaaaaagttaggccgtccggcggctaaggatactattaagcgagtgcagtatgccaaagcaaagggcatgagccagtccaaagcggcgcttgaactgggtttaagtttgccgacaatcaagcgtagctggaacattaaagaagtgtga

SEQ ID NO: 204927 - DNA, 603 bp, Klebsiella oxytoca
atggcaatgaaaaagtgtcgtgaatgtgggcatagtgtttcaagcagcgcgaaggtgtgcccatcctgtggagtaaaaaagccctatatttcacccctcaaaggcgtctttttgctggcagtaattggatggactgggtggatggcgtttactgatgacaaatcgtcaggcagcaatcagctatccacggaaagcggttcggcctcaataggagaaattcgtcttaaaactgctgctcccgtaaatcaggctccggcttcaacggcaccatttactacttctcaggtttgcaaggctgcaatcagcggaatgttcgggtatgaagtgaatacaatcaaagctgcaaaagcgaatcaggcgggcgtgtttaaaatctcttatcgtcgtccgtctgatggtagtcagtactcgttcgactgcaaactatccggcaacaatgtgatatggactgagtcggggcagacttccaaccgttggaacggatcggggagtgttgcattcaatgtcgagttcaccatcaaggataacgtgttagtgataactgaggcatacggtaattctgatgacattccgtatagattcacgatgaatcaattccgctaa

SEQ ID NO: 204928 - DNA, 288 bp, Klebsiella oxytoca
atgaatcttggttttcattgtgtaaatttgttcaaggagctgattttgagaaaaatacttctggttgtactgggattgctggtgagtaatgcttatgcagatgacggttcgtctgagatgaaggcagaagcgaaggcgttgattcagggggcagggtatcagtgcaataaggtcaacggcgtatatcccgctcaattcagccgttcatttaacgtcttctgcgatgatgtatatgagtacacaatcaaggatcgcggcggtcgctggactgttgaagtcaacgattga

SEQ ID NO: 204929 - DNA, 210 bp, Klebsiella oxytoca
atgaaggcgctttgtttgattttttgcggtttgttggtgtcattcagcgccgtcgcaggacggatcaccatgaatgcaccagagcagtcaacgacggagagcggacaaacattgtgtatctacagcagctcgagctacacgtttacatacgtcaccaagtcaaaacattgtccctacagcaagacgttcgatactgaggatgccgagtaa

SEQ ID NO: 204930 - DNA, 954 bp, Klebsiella oxytoca
atggcaattcgaagaatcgcttatgcatattatgatcctgactggataaaaggcgagcatacgcttcttgctctcaaaagaaatactgtggaacccttggattactcattgcacatgaaaggaaatattttctgtccttcttgctatgaacatataacccgagtacctgctgatcccgataagggaatgactacgaacgaggttcctgcctattacaaacatcttaaagatgacaatgcacctttctgtagcctgagatgtggccccattcagtacaaaaaatactcctctcaggaagatgcaaaaaaagcagttgaagatgaggagctcattgtcataagcggttttcttgagtctcgtccaaacaataatcccaggataggctctgagggtgatgaagcacctgtggattcgcacttcgagaggaaaaatggcaaagaggtttcattacccatttcccgccatcatggcgaatctttcaaggttcccagtcaagtaacaagtgttcaatctctatgcgttaatttcgatcacaattattaccgtgagatttatcttgttggtgaagatggtagagctaagcgttataggttgtgtgactctcttaaagaaataaacgatataacaggtgatctccctgagccagcattctactttggtaagttttggaagattgaaaggttttcaggtcatagcaatgtctggttaaagatcagcccaggaacatcatttaaagatttcaggatacgaattactaacgatactgctgatgggagaggatttttcaatgaaaataacctcggtcggatagtcgttttttatagccaagtcgatgaggttgggatgggatatatgacacctcagcttggatggggggaagtggctttattacctgctaaatatgatgaatttctaatcaaagattacatgttattgcatcacggtgagcaatag

SEQ ID NO: 204931 - DNA, 162 bp, Klebsiella oxytoca
gtgtcatggctaattgtaaagatgaacatcgttactggggtttttttgaacaacttcctgatgatcaagggggaattggaagacacaagtgttgtggttgtgcttatgaaagaggatatcaggcgggaacaagaagagatgaaacccttcatattaacttag

SEQ ID NO: 204932 - DNA, 1254 bp, Klebsiella oxytoca
atgctggaacaaatgggcattgctgccaaagcggcctcgtacaaactcgcgcagctttccagccgcgaaaagaaccgggtgctggaaaagattgccgactatcttgaagcgcagaccgacgcgatcctgcgggctaacgctgaggatctggcggaagcgcgcgccaacggtttgagcgaggcgctgcttgaccgcctggagctcaacccggcgcgcctgagcggaattgctaacgatgttcgtcaggtctgcagcctggcggacccggtcggtcaggtaatcgacggcggtctgctggacagcggcctgcgcattgagcgtcgccgcgtgccgctgggcgtggtgggcgtaatttatgaagcccgtccgaacgtgaccgtcgacgtcgcctctttgtgcctgaaaaccggcaacgcggcgattctgcgcggcggtaaagagacctggcgcaccaacgccgccacggtgaaagtgattcagcaggcgctgcaggagtgcggcttaccggcagccaccgtgcaggcgattgagagcccggatcgcgcgctggtcggcgagatgctgaagatggataagtatatcgatatgctgatcccgcgcggcggcgcaggtttgcataagctgtgccgcgagcagtcgacgatcccggtgatcaccggcggtatcggcgtctgccatatttatatcgaccactccgccgacgttgccgaagcgctgaaggttatcgttaacgccaaagtgcagcgcccgagtgcctgtaactcggtcgaaacgctgctggtgcatcaggatatcgccgaacgcttcctgcccgcgctgagcaagcagatggcggaaagcggcgttagcctgcacgccgatgcggcctccctgcccgcgctgcaaaacggcccggccagcgtagagccggtgaaagcggagcagtatgacaatgagtatctgtcgctggatctgaacgtgaaggtggtggccgatcaggatgaagcggtagcgcatattcgcgagcacggcacccagcattctgacgccatcctgacgcgcaccctgggcaacgccaaccgctttatcaacgaggtggattcctcggcggtgtacgtcaacgcctctacccgctttaccgacggcggccagtttggcctcggcgcggaagtggcggtcagcacccagaagctgcacgcgcgcggcccgatgggcctggaagccctgacgacctataagtggattggtttcggcgacgataccattcgtgcttaa

SEQ ID NO: 204933 - DNA, 1500 bp, Klebsiella oxytoca
atgcaaacttccaaagccattaataaaaacatcggaggaaatgactctgaaaaatacctttccaagctgtgtgagaaaacttttctaagtttatggagttatccaaatgtttatactgatgaaggaaagaaaacagcatcgggagatgggaaggagctttgtgatcttctggttgtatttgaaaaccatgtcataatattctctgataaagatatttcgtttaaggactcaggggatttaaaagttgattgggggcgttgggttaaaagggctgttattaaatccgctgctcaactttatggtgccgagtcatcattaaaagaaagacctggtaggttatttcttgatgctaagtgtaatatcccttttccaattaaagtgccaaagtgtgatgaaatcatcgttcaccgaattgctgttgcaaaaaatgcatcaaaaaaatttcaagagcattctggcggttctgggagtttgattatatgtccgcgcatagtgggaaaccaacattttgatactccgtttatgatcggtcaacccattcctgacaagccttatgtacatgtttttgatgatgttgctttagatattatactttctgaactcgatacaattgctgattttgtagattatcttagtaagaaggaaaaattcattgattcaggaggactaaactcagcagcgggggaggaagaacttttagcatggtactatataaatgctaaagatggacgtgagccggggttttatatagaaaaaggtgtttcagctttgattcttgaaggggcctatgaatcgcttaaaagtcttcctcaatttattagaggtaaacaactaaattctagatcttatttttgggatgcttgcatagaaaattttgcaaaacatatgcttggtggcacaatattgtctgaaggggatttttcttttgatgacatgacccgtggtctaagaattatggcatccgagaggagattttcaagacgtatactatcaagtgcgataattgaaaaagtcacctccatccctcatgggcaaagaggtgttagagttttggtctctcccagtaacagtgataacgggtatgtttggctagtagttccggtgccagaactttgcacatcatatgatgattatagaatatatcgaaaagaaatcctctatgtttactgtgcttcagcaaagctacttttcccggatatgaaatatatagttggagttgccacggaaccaatgggggggaatggaggggaagatatggtttttattgattcaactcagtggtcagaggatgattacgaaagagctagaaaagacagagatgaatttaaagctttagtccctgataatattaaaagaactgatggtcacgattatcaatttcccattcttccaggagactatcctgaaaaagaaattttaagagataaaaaaaacagtaaagccaaaataaaacgaattaaaaaggcgcaaaaaaaatcccgtagaaataacagaaaatga

SEQ ID NO: 204934 - DNA, 780 bp, Klebsiella oxytoca
gtgcaagataatacttcaatttctttatacatttccataggtggttttatcatatcctgtctagggtttttgaataccattcgccagtcaaaatacaatagaaaaatagaacgattaagaacttatgataaaatttatttcgatgtttgcgacttgctattatttgactacaaaataaaatcacagaaagcatacgtatcagaagataaagatttagaacaagcagtcaatcaatttggtcagttgcactggatggagcaaatatatggtccggatagttatggttatataaaattcaagaacaaatcagatcaagttagctttagcaaaaaagtatcagcggagtattataaatttcaaagagaaaagagctcaacattattagggaatcaatcaccagtcatgcacactgataatgaagaatttaataatcgttttaaacgtgttatggcacatatcaaagagaatatatctctgtttagcaagccaattagattggaatgggaaaaaacaaacttgagggaacccgatgaaataaggaaggaatatatttcacttgaacgagttaacagctacgcttgtgaagaattggaagaaaaaattgacgacccataccttaaaatattccttttaataagacaagaacataggattctaaataagcagagcacagaaaagctattggatactttgttcaatttaaaatggcgcatttcaaaatcattaataaaaatcaatgaaaaaatgtcatgtaaatttaaatcacactccgaagattga

SEQ ID NO: 204935 - DNA, 708 bp, Klebsiella oxytoca; identical to SEQ ID NO: 10371

SEQ ID NO: 204936 - DNA, 852 bp, Klebsiella oxytoca; identical to SEQ ID NO: 10372

SEQ ID NO: 204937 - DNA, 180 bp, Klebsiella oxytoca; identical to SEQ ID NO: 104100

SEQ ID NO: 204938 - DNA, 534 bp, Klebsiella oxytoca
atggtaaaaaattcgcgtgttctggcattaagtttgttattagggatatctccactgtcggtggcatccgatcatggaatgggtcttgtcacgatgaatggtcaaattcaggaatcggcctgttcgattcatactgacgacgtctggcaggaaattccgttcggggttatctcatataacgatctggaccaggaaggaaaagcaatgatcaagccctttgctgtacgtctggtgaactgttcactggagcgcagtacaggcggtttgtggcaaagcgtaagtattacatttggtggggaaacagagatgtttcgccctgatatttttaaagtgcacggtgcggctcaggggcttggattacgtattcatagccaggtcggcgatctggcccgagctgacgaagcgatgccggcagtcatgctacaaaacgataataatgagctgcgttatttattatcgctggtgcgcagcggaaaaccattatcggaaggtgactggtacggaattattcgctatatggtgacctatcagtaa

SEQ ID NO: 204939 - DNA, 594 bp, Klebsiella oxytoca
atgaaaaaaggatttggtcgaaccaccctgatgctgtggctattgaccgctggaatcgtttctgtggcagatgccgcaaactgggatgtcgacggacttaacggcgggctccgtgctaccggcacgctagttgcctcgccgtgcgtgttgttacctgagtcagcagaacaacatctcgatttaggcaggaccgtcgcatgggggctggagcaaccggggagcaccacgtcgccggtgttggtttacatcaagttagatcgttgtcctggagagtttcagtacatgcgcgaccatcagttaatgcggggctcaacgatgctgaacggacagtctgccgtgaaaatgacgatctatggcgaagttgagcctacagacgggcgctttttccgggtgcatggcggagtggagggcgtagcacttcgccttagcgaccgccagggtgagctattgcggcccggcatgcagagccgaccgcagattcttaatccagggcgtaacgatctggtgtttcaggcccagctatggcgtcttccagcaccgctgatggccaacgaatggcgcagcgtgatgaatatcggcctggagtacgaataa

SEQ ID NO: 204940 - DNA, 525 bp, Klebsiella oxytoca
atgaaaaaacacatagcgcgtgcgctaagcctggtgggcttccccttaatgctgctggtgacggtccctaccgtttacgctgatacggatgttcatttcaccggcaatctggttgccgatccttgtgaactgcacgtggactcagaagatcagattgttgattttcgcaacgtgccatcgaggacgtttatcaaatatcaccgtagcgagcgtgaacgtttttcaatttggctgacggagtgcgatctgtcgctaggcaccacggtaaaggtcacctttatgggggtagaggatgcccagcagccagggctctttgcggtcaccggcacgacggcagggatcgccattgcccttgaggatgctgatggtaccccggtactccctaatgtccctatgcgtccgtcagcattgacagcgggtgacacttatttaaatttccaggcctttatttcggccccggtacatagccgggtaagagaaggggattttgagtgcgtgaccacttttttgctcgagtatgactag

SEQ ID NO: 204941 - DNA, 747 bp, Klebsiella oxytoca
atgaagaaaacactggtttttgccatggttgtcgtgttatcggcaagcagcctgcagctcgctgaagcggcattaacggttaaccgctcacgcgtgatcgttaatgaagaaagcaaaagcgtcagtatgagcgtcacgaatcgcaacaaccaggagccttacctggcccagatctggatagaagatgaaacggaaacaaagctgaccagtccattgatggcactccccccggtacagcgtattgaggcaggagggaaaagttcggtacgcattcgggttctgccggatataaacacattaccgaaggatcgagagagcgtgttctggttcaatatgcgtgaaattccgccgcgtagcgacaagccaaatgtgttgaccctcgcactccagacccggctgaaaattttctggcgtccggctgcaatcaagatcgatagcaaagtcgataccgtgccgggaatgttaaacgtcacgctggctaaaaacggcaaccgttacatcttgaataacccgacgccttaccatttgacatttgtcgagggccgtcgtgcggcgatggaaaatgccagcgaaggatttgaaccgctgatggttgcgccgaagagccagtccacgctgagcgtgggtgtcaatgaactcggtaactcgccgattttggtttttgttaacgactacggtagcttgcgtttgctggcgtttcagtgcaccgcttcagcctgtaaggcggaagcggttattgcaccgtaa

SEQ ID NO: 204942 - DNA, 507 bp, Klebsiella oxytoca
gtgaaaatagggaaatgggcgcctcttgtcggcatgtgttgcctgatggcgacctcgacaaatggctttgcctcagatggcgggacaaccacgctcaatattagcggcaatatcaccgagcctgattgcgtgattaataacaatcaacagattgtggtggatttcggtgaagtgctgacgacgcgcattgatggtgttaactatgaaacaccagttagctatacgttgagctgctcaaatctgattcgcaacacgctaaaaattaatctcaaagggaccggtgcgtcatttaacagccagctgtttacgaccaatgtgaccggactcggcattcgggtgtatgacgccggtaaagttgacatcacccctaatacggggacgctaaattttacctatgccgccaacagcccgccatcgctgcatgcggtaccggtgatgcagaccaatgcaacgctgccaaacggggcgtttaacggttcggcaactatggtgtttagctatcaatga

SEQ ID NO: 204943 - DNA, 516 bp, Klebsiella oxytoca
atgtgtcagcgaataaccgccgcacttttactgaacatcctgttggttagcatctgcccggcaatggcggctaacgaggcagatatcgtgtttaaagggacgctagttaatccacccccttgcgcgatcgataacgatcagaccattcatgtggcgttcggcgatcgtctggcaatcaagaaggtcagtgacgggatctaccgggaagaggtgggttataacctggtctgtgacagtgcggccaataagaactggaaactcatgctcagcgtacggggtaatctggcgaccttcgatactgccgaccaggcaacggtcgccacctcggtgggcaatattggcaacctcggggtgaagatcctgcgtgacggtcagccattcaagtttgattcgccggcagagattagcctttcggcgctaccgaaaatcgaagcgctgttggtgcaacgaccgggtgtcgaactggttgaggggccgtttgaagcgacggtcaccctcaaggctgaatacctttaa

SEQ ID NO: 204944 - DNA, 963 bp, Klebsiella oxytoca
atgaagaaaagaacatggcaaagattaatactggctgcgggagttatgctgggaaacgcgctgctttactccacaccggcatcggcggcgttttgtaatgctttcggtacttccgggggagcatgcccaacggtggactctgtagaagcacgtggcggtactgcaacaatcagatggtctgaaaatctggctgctgagagctttgtttcgataaccggtagcaacgtcacaacctggggtttatatatgatttataactggacgtcggccgatactgcaggacacttctttagcggtggtgtcaggacgccaattctgaccgttactaatagcgaccctgctcttaaacctgacggtacctctggtacagataactgtacttcagcaacgctaaattgttcgcatgaccgaatggccgcacgtttcttcaataaatatggtatggcgggaaccgctaccgtaccgttgccctcttcatggaatgaccttaaaccgccatgcatgctttttggtgggattcgcccagcgtatggtgatatcgttaccgtattcgtcttcaggggtatccccccttgccagcctggttttcccgggaccgttgaacctgaacccgacccggactggtgcgggatgagcaccagcgcactggcctttgattttggcgatatgtcgccagcaaccgtatcagggcagacgatgtctaaaaccgcagtgatggcatgtagcaatgcgggtattagctacaatttttatctaagcaacgtttccaccgcaggaagagatacgattgatctggggcgtgggatcaccgcgaaggtaaccgctaatagacaagcgttagagacaaaaagaacttcaaccggtgcgaccaatacactggatattacggttactctgaatggaacgccaaccagcaccggggaaattagcggtacgggaattctggccgtcaattatttataa

SEQ ID NO: 204945 - DNA, 261 bp, Klebsiella oxytoca
atggtgcagtgtgagaaagagcttagcgcactggcttcggtgaaccagtcacagtacatcgatctcaaagcgcgttttgagcaagttatgaacggcgcatcgggatatactaacgttcgtagttcaataaaccctgaaacacgtaacgccattgatgctttgtataagttccaggcggtaaagttatgttcagagatccgtggcgaaatgcttaatagtctggcgataaaaccaacgggtgcgcgtgctgatgagtcgtag

SEQ ID NO: 204946 - DNA, 1278 bp, Klebsiella oxytoca
atgagtcgtagagcagggagcgctgtagttttcattctcggcatcgttttgaatccctgctctcgggcagatgttttaaactttgcccgagaatggactgctcgtgatagcgaagataaaattgtctcgcagccgccagcccagaaaagtaaaccatccgcaccacgacaaaaatcgaacgtgcagaaaacgactcccgtcaaggagaaacctaatccaaaaaaaacggcggccataaaagaaaaaacagcaccactggtagtcagggataatcacgccgtcaaaaaaaacggaagtcaggactccggtacaaaaaaaaagcagtctgtagtcagtggagatgttagtagcaaaaaggagataacgttacctgatgcccgtattctgggcggatggatcaagtccctgatacagcatatatcgcttagcccttcggatgttgaaatacgtcatcgctaccaggaacagcgtgatgagttacaaagagctaaggctcaattgtcagttagtgaaagtgaaattcaacatctcaacattaaagaacaagaatttcagtctgtttttgttcacgccaggcaactggaagagaaaaatgcgcagtggcagattttaacgcagaaactgcaacaaagtctaaaggaagcgcaatatccttctttaccgtccacggatgatgggttagtggactttgctgccggtatggcgatggggtttgacgttctggaagtccttaagcaacgtgatgaacagggtattcatgttgataagacattatttctggcgggcgttgctgaaacggtacgtggagaaagacgcttgtcccaggaacaatttgagcatcatcttacgcgggcgaatcagcgagtagaggatgcgatgcagaaaacactaaaagaaaaggaagcgcgggacagcgagtggctggcgagatttgttaatgatgagggtaccctggcagccggaaacgcggcctggtataaaatagttcataccggcgagcaattatatcaaggcgaacggtctgcgggcgaattaacgatttctgtaaatcgtcgtctttcagatggaactttaattgccgattccgatctttcaggtctggtattgcgggaaaaacttattgacctgcctgattggctacagatagttgtcaattcagttcgtctgtatggtgaagcggaattagctgtaaaagtgaatgagtatggcgacccctgggagaatggaactcatgtggaacattggagaattcgcatcgttgaacaacagattatgtaa

SEQ ID NO: 204947 - DNA, 975 bp, Klebsiella oxytoca
atggtgcatagtgtaaaaaaaacatatttcccagtccatgtcgcaactgagaataattacttttctcaaggtgtcgtctctttactaacggaattgtttgaggacgagtatagcgagaaaatttcgatatctctggttgaggagccaggcgaagcggatttgatcgttaaaatacaatcccccggagagaaggtctttgattgggtggattgcgatcaattccgcacgcagagtgactataaacatgcgttactaagcaaaaagtgggtcagcgtttatccgcgtaatgaacactacgatcggaattttcactgcccagtggtgagttcagtcatcacaatgagaaattcggttgccaccatccggcgaaaattattcattttgttttttagcgatttgatgtgtggccctccggatttgcgtaaaccaaactgtaataaatgcccaggtgcatatcaattaggatggcgagaacaacttatgctagggtatttgattcaggggttaggccacaatgaaatttcgcagagaatgaattgcagtattaaagcactgagcagctaccgacgcgctatcatgcgtaaagttaatattaaaaattacagtgattttgtattgtggttaggtacgaaatcagtctcggataaattttccgaggctgttaattgtcacgctcatgaagtcagtgacgatcaacttatatggaaaacgaagctatctgatgagaccagtgaactctctgatgataaggaacgtgtattgcaaagcataaaactcctgacccgtaaacggcttagagtaaacaagcttgataatgaagtctggttaacgacgcgtgagattgcaaatgaaatggatacgagtatttacagcatgcgctacttgctatgccaaatggaaatgacgggagtcgtgataagtattaaaacaggcaaaggccggagtcatacactgcgttggaaattagctagctag

SEQ ID NO: 204948 - DNA, 396 bp, Klebsiella oxytoca
atgaatactgccgcctccattgcccttttgagcgcttgcccatttgtgagtctggcggcagtgccggtgaccttttccgaaactgtcctggaggccgctgggccgaaaggtcctttgaagggtacgttactcaccccaaattctaaaccaaccgcggttgttcttatcattcctggctccgggccgaccgatcgggatggaaacaacccgcttggtgtgaatgcatcgccttaccgacttcttgctgaaggtctggcggcaaaaggctttgcaacgcttcgtatcgacaaacgtggaatgttcgctagcgcaatggccgtagaggatggcaatgcggtgacgatggctgactatgttgacgacgttcgatcctgggtagaagtgcttagacgttag

SEQ ID NO: 204949 - DNA, 549 bp, Klebsiella oxytoca
atgtgggattggaacaataatggcccaaaaaaatggcaccccggtttgaatgggaataaatggagtgattgcgaaatagcctatctcatcaaatgtggtaacaatctgtctttaaatgaattatcagtagccttgaagcgtagtcgctactcagttgcaaaaaaacgtcatagcctggggttagaaaaactgaaagcttataaagcctgggaggaagacgaaataaactttctcaaaagtaatgctgggtcaatggcacttacagatattgcaaaaacgttagggcgtagcctgaaatctgtacaaggtaaggccacatacatgaagttatcccttttacgtatcggagaaaaacactctgctgccatatacagcgatgaggatgtattgctttgtcgtgagctccattctgctgggatgggtttaaaacttattgctgaaaaaatggaaatgtcaccaggtgctgttaagtgggttatccatggccaccgcatgacacagcaagaccggatcatgttcgagttggacagaatggacgccagaagatga

SEQ ID NO: 204950 - DNA, 420 bp, Klebsiella oxytoca
atgcctgaaattacgattacagcaaagcgcgacggtttccgtcgctgtggggtggcacaccgtgacgtgccagtgacctggccggatggccattttacggacgagcagatcgccatcctgcgtgccgagccgtcgctggttgttcatatcggcgcactcagcggcgatgacgacaagctgaaaacggcgctgggtcggctcaaggagcaggaaactatctccctgcagctttccttcgaggcatcagatatgaaaaacaagctggaatcaaccgaagcggccctggctgaaatgaccgctgaccgcgatcgtttgcaggaagcgctgacggccgcaggcagtgcgtcagtctcagagacgaaggaaaacgccactgacgttactgcagcggctgagtcttcggctaaatcgaaaaagtaa
